United States Patent Application Publication US 2011/0296543 A1 - sequence listing, part 9

SEQ ID NO: 38623 - DNA, 816 bp, Unknown
  Obtained from environmental sample
  misc_feature (1)..(816): n is a, c, g, or t
atgaaaaacttgctgtcggcgaataaccctagtccccattccccattccctgctatactgtcgcgggtgaacctgatcctgttcgaggcgcatgaactcggcaaagcccttcccagacgcgatgagcgaagcatccaccttctcaaagtgctgcataaaaaagccggtgatacttttgatgccggccttcttgacggcggcagtggtataggtagaatcgaaaaagtcggcatagacggttccatcagtttttcttttgagattgaatctccccctgtcccgcgcctgccggttcgcgtcggggtcggtttcccgcggcctattcagatacgccgcctcttgcgcgatctttccagccttggcgtagaggccatagaccttttcggtacggaacttggcgaaaaaagctaccgtgacaccaaactcctggacgatggcggggcgcgcgccgcccttatcgaaggcgcagcacaatcgcgtgacactaccattccggcgttaggtgtttttcccggcctggcggactggctgaaggaacgcccctgggaaaaatccgctacactcagccgcgccgtacccctgcttgtcgccgcggacaatgtgcgccccgagggggccatgtcgcgcataactcccactatgcgccctgtagtactggcgattggttctgagcgcggctggactgaccacgagcgcgatcttctggaagaggcgggctttcttcgtctgtctttgggaagccgcgccctgcggacggaaactgcctgcattgccgcggcggtattggcaatagagaaaataggtgagttaaggtaa

SEQ ID NO: 38624 - protein, 271 aa, Unknown
  Obtained from environmental sample
  DOMAIN (37)...(265): Protein of unknown function (DUF558)
  misc_feature (1)..(271): Xaa is any amino acid
MKNLLSANNPSPHSPFPAILSRVNLILFEAHELGKALPRRDERSIHLLKVLHKKAGDTFDAGLLDGGSGIGRIEKVGIDGSISFSFEIESPPVPRLPVRVGVGFPRPIQIRRLLRDLSSLGVEAIDLFGTELGEKSYRDTKLLDDGGARAALIEGAAQSRDTTIPALGVFPGLADWLKERPWEKSATLSRAVPLLVAADNVRPEGAMSRITPTMRPVVLAIGSERGWTDHERDLLEEAGFLRLSLGSRALRTETACIAAAVLAIEKIGELR

SEQ ID NO: 38625 - DNA, 699 bp, Unknown
  Obtained from environmental sample
  misc_feature (1)..(699): n is a, c, g, or t
gtggtggggatagaccccgtctccaaagagctctgcgggggcacccatgtctcagcgaccggtcagataggcctctcccacatcgtaggcgaggagagcgtctccgccggcgtccgccgtataaacgccgtcacgggaacggccgccgtgcaatacgtgataaacatggagaagacgtcgtccgccatagcccgtatgctgaaagtcagtcaagataagcttctggaacgcgcgtcggaattgatcgataccgccaaagagttagataacaaagtaaagaccttgtcgtcggccaaggcggccgatactgtcggggcggtttttgacgaggcggccaaatgcgcctcggcgctgaaattcgccgtcaaggacatgggggagttagacaaagactccttcacccgcatagccgacgcgatctccgacagaatccgcgaacaggcgttgtctaccacggttatagcgataggcgcgatagtcgacggcaaagcgatgttcgccgccggagccggtcccgaagccgtctccaagcacggtatccattgcggcgatctggtgaaagcggcggccaagtgcgccggcggcggcggaggaggttcgccgacacgggcgcaagccggtggcaaggagatcggcaagttaggcgaggcgctctccgaacttaacaagctcgccacggccaaggccggcgggaaataa

SEQ ID NO: 38626 - protein, 232 aa, Unknown
  Obtained from environmental sample
  DOMAIN (150)...(223): DHHA1 domain
  misc_feature (1)..(232): Xaa is any amino acid
MVGIDPVSKELCGGTHVSATGQIGLSHIVGEESVSAGVRRINAVTGTAAVQYVINMEKTSSAIARMLKVSQDKLLERASELIDTAKELDNKVKTLSSAKAADTVGAVFDEAAKCASALKFAVKDMGELDKDSFTRIADAISDRIREQALSTTVIAIGAIVDGKAMFAAGAGPEAVSKHGIHCGDLVKAAAKCAGGGGGGSPTRAQAGGKEIGKLGEALSELNKLATAKAGGK

SEQ ID NO: 38627 - DNA, 885 bp, Unknown
  Obtained from environmental sample
  misc_feature (1)..(885): n is a, c, g, or t
ttgctctttaccaacgcggggatgaatcagttcaagtcgatatttctcggcgataacccaaaaggtctgcgccgcgccgccaactcgcagaagtgtatgcgcgtctccggcaagcacaacgatctcgaagaggtcgggcgcgaccactatcaccatactttcttcgagatgctcggcaactggtcgttcggcgattactacaagaaagaggctatccggtgggcttgggaactgctgaccgaagtctgggggctcgaaaagtcgcgcctcttcgccaccatccacgacagcgacgacgaggcggctgagatttggaagagcgagaccgacatcccgcacgagcggataatgcgcttcggcgacaagagcaacttttgggagatgggcgagaccgggccgtgcgggccttgcacggagatacactacgacatcggcgacgaggctacgcgggcggccacatacggcgacccggttcagggcgtaaacggcgagaacgcgcgctaccgcgagctgtggaaccttgtcttcatccaatacaaccgcgagaaggacaggtcgctcaatccgctaaaagcgcagcacgtcgataccggcatgggcttcgagcgcatcgtttcggtgatccaaggggttgattcaaattatgataccgatatatttcagcctataatcaaggcgctttcagataaggcggggatcgcttacgaccgcggcgtcgccggtacgccctttcgcgtgatcgccgaacacatccgttcgctcgtcttcgcggtgacggacggcgcgttcccggcaaaacgaggggcgcggctacgtgctgcggcggctttttgcggggggctaactgcttcggcgccaaatcgggttctaggaagccttttttga

SEQ ID NO: 38628 - protein, 294 aa, Unknown
  Obtained from environmental sample
  DOMAIN (2)...(293): tRNA synthetases class II (A)
  misc_feature (1)..(294): Xaa is any amino acid
MLFTNAGMNQFKSIFLGDNPKGLRRAANSQKCMRVSGKHNDLEEVGRDHYHHTFFEMLGNWSFGDYYKKEAIRWAWELLTEVWGLEKSRLFATIHDSDDEAAEIWKSETDIPHERIMRFGDKSNFWEMGETGPCGPCTEIHYDIGDEATRAATYGDPVQGVNGENARYRELWNLVFIQYNREKDRSLNPLKAQHVDTGMGFERIVSVIQGVDSNYDTDIFQPIIKALSDKAGIAYDRGVAGTPFRVIAEHIRSLVFAVTDGAFPAKRGARLRAAAAFCGGLTASAPNRVLGSLF

SEQ ID NO: 38629 - DNA, 792 bp, Unknown
  Obtained from environmental sample
  misc_feature (1)..(792): n is a, c, g, or t
gtggaagcggacggcgaactgtttgaattaacggaaaaaagcatagagccccctcttgcggcgaaccgcagattgcgcataactaacatccgcgatgaggcattgctttgctcctttgtgcgcgaggcatggggcgcgaacgcgttccgctatctggaggtagtacgttttaccggcggctggcagctgttccccgacctgtacaattctttaagctctacgcttcgccgcgatattgctacggacttaagcaataccctaactcttgccaaactcggccggttatacatacgcaacgctctgcgcaaccttaagcttatcccgcgctttccctctttcgcaaatctttctttcggcgcggctcccgttcttgtcctcggcgcgggtccttcgctggacgaaacattagacgctcttgtaaagcgttatccgcaaaatatcaatttaaaccgcccctttaaaattgtctgcgtagacacctgtcttggttcattaaaagaaaggggaattgttcccgatcttgttgttattctggaaagccagcactggaacctgcgcgattttaccggctgttataattggcaggttcctttcgcggttgatctttccgccctgcccaaatccgctcttatgcttgccggagacggctttttatttatgacgccctggacacctctgcgtatttttgaaaggctgaaaagtgcgcaaatgcttcccgccgtccttcctcctctcggctctgtgggccttaccgcggttgaattgtcccggcgcttaacacaggaagcataa

SEQ ID NO: 38630 - protein, 263 aa, Unknown
  Obtained from environmental sample
  misc_feature (1)..(263): Xaa is any amino acid
MEADGELFELTEKSIEPPLAANRRLRITNIRDEALLCSFVREAWGANAFRYLEVVRFTGGWQLFPDLYNSLSSTLRRDIATDLSNTLTLAKLGRLYIRNALRNLKLIPRFPSFANLSFGAAPVLVLGAGPSLDETLDALVKRYPQNINLNRPFKIVCVDTCLGSLKERGIVPDLVVILESQHWNLRDFTGCYNWQVPFAVDLSALPKSALMLAGDGFLFMTPWTPLRIFERLKSAQMLPAVLPPLGSVGLTAVELSRRLTQEA

SEQ ID NO: 38631 - DNA, 1344 bp, Unknown
  Obtained from environmental sample
  misc_feature (1)..(1344): n is a, c, g, or t
gtggaagatcttgtcggaagtgtttccatagaaaggcttcgcgagtttatcatcacccaggcaaaatacaatacagaacttaacaatgcgattctggtcgaattttcaacgaacgcagggaacgccaaagacaataaatattcaaggctcatacaggcaacccttgcttctgtcccccatgatgaagatgattattattgtgcggaatgtctcaatattgatgttctggaccaatggattgaaaaagccaggaactgtgtacgctcgaaacaatacgatgaggcgttactcatctgcaagggccttattgaagagcactcccagtggctgtataatattggagaaaatctttccatgattttttctctcgaataccagtccgttccttttgacatcataataaatataatagaacacattgataagaaagaattgtacaactactgcatgagtgagatgaagaagggaaaatatgaaaaaactgatttctatgagggttttcagcggctatctgaggaacttttggctataatagatcctgacgctttcattgccttgcaagacaaattgcttgctgatgtaaaaaacattcataaagctgaaaccattctgaggcggaaaatcaaatttttcctgcgtctcggtcagaagaaaaaagcctgggatattatcaaagaaaacatgcagatagaatctttccgcctgaaagtagtaaaaagaaagataagaaaacagaattttaagacggcgaaaaaattaattaacgatttcatcaatgcacagggagaagacccggaagagtattttaacgatatatggaataaattacttctggatattgctcaagaagaaaaagacatacccgccatacgaaagctggcatacggattcatagaagggtatttctacaaagactattttgaaatctataaggccgcttttagtcctgccgaatgggttgacgaaagggaaaaacttttcacgcattatgatgataaaaaatattttagtgagtctgcggcagaacttttggcagcggaaaaagacaaagcgcgccttggggactacatagaaaagtatctttccgtggagagactcgaaaagtaccatgatatattcgcggatgattttcctgacagaaccctggaaatgttcaggagagtcttgattccctatgctgaaaataatatgggacgatctcattatgcatacgttcataaactattaacgatgctgtcccgtataaaaggtggaaaagaagccgctgctgatttatccgcgggcttcagaaaacaatataagaatcgtagagcaatgatggaaatattacaggagtttatatga

SEQ ID NO: 38632 - protein, 447 aa, Unknown
  Obtained from environmental sample
  misc_feature (1)..(447): Xaa is any amino acid
MEDLVGSVSIERLREFIITQAKYNTELNNAILVEFSTNAGNAKDNKYSRLIQATLASVPHDEDDYYCAECLNIDVLDQWIEKARNCVRSKQYDEALLICKGLIEEHSQWLYNIGENLSMIFSLEYQSVPFDIIINIIEHIDKKELYNYCMSEMKKGKYEKTDFYEGFQRLSEELLAIIDPDAFIALQDKLLADVKNIHKAETILRRKIKFFLRLGQKKKAWDIIKENMQIESFRLKVVKRKIRKQNFKTAKKLINDFINAQGEDPEEYFNDIWNKLLLDIAQEEKDIPAIRKLAYGFIEGYFYKDYFEIYKAAFSPAEWVDEREKLFTHYDDKKYFSESAAELLAAEKDKARLGDYIEKYLSVERLEKYHDIFADDFPDRTLEMFRRVLIPYAENNMGRSHYAYVHKLLTMLSRIKGGKEAAADLSAGFRKQYKNRRAMMEILQEFI

SEQ ID NO: 38633 - DNA, 504 bp, Unknown
  Obtained from environmental sample
  misc_feature (1)..(504): n is a, c, g, or t
atggcgcacatttcgaaaatatatagaacactactttccgccttattggctttgttgggattttcctgtggaagttgtggtggaatttttagtgctcccgtcgaatacggttcaccgccgaaccccgaatacggtacaccgagggcaacctataaagccaaaggcgttgtggtatcagaagcgaacgattcccccattaaggggatacgtgccgtattaaaaagagataacaaagattggccaatggatacagacataaaagatacttacccgtgggcggtatacacgaacagtgacggctctttttttctggaacttcaggaatttccccgtcaaaaactatatgtggaattaattgatgttgatggggaagaaaacggctcatttgccggaaagaaaattgaagcggattatacaaattcaacatttaccggaggcagcgggacctggtatagcggtgaagctgaaatagatttgggaaaaataaagatgaagcttgaatga

SEQ ID NO: 38634 - protein, 167 aa, Unknown
  Obtained from environmental sample
  SIGNAL (1)...(27)
  misc_feature (1)..(167): Xaa is any amino acid
MAHISKIYRTLLSALLALLGFSCGSCGGIFSAPVEYGSPPNPEYGTPRATYKAKGVVVSEANDSPIKGIRAVLKRDNKDWPMDTDIKDTYPWAVYTNSDGSFFLELQEFPRQKLYVELIDVDGEENGSFAGKKIEADYTNSTFTGGSGTWYSGEAEIDLGKIKMKLE

SEQ ID NO: 38635 - DNA, 909 bp, Unknown
  Obtained from environmental sample
  misc_feature (1)..(909): n is a, c, g, or t
gtgcgaatcccgattgacgcgtacctgttttttaccggagaagacgttccggttgaaaacaggtttgtcaatcttgacaacgccgtaaagtacgcacggagcaacggcctcaagctgatattggacctccacgagtgtccggggcacgatttttccgaaacagcaaaaacacccgttcaaaaacttttctcgggcgatgacacatggataaaaaaaactgagagaatctgggccagcatcgccgagcgttattcaaagaacgacaacgtcctctttgagacgctcaatgagcctgtcgctcccaccgctgagatttggaacgatgttaaggacaggctctgccgcgcaatacggctccacgctccctggtcaacgataatcaccggttccaatatgtggaaccaagcggcaacgtttgacagccttacgccctttgacgacgacaacgtgatctacagcgtgcatttttacgagccgctgcttttcacccaccagaacgcgccgtggatcgacaatccggaaattaagacggcaaggctatatcccggcgattacggctccggctttgcccgcaaagacgatttgacgctgtcggacggcgtctgggacagggatcggctcgcaaaggaatttgcgcccgtgaacgcgttcaggaaaaaatacaaagcgcgtattatctgtaacgagttcggcgtttacgcgcccgtcgagcttcaatcgcagcttcgctggtatgaggacctgctctcaatcctcagggagatgaagatcggtttctcgtactggaactataaaaatctggactttggaataatttccataggggagaaactgcacgaaaatcttttgaactacgacaacagcgacagaataaaccaccaggttttggatgtgttaaaaaaatattaa

SEQ ID NO: 38636 - protein, 302 aa, Unknown
  Obtained from environmental sample
  DOMAIN (1)...(272): Cellulase (glycosyl hydrolase family 5)
  misc_feature (1)..(302): Xaa is any amino acid
MRIPIDAYLFFTGEDVPVENRFVNLDNAVKYARSNGLKLILDLHECPGHDFSETAKTPVQKLFSGDDTWIKKTERIWASIAERYSKNDNVLFETLNEPVAPTAEIWNDVKDRLCRAIRLHAPWSTIITGSNMWNQAATFDSLTPFDDDNVIYSVHFYEPLLFTHQNAPWIDNPEIKTARLYPGDYGSGFARKDDLTLSDGVWDRDRLAKEFAPVNAFRKKYKARIICNEFGVYAPVELQSQLRWYEDLLSILREMKIGFSYWNYKNLDFGIISIGEKLHENLLNYDNSDRINHQVLDVLKKY

SEQ ID NO: 38637 - DNA, 1143 bp, Unknown
  Obtained from environmental sample
  misc_feature (1)..(1143): n is a, c, g, or t
ttgagcttcaaccgcgcgatacaggaaaattggagagataacattattgtcggtttgtacagctactctttcggcgtaaaccttatcgaaaccgtcgacggctatcagcagaatatgcgttgcgcgaagtacgctttgatgtttatcgcgctgacgtttatggtattcttctttgttgaaatctttaccaagaaaacgatacaattctttcagtacgtacttgtcggtatcgcgttgatactgttttacagtttgctgctttcgttctcggaacagatcggtttcggctgggcgtacctgacggccagcttagctactatctttatgataacgatctatttttattcgctgataaaacaattgctgccgactgtcattctcgcctgcattatgcttagtttgtacgcgtttttgtacgtaattttgcggacggaggatttcgccctgctattcggcagcgtgttcttgtttgcgattttgggcgtggtgatgtttgtgtcgaacaagatcaaatttgaaagcactcaaaaaaatactttaaccgattcaaccaaacaggaggcagttatggcaggtaagaatgtggttcttttcggcccgccgggagcgggtaagggcactcaggcggcgaagctgcgggatcttttggccgttccgcacatctccaccggtgatatgttccgcgagaacatcaagaacaacacggagctcgggcgcaccgccaaggagtactcgaacaagggcgaactggttcccgactcggtgacgatagcgatggtcaaggacagactgggccgcgccgacgttaaaggcggcttcctgctcgacggcttcccccgcagcgtcccacaggccgaggcgctggacaagattctgggcgaactcgggataaagctcgaccacgtggtcaacatcgcggtcgccgaccaggaggtcaaagacaggttagccaaacgcgcctccatagagggccgcgccgacgacgccgaccccaaggtcatagagaacaggctgaacacctacaagcaacagagtgaaccctgcctcacctactaccgcccgaagaacatcgtgcgcgacgtggacgggatagggtctatcgacgatgtgttcggcaggataaaggctatctttgccaaataa

SEQ ID NO: 38638 - protein, 380 aa, Unknown
  Obtained from environmental sample
  DOMAIN (1)...(177): Inner membrane protein CreD
  misc_feature (1)..(380): Xaa is any amino acid
MSFNRAIQENWRDNIIVGLYSYSFGVNLIETVDGYQQNMRCAKYALMFIALTFMVFFFVEIFTKKTIQFFQYVLVGIALILFYSLLLSFSEQIGFGWAYLTASLATIFMITIYFYSLIKQLLPTVILACIMLSLYAFLYVILRTEDFALLFGSVFLFAILGVVMFVSNKIKFESTQKNTLTDSTKQEAVMAGKNVVLFGPPGAGKGTQAAKLRDLLAVPHISTGDMFRENIKNNTELGRTAKEYSNKGELVPDSVTIAMVKDRLGRADVKGGFLLDGFPRSVPQAEALDKILGELGIKLDHVVNIAVADQEVKDRLAKRASIEGRADDADPKVIENRLNTYKQQSEPCLTYYRPKNIVRDVDGIGSIDDVFGRIKAIFAK

SEQ ID NO: 38639 - DNA, 348 bp, Unknown
  Obtained from environmental sample
  misc_feature (1)..(348): n is a, c, g, or t
atgaaaaaagttttacgtataggccttgcgggctacatgggcgcgggtaagagcacctgcgcccgttcttttgcctccgaagaggccctgataatagacgccgacgccgaggccaagcggctgatggcgganagccacgagatccaagagacgctgcgggcggccttcggggacgaggcggtcggagccgacggccgcatacgctccgacgtgctggggcgggaggcctttcaatcggtcgacgcgatactgacgctgaacggcataacgcacccgccgctcgtcaaataccttagccccattatcacctattgccaaagaccgctctgcatcctggacgccgcctga

SEQ ID NO: 38640 - protein, 115 aa, Unknown
  Obtained from environmental sample
  SIGNAL (1)...(25)
  DOMAIN (5)...(115): Dephospho-CoA kinase
  misc_feature (1)..(115): Xaa is any amino acid
MKKVLRIGLAGYMGAGKSTCARSFASEEALIIDADAEAKRLMAXSHEIQETLRAAFGDEAVGADGRIRSDVLGREAFQSVDAILTLNGITHPPLVKYLSPIITYCQRPLCILDAA

SEQ ID NO: 38641 - DNA, 552 bp, Unknown
  Obtained from environmental sample
  misc_feature (1)..(552): n is a, c, g, or t
gtgatagccggcaaggaaaacgccgcgggtttaaccctgcgtgtggagccggcgaaacgcgggatgggaaacaagtactcctgcgttgtcagaaacggcgaaatacccgaggaaatttacggcgcggtggaacgcggcattaccggagtgttttcttccgggatcgttatgggctatccctgcattgatattatggtgactgtcaccggtttaaattattccgaattgaacggcactgaattcgcttttgaagcctgcgccagcatggcatttgacgaagcctgccgcgccgcttctcccatattgctcgaaccgatcatggcagttaaccttaccagcccgcatgaatttgtcggcgaggtgatgggccttgtcacccagcgcggcggccagattttcagcatggacgcaaaagccgagattgatgaaataaaagcccaggcgcccatggcgcagatgttcggctttatgacctcactgcgcagcgtaagccagggccgcgcgagtttcagcatggaattctcgcatttcgagaagaagacgggaaaatga

SEQ ID NO: 38642 - protein, 183 aa, Unknown
  Obtained from environmental sample
  DOMAIN (3)...(99): Elongation factor G, domain IV
  misc_feature (1)..(183): Xaa is any amino acid
MIAGKENAAGLTLRVEPAKRGMGNKYSCVVRNGEIPEEIYGAVERGITGVFSSGIVMGYPCIDIMVTVTGLNYSELNGTEFAFEACASMAFDEACRAASPILLEPIMAVNLTSPHEFVGEVMGLVTQRGGQIFSMDAKAEIDEIKAQAPMAQMFGFMTSLRSVSQGRASFSMEFSHFEKKTGK

SEQ ID NO: 38643 - DNA, 990 bp, Unknown
  Obtained from environmental sample
  misc_feature (1)..(990): n is a, c, g, or t
ttgtcaaacaactggtggcacggacgccacccaaagcgcatcaaggaggatgcaatggcacaaggatctattctcaacaacatctcggccctgggcgcaagccgccagttgggcataaccggaatggggatggacaaaaccatccagcgcttgacatcaggcaagcgcatcaacgtagcccaagacgacgccgctggtttggccatcagcaacaggctgggcgccgacatcaggatttcggtgcaggctaggcgcaacgcttacgacggcattggttacttggcagtcgccgacggcgcgctggacgaagtcaccaacctgctgacccgcgcagcggaactggcagagcaggccgccaccggcaccatcaacaccctgaaccgccaggccctcgaccttgaattccagaacatcaagctggccatcaaggatgtcggtgaaaaggctaggttcaacggtgcatcggtgttcgttaccagatcgctgttcgtctccgtggcggacttcagcaagatcacgctcaccgttggcacgatgactggggtcttcagtgccagcagcgcggtcagcaccgccactgatgccgaanacgcgaagaaggaaattgctgaattgctgcagagcgtcagcatgcagcgcgccaccttgggtgcgacgcatgcagtacctgaacaccatcgccaacaccttgggcatccaggtggagaacttcaccgcggccatgagccagatcagggacgccaacatagcggacgaggtgataagcctgaccaagttccagatcctgggccagtccggcaccagcgcgctggcgcagtccaaccaggccgcccagctcatgctcggcctgctcaggtagcaagccccccccaggcgcggggcgccgggggcggtcggaacagaaaaagggggccgcggccccctttttttgctggtttggttggttttccccgactctttctcacagtccagctgagtccagatgagtaa

SEQ ID NO: 38644 - protein, 329 aa, Unknown
  Obtained from environmental sample
  DOMAIN (48)...(180): Bacterial flagellin N-terminus
  misc_feature (1)..(329): Xaa is any amino acid
MSNNWWHGRHPKRIKEDAMAQGSILNNISALGASRQLGITGMGMDKTIQRLTSGKRINVAQDDAAGLAISNRLGADIRISVQARRNAYDGIGYLAVADGALDEVTNLLTRAAELAEQAATGTINTLNRQALDLEFQNIKLAIKDVGEKARFNGASVFVTRSLFVSVADFSKITLTVGTMTGVFSASSAVSTATDAEXAKKEIAELLQSVSMQRATLGATHAVPEHHRQHLGHPGGELHRGHEPDQGRQHSGRGDKPDQVPDPGPVRHQRAGAVQPGRPAHARPAQVASPPQARGAGGGRNRKRGPRPPFFAGLVGFPRLFLTVQLSPDE

SEQ ID NO: 38645 - DNA, 309 bp, Unknown
  Obtained from environmental sample
  misc_feature (1)..(309): n is a, c, g, or t
gtgccagcagcgcggtcagcaccgccactgatgccgaanacgcgaagaaggaaattgctgaattgctgcagagcgtcagcatgcagcgcgccaccttgggtgcgacgcatgcagtacctgaacaccatcgccaacaccttgggcatccaggtggagaacttcaccgcggccatgagccagatcagggacgccaacatagcggacgaggtgataagcctgaccaagttccagatcctgggccagtccggcaccagcgcgctggcgcagtccaaccaggccgcccagctcatgctcggcctgctcaggtag

SEQ ID NO: 38646 - protein, 102 aa, Unknown
  Obtained from environmental sample
  misc_feature (1)..(102): Xaa is any amino acid
MPAARSAPPLMPXTRRRKLLNCCRASACSAPPWVRRMQYLNTIANTLGIQVENFTAAMSQIRDANIADEVISLTKFQILGQSGTSALAQSNQAAQLMLGLLR

SEQ ID NO: 38647 - DNA, 387 bp, Unknown
  Obtained from environmental sample
  misc_feature (1)..(387): n is a, c, g, or t
ttgggggccccccacttttttttttttccacaaaaaaaagaaaaaaattatccccccccccctttctggggggaaaaaaaaaaaaaaaaaacccggccccccccccctttttttttttggggggaaaaaaaaaaaaggttgggtatttttttttctttttttttattaaaaaaaccccccccccccccccccacaaaaagggggggggggggggggggggttatatataaattaaaaaaaaaaaaaacccaccaccccccccccctttttttttttttttcctccccnncccccaaaaaaaaaaaaaaaaaaaaaaaattttttttttttttttttttgttgggggggggggggtggggnnnnttcccttttatttttaaattttaa

SEQ ID NO: 38648 - protein, 128 aa, Unknown
  Obtained from environmental sample
  misc_feature (1)..(128): Xaa is any amino acid
MGAPHFFFFPQKKEKNYPPPPFWGEKKKKKTRPPPPFFFWGEKKKRLGIFFSFFLLKKPPPPPPTKRGGGGGGVIYKLKKKKTHHPPPLFFFFSSPXPKKKKKKKKFFFFFFLLGGGGWGXFPFIFKF

SEQ ID NO: 38649 - DNA, 774 bp, Unknown
  Obtained from environmental sample
  misc_feature (1)..(774): n is a, c, g, or t
ttgaatgtggtggtgaacggatcaaacgttgccggcggagccgttactataaacggcggtacgtttgtttcggccgctagttcggtaggcaacgcgatctcggcgggcgacagcgttttgattctgggcgcaagaataagcggctccggcactccgagcgacgccccggactacgtcgtcagcagcgagaacggcgtgatagtgagagcgaccagcagcaatccggccgaagtggcttggacgggaagcgcgaacgtgggcgcggtaagggctaggagatatgtatttgtcgaatcgggcctgctggctaaagcggaagtccgcgtgcagggcggcaacgccgcggcgatttgggtttacgggacggacggcggacacgccgctcctgcagacctatccacctttttaaccgcgggagcgaccggagtgatcaccaatatcacaagcgtcgcggttctcgtgcaaggaaacggcacgaacaactccgctacggtgagagcggcttccgggagagctatatgggttaacaacacgtttaaaaccggtacggctaagaacgacgtaattttggataacgcggtcgttgtgcggacctcctctcctaccggtgtcgtcaccccgttggtggacgtgaacggcggagacgtcgcggtattcggcgcgagcctgacggcgacctccatcaacgcggcggcggtgggcgggatcacgcccagcacggtttcctccggtatcggcatcttccccccaataacggcgcgggcgcggacttga

SEQ ID NO: 38650 - protein, 257 aa, Unknown
  Obtained from environmental sample
  misc_feature (1)..(257): Xaa is any amino acid
MNVVVNGSNVAGGAVTINGGTFVSAASSVGNAISAGDSVLILGARISGSGTPSDAPDYVVSSENGVIVRATSSNPAEVAWTGSANVGAVRARRYVFVESGLLAKAEVRVQGGNAAAIWVYGTDGGHAAPADLSTFLTAGATGVITNITSVAVLVQGNGTNNSATVRAASGRAIWVNNTFKTGTAKNDVILDNAVVVRTSSPTGVVTPLVDVNGGDVAVFGASLTATSINAAAVGGITPSTVSSGIGIFPPITARART

SEQ ID NO: 38651 - DNA, 543 bp, Unknown
  Obtained from environmental sample
  misc_feature (1)..(543): n is a, c, g, or t
atggcgagctctcccgtccctaccttcccggcatatcgggctatgtttgcaagagccatttctcttttcaaaaccctgcgggataatatttccattgcgagaccggagatggagcttgcggaactgcgggctgccgcagcggtggcaatggtggacgaaacaatcgaggattttgctgaaggctacgacacgattgtcggcgagaggggcgttaccctttccggcgggcaaaaacagagggtagccatcgcgcgtatgcttgccggcaatgcgccggtgatgatttttgacgacagcctttcggcggttgacaccgagactgacgcaaagatccgcactgccctgcgccgccgggtcgccgacgcgtcggtgatcatcatttcgcaccgaatatcgagcatcatgcaggctgacaagatcctcgtgctgaaagacggaaccgtggaggacataggttcccacgaagagcttctggtacgtggaggcagctaccgccgcatttttgaattgcaacgcggtgtcgctatggaggaaaaagtataa

SEQ ID NO: 38652 - protein, 180 aa, Unknown
  Obtained from environmental sample
  DOMAIN (1)...(146): ABC transporter
  misc_feature (1)..(180): Xaa is any amino acid
MASSPVPTFPAYRAMFARAISLFKTLRDNISIARPEMELAELRAAAAVAMVDETIEDFAEGYDTIVGERGVTLSGGQKQRVAIARMLAGNAPVMIFDDSLSAVDTETDAKIRTALRRRVADASVIIISHRISSIMQADKILVLKDGTVEDIGSHEELLVRGGSYRRIFELQRGVAMEEKV

SEQ ID NO: 38653 - DNA, 390 bp, Unknown
  Obtained from environmental sample
  misc_feature (1)..(390): n is a, c, g, or t
atggctgattttgaagattttgattacaacaagccaatgtcgcttggcgtatggaagaagatgcttccgtttatatcgccgcagaaaaaggaccttatacacgtcgccttattaatgtgtgcggtagcaatggtggacgtgctttaccccctgctgctgggttatgcgataaagaacaacatagaaccgcgcactaccgaaggcgtgcttaagcttctggctgcggcggtttttcttattactgcccagggggttatcgttcggttttttgtcgccctggggcttaaggcgggaaatgggcataaccatagctttaagaaacgctgttttttttcatcttcagaaaattgggcatttcttattacaacaaaaccccggttggctacatga

SEQ ID NO: 38654 - protein, 129 aa, Unknown
  Obtained from environmental sample
  misc_feature (1)..(129): Xaa is any amino acid
MADFEDFDYNKPMSLGVWKKMLPFISPQKKDLIHVALLMCAVAMVDVLYPLLLGYAIKNNIEPRTTEGVLKLLAAAVFLITAQGVIVRFFVALGLKAGNGHNHSFKKRCFFSSSENWAFLITTKPRLAT

SEQ ID NO: 38655 - DNA, 735 bp, Unknown
  Obtained from environmental sample
  misc_feature (1)..(735): n is a, c, g, or t
ttgggcatttcttattacaacaaaaccccggttggctacatgatggcccgaaccaattctgataccggccgaatcggagaccttgtggcatgggggcttatagatttcagttggtcggttttttactgcataggggttatcatcgccatgttcatcgtccactggaagatggcgattcttgtgagtaccaccataattccgctggcgctcctcaccaggtttttccaaaagcggatacttgcggtcaacaggatcatgagaaagctcaattccaaaatgacgggcgcgatgaacgaaggcatcacaggcgctcgcaccgtaaaggttctggtcgccgaggaacaatgcctggccgaatttaccggcattaccaatgaataccgcgtgtacgcaaaccgcatggcgaggcttaaggctattttttttcccacggttttttttatcggttcggcggcgaccgctttggtgcttggctacggcggctgggaaatcgccgttatgggggccgatcttgccatactcgcaatttttctgcaatacgcggggggttttttcgatcctgttcagaatatcgcaaacattcttacggaatttgtttccgcccaggcgaatgttgaacgggtatgcgacaagttggaccaaagtccggccattattgagaaaccgcaaaaaccgaaaaatagcggcgtgggatcctctagagtcgacccagcaggcatgcaagctgagttttaa

SEQ ID NO: 38656 - protein, 244 aa, Unknown
  Obtained from environmental sample
  misc_feature (1)..(244): Xaa is any amino acid
MGISYYNKTPVGYMMARTNSDTGRIGDLVAWGLIDFSWSVFYCIGVIIAMFIVHWKMAILVSTTIIPLALLTRFFQKRILAVNRIMRKLNSKMTGAMNEGITGARTVKVLVAEEQCLAEFTGITNEYRVYANRMARLKAIFFPTVFFIGSAATALVLGYGGWEIAVMGADLAILAIFLQYAGGFFDPVQNIANILTEFVSAQANVERVCDKLDQSPAIIEKPQKPKNSGVGSSRVDPAGMQAEF

SEQ ID NO: 38657 - DNA, 420 bp, Unknown
  Obtained from environmental sample
  misc_feature (1)..(420): n is a, c, g, or t
gtgctaagcacaattctgattgacgcgggtcctcttattgccctttttgctgccaatgataagaatcatagaggaattcgggattttcttaaagaacatccgtatcgttttgtaagtaccctcgcggtctttaccgaagtttcaaatatattgggatttaacgtaaaggcccagagggatttttatgaatgggttatgtacaaaggggtaataatcagcgatataaaccaaaatgatatgcccaggattgttgagttgaccgataagtatgcggatcttcccatggattttgcggatgccacgctggtcattactgcggaaaaagccaatatccgggaaataatcagtttggacagggatttcgatatctacaggcttcccggcagagagcaaatacacaacgtatataaacctggctga

SEQ ID NO: 38658 - protein, 139 aa, Unknown
  Obtained from environmental sample
  DOMAIN (5)...(124): PIN domain
  misc_feature (1)..(139): Xaa is any amino acid
MLSTILIDAGPLIALFAANDKNHRGIRDFLKEHPYRFVSTLAVFTEVSNILGFNVKAQRDFYEWVMYKGVIISDINQNDMPRIVELTDKYADLPMDFADATLVITAEKANIREIISLDRDFDIYRLPGREQIHNVYKPG

SEQ ID NO: 38659 - DNA, 351 bp, Unknown
  Obtained from environmental sample
  misc_feature (1)..(351): n is a, c, g, or t
atggtggttttccacgctgtcatcgtcggtggcggaacggcaggctccgatctgcgttacctctgcgaggaaaccggcggcaaggtgctttcgttgttccgcaatgagggcatcacgcctgaaatccgaagccagagcgaaaagccatccggcagctacatcctcagttacagatccaatctgccgacggatttcgggcgctcatatctgcctattgaagcgagggtctaccttatgaaagatcgggcagagacagcactggctactttgcgcctttggaataaaattcccgtagaaagtcagccaggtttatatacgttgtgtatttgctctctgccgggaagcctgtag

SEQ ID NO: 38660 - protein, 116 aa, Unknown
  Obtained from environmental sample
  misc_feature (1)..(116): Xaa is any amino acid
MVVFHAVIVGGGTAGSDLRYLCEETGGKVLSLFRNEGITPEIRSQSEKPSGSYILSYRSNLPTDFGRSYLPIEARVYLMKDRAETALATLRLWNKIPVESQPGLYTLCICSLPGSL

SEQ ID NO: 38661 - DNA, 630 bp, Unknown
  Obtained from environmental sample
  misc_feature (1)..(630): n is a, c, g, or t
atgaaaaatcctgtttttctttgcgctattgtttctgtttnttcatcgngctcaaaaacgccggatcagagaacaatactccgctattttcacgcgtcggaagagtacgcgctggggagatttgcggagacaatcgaaatccttaacggagagaaaaaatttccgccgtcccttctgcttaggacaaaggcggaattcttttccggggatattgaaaaagcggaaaaaacctgccgcagattattaaaaaagcagccttcgttttatgaggggaaattataccttgcgaggattctgcgcgaaaagggcgattccgacacggcggtaaagctgactgaatcgctgttagctgattatccgcaggatatacgcgcacttcggttcgcggcggagcttgccggagagtcgaaaaaatacgacgaggcggtgatttttctggacaaggccgcggaactttccgcggagagcgcccttgtttttctggacagggcgcgattgcgctgggtcgtggggaaagggaaggaggcgctggaggatttaagccgcgcgaaggccctgctgccgtgggatactccgctgttacgtgtaattaacaatcttgaaaaaaccataaaggaggttatgaaatga

SEQ ID NO: 38662 - protein, 209 aa, Unknown
  Obtained from environmental sample
  SIGNAL (1)...(18)
  misc_feature (1)..(209): Xaa is any amino acid
MKNPVFLCAIVSVXSSXSKTPDQRTILRYFHASEEYALGRFAETIEILNGEKKFPPSLLLRTKAEFFSGDIEKAEKTCRRLLKKQPSFYEGKLYLARILREKGDSDTAVKLTESLLADYPQDIRALRFAAELAGESKKYDEAVIFLDKAAELSAESALVFLDRARLRWVVGKGKEALEDLSRAKALLPWDTPLLRVINNLEKTIKEVMK

SEQ ID NO: 38663 - DNA, 657 bp, Unknown
  Obtained from environmental sample
  misc_feature (1)..(657): n is a, c, g, or t
atggaaagggttgtattgtctgaagaaatgaatcaactcaggcgggagattgcgatcatggcggcaagggtggaagaagatttaggaaaagctctctccgtccttcgcgccggcggagaagaactcgcagaggaaataaaagaaagcggcaaaatcgtcgataccctgcagcttaaaattgaagatatggcaatgattcttattgccacccagcagcctgtggcaagtgatttacgggagcttatcaccgtttttaaaatcaccgcaaaccttgaacgcataggcgattacgggattcaccttgtaaaggccggattgagattgtcaaaaatgcccactttccgttccattgaaagaattgaacgcatggtcgaaaccgccgtacttatgcttaaagatgcgatttccgcttacctttcgcaggatgcagacgccgcgagaaaagccgcctctcttgatgataaaatagatcaggagcacaaagcccttaccgatgaagtgctttcctttattaaagaacagcctcagtctgtaaaggccgccgcccgtcttctaaaactttcggggtatatggaacgccttggagatcacatcaccaatatctgcgagggaattatttatatgattgaaggcaaacatgaggatctaaacgattga

SEQ ID NO: 38664 - protein, 218 aa, Unknown
  Obtained from environmental sample
  DOMAIN (17)...(105): PhoU family
  misc_feature (1)..(218): Xaa is any amino acid
MERVVLSEEMNQLRREIAIMAARVEEDLGKALSVLRAGGEELAEEIKESGKIVDTLQLKIEDMAMILIATQQPVASDLRELITVFKITANLERIGDYGIHLVKAGLRLSKMPTFRSIERIERMVETAVLMLKDAISAYLSQDADAARKAASLDDKIDQEHKALTDEVLSFIKEQPQSVKAAARLLKLSGYMERLGDHITNICEGIIYMIEGKHEDLND

SEQ ID NO: 38665 - DNA, 306 bp, Unknown
  Obtained from environmental sample
  misc_feature (1)..(306): n is a, c, g, or t
ttgattgccgaggntggcatcgcgcgaaagcatttccatggntccccggagataatcctcatggacgaaccgaccagcgcccttgacccgattgccaccggaagaatcgaagagcttatcggcgagttaaaaagggatttcagcattatcattgtcacccattccatgaatcaggcggcgcgtatcagcgaccggaccgccttcttccttttgggtgatcttatagaatatgctgaaacaacaaaggtatttacacatccgaaagatagacgtacggaagattatatttcaggccgcttcggctaa

SEQ ID NO: 38666 - protein, 101 aa, Unknown
  Obtained from environmental sample
  misc_feature (1)..(101): Xaa is any amino acid
MIAEXGIARKHFHGSPEIILMDEPTSALDPIATGRIEELIGELKRDFSIIIVTHSMNQAARISDRTAFFLLGDLIEYAETTKVFTHPKDRRTEDYISGRFG

SEQ ID NO: 38667 - DNA, 420 bp, Unknown
  Obtained from environmental sample
  misc_feature (1)..(420): n is a, c, g, or t
atgaaaagaaatacatttatttttattctcatgaccgttgttgccatattagcgttaggttcctgcgttttaacccaaagaatcggtaatgttcaaaatgcaaaaaacaaccttgattgggaaggtgtttataaaggaacaattccggcagccgactgtccgggaataaatgtcacaatgaaactcagcaaagagcagagttttgaactgggttacgaatacattgacagagttcacgagccatttacatggacaggaaaatttaaatgggatgatatggggaacaccattataattgatgtaatagacgcgcccagttattataaagtaattgaaaatatgttgatccagttggacatggaaggaaagataataaaaggcaaattagccgctaattacgcgttaaagaaaatactataa

SEQ ID NO: 38668 - protein, 139 aa, Unknown
  Obtained from environmental sample
  SIGNAL (1)...(25)
  DOMAIN (1)...(138): Uncharacterized lipoprotein NlpE involved in copper resistance
  misc_feature (1)..(139): Xaa is any amino acid
MKRNTFIFILMTVVAILALGSCVLTQRIGNVQNAKNNLDWEGVYKGTIPAADCPGINVTMKLSKEQSFELGYEYIDRVHEPFTWTGKFKWDDMGNTIIIDVIDAPSYYKVIENMLIQLDMEGKIIKGKLAANYALKKIL

SEQ ID NO: 38669 - DNA, 432 bp, Unknown
  Obtained from environmental sample
  misc_feature (1)..(432): n is a, c, g, or t
atgccgcttatatatgacgatgtggctttcggctgccgcaattttggaatgtcggaagatgaaatcaaaatacgagtagataaaacgcttaaccaattaaacataaaccatctgcgcaatcgttcatcgttgcggctgtccggcggcgaaaaacgccttgcggcaatagcgacagttttagcaatggagccttctattttgatgtttgacgagccaaccgcttttcttgacccgaaagcgaaacgctcacttattcaaaccttaaaaatattgaaccatacaaaaataatagcgacccatgatataacctttgcagctaacgtatgcgaccgggtaatcatattaaagaacggacaaattgccgcagacggatcattgtcaatcttgcatgataaagaattaatgcaaaactgcggattggattttgactga

SEQ ID NO: 38670 - protein, 143 aa, Unknown
  Obtained from environmental sample
  DOMAIN (2)...(118): ABC transporter
  misc_feature (1)..(143): Xaa is any amino acid
MPLIYDDVAFGCRNFGMSEDEIKIRVDKTLNQLNINHLRNRSSLRLSGGEKRLAAIATVLAMEPSILMFDEPTAFLDPKAKRSLIQTLKILNHTKIIATHDITFAANVCDRVIILKNGQIAADGSLSILHDKELMQNCGLDFD

SEQ ID NO: 38671 - DNA, 801 bp, Unknown
  Obtained from environmental sample
  misc_feature (1)..(801): n is a, c, g, or t
atgagtttaaaacaaccgcaaatgctgtttgaaaacgaacaatttcgaatgtccggactccaggtttttaattgggggacattctcaggactgcacgaagtacctatttctccgaaaggttttttatttgtcggaaggtcaggatccggcaagactaccctactggacgccttttcagcattgcttatacctccccgatgggttgattttaatgccgccgcgcgtgaaactgaacgaaaaaccagagatcgcaatatcgtaagttacatacgaggggcatgggcggaaaaaggagatgaagtatcaggagatataagcacccactatctccggccgggaacaacgtggtcagctctggcgctgacatataaaaacgaaacagggcaaactattgtcataggacagatattttggattcacggcaattcaaacggaactgccgatgtcaaacgatattatttcatttttgaacggacattcgatctgcgcgagtttgacgatttcggaaaatcgaattttgatattcgaaaattaaaacaatcatttcctgatgattttattaaaaacgaatttacgccgtattgcgaacgttttcgccgcctgcttggcattgaaaatgaagtagcgctaaggcttctgcacaagactcaatcagccaagaatctaggcgatttgaataccttgttccgggactttatgctcgaaaaacctgaaacatttgacgccgcagacagacttgtcaacgaatttggagaactcaacgacgcgcatcaggcagtggtaaccgcccgaaacaaatga

SEQ ID NO: 38672 - protein, 266 aa, Unknown
  Obtained from environmental sample
  misc_feature (1)..(266): Xaa is any amino acid
MSLKQPQMLFENEQFRMSGLQVFNWGTFSGLHEVPISPKGFLFVGRSGSGKTTLLDAFSALLIPPRWVDFNAAARETERKTRDRNIVSYIRGAWAEKGDEVSGDISTHYLRPGTTWSALALTYKNETGQTIVIGQIFWIHGNSNGTADVKRYYFIFERTFDLREFDDFGKSNFDIRKLKQSFPDDFIKNEFTPYCERFRRLLGIENEVALRLLHKTQSAKNLGDLNTLFRDFMLEKPETFDAADRLVNEFGELNDAHQAVVTARNK

SEQ ID NO: 38673 - DNA, 471 bp, Unknown
  Obtained from environmental sample
  misc_feature (1)..(471): n is a, c, g, or t
gtggtgcagctcgtatcgctcccgcagcccgcgcagtatcgatatcgtatcgccgacggagggctggtcgataagaacggtctgaaagcggcgctccaaagccttgtccttctctatgtacttcctgtactcgtcgagcgtggtggcccctatggtgcgcagctcgccccgcgcgagcataggcttcagcatattccccgcgtccaccgccccctccgccgcccccgcgcccaccacggtgtgcagctcgtctatgaagaggacgatgtccccgcgctcggtgacctcatgcagcaccgccttaagccgctcctcgaactccccccgaaacttggcccccgctataagcgcccccatgtcgagcgacaccacagacttgctcttgagcccctcaggcacgtccccccgaacgatacgcaacgccaacccctccgcgatggccgtcttgccgacccccggatcgccgattag

SEQ ID NO: 38674 - protein, 156 aa, Unknown
  Obtained from environmental sample
  misc_feature (1)..(156): Xaa is any amino acid
MVQLVSLPQPAQYRYRIADGGLVDKNGLKAALQSLVLLYVLPVLVERGGPYGAQLAPREHRLQHIPRVHRPLRRPRAHHGVQLVYEEDDVPALGDLMQHRLKPLLELPPKLGPRYKRPHVERHHRLALEPLRHVPPNDTQRQPLRDGRLADPRIAD

SEQ ID NO: 38675 - DNA, 519 bp, Unknown
  Obtained from environmental sample
  misc_feature (1)..(519): n is a, c, g, or t
ttgtccttctctatgtacttcctgtactcgtcgagcgtggtggcccctatggtgcgcagctcgccccgcgcgagcataggcttcagcatattccccgcgtccaccgccccctccgccgcccccgcgcccaccacggtgtgcagctcgtctatgaagaggacgatgtccccgcgctcggtgacctcatgcagcaccgccttaagccgctcctcgaactccccccgaaacttggcccccgctataagcgcccccatgtcgagcgacaccacagacttgctcttgagcccctcaggcacgtccccccgaacgatacgcaacgccaacccctccgcgatggccgtcttgccgacccccggatcgccgattagcaccggattgttcttggtccgccgcgaaagtatctgtatcatccgccggatctcgtcgtcgcgaccgataacggggtccagcttcccacggcgggcggcctcggtgaggtcgcgggagaagcgttctaaagcagtgggttcttgttgttga

SEQ ID NO: 38676 - protein, 172 aa, Unknown
  Obtained from environmental sample
  misc_feature (1)..(172): Xaa is any amino acid
MSFSMYFLYSSSVVAPMVRSSPRASIGFSIFPASTAPSAAPAPTTVCSSSMKRTMSPRSVTSCSTALSRSSNSPRNLAPAISAPMSSDTTDLLLSPSGTSPRTIRNANPSAMAVLPTPGSPISTGLFLVRRESICIIRRISSSRPITGSSFPRRAASVRSREKRSKAVGSCC

SEQ ID NO: 38677 - DNA, 468 bp, Unknown
  Obtained from environmental sample
  misc_feature (1)..(468): n is a, c, g, or t
gtgattgacgattccatcgaggtagagatccgtcccgaggatctcagggtagacacctaccgctcaggcggcgcgggcggccagcacgttaataaaaccgacagcgccgtcaggtttacccatcttccgacagggatcgtggtggcctgccagaatgaaagaagccagataaaaaaccgggctatcgcgatgagtatgttaaaggcccggctatacgaatactacaggcaggagaaggaaaaggagaacgagaggtttgcccaggaaaaaaaggatatttcctggggtaaccagatacgctcttatgtgtttcagccatatacgatggtaaaagatgccaggacaaaaacggaaacaggcaatattcaggcggtaatggacggggacatcgatcctttcatcgaggaatacctgcgctttgcctggaataacaatcaaagaataacgcccggcggggagcaggaatga

SEQ ID NO: 38678 - protein, 155 aa, Unknown
  Obtained from environmental sample
  DOMAIN (1)...(114): Peptidyl-tRNA hydrolase domain
  misc_feature (1)..(155): Xaa is any amino acid
MIDDSIEVEIRPEDLRVDTYRSGGAGGQHVNKTDSAVRFTHLPTGIVVACQNERSQIKNRAIAMSMLKARLYEYYRQEKEKENERFAQEKKDISWGNQIRSYVFQPYTMVKDARTKTETGNIQAVMDGDIDPFIEEYLRFAWNNNQRITPGGEQE

SEQ ID NO: 38679 - DNA, 408 bp, Unknown
  Obtained from environmental sample
  misc_feature (1)..(408): n is a, c, g, or t
atggcgatgagcgcgcaggagaagttcgattactggctggacgcggcacagtatgacctccaatcggcgggggtaatgctgaccggcggccgttggctgtatgttgctttcatgtgccagcaggcggttgagaaactcgtaaagggtctgtacctgctctacttggacgacaatgtgccaaggacgcacaacatcgaaacattggtcaagcgattcagagacaagctatcagtggaagtacccgccgaaacaatcaagctgtttgacaggttgtcggtctgctatctgaacaaccgctaccccgaatacaaggacgaacttagctcccagtttgacgagaccacggcaggggctctttactcccagacaaaagaggtgttcacatggctgttgactttgaagccgtga

SEQ ID NO: 38680 - protein, 135 aa, Unknown
  Obtained from environmental sample
  DOMAIN (9)...(133): HEPN domain
  misc_feature (1)..(135): Xaa is any amino acid
MAMSAQEKFDYWLDAAQYDLQSAGVMLTGGRWLYVAFMCQQAVEKLVKGLYLLYLDDNVPRTHNIETLVKRFRDKLSVEVPAETIKLFDRLSVCYLNNRYPEYKDELSSQFDETTAGALYSQTKEVFTWLLTLKP

SEQ ID NO: 38681 - DNA, 321 bp, Unknown
  Obtained from environmental sample
  misc_feature (1)..(321): n is a, c, g, or t
atggctgttgactttgaagccgtgaccagtttgtgcaagcaatacgctgacaacgtgcgtcgagccatgcccgttgacaaggtaatgctgttcggctcgtacgccaagggtacggctgacgagcagagcgatgtagatatttgtttcttccttgacaactatggcggcaaagggcgcagggaaatcctaaaagagttgctttggctgatgaatggctttgatagcgcatactttgagccgatagtttttgaaacatctgagatcgaaaacgacaacccttttgtgaaagagatattgcgtacggggaaggagatattgtag

SEQ ID NO: 38682 - protein, 106 aa, Unknown
  Obtained from environmental sample
  DOMAIN (8)...(105): Nucleotidyltransferase domain
  misc_feature (1)..(106): Xaa is any amino acid
MAVDFEAVTSLCKQYADNVRRAMPVDKVMLFGSYAKGTADEQSDVDICFFLDNYGGKGRREILKELLWLMNGFDSAYFEPIVFETSEIENDNPFVKEILRTGKEIL

SEQ ID NO: 38683 - DNA, 423 bp, Unknown
  Obtained from environmental sample
  misc_feature (1)..(423): n is a, c, g, or t
atgacagaatggccgaggccttggcgcccaaacgccataacagagacggccaatggcagagtgcagcccctgcccagggataagtactacgtgccagggtcaatcttgcaggtggcagttgacaacagccagccccttgcctatggcatggacactgcggccaacatatttttcaacaacagcccggcctacaaactcagcgaagccgccatagcaaacggtgccaaggccgttgcttggttcgattctcccaatcccttaaagagcggctggatacatggccctgcctacctaaatggcaccatcgccgcaatggacatcccccacggcaaaggccgcctgtgcctcatagggcccgaacccaccttccgcgcccagccgcatggcaccttcaagctgctgtttaatgcgatctatatgtag

SEQ ID NO: 38684 - protein, 140 aa, Unknown
  Obtained from environmental sample
  misc_feature (1)..(140): Xaa is any amino acid
MTEWPRPWRPNAITETANGRVQPLPRDKYYVPGSILQVAVDNSQPLAYGMDTAANIFFNNSPAYKLSEAAIANGAKAVAWFDSPNPLKSGWIHGPAYLNGTIAAMDIPHGKGRLCLIGPEPTFRAQPHGTFKLLFNAIYM

SEQ ID NO: 38685 - DNA, 1491 bp, Unknown
  Obtained from environmental sample
  misc_feature (1)..(1491): n is a, c, g, or t
atgaaaagcgattctgtaaacaaaggcattgcccgtgcgcctcatcgctcgctctttaaggcgttgggttttattgaagaagaatttaataaaccgttaatagggattgcctgcgctaaaagcgaaatagtgccggggcatatgcatctcgataatatcgcgcgcgccgccgccgacggcgttcgcatggcaggcggtgtgcctgtaacatttcccgtaatcggtgtatgcgacggaatagcgatgggtcatgagggaatgagatactccctgccgacaagggaacttatcgccgactcgattgaatgtatggcgaccgctcacgcatttgacgctcttgtctttatccccaactgcgacaagatagtgccgggtatgctgatggcatcggctcggcttaaccttccttccgtttttgtttcaggcggacctatgcttgctggacgcaaggacgggaaaccgctgacgcttacaacaatgtttgaggcggttggcactgtcgccgcagggaagatcagcgaagcggaacttgaagaacttgaaaacctttcatgcccgggctgcggctcttgcgccggaatgtttacggcaaactcgatgaactgcgtaaccgaagcgctgggaatggctctgccgggcaatggtactattccagccgtaatggcggaacgtatccgtctggcaaaaaaaacaggaatattaattttggacgtactaaaaaaagacctgcgtcctaaaagcatactcacagaaaaagcgttcatgaacgctctcgccctcgacatggcgctaggctgttctacaaataccgctcttcatcttcccgccattgcaggggaagcaggtttcaaactcgatctggaacttcttaacaaggtaagcgcggttacgcctaacctttgccgccttgcccctgcgggaaaagacgcaatagaagacctgcacacggctgggggaattcccgctgtctttaaggaactttcaaaaaagaaccttgtcgatcttaaagcagtcacagtgtacggctgtctgggcgacgcattgaacaaagcggaaaaccgcaacagcgatgtcgtaagaccgattgaaaatccctactcggcgacaggagggcttgccgcattgaaaggaaacatcgctcaggacggctgtgtcgtaaagcgaagcgcagttgcgccttccatgttgaaacacgaaggaccggcgagagttttcgattccgaggaaacggcatttgacgctatcatgggaaaaaagataaacgctggagacgttatcgttatccgttacgaaggaccgaagggcggacccggcatgaaagaaatgctcgctcctactgcggctctcgcaggtatggggctagacgataaagtcgccctgattacggacggacgtttttcaggcgcatccaaaggagcgtccataggtcacgtctcgcccgaagcggctttgggcggaaacatcgggctcataaacgaaggcgacatatag

SEQ ID NO: 38686 - protein, 496 aa, Unknown
  Obtained from environmental sample
  DOMAIN (31)...(496): Dehydratase family
  misc_feature (1)..(496): Xaa is any amino acid
MKSDSVNKGIARAPHRSLFKALGFIEEEFNKPLIGIACAKSEIVPGHMHLDNIARAAADGVRMAGGVPVTFPVIGVCDGIAMGHEGMRYSLPTRELIADSIECMATAHAFDALVFIPNCDKIVPGMLMASARLNLPSVFVSGGPMLAGRKDGKPLTLTTMFEAVGTVAAGKISEAELEELENLSCPGCGSCAGMFTANSMNCVTEALGMALPGNGTIPAVMAERIRLAKKTGILILDVLKKDLRPKSILTEKAFMNALALDMALGCSTNTALHLPAIAGEAGFKLDLELLNKVSAVTPNLCRLAPAGKDAIEDLHTAGGIPAVFKELSKKNLVDLKAVTVYGCLGDALNKAENRNSDVVRPIENPYSATGGLAALKGNIAQDGCVVKRSAVAPSMLKHEGPARVFDSEETAFDAIMGKKINAGDVIVIRYEGPKGGPGMKEMLAPTAALAGMGLDDKVALITDGRFSGASKGASIGHVSPEAALGGNIGLINEGDI

SEQ ID NO: 38687 - DNA, 543 bp, Unknown
  Obtained from environmental sample
  misc_feature (1)..(543): n is a, c, g, or t
atggccagcggccgagcacaaagcgacgccgcttctattgaggcgataaccgaagctgtagtccgcagaagacgcgatttaacgatttttaactctgttggaaatatcccagacccgcaaaaaatgaccaaagagataaccgaacaaatcaatgcgggaatcggcggcagtcttgaaggcatgaaaaaatccgtacaggatatgattaaaaacatactgaaggaacacgctcctgaacttgatgaaaagcaaagagaagaattgtgtcaggcatggctgcccggagggaacgggaaaaaaggtcccggcggcgggttaccgcccgacgtacttctttccatgatagaacaatttatctctttctcccgcggtgaaatgacagaatcggtagacaaaaatctccgcgaagaaatgggcgcatggaccaagcgttactggaacagctttccacctgttgtacaacaaataattacggattatttgaaagataaaataaccgagaaagattttaagagcagggtttgtatcgctttggggctgtaa

SEQ ID NO: 38688 - protein, 180 aa, Unknown
  Obtained from environmental sample
  misc_feature (1)..(180): Xaa is any amino acid
MASGRAQSDAASIEAITEAVVRRRRDLTIFNSVGNIPDPQKMTKEITEQINAGIGGSLEGMKKSVQDMIKNILKEHAPELDEKQREELCQAWLPGGNGKKGPGGGLPPDVLLSMIEQFISFSRGEMTESVDKNLREEMGAWTKRYWNSFPPVVQQIITDYLKDKITEKDFKSRVCIALGL

SEQ ID NO: 38689 - DNA, 936 bp, Unknown
  Obtained from environmental sample
  misc_feature (1)..(936): n is a, c, g, or t
gtgcgcgttgtgggggaattaaacgcgcggattgcaaacaggaattttcaggagtatataagaatagctgaancgcatcaggaaagaaggataggagatgtagcccgccttatttgtgaaaaacgcgaaaatataaaaacgatacttatcgccggtccttccagttcgggaaaaacaacaagcgccaaaaggctggaaattgagttgatggtatcgggtttaaagccaattgcaatcagtcttgacgattattacaagggaacggctgatacgcccaaagatgaaaacggcgagcccgattacgaatgtttggaagctcttgacgtggaatatttaaataagcaattgcaagctctctaccgaggagaagaaataacgcttcctgtttacgattttaaaacaggcacgcgcaaggaaaccggcggcagaaagataaaacttgaaagcaataatgttttaattgtcgagggtattcacggacttaacgatgcgttaacttacagtattgacaggaaaacaaagtttaaagtttatatatctgcattaacgcaattaaatcttgacgatcacaaccgtattcccacaagcgacaacaggcttttaaggcgtatggtgcgcgattcccaattcagagggatgcaggcggcgggcacaatcaaaatgtggcccaaagtgcaagccggagagcgcaaacatattttcccgttccaaggctccgccgacgccacgcttaattccgcgcttgattacgaactttcagttttaaaatactacgcagacccgctgttacgcgtaattaaacccggtatgaccgaatacgccgaagcggtaagactgcttgccttccttgaaaactttatccccattccgccccagtatgtgccgggaacgagtattctgcgcgagtttatcggggggagtgagtttaagtattag

SEQ ID NO: 38690 - protein, 311 aa, Unknown
  Obtained from environmental sample
  DOMAIN (47)...(253): Phosphoribulokinase / Uridine kinase family
  misc_feature (1)..(311): Xaa is any amino acid
MRVVGELNARIANRNFQEYIRIAEXHQERRIGDVARLICEKRENIKTILIAGPSSSGKTTSAKRLEIELMVSGLKPIAISLDDYYKGTADTPKDENGEPDYECLEALDVEYLNKQLQALYRGEEITLPVYDFKTGTRKETGGRKIKLESNNVLIVEGIHGLNDALTYSIDRKTKFKVYISALTQLNLDDHNRIPTSDNRLLRRMVRDSQFRGMQAAGTIKMWPKVQAGERKHIFPFQGSADATLNSALDYELSVLKYYADPLLRVIKPGMTEYAEAVRLLAFLENFIPIPPQYVPGTSILREFIGGSEFKY

SEQ ID NO: 38691 - DNA, 321 bp, Unknown
  Obtained from environmental sample
  misc_feature (1)..(321): n is a, c, g, or t
gtgttgagcatagacgaagatgacgatgaaataaagaacggacagacttattctttttggcatccttccgcggattaccgccattttgtacacactgtcgaaggcagcgcggcgccgatgttgaaaaaacgcatagaaaacggcgtactgaccgcagaacagccttcgctagcggaaattaaagcctatgccgccgcagaccttgaaagttttgacgcgacatacaaaaggctgttaaatccccatatttacaaagtgtcgataaccgataaattacgctctcttaaactggaattgatacaaaaacaattgccttcttga

SEQ ID NO: 38692 - protein, 106 aa, Unknown
  Obtained from environmental sample
  misc_feature (1)..(106): Xaa is any amino acid
MLSIDEDDDEIKNGQTYSFWHPSADYRHFVHTVEGSAAPMLKKRIENGVLTAEQPSLAEIKAYAAADLESFDATYKRLLNPHIYKVSITDKLRSLKLELIQKQLPS

SEQ ID NO: 38693 - DNA, 540 bp, Unknown
  Obtained from environmental sample
  misc_feature (1)..(540): n is a, c, g, or t
ttgaccagaattttccaaatattcgcaatttgcaaaactttttttacgaaaagccgacttatgcaaccattagcttattgccggcaaatcaaaccgtgtattttgaaaatgcggcaaatgttgtggagattcctttgccaaaagattttcctgtgcaaaaaatattttcaaatatattgcaaacccagccatcaattattccgcaacaacctattcctcaatcacagcaggttttgccacaacaacccatttcacagcaagccactccgccgcaggttcaaccacaacaacccattccgcagcaaccaactccacaatcacagcagattccacagcaacaaccaattccaccgcaaggaaccccaccgcaagttcaaccacaacagcctattccacagcaagccacgccgccaccaatttcaccgcaacaaccaattccacaaccacagcaggtactgccagaacaacccattccacagcaaggaacgccgccgcaggttcaaccgcagcaaccaattccacagtcacaacaaccgctag

SEQ ID NO: 38694 - protein, 179 aa, Unknown
  Obtained from environmental sample
  misc_feature (1)..(179): Xaa is any amino acid
MTRIFQIFAICKTFFTKSRLMQPLAYCRQIKPCILKMRQMLWRFLCQKIFLCKKYFQIYCKPSHQLFRNNLFLNHSRFCHNNPFHSKPLRRRFNHNNPFRSNQLHNHSRFHSNNQFHRKEPHRKFNHNSLFHSKPRRHQFHRNNQFHNHSRYCQNNPFHSKERRRRFNRSNQFHSHNNR

SEQ ID NO: 38695 - DNA, 1335 bp, Unknown
  Obtained from environmental sample
  misc_feature (1)..(1335): n is a, c, g, or t
atgaccacgactacaagaaaaaacgacgcgccgccgccggaggccccgcccgtagacagggccgcgcttaggttgcgcaaactcgccaacctgcagggctttgtcaccgaggcgcagatggaggacgcggtcgacgccgcggacgacatagagcgcataagggagatgctggagcgcgagcgcatcaccatcaacaccttcgtgggcgagcgcagggcgctgccccgcggggaacgcaaacaggagcgcacgccggcccacgcgcactacacagaccccacgctggcctacctgaacaccgtaggcaaagttccgctgctctccaaagggcaggaggcggagtacgcaatgcgcatggaggcggcgcagggcaaactctttgagatggccttccgctcccgatacgccatagacagcctgaaacgccttggccaaaagctggaaaacggcgaggtgggctgcaccgacgtactgtccatagacgagggccaggaggagggcgcggagcaggcggacgtggacgaaaagcgcgacgggttccttcggacgctctccatagtagaggataaatacgacgccataacagacttggagcggacgggcgcgggggggaaagagttagacaagttatgggaagaaaccatacttatatgcaggggcatggggctcaacgccaaacacgttgaagatattttagacaagtacaaggaagaactggcgtctgataagcgcgtggcggacatagaaaaattctcgcggctcgaagaggcgcgcaaccaggcgaagtgcgcggtgatagaggccaacgtgcgcttggtcgtaagtatagccaaaaagtacatgacgcgcggcatggagataatagaccttatacaggagggcaataggggcctgataaaagcggtggaaaatttcgactaccgcaaaggctacaagttctccacttacgccacgtggtggatccgccaagccatactgcgggcgataaacgacaagtcgaaggcgatccgcattcccgccaacactatggagctggtgaacaaggtgctgcgcgtaacgcgcaagtgggtcatagactacggctacgagccctcgtaccaagagatagctgtcgcgctcggctgtccggcggtcaaggtgcagcaggctatggagtactcgctcgaccccatatccctcgatatgcagataagcggcgacagcggcgcgacggtgggcgagtacatagaagactccacggtggtggatcccacgcagaagatatcgcttctgcacctgcgggagcagatcaagtcggttctaagttcgctcgcgctcggccgatctgatacatga

SEQ ID NO: 38696 - protein, 444 aa, Unknown
  Obtained from environmental sample
  DOMAIN (91)...(128): Sigma-70 factor, region 1.2
  misc_feature (1)..(444): Xaa is any amino acid
MTTTTRKNDAPPPEAPPVDRAALRLRKLANLQGFVTEAQMEDAVDAADDIERIREMLERERITINTFVGERRALPRGERKQERTPAHAHYTDPTLAYLNTVGKVPLLSKGQEAEYAMRMEAAQGKLFEMAFRSRYAIDSLKRLGQKLENGEVGCTDVLSIDEGQEEGAEQADVDEKRDGFLRTLSIVEDKYDAITDLERTGAGGKELDKLWEETILICRGMGLNAKHVEDILDKYKEELASDKRVADIEKFSRLEEARNQAKCAVIEANVRLVVSIAKKYMTRGMEIIDLIQEGNRGLIKAVENFDYRKGYKFSTYATWWIRQAILRAINDKSKAIRIPANTMELVNKVLRVTRKWVIDYGYEPSYQEIAVALGCPAVKVQQAMEYSLDPISLDMQISGDSGATVGEYIEDSTVVDPTQKISLLHLREQIKSVLSSLALGRSDT

SEQ ID NO: 38697 - DNA, 582 bp, Unknown
  Obtained from environmental sample
  misc_feature (1)..(582): n is a, c, g, or t
gtgcagaagcgatatcttctgcgtgggatccaccaccgtggagtcttctatgtactcgcccaccgtcgcgccgctgtcgccgcttatctgcatatcgagggatatggggtcgagcgagtactccatagcctgctgcaccttgaccgccggacagccgagcgcgacagctatctcttggtacgagggctcgtagccgtagtctatgacccacttgcgcgttacgcgcagcaccttgttcaccagctccatagtgttggcgggaatgcggatcgccttcgacttgtcgtttatcgcccgcagtatggcttggcggatccaccacgtggcgtaagtggagaacttgtagcctttgcggtagtcgaaattttccaccgcttttatcaggcccctattgccctcctgtataaggtctattatctccatgccgcgcgtcatgtactttttggctatacttacgaccaagcgcacgttggcctctatcaccgcgcacttcgcctggttgcgcgcctcttcgagccgcgagaatttttctatgtccgccacgcgcttatcagacgccagttcttccttgtacttgtctaa

SEQ ID NO: 38698 - protein, 193 aa, Unknown
  Obtained from environmental sample
  misc_feature (1)..(193): Xaa is any amino acid
MQKRYLLRGIHHRGVFYVLAHRRAAVAAYLHIEGYGVERVLHSLLHLDRRTAERDSYLLVRGLVAVVYDPLARYAQHLVHQLHSVGGNADRLRLVVYRPQYGLADPPRGVSGELVAFAVVEIFHRFYQAPIALLYKVYYLHAARHVLFGYTYDQAHVGLYHRALRLVARLFEPREFFYVRHALIRRQFFLVLV

SEQ ID NO: 38699 - DNA, 597 bp, Unknown
  Obtained from environmental sample
  misc_feature (1)..(597): n is a, c, g, or t
ttgccctcctgtataaggtctattatctccatgccgcgcgtcatgtactttttggctatacttacgaccaagcgcacgttggcctctatcaccgcgcacttcgcctggttgcgcgcctcttcgagccgcgagaatttttctatgtccgccacgcgcttatcagacgccagttcttccttgtacttgtctaaaatatcttcaacgtgtttggcgttgagccccatgcccctgcatataagtatggtttcttcccataacttgtctaactctttcccccccgcgcccgtccgctccaagtctgttatggcgtcgtatttatcctctactatggagagcgtccgaaggaacccgtcgcgcttttcgtccacgtccgcctgctccgcgccctcctcctggccctcgtctatggacagtacgtcggtgcagcccacctcgccgttttccagcttttggccaaggcgtttcaggctgtctatggcgtatcgggagcggaaggccatctcaaagagtttgccctgcgccgcctccatgcgcattgcgtactccgcctcctgccctttggagagcagcggaactttgcctacggtgttcaggtag

SEQ ID NO: 38700 - protein, 198 aa, Unknown
  Obtained from environmental sample
  misc_feature (1)..(198): Xaa is any amino acid
MPSCIRSIISMPRVMYFLAILTTKRTLASITAHFAWLRASSSRENFSMSATRLSDASSSLYLSKISSTCLALSPMPLHISMVSSHNLSNSFPPAPVRSKSVMASYLSSTMESVRRNPSRFSSTSACSAPSSWPSSMDSTSVQPTSPFSSFWPRRFRLSMAYRERKAISKSLPCAASMRIAYSASCPLESSGTLPTVFR

SEQ ID NO: 38701 - DNA, 891 bp, Unknown
  Obtained from environmental sample
  misc_feature (1)..(891): n is a, c, g, or t
atggacaatatgttaagcagggcaaaaaaagcagaggcatatttaaaaaaagctggaaaattaacggaaaaatgtttgaaaaaatatattccaaacaaaaacgaggttccagccattttgcattctgcaatgcgttatgccttgttagctggcggcaaaaggcttagaccagctcttgcacaggcttcttatgaactttttggcggcaaaccatccgagtccattaatttggcaatgtcggcattagaaatgctgcacaccttctcgctgatacacgacgacctgccgtgcatggacgacgacgacttccgacgcggcaagcccacggcgcacaaggcgttcggcgaggcgctggccgttttgggcggcgacgccctctgcatatcggccttcgagacgctggcctccgtggggcggatagacatcatctcggagattgccgttgcactggggacaagcggcatgctcggcggtcaggtggtggacatagagtcggaggggaagaccgtggggcgggagaccgtggagtacatacacacgaacaaaaccgcggcactgataaaggcgtcaatacgagtgggggcgctattggccgacgcgccgccagacacattggaaaagctctcgtcctacgggagcaacgtcggcttggcgtttcaggtggtagacgacatacttgacgaagagggaaccaccgaatccttgggcaaggacgccggaagcgacgtcgagaagggaaaagcgacctatccggcggtagtgggtatggacgagtcaaaaaaatacgctcacgaattgatagaaaaagcatgggcggatattgcgttcttgggcgataagggaatcatactgaaagacttggcggagtacatacgggtcaggatttcgtaa

SEQ ID NO: 38702 - protein, 296 aa, Unknown
  Obtained from environmental sample
  DOMAIN (40)...(292): Polyprenyl synthetase
  misc_feature (1)..(296): Xaa is any amino acid
MDNMLSRAKKAEAYLKKAGKLTEKCLKKYIPNKNEVPAILHSAMRYALLAGGKRLRPALAQASYELFGGKPSESINLAMSALEMLHTFSLIHDDLPCMDDDDFRRGKPTAHKAFGEALAVLGGDALCISAFETLASVGRIDIISEIAVALGTSGMLGGQVVDIESEGKTVGRETVEYIHTNKTAALIKASIRVGALLADAPPDTLEKLSSYGSNVGLAFQVVDDILDEEGTTESLGKDAGSDVEKGKATYPAVVGMDESKKYAHELIEKAWADIAFLGDKGIILKDLAEYIRVRIS

SEQ ID NO: 38703 - DNA, 729 bp, Unknown
  Obtained from environmental sample
  misc_feature (1)..(729): n is a, c, g, or t
ttgacagattggccgagaatagttttgcaaacatttccttttcgcaggaacaaggagaaatcagagctattttgggaacatccggttgcggaaaatccacngcttttgaataatattcttgggcttgaaaaagcgatggcaggcgaaatagaaattttaggcacaagattaaaagctggcaaggaacaaatcccgctttctgtgcaaaaacgtatgggggttttgttccaaaacggcgcgctactgagttcactaactgtttttcaaaacgttgccctgccaattcgtctgcaccgccctaaaacacctgaatcagaagttagggatatggtggcaagccgattggaaaaggtgaatatgctccacgccatagacaaattgcctagcgaactcagcggcggaatgaaaaagcgagcggcactagcgcgagcaatagccctagacccagaactccttttttgcgatgagccaagcgcaggcctagaccccgttacaagccgtgccttagacgaccttttgctgtttttgagagataacttaaaactctcggttttaatagtaactcacgaattggattccattaaaacaatagcaaataaaattctatttttgaaaacaggaaatgttcttttggatgccgatttaaaaaccggattggaaagtgatatagaagaagtgagggagttcttcacaagaggagagagcaatagtggacataaaaaagattga

SEQ ID NO: 38704 - protein, 242 aa, Unknown
  Obtained from environmental sample
  DOMAIN (35)...(207): ABC transporter
  misc_feature (1)..(242): Xaa is any amino acid
MTDWPRIVLQTFPFRRNKEKSELFWEHPVAENPXLLNNILGLEKAMAGEIEILGTRLKAGKEQIPLSVQKRMGVLFQNGALLSSLTVFQNVALPIRLHRPKTPESEVRDMVASRLEKVNMLHAIDKLPSELSGGMKKRAALARAIALDPELLFCDEPSAGLDPVTSRALDDLLLFLRDNLKLSVLIVTHELDSIKTIANKILFLKTGNVLLDADLKTGLESDIEEVREFFTRGESNSGHKKD

SEQ ID NO: 38705 - DNA, 564 bp, Unknown
  Obtained from environmental sample
  misc_feature (1)..(564): n is a, c, g, or t
gtggacataaaaaagattgaagatggatttagacttattttagagggtttaggagaaaatccaaatagagaaggtttgcttaaaacgcctgagcgtgtggcgaaaatgtattcggaacttttaagcggattggattccaaagaaaatgaaaaagatattttggcaactcaatttgttgagaaatacgatgagatgattttgttaaaagatattccagttacaagtatatgcgagcatcattttttgccattcacaggtgttgcgcacgtagcttatgtaccaggcaatagaattgcagggctttcaaaattggcacgggcagttgatttttatgcgcaccgcccacaagtgcaagaaagattaaccacgcaaatagccgagcttattcaccgctcccttgaaccgctaggtgttggcgttgttatggagtgcgttcacacctgcatgacaattaggggcataaaaaaaacaggttccataatgttcacaagcaaactcattggtacatttaaaagcaatgctaccaccagagcggagtttatgtcgcttataggaaagaaatag

SEQ ID NO: 38706 - protein, 187 aa, Unknown
  Obtained from environmental sample
  DOMAIN (64)...(168): GTP cyclohydrolase I
  misc_feature (1)..(187): Xaa is any amino acid
MDIKKIEDGFRLILEGLGENPNREGLLKTPERVAKMYSELLSGLDSKENEKDILATQFVEKYDEMILLKDIPVTSICEHHFLPFTGVAHVAYVPGNRIAGLSKLARAVDFYAHRPQVQERLTTQIAELIHRSLEPLGVGVVMECVHTCMTIRGIKKTGSIMFTSKLIGTFKSNATTRAEFMSLIGKK

SEQ ID NO: 38707 - DNA, 372 bp, Unknown
  Obtained from environmental sample
  misc_feature (1)..(372): n is a, c, g, or t
atgtattatgaaaaaaattgcccctctagttcttttcgttgtttttacagcttttgcacaacaacaaaatacaacaccaccgacacataccccagtgccaacaccaccaataccactaccgcaagacacactaccagaaccagtagtgccactggtgccagctcaacctataccagaagaattagtaccgatagcaccgccacagctaccagcgtcaaccgacagtgcaagcgcagtgccagcacccacgccgctaccacaagacacaacacaacaggtagtaccaccaccaaccgacagcgcaagcatagtacctactcccgcaccaaaagacacacgcctccccctcccaaaaaccatcgttgccaatga

SEQ ID NO: 38708 - protein, 123 aa, Unknown
  Obtained from environmental sample
  misc_feature (1)..(123): Xaa is any amino acid
MYYEKNCPSSSFRCFYSFCTTTKYNTTDTYPSANTTNTTTARHTTRTSSATGASSTYTRRISTDSTATATSVNRQCKRSASTHAATTRHNTTGSTTTNRQRKHSTYSRTKRHTPPPPKNHRCQ

SEQ ID NO: 38709 - DNA, 381 bp, Unknown
  Obtained from environmental sample
  misc_feature (1)..(381): n is a, c, g, or t
atgaaaaaaattgcccctctagttcttttcgttgtttttacagcttttgcacaacaacaaaatacaacaccaccgacacataccccagtgccaacaccaccaataccactaccgcaagacacactaccagaaccagtagtgccactggtgccagctcaacctataccagaagaattagtaccgatagcaccgccacagctaccagcgtcaaccgacagtgcaagcgcagtgccagcacccacgccgctaccacaagacacaacacaacaggtagtaccaccaccaaccgacagcgcaagcatagtacctactcccgcaccaaaagacacacgcctccccctcccaaaaaccatcgttgccaatgaaatacatcactggtga

SEQ ID NO: 38710 - protein, 126 aa, Unknown
  Obtained from environmental sample
  SIGNAL (1)...(17)
  misc_feature (1)..(126): Xaa is any amino acid
MKKIAPLVLFVVFTAFAQQQNTTPPTHTPVPTPPIPLPQDTLPEPVVPLVPAQPIPEELVPIAPPQLPASTDSASAVPAPTPLPQDTTQQVVPPPTDSASIVPTPAPKDTRLPLPKTIVANEIHHW

SEQ ID NO: 38711 - DNA, 561 bp, Unknown
  Obtained from environmental sample
  misc_feature (1)..(561): n is a, c, g, or t
atgggtgataattatattgacattcaaaacctgactaaatccttcatggtcaggggcgaacgccttgaggtattaaaaggaatctccctgtccgtttcaaagggggacgtattcggaatcatcggtttgtcaggcgccggaaaatccactctggcgcgatgcatcaacaggatcgaaacgccggacgcgggccgcattaacataggcggcgtagatatgctgacgctttcaaagcgccgtctccttgaacagcgccagcgcataggcatgatctttcagaatttcaatctttttgagtctaaaaccgtttacaggaatatcgcgtatccgctggcaatccgcggcgtaaaaaaaactgaacgctcaaggcgcgtgcgtgaaatagcggaggttgtcggcctgcaggacaagctggacgcttacccggcaggactttccggcgggcagaaacagcgcgtgggcatcgccagggcgcttgcgaataacccggacattctgctttcggacgaggcgacaagcgcccttgatccgcagaccactttgagcatttggaactgctaa

SEQ ID NO: 38712 - protein, 186 aa, Unknown
  Obtained from environmental sample
  DOMAIN (35)...(185): ABC transporter
  misc_feature (1)..(186): Xaa is any amino acid
MGDNYIDIQNLTKSFMVRGERLEVLKGISLSVSKGDVFGIIGLSGAGKSTLARCINRIETPDAGRINIGGVDMLTLSKRRLLEQRQRIGMIFQNFNLFESKTVYRNIAYPLAIRGVKKTERSRRVREIAEVVGLQDKLDAYPAGLSGGQKQRVGIARALANNPDILLSDEATSALDPQTTLSIWNC

SEQ ID NO: 38713 - DNA, 378 bp, Unknown
  Obtained from environmental sample
  misc_feature (1)..(378): n is a, c, g, or t
atgacagatgggccgagaagaggaactgcggacgccgacgtagtcgtggtttcatacggcataacttcgcgcgttgcgataaaagcgattcagtcggcgcgggaaaacggaatcaaggtcggtcatctccgcctgataacggtctggccgttccctgaaaaacgtctccgcacgcttgcctcgcacgtcaaggcgtttatcatgcctgaattgaatctggggcaggtgtatctggaaatgcagcgctgcattgaaggacgggcggcgacatatctgattccccacgcgggcggaaccgtacacgacccggacggcatatatcagaagattgtttacgcggccagacacccgcgcgtaaagaaggagacgccaaaatga

SEQ ID NO: 38714 - protein, 125 aa, Unknown
  Obtained from environmental sample
  misc_feature (1)..(125): Xaa is any amino acid
MTDGPRRGTADADVVVVSYGITSRVAIKAIQSARENGIKVGHLRLITVWPFPEKRLRTLASHVKAFIMPELNLGQVYLEMQRCIEGRAATYLIPHAGGTVHDPDGIYQKIVYAARHPRVKKETPK

SEQ ID NO: 38715 - DNA, 927 bp, Unknown
  Obtained from environmental sample
  misc_feature (1)..(927): n is a, c, g, or t
ttgccaaacggcttaacgctttctgtcgtaggagtaatttcaggaacgccgacaacgtttggtgcatctaatttcacggtcaaagcaactaatttcgcaggtaacaacaacaacacaaaatcgctaagtattacaattcggcttgttgaaatggtttcgatatccgccggaactttttctatgggggaaacaaatcttgcgaaacctgttcattctgtaacgcttagcgcttttaaaatgggcaagtatgaggtaacacaggaactgtatcaggcggttatgggaagtaatccgagttcttttgacggtagtaaaagcagagaacctgctgcaggtgaaacacaaggcaaacgaccggtggagcttgtaagttggtataacgcattggtattctgcaacaagttgagcataaaggaaggattaactccggcgtacagcattagcggcagtaccgatcctacagtatggggaacagtaccgacaagcagtaatgcaacatgggatgctgtaacaatcgttgccggttctaacggttatcgtttaccaaccgaggcgcagtgggagtatgcatgccgcgcggggacgacgacaaactataacacaggaagtaatgtgattagcgacaatacagggtggtattccgataacagcggaagtaagacacatgaggtaggaaagaaacccgcaaacagatgggggctgtacgacatgcccgggaatgtgcaagaatggtgttgggactggtatggttcttattcgagcgagtctcagactgacccgaccggagcgtttaccgggtctctccgggtggtacgcggcggtagctgggtcgattcagccgcttgcctgcgttccgtgttccgggataacgcctacaacccgaacgtccgggacagaagcgtcggtttccggcttgtccgcccctag

SEQ ID NO: 38716 - protein, 308 aa, Unknown
  Obtained from environmental sample
  SIGNAL (1)...(21)
  DOMAIN (47)...(307): Domain of unknown function (DUF323)
  misc_feature (1)..(308): Xaa is any amino acid
MPNGLTLSVVGVISGTPTTFGASNFTVKATNFAGNNNNTKSLSITIRLVEMVSISAGTFSMGETNLAKPVHSVTLSAFKMGKYEVTQELYQAVMGSNPSSFDGSKSREPAAGETQGKRPVELVSWYNALVFCNKLSIKEGLTPAYSISGSTDPTVWGTVPTSSNATWDAVTIVAGSNGYRLPTEAQWEYACRAGTTTNYNTGSNVISDNTGWYSDNSGSKTHEVGKKPANRWGLYDMPGNVQEWCWDWYGSYSSESQTDPTGAFTGSLRVVRGGSWVDSAACLRSVFRDNAYNPNVRDRSVGFRLVRP

SEQ ID NO: 38717 - DNA, 777 bp, Unknown
  Obtained from environmental sample
  misc_feature (1)..(777): n is a, c, g, or t
atgcggaacaagcttaccgacgaactggcagtctgcggcctgaaagcggcccttgcccttgccgaatttcatcctgaaaccatcaaccgtctttttgtgcgggaggatcgttttccgctgtttaccaaaacatgcaaaaaactcgcggaacgcaagcgcccctataaaatatgcgagaacgaagaactggaacgcctgtgcaaaacagtccaccatcagggcgtggtaatgatgattgaagaaccggaaattgaacctttaaccagggaagacctggaattttgggcagatgagggcaagacaggcctcgtgcttcacgaggttggtaacgaccataattttggcgccattgccagggctgcggcttttttcgacgtgcatttcatcgtgctgaacgaaaacgacgaggaagcgcggctgactaccagcgcctaccgcgtcgccgaaggcggcatggaacatgtcatcgtgcggaagataaacaacacggcaggatttttgaaagacgcggcaaaaagaattcttgtcatcggaaccgacacccgcgcacggcggcgcatcgacgatctttccggcattgcgaaagattgggccgggcaaaacggagtgaaacggcccggagtagcccttgcgcttgggaacgaggaaagcggccttccgcaaaacataaaagacaactgctcctgcctgcttcgcgttcccggaacgggcaatatcgaaagccttaatgtcgcccaggcggcggctctttttttaagagagatttacgagctataa

SEQ ID NO: 38718 - protein, 258 aa, Unknown
  Obtained from environmental sample
  DOMAIN (10)...(85): RNA 2'-O ribose methyltransferase substrate binding
  misc_feature (1)..(258): Xaa is any amino acid
MRNKLTDELAVCGLKAALALAEFHPETINRLFVREDRFPLFTKTCKKLAERKRPYKICENEELERLCKTVHHQGVVMMIEEPEIEPLTREDLEFWADEGKTGLVLHEVGNDHNFGAIARAAAFFDVHFIVLNENDEEARLTTSAYRVAEGGMEHVIVRKINNTAGFLKDAAKRILVIGTDTRARRRIDDLSGIAKDWAGQNGVKRPGVALALGNEESGLPQNIKDNCSCLLRVPGTGNIESLNVAQAAALFLREIYEL

SEQ ID NO: 38719 - DNA, 615 bp, Unknown
  Obtained from environmental sample
  misc_feature (1)..(615): n is a, c, g, or t
ttgcctgatgataatgttactcccgagttccgctctgctcctgaaactccgggtgaaaatacagttacagtagaaccttccggtcagggggataagacaggctcacaaaccacagatgataagccggtggtacaacagacaacgacacagccgaacacaaatcaacaaacacagacacaaacgactccggctgtacagacaagggaacgtaacatttatttcacccaaattaataaggacggacagattctgcaatcaagagtaacccgaaggatacctgtttcagacactcccatgcaagatgcattgaatacaatgctgacaggtccttctgcggatgaaataaacaagggtattctgaatattattccgaaaaatacacggatactttcagccgcagtacgaggcagtacggcttatatcaatttcagcgaagattttatgttcaacacattcggtgttgaaggatatgtagcccagttgaggcagattgtctggactgttaccgaattttcaaatataaatgatgtacaaatactgatcgaaggcagaaggatggattatctgggcgaaggtatctatataggaagtccgattaaccgtcaatccttttga

SEQ ID NO: 38720 - protein, 204 aa, Unknown
  Obtained from environmental sample
  misc_feature (1)..(204): Xaa is any amino acid
MPDDNVTPEFRSAPETPGENTVTVEPSGQGDKTGSQTTDDKPVVQQTTTQPNTNQQTQTQTTPAVQTRERNIYFTQINKDGQILQSRVTRRIPVSDTPMQDALNTMLTGPSADEINKGILNIIPKNTRILSAAVRGSTAYINFSEDFMFNTFGVEGYVAQLRQIVWTVTEFSNINDVQILIEGRRMDYLGEGIYIGSPINRQSF

SEQ ID NO: 38721 - DNA, 1158 bp, Unknown
  Obtained from environmental sample
  misc_feature (1)..(1158): n is a, c, g, or t
ttgagggggcttatcaagttggaaaatattgatcttgtacggcagacggttgaaaggctcaaacctgtagctgttaagctgagcgatgagcttgcggcggcccccgagctttcgggtgaggagtatgaggcaagcaggaaaatagccggaattttggaaaaggccggctttacggttgaatatccgttcgatggcttggaaacagcgttcaaggccgtgcttgacaacggcgcagggccatcagtggcgcttatggtcgagtacgacgcgctgccaggaattggtcatggctgcgggcataatctgcacggggcgatgtcggttctggccgccctggcgttggctgatctaaaaaaactattcaccggtaagctgtacgttatcggcactcctgacgaagagaaaaaaggctccaaaatcaaaatggcgtctgacggcgtttttgacggcatggacatcgccatgatgatacactgttcagcgggaatatcattgccggtcaagcgttttttatcactgaaggactgcaattttacgtttaccgggcaaaccgctcatgcctccgcctgcccgtggaatggccgaaacgctttgacagcggtcagaaaattcctcgacctgcttgacgcgcggcgcgaaagctatacgcccgatatgcgggtaagctctgtcatagaatacggcggggaaactccgaatgtgattcctgaaacggcggtggtaaaggttgagtatcgcgctgaaacggtggcagggttgaaaaaagtcgaggatattatgtttaagtgcgcgaaaggcgcgtcaattgcgcttgaatgtgatattaattgggaatttgattctcctgttggttatcttgatctcataccaaacgatacgattgaaaaagccgtgagtgttatatttgacagcctaggtataagctttaagacgaatctgccgcccaccggttcttcggatgttggaaatgtgagttatagttgtcctgtatcgcacccgtatttggctattgccgatgaacctgtaaattctcacactgttgatttcgctgccgctactcanaagccgcttgcatatgaacggctcgcgacaggagccagggctttggcgcatctggcgttacggacatggaatgacgcggatttccaaacgccatga

SEQ ID NO: 38722 - protein, 385 aa, Unknown
  Obtained from environmental sample
  DOMAIN (168)...(272): Peptidase dimerisation domain
  misc_feature (1)..(385): Xaa is any amino acid
MRGLIKLENIDLVRQTVERLKPVAVKLSDELAAAPELSGEEYEASRKIAGILEKAGFTVEYPFDGLETAFKAVLDNGAGPSVALMVEYDALPGIGHGCGHNLHGAMSVLAALALADLKKLFTGKLYVIGTPDEEKKGSKIKMASDGVFDGMDIAMMIHCSAGISLPVKRFLSLKDCNFTFTGQTAHASACPWNGRNALTAVRKFLDLLDARRESYTPDMRVSSVIEYGGETPNVIPETAVVKVEYRAETVAGLKKVEDIMFKCAKGASIALECDINWEFDSPVGYLDLIPNDTIEKAVSVIFDSLGISFKTNLPPTGSSDVGNVSYSCPVSHPYLAIADEPVNSHTVDFAAATXKPLAYERLATGARALAHLALRTWNDADFQTP

SEQ ID NO: 38723 - DNA, 804 bp, Unknown
  Obtained from environmental sample
  misc_feature (1)..(804): n is a, c, g, or t
atgctgacaaagggagtcggcgacgctcttaatatggcgcgcgatttgcccattggcgaggacgatgtaacagtcgccgccggaggggacggaacctgcaacgaagttgtaaacggtttgttaacacgccgcatgcaaacccctccggtttttgggatcctccccattggcaggggcaatgatttttcctctacgccgggtatttctcaggatgtcgaaaaagcccttcaattgctcattgcgggaaatataaaaccgctggacgcgggttttgtaaagggcggctttttccctgacggacgctattttattaacggagttggcatcggttttgataccaaggtcggttttgaggctgcgaaattgagaataaaaagcggcatttcctacgctatcggcgccatcattacccttatccgctacgatccttcgcccgtattgcagatccgttatgatgataacgaagtaacgcttccggcggcgattgtttcgattgtaaacggaaggcgtatgggcgggagtttctacatggggccgtacgccctgcttgacgacgggctcctggacatctgttatgcgcggcatcgaaaatcgcgtttagatattcttaaattggtttctcattatgcaaaaggagcccagggcgaatgttatgaagtaactcatggcagggggcggcattttcatctgaaggcgcttgagggcggaatggcggcgcactgtgacggggaaactgtctgttacgacggcaaggaactggagataacctgtatcccgaacgccctgcggcttatagaggcgtaa

SEQ ID NO: 38724 - protein, 267 aa, Unknown
  Obtained from environmental sample
  DOMAIN (2)...(95): Diacylglycerol kinase catalytic domain (presumed)
  misc_feature (1)..(267): Xaa is any amino acid
MLTKGVGDALNMARDLPIGEDDVTVAAGGDGTCNEVVNGLLTRRMQTPPVFGILPIGRGNDFSSTPGISQDVEKALQLLIAGNIKPLDAGFVKGGFFPDGRYFINGVGIGFDTKVGFEAAKLRIKSGISYAIGAIITLIRYDPSPVLQIRYDDNEVTLPAAIVSIVNGRRMGGSFYMGPYALLDDGLLDICYARHRKSRLDILKLVSHYAKGAQGECYEVTHGRGRHFHLKALEGGMAAHCDGETVCYDGKELEITCIPNALRLIEA

SEQ ID NO: 38725 - DNA, 672 bp, Unknown
  Obtained from environmental sample
  misc_feature (1)..(672): n is a, c, g, or t
ttggaaggaaacggcgtaacaattactaaaagcggtgaatttcctccttatgaagcaagtaacaattcatattcctccctgttctatttaaacggaagaaatatcacggtaaaaatccgccgtgttcacttcaatggtggcgaagcttattccggaggagctgtttatatttatggctcggatcttgttttggaatcatgtatattaagcgaaaataaagcagatggtaacggcggcgctgttaatatttcatttggaaacctggaaattaaaggttgtacattttatgggaacagcgcggtaggatcaggcggcgctgtttattacggcggcggaaatatatctattggcgggaatctgttttatggaaataccggaaaagaacaaccgataattaatccggacggcaacggatatttatattcccttggctgcaatgtggtagatgtgccatttctgcctgaaaatataaattgcggctggtaccaggaagaaggcgacatatatacaacaagtcaaattgtaacggaaaaaacatttaagcttcttccggaaagcgatgcggcgaaaataatcaaaaaaataccggaaaattatccaaccattgatttttacggtaatcccattaacgaaagcgcggcggccggcgctgtacaggaaacggcgcaataa

SEQ ID NO: 38726 - protein, 223 aa, Unknown
  Obtained from environmental sample
  misc_feature (1)..(223): Xaa is any amino acid
MEGNGVTITKSGEFPPYEASNNSYSSLFYLNGRNITVKIRRVHFNGGEAYSGGAVYIYGSDLVLESCILSENKADGNGGAVNISFGNLEIKGCTFYGNSAVGSGGAVYYGGGNISIGGNLFYGNTGKEQPIINPDGNGYLYSLGCNVVDVPFLPENINCGWYQEEGDIYTTSQIVTEKTFKLLPESDAAKIIKKIPENYPTIDFYGNPINESAAAGAVQETAQ

SEQ ID NO: 38727 - DNA, 465 bp, Unknown
  Obtained from environmental sample
  misc_feature (1)..(465): n is a, c, g, or t
atgagcggcagtggcaacggcagaggaggagataaccggggaaaccggagaaaacctttcaagcgccgggatcgggaaaacaaccaatcacgagcccgcgatgtttcaaaaagcggcggaaaaaaaccggctgatttttttcccatcaatgaaggcaaacttgaaagacggcggggaggtttgtttgaccgtcccaaatgggtcccgccggtaccgccttccgaacctttgccagccgcttcctgcgcctggtgcgataagcccatcaaagacatttcccttgccatttccgaacctgacaccggggaaaccgtacattttgaatgtgtaataaaccgaatcattgaacgagaaaatcttgaaaacggcgacacggtaagttatatcggcggcgggagttttggcattgttcattttaacaaccctcctgataccagagattttcaacataaagaaaatctttga

SEQ ID NO: 38728 - protein, 154 aa, Unknown
  Obtained from environmental sample
  misc_feature (1)..(154): Xaa is any amino acid
MSGSGNGRGGDNRGNRRKPFKRRDRENNQSRARDVSKSGGKKPADFFPINEGKLERRRGGLFDRPKWVPPVPPSEPLPAASCAWCDKPIKDISLAISEPDTGETVHFECVINRIIERENLENGDTVSYIGGGSFGIVHFNNPPDTRDFQHKENL

SEQ ID NO: 38729 - DNA, 867 bp, Unknown
  Obtained from environmental sample
  misc_feature (1)..(867): n is a, c, g, or t
atgtcaaaattcaacggtaaggcgctattgccggcaagtttcgtttggcattggctgctcccggccaccgtcgtcgatccgcatacgcccgcgatgtttatgcagcaggtacgcaagtacttcttcccccacaatccccgcggcgacgtcccggtggggcagatatcgttgcgggtaaacgaggtgtgcaacctgcggtgcggctcgtgcgggcagtggggcgagaacgggcacctgcgcaaaaaactagaacgcggggagaagctctgccaactcgacttcgacacggtgaagcgcgtggtcttcgagacgcggcgcgacaagccgttctactacgtgtggggcggcgaacccacgatgtggaaaccgctcctgccgttctttcaagagctagccagacaaaaattacgcgggtctatagtcacgaacgcgcaagacttggacaagattcttgaagacttgattgataccggcgcgttgtcgatactctttctgagcctcgacgggtgggacagcgcctcccaaaacattatgcgagcgccggccggcggcggcgcctcggacaacttcgagaagacgatggccgtcatggagaagacgagggctatcaaggagaggaaggggcttaagtaccctatggtgatccctatcaccgtcatatccaacgccaactactcccacctcacggagatacaccggctggtgctggacaaggcgcaactccacccattctacttcggctggttcatcacagaggaacgcgccgccgcgcacgagaagatcttcgaggcgcgctttgggcacaagccccaaaagcacttggggtacctaaagagctgttcaacgacgtcgacccggaagcggtag

SEQ ID NO: 38730 - protein, 288 aa, Unknown
  Obtained from environmental sample
  DOMAIN (57)...(235): Radical SAM superfamily
  misc_feature (1)..(288): Xaa is any amino acid
MSKFNGKALLPASFVWHWLLPATVVDPHTPAMFMQQVRKYFFPHNPRGDVPVGQISLRVNEVCNLRCGSCGQWGENGHLRKKLERGEKLCQLDFDTVKRVVFETRRDKPFYYVWGGEPTMWKPLLPFFQELARQKLRGSIVTNAQDLDKILEDLIDTGALSILFLSLDGWDSASQNIMRAPAGGGASDNFEKTMAVMEKTRAIKERKGLKYPMVIPITVISNANYSHLTEIHRLVLDKAQLHPFYFGWFITEERAAAHEKIFEARFGHKPQKHLGYLKSCSTTSTRKR

SEQ ID NO: 38731 - DNA, 795 bp, Unknown
  Obtained from environmental sample
  misc_feature (1)..(795): n is a, c, g, or t
gtggaacaagagaagctccacaaggtcgtgttgaacccgtcaacgatcaaagacgttgcgggacggcctcttactaataagaagccgagctcgttctacgtctatctgcctaaggtcaggccgcacgccaagtgggatcgcgggttcggaatagtggagcggctcggccctcagcagtttccgataacgacggcgggccttacgagcttggacttcagggtgtacaaaatagacccgctgcacacggccttcggcgacttcccgtccgctcaagtcgaggtgagcgaaacgtccatgccgccggggcccggcgaagaacccgcctcaatggattcgaagtacggcgagagcgggcgctggaattatccgtcttacgtcgaaaagcacataagaatgctcggcagcccgcactattcgggaatcgcggacgtcgacaaagggggaacgggcaggatcaagagcgtagacctgaagccgatgttcgccgccgtcagcggcaaggacaagccggggacgtacctcgtaggcttcaggctgctcgacggggcgcagaagcggtactacgctaaggtgactgtgaccgatttatgcctaagcgcggcggagtcgaggtcgaacggcagcaacaaagtggtgttcgccgtcacgagctactcgaacgacaagcccgtggccgacgcggcgataaggatagacggactgatagacggcgagatgacgacgctcgcgcgcggcaagacgggggcggacggggttttcgtcttcgagcacacgaaggcgaccgccgagagctga

SEQ ID NO: 38732 - protein, 264 aa, Unknown
  Obtained from environmental sample
  misc_feature (1)..(264): Xaa is any amino acid
MEQEKLHKVVLNPSTIKDVAGRPLTNKKPSSFYVYLPKVRPHAKWDRGFGIVERLGPQQFPITTAGLTSLDFRVYKIDPLHTAFGDFPSAQVEVSETSMPPGPGEEPASMDSKYGESGRWNYPSYVEKHIRMLGSPHYSGIADVDKGGTGRIKSVDLKPMFAAVSGKDKPGTYLVGFRLLDGAQKRYYAKVTVTDLCLSAAESRSNGSNKVVFAVTSYSNDKPVADAAIRIDGLIDGEMTTLARGKTGADGVFVFEHTKATAES

SEQ ID NO: 38733 - DNA, 1407 bp, Unknown
  Obtained from environmental sample
  misc_feature (1)..(1407): n is a, c, g, or t
gtgatcataaacggaaaggccgcaacatcagtaaggtattctcccggcgcgaaaaaagacatactctatattttcgagcctgttattatgtctggctttgaaacaaccccctggtccctgtcattaggcatccccgtagaggatataaacaggccgattaataccatgataaggtttgtcattgtcttcgtttttatccttctggcattagcagtggttattaccctgttagtcgccaacggcattgttaaaccgattctcggcgtaaccgccacgttaaaggacatatccgaaggcgaaggagatctgacgcggactgtcgccatcacttctaaagacgaggttggcgaccttgccgcatactttaacaagacgcttggaaaaatcaaagatctggtacttatcattaaaaagcaggcgcacatgttgtcagatatcggcaacgatctgtccagcaacatgaccgaaaccgctgcggcgataaaccaaatcaccgccaacatccagagcatcaaaaaccgcgtcataaaccaaagcgccagcgttaccgaaaccaacgccactatggaacaggttatcgccaacatcaacaaactcaatgatcatgttgagaaccagagccgcaatgtttcccaggcttcatccgccattgaggaaatggtagccagtatcagttcggttaccagcacgctggtcaacaacgccgccaatgtaaatacgctaaaagaagcctccgaagtgggccgcggaggattgcaggatgtggcaacggacattcaggaaatagcccgcgagtcggaaggcctgctggaaattaacgcggtaatggaaaacatagccagccagaccaaccttctttcgatgaacgccgcgatagaagcggcccacgcgggggaattgggcaagggttttgccgtagtggccgatgaaatccgcaagctggcggaaagttccggcgaacagtccaagaccatcagcactgttctgaaaaagataaagagttccatcgacaagataatgcaatccaccgacaacgttctgaacaagttcgaggcgattgacacgggcgtaaagacggtgtcgcagcaggaagaaaacatccgcaacgcgatggaagaacagggcgagggaagcaaacaggttcttaaaagcgcaaacagtttaaacgagcttacccagcaggtaaagaacggttccgaggaaatgctgagcggcagcaaagaggtaataaccgaaagccgtaaccttgaaagggtaacgcaggagattaccggcagcatgaacgaaatggcgtcgggagcggagcaggtgaatgtcgcggtaaaccatgtcaacgatataagcaacaagaaccataaagccattgaaaacttgatggaggaagtctcgcgctttaaggtagattga

SEQ ID NO: 38734 - protein, 468 aa, Unknown
  Obtained from environmental sample
  DOMAIN (204)...(433): Methyl-accepting chemotaxis protein (MCP) signaling domain
  misc_feature (1)..(468): Xaa is any amino acid
MIINGKAATSVRYSPGAKKDILYIFEPVIMSGFETTPWSLSLGIPVEDINRPINTMIRFVIVFVFILLALAVVITLLVANGIVKPILGVTATLKDISEGEGDLTRTVAITSKDEVGDLAAYFNKTLGKIKDLVLIIKKQAHMLSDIGNDLSSNMTETAAAINQITANIQSIKNRVINQSASVTETNATMEQVIANINKLNDHVENQSRNVSQASSAIEEMVASISSVTSTLVNNAANVNTLKEASEVGRGGLQDVATDIQEIARESEGLLEINAVMENIASQTNLLSMNAAIEAAHAGELGKGFAVVADEIRKLAESSGEQSKTISTVLKKIKSSIDKIMQSTDNVLNKFEAIDTGVKTVSQQEENIRNAMEEQGEGSKQVLKSANSLNELTQQVKNGSEEMLSGSKEVITESRNLERVTQEITGSMNEMASGAEQVNVAVNHVNDISNKNHKAIENLMEEVSRFKVD

SEQ ID NO: 38735 - DNA, 588 bp, Unknown
  Obtained from environmental sample
  misc_feature (1)..(588): n is a, c, g, or t
atggctttatggttcttgttgcttatatcgttgacatggtttaccgcgacattcacctgctccgctcccgacgccatttcgttcatgctgccggtaatctcctgcgttaccctttcaaggttacggctttcggttattacctctttgctgccgctcagcatttcctcggaaccgttctttacctgctgggtaagctcgtttaaactgtttgcgcttttaagaacctgtttgcttccctcgccctgttcttccatcgcgttgcggatgttttcttcctgctgcgacaccgtctttacgcccgtgtcaatcgcctcgaacttgttcagaacgttgtcggtggattgcattatcttgtcgatggaactctttatctttttcagaacagtgctgatggtcttggactgttcgccggaactttccgccagcttgcggatttcatcggccactacggcaaaacccttgcccaattcccccgcgtgggccgcttctatcgcggcgttcatcgaaagaaggttggtctggctggctatgttttccattaccgcgttaatttccagcaggccttccgactcgcgggctatttcctga

SEQ ID NO: 38736 - protein, 195 aa, Unknown
  Obtained from environmental sample
  SIGNAL (1)...(22)
  misc_feature (1)..(195): Xaa is any amino acid
MALWFLLLISLTWFTATFTCSAPDAISFMLPVISCVTLSRLRLSVITSLLPLSISSEPFFTCWVSSFKLFALLRTCLLPSPCSSIALRMFSSCCDTVFTPVSIASNLFRTLSVDCIILSMELFIFFRTVLMVLDCSPELSASLRISSATTAKPLPNSPAWAASIAAFIERRLVWLAMFSITALISSRPSDSRAIS

SEQ ID NO: 38737 - DNA, 429 bp, Unknown
  Obtained from environmental sample
  misc_feature (1)..(429): n is a, c, g, or t
ttggaggggaacatgaaaaaagcacccgtaccgccgctcatggactattttaagggtatcaaagaccccagaatagaacggaataaaatctatccgcttgtcgaggtcatcgacattaccatcctggctatcatggccttcgcagaaggatgggaggatatcgaaacctacggccttgctaaaaaggcatggcttaaaaagtttcttcctttgaacaacggcatacccaaacatgatgtataccgccgggtcttcaactgtttgcatccacagaccatagaacaatgttttatggcgtgtgtaagggatattaaacaggatactactcatgaaatcatccccttctatggtaaaattattttcgggggagtttttactcccaattgggaaccttcccctcttccccttgtgagtgcctggtctgcataa

SEQ ID NO: 38738 - protein, 142 aa, Unknown
  Obtained from environmental sample
  misc_feature (1)..(142): Xaa is any amino acid
MEGNMKKAPVPPLMDYFKGIKDPRIERNKIYPLVEVIDITILAIMAFAEGWEDIETYGLAKKAWLKKFLPLNNGIPKHDVYRRVFNCLHPQTIEQCFMACVRDIKQDTTHEIIPFYGKIIFGGVFTPNWEPSPLPLVSAWSA

SEQ ID NO: 38739 - DNA, 591 bp, Unknown
  Obtained from environmental sample
  misc_feature (1)..(591): n is a, c, g, or t
ttgcgggatgccgttttgccgggcgttgtgcgccggagggctgattttgtcttgatcgcgaaggcagatgcgatgctgaccacgacattgactgccgtttggaaagatgcgccgttggggagaaaaaggtggaagcgcctgctggaaggactcggcgttaccgaggccgacgaggctcctttgcctgttgaacgtattttggacatcaacggcctggacgatgccttgtgggcgctccgctccttggaggtatatacccgcgccgcccggctgttcgcctgtaattgcgcgaaactcgccttgcctgtttttgagagggcatacccaaaggacaagcggccgcacctggccgtggaaacagcggaactcttcgcccagggcgagacaacggcggaaaagctggcggatgcggaaaaagccgccgaagcggccgtcaatgccgccgaacaagccaaggcgcgggaatccgtgagacttgcggcaaaaagcgcggcctgcgccgcgcagcgggagattgaaatagagcgtttcaactttgaaacgctctatgcaagccgtgcttcagcatggcttgccgccgcgcaggcgtag

SEQ ID NO: 38740 - protein, 196 aa, Unknown
  Obtained from environmental sample
  misc_feature (1)..(196): Xaa is any amino acid
MRDAVLPGVVRRRADFVLIAKADAMLTTTLTAVWKDAPLGRKRWKRLLEGLGVTEADEAPLPVERILDINGLDDALWALRSLEVYTRAARLFACNCAKLALPVFERAYPKDKRPHLAVETAELFAQGETTAEKLADAEKAAEAAVNAAEQAKARESVRLAAKSAACAAQREIEIERFNFETLYASRASAWLAAAQA

SEQ ID NO: 38741 - DNA, 837 bp, Unknown
  Obtained from environmental sample
  misc_feature (1)..(837): n is a, c, g, or t
ttggccgagggaccggcggcaagaggccatcgacaaagccattttgccggcgcttgttttggcatggaaaaaatgatgggacgcaccgacacacctgtacgcgccatgttcgatgaaggcctgcgccttgccagcggaatgttaccccccgtgttatacgctcttaccgtgataagcgcccgaagcgaaaccgagacagcaaacagcggcttgccggacaagccatgtttacctaaaggttctcttgccctgcgggggctgttctgcggttttggccgcgcttgttttgaagaggcagccgcccttgcccggcaggtaaacgttgaccttttggacgaacctatacacaaggcggttgtataccttgaacctgaagagttccgcaccacatggcttgggaacaaggccgtttacagaacccgcatggcaatggccgacaaaggcgaactgttgattatcgcgcccggccttgaacgtttcggcgaggacatgggcatagacgcgctgatccgcaagcacggctaccggccttcaaaagttatcagagaaaaaatcggcaaggacgcagaactggcaaacaacctcagcgccgcggcccacctgatccacggttccagcgaagaacgcttcaccgtccgctattgccccgggccgggtttaagccgacaggaaatcgaatccgtagggtttgaatggggcgatattggcgagacgtctgctcgctacgatgtgcgtaaactagcaactggctggaacaccaacgctgatggcgaacggtttttctttgtgccgaatccggcgcttggcctgtgggcgctgagggatactttcaactaa

SEQ ID NO: 38742 - protein, 278 aa, Unknown
  Obtained from environmental sample
  misc_feature (1)..(278): Xaa is any amino acid
MAEGPAARGHRQSHFAGACFGMEKMMGRTDTPVRAMFDEGLRLASGMLPPVLYALTVISARSETETANSGLPDKPCLPKGSLALRGLFCGFGRACFEEAAALARQVNVDLLDEPIHKAVVYLEPEEFRTTWLGNKAVYRTRMAMADKGELLIIAPGLERFGEDMGIDALIRKHGYRPSKVIREKIGKDAELANNLSAAAHLIHGSSEERFTVRYCPGPGLSRQEIESVGFEWGDIGETSARYDVRKLATGWNTNADGERFFFVPNPALGLWALRDTFN

SEQ ID NO: 38743 - DNA, 828 bp, Unknown
  Obtained from environmental sample
  misc_feature (1)..(828): n is a, c, g, or t
atgccctctttcgcggtcgcgcgcgaaaggggaatttcgcttaacctgaacatggtgaacgagatcagcgcgaggacgccgaacctctgccgccttgccccggcgggcaagcaccatattcaggatctgcatttcgcggggggagtgtccgccgtcatgcgggagctgggcgatcttttgaacagagacgagcgtaccgtgacaggcaagacggttggtgaaaatatgcagagcgcaaatgtcaaaaaccgtgaggtaattcaaaagtacgcttcctctggtggccttgcggcgctgttcggcagccttgcgccagacggcgcggttgtcaagcgtagcgccgtaaaaaaagagatgctcgattttaccggaagggcaagggtgtttaacggcgaagaagccgcagtcgccgcgatatacaacggaaaaattgaagccggcgatgtggttgttatacgctacgaagggccttccggcgggcctggtatgcgcgagatgctccaggcgacctcggcaatcgccggtatgggccttgacgccgatgttgcgctgataacagacgggcgcttttccggcgcgactcgcggggcagccataggccacatttctcccgaagcagctgcgggcggcccgattgcttatgtggtcgagggcgataaaattcacattgatattgaacgaaatgccatctcattgcttgtgtccggtgaagaaatgcaaaagcgcatagaaaccattcgcttgagagcgccggaagctttaagcgggtacttaaagcgctacgcaaaagcagtcttatccgctgacaaaggcgcggtactgaattaa

SEQ ID NO: 38744 - protein, 275 aa, Unknown
  Obtained from environmental sample
  DOMAIN (1)...(275): Dehydratase family
  misc_feature (1)..(275): Xaa is any amino acid
MPSFAVARERGISLNLNMVNEISARTPNLCRLAPAGKHHIQDLHFAGGVSAVMRELGDLLNRDERTVTGKTVGENMQSANVKNREVIQKYASSGGLAALFGSLAPDGAVVKRSAVKKEMLDFTGRARVFNGEEAAVAAIYNGKIEAGDVVVIRYEGPSGGPGMREMLQATSAIAGMGLDADVALITDGRFSGATRGAAIGHISPEAAAGGPIAYVVEGDKIHIDIERNAISLLVSGEEMQKRIETIRLRAPEALSGYLKRYAKAVLSADKGAVLN

SEQ ID NO: 38745 - DNA, 507 bp, Unknown
  Obtained from environmental sample
  misc_feature (1)..(507): n is a, c, g, or t
gtgtataaaagcgttgatccaaaagtaaattttccgaagcttgaggaagaagtacttgcattttgggagaaaaacaaaatatttgagaaatcaatttcccagcgcgaggggaaagaggaatttgttttttacgacggccccccctttgctacgggcctgccccatttcgggcattttattccaagcacaatcaaagacatcatcccccgttatcagaccatgaaaggcaagaaggtagaacgccgcttcggctgggactgccacggtcttcctattgaaaacctaatagagaaagaactgaatcttaattccaaaaccgacatagaaaaatacggcgttgcgaattttaacgaagcctgcagggcggcggttttacgttacgtcaaagaatggcggcgtaccataacccggctgggacgctgggtggattttgataacgattacaaaaccatgaacccggactacatggaaaccatctggtgggtttgtaaatccctttgggaatag

SEQ ID NO: 38746 - protein, 168 aa, Unknown
  Obtained from environmental sample
  DOMAIN (17)...(168): tRNA synthetases class I (I, L, M and V)
  misc_feature (1)..(168): Xaa is any amino acid
MYKSVDPKVNFPKLEEEVLAFWEKNKIFEKSISQREGKEEFVFYDGPPFATGLPHFGHFIPSTIKDIIPRYQTMKGKKVERRFGWDCHGLPIENLIEKELNLNSKTDIEKYGVANFNEACRAAVLRYVKEWRRTITRLGRWVDFDNDYKTMNPDYMETIWWVCKSLWE

SEQ ID NO: 38747 - DNA, 1278 bp, Unknown
  Obtained from environmental sample
  misc_feature (1)..(1278): n is a, c, g, or t
atgagcgaatacattattgagggcggtgttccgctgaacgggaaaataaaggcaagcggcaacaaaaacgccgccctgccgtgtattgcggcggcgctgttaactgacgaacctgtcatattaagaaatatcccagagatagaagacgtgcaggtgatgcttgagatatacgtttcattgggaggaagtgtagaaaaccttgagcctaatacattccgtctgcggcttggcaatatcaccgattcaatggttcctgttgaacaggcaaggaagatcagggcgtcaatactgtttgccggcccgcttctggcgcaaaccggcaaggtgatgctgccgcctccaggcggggacgttatcggcaggcggagactggatacccattttctagctcttacggaactgggggcaaaagtaaaaacaaaagatactttcacctttaccgcaaagtcgctgacaggggccgatatttttctggatgaggcgtctgttaccggcactgaaaacgcaataatggcggcggtgcttgcaaagggaaaaacgatactcaccaacgcggcaagcgagccgcatgtgcaggatctttgcagtatgcttgttatgatgggcgcgcaaatagaaggcatcggctcanacatcctgactatcaccggggtaaaaaaactttccggctgtgattttacaataggggctgattacatggaggtaggttcttttatcgggcttgccgctgtcaccggaggagacctccacattgagggaatccgcccccaggatctgcgcccggcgaaaatcgcctttggcaaattgggcatttcctgggcgcatgagggaacaacaattcatgtcccgcaaaaacagccactagcagttaattgcgatttagggggcatgattcccaaaatagacgacgcgccatggcccggcttcccgcccgaccttaccagcattatcaccgttgtagccacgcaggtacagggaacggtgttaatccacgaaaagatgtttgaatcgcggatgttctttgtggacaagctcatcggcatgggcgcgcggatagtgttatgcgatccccaccgggccgttgtttcgggtcccgcgaggctgcacggctccgagcttaccagccccgatgtccgcgccggtatggcaatgctcatagccgccctctgcgccgaaggcaggagcgttatacgcaacgtctaccagatcgagcgcggctacgagcgcctggtagaaaggctgtccgccctgggagctcttgtaacaaagaacagttaa

SEQ ID NO: 38748 - protein, 425 aa, Unknown
  Obtained from environmental sample
  DOMAIN (6)...(414): EPSP synthase (3-phosphoshikimate 1-carboxyvinyltransferase)
  misc_feature (1)..(425): Xaa is any amino acid
MSEYIIEGGVPLNGKIKASGNKNAALPCIAAALLTDEPVILRNIPEIEDVQVMLEIYVSLGGSVENLEPNTFRLRLGNITDSMVPVEQARKIRASILFAGPLLAQTGKVMLPPPGGDVIGRRRLDTHFLALTELGAKVKTKDTFTFTAKSLTGADIFLDEASVTGTENAIMAAVLAKGKTILTNAASEPHVQDLCSMLVMMGAQIEGIGSXILTITGVKKLSGCDFTIGADYMEVGSFIGLAAVTGGDLHIEGIRPQDLRPAKIAFGKLGISWAHEGTTIHVPQKQPLAVNCDLGGMIPKIDDAPWPGFPPDLTSIITVVATQVQGTVLIHEKMFESRMFFVDKLIGMGARIVLCDPHRAVVSGPARLHGSELTSPDVRAGMAMLIAALCAEGRSVIRNVYQIERGYERLVERLSALGALVTKNS

SEQ ID NO: 38749 - DNA, 594 bp, Unknown
  Obtained from environmental sample
  misc_feature (1)..(594): n is a, c, g, or t
atggccgagggtctaggaaccgcggcgcgcggnaaaacccacaccgcccaatggtacacaaaaaatcacgccgacgcttgttatgtgctctttgttgaaggctcaacccgcgtccaactcctccgcgacatctgcgaagcccttactaacgcccgccccatcaccttcggcggctgccttgacctcatccataacgtctgcgccaaacgccataggctcatcatcatagacgaagccgacaagatgcctgtatcgtttcttgaactcgtccgcggtatcaacgaacgctgcaaagtacccatcatgctttccggcgaagaagccctcaaagccaaagtagaccgcgtcccccggctccgcagccgcatccgcaaccccgttgtgctttacgaacccatcggccccgtcgatgtcgccgccttctatggtctggcttgcgggatagagatcgaactggaaaccgccgaaaccctcaccaagcgcgcccacggcgcatggcgtgtcctcgtcaacgatgccctggccctcgcccgcatgggccgcacctccggcatcgccaccatcacccccgaaatgatcgggaaattgcagtga

SEQ ID NO: 38750 - protein, 197 aa, Unknown
  Obtained from environmental sample
  misc_feature (1)..(197): Xaa is any amino acid
MAEGLGTAARGKTHTAQWYTKNHADACYVLFVEGSTRVQLLRDICEALTNARPITFGGCLDLIHNVCAKRHRLIIIDEADKMPVSFLELVRGINERCKVPIMLSGEEALKAKVDRVPRLRSRIRNPVVLYEPIGPVDVAAFYGLACGIEIELETAETLTKRAHGAWRVLVNDALALARMGRTSGIATITPEMIGKLQ

SEQ ID NO: 38751 - DNA, 1140 bp, Unknown
  Obtained from environmental sample
  misc_feature (1)..(1140): n is a, c, g, or t
ttgttttgtaaaaaaatcaaaagaatacgatctgaacgaaggttcaatcatgataatggtattttctgccgcgcgttgttacataatgacgaggaaatgataaaggaagaagatcttatcgacgaattgcgtgaaattgtcggatatggcgaagcgcggcatatccataaccgtttaaaatcagaaaaacataaagttattgaaaaagaacttgtccagtttgactgcaatgacggcatagcggatactgaatatttcagacttactgaaaaagcaaaagaagaattccttgcagatattgattttattgataaagcaaaatacaaaggcaagaatttcatattggctaaaaatttatccgagaaaaaattgttttacagcgaaaaaataagggagcgaattaacgagctgacagaactgcttaacgaagataactttttaagtattcagaaacggctttcggagagcggaatgcgcaccggctttgcctgtatcttttcaggtcctccgggaaccggaaaaacggaaacagcgtatcagatagcgcgcaaaacaggcagggacataatgcttgtaaatattgctgatactaaaagcaagtggtttggggaaagcgagaagcgcattaaatccttatttgaccgctaccgaagcattgtaaagaacggcggccttgcgccaatcttgttttttaacgaagcagacgctgttttgggaaaacgcagggaattgtcacaatcgcgcagcggtcccgatcaaaccgagaacgcaattcagaacattattcttcaggaattggaaaaccttaacggcatccttatcgccacgaccaacatgacggttaaccttgacaaagcattcgagcgccgtttcctttataaaattgaatttgaaaaaccaaatacggaatcaagaattcaaatgtggaaaaattttattcccgcccttgatgaaaacgacgccgcaaaacttgcaggtaaatatgatttctcgggcgggcagatagagaacatagcgcgtaaaaataccgtttcctatatcttaaggggaacggatccaaatttttcaattctggaaagtttatgcaaagaagaattgctggaaaaacccgttgcaagaattgggttctgcagtgaataa

SEQ ID NO: 38752 - protein, 379 aa, Unknown
  Obtained from environmental sample
  DOMAIN (163)...(348): ATPase family associated with various cellular activities (AAA)
  misc_feature (1)..(379): Xaa is any amino acid
MFCKKIKRIRSERRFNHDNGIFCRALLHNDEEMIKEEDLIDELREIVGYGEARHIHNRLKSEKHKVIEKELVQFDCNDGIADTEYFRLTEKAKEEFLADIDFIDKAKYKGKNFILAKNLSEKKLFYSEKIRERINELTELLNEDNFLSIQKRLSESGMRTGFACIFSGPPGTGKTETAYQIARKTGRDIMLVNIADTKSKWFGESEKRIKSLFDRYRSIVKNGGLAPILFFNEADAVLGKRRELSQSRSGPDQTENAIQNIILQELENLNGILIATTNMTVNLDKAFERRFLYKIEFEKPNTESRIQMWKNFIPALDENDAAKLAGKYDFSGGQIENIARKNTVSYILRGTDPNFSILESLCKEELLEKPVARIGFCSE

SEQ ID NO: 38753 - DNA, 372 bp, Unknown
  Obtained from environmental sample
  misc_feature (1)..(372): n is a, c, g, or t
atggcaacgcgaaattttttctctgaggaattgagccgtttacggcaggatattttggcaatggcgaccagagtggaagaaaaccttggcaaggcgcttacggctttgcggacgcgtaacgcggaactggcaaaagaagtgcgcgccgatgattctgaagtggacgcgcttcaaataagaatagaagacgacgccgcgatagttatcgccacgcagcagcctgttgcgcgcgatttacgcgagatggtgacaatttttaagcttacaagcaacatagaaagaataggagatcatgccgtacatcttgcgcgcgccgcgaaaaatcttgccaaaaaacggcgattcgcttttcatgactcaggggcattttga

SEQ ID NO: 38754 - protein, 123 aa, Unknown
  Obtained from environmental sample
  DOMAIN (18)...(106): PhoU family
  misc_feature (1)..(123): Xaa is any amino acid
MATRNFFSEELSRLRQDILAMATRVEENLGKALTALRTRNAELAKEVRADDSEVDALQIRIEDDAAIVIATQQPVARDLREMVTIFKLTSNIERIGDHAVHLARAAKNLAKKRRFAFHDSGAF

SEQ ID NO: 38755 - DNA, 756 bp, Unknown
  Obtained from environmental sample
  misc_feature (1)..(756): n is a, c, g, or t
atgaacagtaaaaaaatagaagtaaacggccttgatctttattatggtgattttaaggccttgtcaaatatcaatttttcgcttacgaagcaggatgtggcggcgcttatcgggccttcaggctgcgggaaatcaacgtttatccgcattttaaaccggatgaacgatctaattccttcatgccgcataacaggcgaagtttttctggacggcaaggatatttacggaacgatggacgttacggaactgcgcagccgggtggggatggtgtttcaaaaaccaaatccatttaacatgagcgtgtttgataatgtcgcgtacgggaagcgaatgcagggcttaaaaaacaaaggacgcattgcggacatagtggaaatttcattgcgaaaggcggctctttgggacgaggtgaaggacaggctgaaaaaaccggcgcaggcgctttcaggcggacaacagcaaaggctctgtatcgcaagaacaatagcgatggagcctgaaattattttcaaggaagagccgacaagcgcgctggatccaatcgctacaggcagaatcgaagaattaataggcgagctaaaaaaagaattcagtattattcttgtaacacacgcaatgcatcaagcttccagagtcagtaataaaaccgctttttttcttttgggagaattgatagaatacaatgacacaagagaagtttttacgaagcctggagataaaagaacagaagattacatatcaggcaggtttggttaa

SEQ ID NO: 38756 - protein, 251 aa, Unknown
  Obtained from environmental sample
  DOMAIN (31)...(222): ABC transporter
  misc_feature (1)..(251): Xaa is any amino acid
MNSKKIEVNGLDLYYGDFKALSNINFSLTKQDVAALIGPSGCGKSTFIRILNRMNDLIPSCRITGEVFLDGKDIYGTMDVTELRSRVGMVFQKPNPFNMSVFDNVAYGKRMQGLKNKGRIADIVEISLRKAALWDEVKDRLKKPAQALSGGQQQRLCIARTIAMEPEIIFKEEPTSALDPIATGRIEELIGELKKEFSIILVTHAMHQASRVSNKTAFFLLGELIEYNDTREVFTKPGDKRTEDYISGRFG

SEQ ID NO: 38757 - DNA, 588 bp, Unknown
  Obtained from environmental sample
  misc_feature (1)..(588): n is a, c, g, or t
gtggcggacagcatcaagccaaacgcgcatacagccgtcgccgagttgcatgcctggggcatggacaccgttatgctcacgggcgatacgcaaaacgccgcacggagcatcgccggagaagcgggcatcgacacggtgatcgcggaactgcttccttccggcaaaaccgaggaaatcgcacggctccaaggcctcggcaggcgtgtgctgatggtgggcgacggcatcaacgacgcccccgccctggcgctggccgatgtggggatgtccgtgagcagcggtacggatacggccatggagtccgcggatatcgtcctcatgcgcggcgacctgcttgccgtgcccaccgccctgcaactcagccgcgccaccttccgcatcatcaggcaaaatcttttttgggccttttgctataacgcgctcggcattcccgtggctgccggcgtattgcatgcgttcttcggcggcccgctgctcaatcccatgctcgcagccctggccatggccttcagttccgtgtccgtagtaagcaacgccctgcgcctgcggacattcagaccccgcgccgtgacgcccggccgggcatga

SEQ ID NO: 38758 - protein, 195 aa, Unknown
  Obtained from environmental sample
  misc_feature (1)..(195): Xaa is any amino acid
MADSIKPNAHTAVAELHAWGMDTVMLTGDTQNAARSIAGEAGIDTVIAELLPSGKTEEIARLQGLGRRVLMVGDGINDAPALALADVGMSVSSGTDTAMESADIVLMRGDLLAVPTALQLSRATFRIIRQNLFWAFCYNALGIPVAAGVLHAFFGGPLLNPMLAALAMAFSSVSVVSNALRLRTFRPRAVTPGRA

SEQ ID NO: 38759 - DNA, 651 bp, Unknown
  Obtained from environmental sample
  misc_feature (1)..(651): n is a, c, g, or t
atggcattctccgcggatttgcccgcatatcttgaacccctcaacccggatcaaaggcgggctgtcctgcatacgggaaaccccctgttgattttggcaggcgccggatcgggtaaaaccagggtcattacaacaaaaatcgcgtggcttatacgggaaagaggcgtagcgccgcagtcgatactggccgtcacatttaccaacaaggcggcgcgggaaatggcggaacgcgcaaggggcattgacgaaagggcaggctatgccatgctcaggactttccattcattcggagcgtggttcctgaggcgcaacgggcattacggcggtcttgattccaattttacaatttatgacgatgacgacgttatttcctttctttctacaataatggaaggagcgcagaaagccgaagtaaaacgcgccgcgtataatatctccagggccaaggattattttattactccggaagacccgtcccttgctttaatcgacggccataaaaaattccgtgatatatacgcggaatatgaaaaaaggcttgcccgcacaggaaatgtggatttcggcgaccttataaaaaaaccctgtggagatactgagaaacgaacccgatgtcagcagacgtttcagggaagcggttttccgtcataa

SEQ ID NO: 38760 - protein, 216 aa, Unknown
  Obtained from environmental sample
  misc_feature (1)..(216): Xaa is any amino acid
MAFSADLPAYLEPLNPDQRRAVLHTGNPLLILAGAGSGKTRVITTKIAWLIRERGVAPQSILAVTFTNKAAREMAERARGIDERAGYAMLRTFHSFGAWFLRRNGHYGGLDSNFTIYDDDDVISFLSTIMEGAQKAEVKRAAYNISRAKDYFITPEDPSLALIDGHKKFRDIYAEYEKRLARTGNVDFGDLIKKPCGDTEKRTRCQQTFQGSGFPS

SEQ ID NO: 38761 - DNA, 855 bp, Unknown
  Obtained from environmental sample
  misc_feature (1)..(855): n is a, c, g, or t
gtgtgcgttttcaatactccgggtgcaaatgcaaatgctgtttcggagcttgttttcacggctttgggcattgctctgaggaatgtccataaatctttagcttggataggcagccttaggggcaaggaagacaaggaaatcagcgaggcggttgaaaagaataaatctgcattcgtgggtgccgagttggcgggcaaaaccataggcgttataggccttggcaaaattggtgttttggttgcaaacggagccattggtcgcggtatgaatgtaatagcttacgagccttatccgagcgttggcaatatgcttatgctaaacaacacagttaaagtagtgcagagccttgatgaggttatagccgccgcagatgttttaaccgtgcacgttccgtttttgtctgctacaaagggtatgttgaacgagaccaacttggctcttttcaacggttcttatttgctgaactttgccaggaacggaattatcagcgaagctggcatcaatgcttttttgggaaaaaataaaagtaatgtttacttaaccgattttcctagcaaagcggatttggaaaatgaacaaatcgtctctttccctcatcttggcgcgagtacggaagaagcggaggagaactgcgctgttatggcggtggagcagcttaaaaaatatctggaatttggcatagtccataattccgtgaattttccaacggttgaaagccacccttctgcaagcgtaaaaaaccgcattgtggttataaacaagcgatgtcccaaatatgatagctttaatatcaaaagtttttggagatgctggcataaacataagcagcttaaaaacgaaagcaaggaaagatag

SEQ ID NO: 38762 - protein, 284 aa, Unknown
  Obtained from environmental sample
  DOMAIN (19)...(201): D-isomer specific 2-hydroxyacid dehydrogenase, NAD binding domain
  misc_feature (1)..(284): Xaa is any amino acid
MCVFNTPGANANAVSELVFTALGIALRNVHKSLAWIGSLRGKEDKEISEAVEKNKSAFVGAELAGKTIGVIGLGKIGVLVANGAIGRGMNVIAYEPYPSVGNMLMLNNTVKVVQSLDEVIAAADVLTVHVPFLSATKGMLNETNLALFNGSYLLNFARNGIISEAGINAFLGKNKSNVYLTDFPSKADLENEQIVSFPHLGASTEEAEENCAVMAVEQLKKYLEFGIVHNSVNFPTVESHPSASVKNRIVVINKRCPKYDSFNIKSFWRCWHKHKQLKNESKER

SEQ ID NO: 38763 - DNA, 1014 bp, Unknown
  Obtained from environmental sample
  misc_feature (1)..(1014): n is a, c, g, or t
atgatcagatcggccgagaacccccgcgataggcgacctttacaagtggggacggcggcaaaaatcgtaaaaaaaatcaaccttcccgacggcggtgtgaatatctttatctccacgttaaagcgtttcaaggttaaaaaaaccctccatgccagcaatcccatagtggcggcggtggagtacctgaatgaagaagaagacgacaccagcgaggtaaaggcccttacaagggcgctcatttcggaaatgaagcagatttcagaaaacaaccccctgttttcagaggaaatgcgcctgaacatgataaatatagatcatccgggcaagattgcagattttatcgccagtattctaaatattgacaaggcggagatgcagaagattttggaaatcctcaacgtgcgaaaacggatggaacaggtacttgtgttcatcaaaaaagagcaggagcttctgcggattcagaaaaagatacagaaagagataaatgaaaaaatagaaaaatcgcaaagggattatttccttaaagaggagctcaaggccataaagggcgagttgggaatgaccaccgatgccaagagctctgactaccagcggttcaaggacgctattgaaactttaaaatttgaaggcgaggtaaaggaaaccgtagagcaggagcttgaaaaattcaacctgatggagccgaactcgccggaatttgttgttacgcgcaattatcttgacctcattgtcagccttccctggaaagaccctgaacccgaaaatttcagcatgaaaaacgccagggatattctggaagctgatcattacggactaagcgacgtaaaaaatcgtataacggagtacctcgcggtagaaaattgcggggctataacgcggaaaaagctccggttgaagcccccgccaacaccgcgccggcggcgcccgcaacggaaccatcagcggagcctgaaagcggtcctgtcaaacccccgatccgctccccgcatgatcctccggcaggctccataa

SEQ ID NO: 38764 - protein, 337 aa, Unknown
  Obtained from environmental sample
  DOMAIN (2)...(147): ATP-dependent protease La (LON) domain
  misc_feature (1)..(337): Xaa is any amino acid
MIRSAENPRDRRPLQVGTAAKIVKKINLPDGGVNIFISTLKRFKVKKTLHASNPIVAAVEYLNEEEDDTSEVKALTRALISEMKQISENNPLFSEEMRLNMINIDHPGKIADFIASILNIDKAEMQKILEILNVRKRMEQVLVFIKKEQELLRIQKKIQKEINEKIEKSQRDYFLKEELKAIKGELGMTTDAKSSDYQRFKDAIETLKFEGEVKETVEQELEKFNLMEPNSPEFVVTRNYLDLIVSLPWKDPEPENFSMKNARDILEADHYGLSDVKNRITEYLAVENCGAITRKKLRLKPPPTPRRRRPQRNHQRSLKAVLSNPRSAPRMILRQAP

SEQ ID NO: 38765 - DNA, 762 bp, Unknown
  Obtained from environmental sample
  misc_feature (1)..(762): n is a, c, g, or t
ttgcggggctataacgcggaaaaagctccggttgaagcccccgccaacaccgcgccggcggcgcccgcaacggaaccatcagcggagcctgaaagcggtcctgtcaaacccccgatccgctccccgcatgatcctccggcaggctccataatctgccttgtggggccgcccggcgtgggaaagacatcggtaggcagatccatagcgcgcgccctgggcaagcagtttttccgtttttcggtgggcggcatgagggacgaggccgagataaaaggccaccgccgcacttatataggcgccatgccgggcaagatcatacaggggcttaagatcgtcaaaaccagggcgcccgtgtttatgattgacgagattgacaagatgggggcgagttatcagggcgatcccgccagcgcccttcttgaagtgctggaccccgagcagaatatcgagttcagggatcattatcttgatatgccattcgacatttcccatatcttttttattgtcacggcgaacaccctggacactataccccctccgcttttggatcgcatggagataatacagcttcccggttatatcgacattgagaagctggaaatcgcccgcaggtatcttgttcccaaaagccttgagaaaaacggcctgaaaaaaacccaggtcaagtacaccaaggacagccttctgcatatcgccnactcttacgcccgcgaggcaggcgtgagaaattttgaaaaaaaccttgacaagattcacccgtag

SEQ ID NO: 38766 - protein, 253 aa, Unknown
  Obtained from environmental sample
  DOMAIN (51)...(187): ATPase family associated with various cellular activities (AAA)
  misc_feature (1)..(253): Xaa is any amino acid
MRGYNAEKAPVEAPANTAPAAPATEPSAEPESGPVKPPIRSPHDPPAGSIICLVGPPGVGKTSVGRSIARALGKQFFRFSVGGMRDEAEIKGHRRTYIGAMPGKIIQGLKIVKTRAPVFMIDEIDKMGASYQGDPASALLEVLDPEQNIEFRDHYLDMPFDISHIFFIVTANTLDTIPPPLLDRMEIIQLPGYIDIEKLEIARRYLVPKSLEKNGLKKTQVKYTKDSLLHIAXSYAREAGVRNFEKNLDKIHP

SEQ ID NO: 38767 - DNA, 678 bp, Unknown
  Obtained from environmental sample
  misc_feature (1)..(678): n is a, c, g, or t
gtgaatcttgtcaaggtttttttcaaaatttctcacgcctgcctcgcgggcgtaagagtnggcgatatgcagaaggctgtccttggtgtacttgacctgggtttttttcaggccgtttttctcaaggcttttgggaacaagatacctgcgggcgatttccagcttctcaatgtcgatataaccgggaagctgtattatctccatgcgatccaaaagcggagggggtatagtgtccagggtgttcgccgtgacaataaaaaagatatgggaaatgtcgaatggcatatcaagataatgatccctgaactcgatattctgctcggggtccagcacttcaagaagggcgctggcgggatcgccctgataactcgcccccatcttgtcaatctcgtcaatcataaacacgggcgccctggttttgacgatcttaagcccctgtatgatcttgcccggcatggcgcctatataagtgcggcggtggccttttatctcggcctcgtccctcatgccgcccaccgaaaaacggaaaaactgcttgcccagggcgcgcgctatggatctgcctaccgatgtctttcccacgccgggcggccccacaaggcagattatggagcctgccggaggatcatgcggggagcggatcgggggtttgacaggaccgctttcaggctccgctga

SEQ ID NO: 38768 - protein, 225 aa, Unknown
  Obtained from environmental sample
  misc_feature (1)..(225): Xaa is any amino acid
MNLVKVFFKISHACLAGVRVGDMQKAVLGVLDLGFFQAVFLKAFGNKIPAGDFQLLNVDITGKLYYLHAIQKRRGYSVQGVRRDNKKDMGNVEWHIKIMIPELDILLGVQHFKKGAGGIALITRPHLVNLVNHKHGRPGFDDLKPLYDLARHGAYISAAVAFYLGLVPHAAHRKTEKLLAQGARYGSAYRCLSHAGRPHKADYGACRRIMRGADRGFDRTAFRLR

SEQ ID NO: 38769 - DNA, 399 bp, Unknown
  Obtained from environmental sample
  misc_feature (1)..(399): n is a, c, g, or t
ttgttatccgcttttctgggcgggataggcggctcattgcgcatgatacgcgcgacaatgctcgatcaactgggacagccgtatatcacaagtttacgctcccgcggcattgccgaatggcgggtttatttcgcccatgccttccgcaacacattgaacccctacattacgggaagcgcaaaccttcttgcaagccttttttcaggatcgcttattcttgaaataatattcgcgtaccccggtatcggaagattaatgtacgaggctgtaattcaacaggacattaaccttgtgcttgccaatattatgtttatttcgttccttgtattggttggaatggcgctggccgacattacccttgcttttgtagacccccgcatcaggtacgggaaagagtaa

SEQ ID NO: 38770 - protein, 132 aa, Unknown
  Obtained from environmental sample
  misc_feature (1)..(132): Xaa is any amino acid
MLSAFLGGIGGSLRMIRATMLDQLGQPYITSLRSRGIAEWRVYFAHAFRNTLNPYITGSANLLASLFSGSLILEIIFAYPGIGRLMYEAVIQQDINLVLANIMFISFLVLVGMALADITLAFVDPRIRYGKE

SEQ ID NO: 38771 - DNA, 1050 bp, Unknown
  Obtained from environmental sample
  misc_feature (1)..(1050): n is a, c, g, or t
atggagggagagatggcgataaatcgtttcaagggcgaatatcctaaaattggcataagaccaactatcgacggacggcagggtgcgcttaaagtgcgggaatctcttgagttgcaaaccatgaatattgcgaaagcggccaaggcgctgcttgaaaaaaatctgcgctattccaacggcagtccggttcaggtggtgatagccgatacgactatcggcagggtagcggaagccgccgcctgcgccgccaaattccggcgggaaggcgtggacattacgctgacggtaacgccctgctggtgttacggctcggagaccatggacatggaaccttccaccataaagggcgtttggggctttaacggtaccgagagacctggtgcggtgtacctggcttcggtattggcgggtcacgcgcaaaaaggattgcccgcctttgggatttacggacgcaatgtgcaggatcttagcgatacggaaatcccggcggatgtgcaggaaaagctgctgcgcttcggcagggcggcgctggcggcggctaccatgcggggcaagagctatttacagattggttcgatctgcatgggcatcgccggttcaatcatcaacccggaattttttgaggaataccttggcatgagggttgagagcgtcgatgaggttgaaattatccgccgcatggaaaagggcatttacgacgagaaggaataccagaaagccctggcctggacaaagcagtattgcaaggaaggctttgacaaaaatccatctgagttacagcgttcgcgcgcagagcaggacaaagcctgggaattcgtggtcaagatgatgtgcatcattaaagacctctataatggcaaccccaacctgccggaaggctgcgaagaggaaaggctgggccacaacgccatcgccggcggcttccagggccagcgccagtggacggacttctaccccaattgcgacttccccgagtccttaatgtgttcctcttttgactgggaaggtgcacgtgaaccttatattttggcaaccgagaagcaccaataa

SEQ ID NO: 38772 - protein, 349 aa, Unknown
  Obtained from environmental sample
  DOMAIN (185)...(348): L-fucose isomerase, second N-terminal domain
  misc_feature (1)..(349): Xaa is any amino acid
MEGEMAINRFKGEYPKIGIRPTIDGRQGALKVRESLELQTMNIAKAAKALLEKNLRYSNGSPVQVVIADTTIGRVAEAAACAAKFRREGVDITLTVTPCWCYGSETMDMEPSTIKGVWGFNGTERPGAVYLASVLAGHAQKGLPAFGIYGRNVQDLSDTEIPADVQEKLLRFGRAALAAATMRGKSYLQIGSICMGIAGSIINPEFFEEYLGMRVESVDEVEIIRRMEKGIYDEKEYQKALAWTKQYCKEGFDKNPSELQRSRAEQDKAWEFVVKMMCIIKDLYNGNPNLPEGCEEERLGHNAIAGGFQGQRQWTDFYPNCDFPESLMCSSFDWEGAREPYILATEKHQ

SEQ ID NO: 38773 - DNA, 453 bp, Unknown
  Obtained from environmental sample
  misc_feature (1)..(453): n is a, c, g, or t
atgggcgaatgtctgtattccatggggcagttcggcgaggcggaaaaattttattcatgggttatcgcaaaataccctaacagcccaaaagtagaggtttcaggttaccgcgtagacttaataaaacaaaagaaaatagaagccgaacttttatcgcttttacgctggagccatgaagaatcgctgcggaacagcgaagaaaaccagcgcaaaataagaacctacgaaaacgcccttaacgcctaccagcggaaaattgccgaattaacgcaaggcgcggctcagtcaagaaccgatgaattgcctgcttctgcgggtattcccgaatccgcgggcgttattgacaacatacccgaagacgacgaagcgctcagaaagcgggctatacaactggaagaagaagttaagctgattcttaatcaatacgagcaaaagtccggaggagaaaattga

SEQ ID NO: 38774 - protein, 150 aa, Unknown
  Obtained from environmental sample
  misc_feature (1)..(150): Xaa is any amino acid
MGECLYSMGQFGEAEKFYSWVIAKYPNSPKVEVSGYRVDLIKQKKIEAELLSLLRWSHEESLRNSEENQRKIRTYENALNAYQRKIAELTQGAAQSRTDELPASAGIPESAGVIDNIPEDDEALRKRAIQLEEEVKLILNQYEQKSGGEN

SEQ ID NO: 38775 - DNA, 918 bp, Unknown
  Obtained from environmental sample
  misc_feature (1)..(918): n is a, c, g, or t
atgatgcaaaaaattgttacggttatcaatttccgcgtggacgaaaaacagcaaaaactttcgatctatattgacggtgaaattcctcaaacccttatagccgatgatcagcgtcttgctcaggttattaccaatcttntgagtaacgctgtaaaattcactccggaaaaaggatcgatcactcttgatgcgcgctgtattaaagaggaagaagatatttgcacaatacaaatctccgtaacagatacgggaatcggcataaccgatgaacagcaaaaactcttgttcaagtcctttcagcaagccgagagcagcacgacgcgcaaatacggcggcacggggctggggcttgctatttccaaaagcattgtagaaatgatgggcggcgaaatatggattaaatcgggaccggaaggcggtactacttttagctttacagtcatggtgaagaaaggcaaaaccgcagaaaccaatgcacataacgccggtggcggtcttcaagcggatggaacggcaaatattaacggtcttttcacaggacggcgtattttgctggtagaagacgtggaaatcaaccgtgaaatcgtacttgccctgcttgaaccgacgcaaatggagatagactgcgcggaaaacggcgtggaagccgtacgcatgttcagtgaagctccggacaagtatgagttgatttttatggatgtacagatgcccgaaatggacggctacgaggcgacgcggcgtattcggtcgctggatacgccgaaggggaaaaccgtcccgattgtagccatgaccgctaacgcgttccgtgaaaatgtggaagaatgtcttgccgtcggcatgaacgatcatatcgggaaaccgcttgattttgagaaagttattgagaagctgtgtgtttatttgcccaagaaatag

SEQ ID NO: 38776 - protein, 305 aa, Unknown
  Obtained from environmental sample
  DOMAIN (181)...(299): Response regulator receiver domain
  misc_feature (1)..(305): Xaa is any amino acid
MMQKIVTVINFRVDEKQQKLSIYIDGEIPQTLIADDQRLAQVITNLXSNAVKFTPEKGSITLDARCIKEEEDICTIQISVTDTGIGITDEQQKLLFKSFQQAESSTTRKYGGTGLGLAISKSIVEMMGGEIWIKSGPEGGTTFSFTVMVKKGKTAETNAHNAGGGLQADGTANINGLFTGRRILLVEDVEINREIVLALLEPTQMEIDCAENGVEAVRMFSEAPDKYELIFMDVQMPEMDGYEATRRIRSLDTPKGKTVPIVAMTANAFRENVEECLAVGMNDHIGKPLDFEKVIEKLCVYLPKK

SEQ ID NO: 38777 - DNA, 639 bp, Unknown
  Obtained from environmental sample
  misc_feature (1)..(639): n is a, c, g, or t
atgaacagtaaggtatattcaaaagaaggcaaggaactcagaacaatcgaattggcagatgatgtttttggccttccggcaaacgaagcgttgatctggtatgcgatcaacaacgagcttgccaacaagaggcagggtaacgcctgcactaaaggccgcgctgatgttcacggctccaacgcaaagccatataagcagaaaggcaccggacgcgcgaggcgcggcgacaagaaatcgcccgtactggtcggcggaggcgtcatttttgggcccaagcccaaagattattcctatgccatgccgaaaaaggcaaagcgtaaagcgctcaagaccatcttaagccttaaagccaagaatgacatgttaaaaattatcgaagatttttccatagaaacagggaaaacaaaagaccttgcggtgcttctggacaactttaaccccggtacacggaccgtgcttgtccttaaagatgatgatccgaaactcaagcgggccgcggccaatatcccctggctgagctatctttcctataaccgcctgcgcgcccatgaccttttctacggacgtcaggtgcttatgctggaaaccgcggcgaagaacctcaatgagttttacagttcccgcgaggaggccaaatga

SEQ ID NO: 38778 - protein, 212 aa, Unknown
  Obtained from environmental sample
  DOMAIN (15)...(204): Ribosomal protein L4/L1 family
  misc_feature (1)..(212): Xaa is any amino acid
MNSKVYSKEGKELRTIELADDVFGLPANEALIWYAINNELANKRQGNACTKGRADVHGSNAKPYKQKGTGRARRGDKKSPVLVGGGVIFGPKPKDYSYAMPKKAKRKALKTILSLKAKNDMLKIIEDFSIETGKTKDLAVLLDNFNPGTRTVLVLKDDDPKLKRAAANIPWLSYLSYNRLRAHDLFYGRQVLMLETAAKNLNEFYSSREEAK

SEQ ID NO: 38779 - DNA, 621 bp, Unknown
  Obtained from environmental sample
  misc_feature (1)..(621): n is a, c, g, or t
atgttagggctattggccaggaaagttggaatgacccaggtcttcgacgaagagggcaacatggttccggtaacggtaataagtgtcgcgccgaacgttgtcattgccaaaaagacggaagagaaagaccattacaacgccgtggtcattggcgtgggcgacgcgaagaagaacaggatcacaaaagcctataagggccagtttcccgaaaacatcgcccccaaaaagcggctgcaggaattgcgggactttgaaaaagaaaccgccgtgggggactcccttggagttgaaacgctggaaggcgtccgctatgtcgacgtatccggcgtatccaagggcaagggtttccagggcgttgttaagcgctatggttttggcggcgggcggaaaacccacggttccaaattccaccgcgagccgggctcgaccggccagagcacttacccgcacaggacattcaagaatacgaaacttccgggccgcatgggcagggaaaacgtgacggtcttaagtctgcgggtactgaagctggacgccgagaaacagcttattctggttcgcggttctgttcctggtaataatggcggccttgtgctggtacgggcggcggtgaaaaggtaa

SEQ ID NO: 38780 - protein, 206 aa, Unknown
  Obtained from environmental sample
  DOMAIN (8)...(201): Ribosomal protein L3
  misc_feature (1)..(206): Xaa is any amino acid
MLGLLARKVGMTQVFDEEGNMVPVTVISVAPNVVIAKKTEEKDHYNAVVIGVGDAKKNRITKAYKGQFPENIAPKKRLQELRDFEKETAVGDSLGVETLEGVRYVDVSGVSKGKGFQGVVKRYGFGGGRKTHGSKFHREPGSTGQSTYPHRTFKNTKLPGRMGRENVTVLSLRVLKLDAEKQLILVRGSVPGNNGGLVLVRAAVKR

SEQ ID NO: 38781 - DNA, 321 bp, Unknown
  Obtained from environmental sample
  misc_feature (1)..(321): n is a, c, g, or t
ttgtacttcgagatgatggctaagaagaattcgcgtaaaatacgcggtttcgatgtggaattgattgaccagagtgcgaaatcaattgttcaggcagtgcagaaggccggggcgaaagttaccggcccgatccctctgcccacccgcatcaacaaaatgacggtgcttcgctcgcctcatgtgaataaaaagagccgtgaacagtttgagatgcggacgcataaacggctcatagatattattaacccgtcggcggaagtgatggattcattaatgaagcttgaactccccgccggcgtggacgtggaaattaagcaataa

SEQ ID NO: 38782 - protein, 106 aa, Unknown
  Obtained from environmental sample
  DOMAIN (13)...(104): Ribosomal protein S10p/S20e
  misc_feature (1)..(106): Xaa is any amino acid
MYFEMMAKKNSRKIRGFDVELIDQSAKSIVQAVQKAGAKVTGPIPLPTRINKMTVLRSPHVNKKSREQFEMRTHKRLIDIINPSAEVMDSLMKLELPAGVDVEIKQ

SEQ ID NO: 38783 - DNA, 351 bp, Unknown
  Obtained from environmental sample
  misc_feature (1)..(351): n is a, c, g, or t
gtgctcaactttattaccgccgaaataaagaaaaccggttatgagcatgagattcaaaataaaattgaaatggcgtcggaagaaatatttacgaatatcgcgaattacgcatacgccgatgaaggcggaaaagtaaaaatcgccgtttccattatagacgggataaaaataacatttgaagataacggcagacctttcaatcctacagagtaccccgctcccgatttggaaaaacccataaaagaccgcgagatcggcggacttggcttatttctggtcaaacaagtcatggataaagtggagtacacccgcgaaaatgatagaaatatactgataatcagcaaaaaatag

SEQ ID NO: 38784 - protein, 116 aa, Unknown
  Obtained from environmental sample
  misc_feature (1)..(116): Xaa is any amino acid
MLNFITAEIKKTGYEHEIQNKIEMASEEIFTNIANYAYADEGGKVKIAVSIIDGIKITFEDNGRPFNPTEYPAPDLEKPIKDREIGGLGLFLVKQVMDKVEYTRENDRNILIISKK

SEQ ID NO: 38785 - DNA, 510 bp, Unknown
  Obtained from environmental sample
  misc_feature (1)..(510): n is a, c, g, or t
atgatttatgaaaaatgcagggatatccttttacaggaatgcgagttgattcagaacgcggcaaatgaacaggaaaaaatacgcaatgcagtttcaaatcgagattggactgtctttgaagaccatttaagcgttatgaactcaatcgaaaacaaaatagcgtctctggaaacagaacgcgaacagctttttatcgtttttaaaacgctcattcatcaacagagtttttctgaaaatcttgactcaaaggggcaatttttcgctcttgtttccctccttcccgataatcagcgcgaagaattgtcctcgatctacctcagtttaaaacaagaagccgtaaagttacgcatggcaaatgaaatgttatttgcctatttgtcgggaataaaatcgacgttaaaagaattttttgatctggctttccccgaacgcggcggaaaattgtacacaaaagagggaatgcatttttcaaatgatatgcacagtatgttgttaaaccgcactttttaa

SEQ ID NO: 38786 - protein, 169 aa, Unknown
  Obtained from environmental sample
  misc_feature (1)..(169): Xaa is any amino acid
MIYEKCRDILLQECELIQNAANEQEKIRNAVSNRDWTVFEDHLSVMNSIENKIASLETEREQLFIVFKTLIHQQSFSENLDSKGQFFALVSLLPDNQREELSSIYLSLKQEAVKLRMANEMLFAYLSGIKSTLKEFFDLAFPERGGKLYTKEGMHFSNDMHSMLLNRTF

SEQ ID NO: 38787 - DNA, 1191 bp, Unknown
  Obtained from environmental sample
  misc_feature (1)..(1191): n is a, c, g, or t
atgggatcgtttttattatttttatcgccggaattttcgctcataaaagaattattgcataaatcgactgtcgttgcaaggttcgctcatattatgttactatatattatgaaaagtactgctttgcctcccctttatttgattgacgcttacggtcttatataccgttcatatttcgcctttttaacccatcccctgcgcaataactcgggtaaaaacgtttcggcgttattcgggtttgcccgcacattgatttccctgattgacgacngcgctccttgcgcagacgacagcggtaaatgccttgacagccccataaagcccctgcgccttgcggcgatttttgattcccgcactcccaccttccgtcataaaatgtacagcgaatatanagccacgcggcaaaaggcccctgatgaccttcacgcgcaagttccgttagtggaagaatttcttgccgcgctgaacataccatgcntgcgggcggacggctttgaagccgatgacattatcgcaaccctggcgaaaaaatgtcaggaagaaaaaagacagtgctatattctttcctccgataaagatctgctgcagttggtagggaatggaacttttgaattgcgcccggcaaaaacacaaaagaatgccgcctcatccgccgcggcatcacccgcttcgacgccgggatgggaaataataggaccggctgaggtaaaaaccgaatggggcgtaccgcccgaaaaaataatggatcttctttcgcttgccggggacgcttctgacaatattccgggcgttaaaggcattggcgaaaaaacagccgttgaatatataatacgctacggctctcttgacgggatttatgaaaacatcgccggtcttggcggatccagaggcaaaaagatagccgaaggaaaagagagcgcttatttctcacagtcgttgataagattggatgccaatgtttctttgccaataacggatatagacgaactgtcggcggaaaatcctgacaggaaagccgcggcgcagatacttttccgcgaaggcatacgtcaaagcgctaagcagcttgacccaaacataagcgtctctgccgcttcaggtcaggcgcagccagacgaacagcaggaccgtgtcggcgcggtatattccgccgataaatccctgttggcagcggtgtttataaaattgtaa

SEQ ID NO: 38788 - protein, 396 aa, Unknown
  Obtained from environmental sample
  DOMAIN (242)...(342): 5'-3' exonuclease, C-terminal SAM fold
  misc_feature (1)..(396): Xaa is any amino acid
MGSFLLFLSPEFSLIKELLHKSTVVARFAHIMLLYIMKSTALPPLYLIDAYGLIYRSYFAFLTHPLRNNSGKNVSALFGFARTLISLIDDXAPCADDSGKCLDSPIKPLRLAAIFDSRTPTFRHKMYSEYXATRQKAPDDLHAQVPLVEEFLAALNIPCXRADGFEADDIIATLAKKCQEEKRQCYILSSDKDLLQLVGNGTFELRPAKTQKNAASSAAASPASTPGWEIIGPAEVKTEWGVPPEKIMDLLSLAGDASDNIPGVKGIGEKTAVEYIIRYGSLDGIYENIAGLGGSRGKKIAEGKESAYFSQSLIRLDANVSLPITDIDELSAENPDRKAAAQILFREGIRQSAKQLDPNISVSAASGQAQPDEQQDRVGAVYSADKSLLAAVFIKL

SEQ ID NO: 38789 - DNA, 1149 bp, Unknown
  Obtained from environmental sample
  misc_feature (1)..(1149): n is a, c, g, or t
atgttcccctggctaaagaaaaatacgactggaggttatagcgttctgggccgacctaggccaaggcgaagagctgagcggctggaagacaaggccctcaagaccggcgcgagcaagctctacatcgagcacctgaccgacgagttcgtgaccgcctacatcttccccaccctgaaagcgggggcggtatacgagggttcgtacctgctgggcactagtttcgcgcgccccttaatcgccaagcgggcggtggagatcgcccacaaggagggggccacggccgtggcgcacggggcgaccggcaagggcaacgaccaggtccgcttcgagctgacggtaatggcgctcgacccaaagctcaagatcatctccccttggaaggaccccaagtggacgctccacagccgcgaggactgcctcgcctacgccgagcagcacggggtgccggtggcgcaaaccaagaagcggatatactccgaggaccgcaacctctggcatataagccacgagggcggcgtgctggagaatccgtggaacgagccgcccgacgacgtctacacgctgaccaataccatagagaaggcgccggacaccccggagcatatagaggttacctttacaaaggggaatcccgtcgcggtcaacggcaaggccatgagccctgtcgatctgctgacggcgctcaacaagcgcggctccatacacggcattgggcacgtggacatggtggagaacaggctcgtggggataaaatcgcgcggagtgtacgagacgccgggcggcgcgatactttacgcggcgcaccggatgcttgagaatttgacgctggacagggatacggcgcacttcaaggagatgttggcgatacggtacgcggagcttgtctacaacgggcagtggttctccaaattaagagaagcgctcgacggatttgtggaagtcacgcagaagaacgtntctggcgtcgtcaggctaaagctctacaaggggaatatcgtgccggcgggggtcaaggcggataaagcgttatatcttgaggatctggcatcgtttacggatacggagttttacgaccagatggacgccacaggattcataaagattttcgggctgccaatgaaagtcgcggggttggtcgataggaaatga

SEQ ID NO: 38790 - protein, 382 aa, Unknown
  Obtained from environmental sample
  DOMAIN (3)...(379): Arginosuccinate synthase
  misc_feature (1)..(382): Xaa is any amino acid
MFPWLKKNTTGGYSVLGRPRPRRRAERLEDKALKTGASKLYIEHLTDEFVTAYIFPTLKAGAVYEGSYLLGTSFARPLIAKRAVEIAHKEGATAVAHGATGKGNDQVRFELTVMALDPKLKIISPWKDPKWTLHSREDCLAYAEQHGVPVAQTKKRIYSEDRNLWHISHEGGVLENPWNEPPDDVYTLTNTIEKAPDTPEHIEVTFTKGNPVAVNGKAMSPVDLLTALNKRGSIHGIGHVDMVENRLVGIKSRGVYETPGGAILYAAHRMLENLTLDRDTAHFKEMLAIRYAELVYNGQWFSKLREALDGFVEVTQKNVSGVVRLKLYKGNIVPAGVKADKALYLEDLASFTDTEFYDQMDATGFIKIFGLPMKVAGLVDRK

SEQ ID NO: 38791 - DNA, 1011 bp, Unknown
  Obtained from environmental sample
  misc_feature (1)..(1011): n is a, c, g, or t
gtgattaggcaggaagaccctatcggtaaagtgcaggcgggctggactctgcccaacggtctgcagattgataaagttaccgtgtccctcggcgttgcagctattatttacgaatcacgtcccaatgttacagcggactgtgccgctcttgcgtacaaagcaggctgttcaatactcttacgaggctcctcttccgcactggaatccaacaaggcactggttaaagctatcaaagcggggcttgaaagcggcggcggaattgcggacgctgtcgctcttgcggaatcaggcagtagagacgagattgacgagatactcaaagcccgcggttatattgatgtagttcttccccgtggaggacacgagttaatccgccgtgttgtagaaaacgctcgtattcctgtcattgagacgggagaaggcaactgccacatttatgttgagccgagcgcagacatgaacaacgcaatagaaattatcgccaacgcaaaactgcaaaaacccggcgtgtgtaatgctgtggaaacaatacttgtacacaaagacgctcttgccgctcttatgccaaaaatggcggcgacgcttgcgggaaaatgcgaactgcgctgtgacggcgcttcaaaagccgcaatcggcgcaataccttccgcccttgtcgttaaagacgctgttgaggaagattgggcgacagagtttcttgattacattcttgcggtaaagactgtttcctcatgcgatgaggcaatcgctcatatcaaccggtacgggactaaacattcggacgctattcttaccaacgatttaagggcggcggacgagttccgctcaaaggtggacgcggcgtgcgtttatgtcaacgcgtccacgcgctttacggacggcgggcaattcggcttcggcgcggaattgggaatcagcactcagaaatttcacgcaaggggaccgatgggtcttgaagcccttacgacgataaaatatcttataaacggcagcggacaaatacggagttaa

SEQ ID NO: 38792 - protein, 336 aa, Unknown
  Obtained from environmental sample
  DOMAIN (15)...(327): Aldehyde dehydrogenase family
  misc_feature (1)..(336): Xaa is any amino acid
MIRQEDPIGKVQAGWTLPNGLQIDKVTVSLGVAAIIYESRPNVTADCAALAYKAGCSILLRGSSSALESNKALVKAIKAGLESGGGIADAVALAESGSRDEIDEILKARGYIDVVLPRGGHELIRRVVENARIPVIETGEGNCHIYVEPSADMNNAIEIIANAKLQKPGVCNAVETILVHKDALAALMPKMAATLAGKCELRCDGASKAAIGAIPSALVVKDAVEEDWATEFLDYILAVKTVSSCDEAIAHINRYGTKHSDAILTNDLRAADEFRSKVDAACVYVNASTRFTDGGQFGFGAELGISTQKFHARGPMGLEALTTIKYLINGSGQIRS

SEQ ID NO: 38793 - DNA, 828 bp, Unknown
  Obtained from environmental sample
  misc_feature (1)..(828): n is a, c, g, or t
atggatgtcaacgggcatacatatttcgccaatgactggaaaaacgccgaagcgcaaaacactgccgcgaaaggcgcaaaaaaaaccacggcggaagaaataaaagcggcgaccgcgctgttcgcctccgtggcggcggcctatgacgatattgccggcaagagccagcagagattcgccaaggaaaaagacgacgccaacaaggcgctgcaggcggcgatagcgcgggcggataaatccaggcaggccgcgacggccgcgaacgcccagaccttgctgcccaatgactggagaaacgccgagacaaaaaacacctccgcaaaggccgcgaaaacaggcacgctggatgaaatgaaggcggcggccgcgctgtttgtctccgcggcggacgcctatgacgacgtggccagaaagagtcagcagcaggccgccaaggaaaaagacgacgccaccaaagcgatgcaggcggcgatggcgcggatgaataaatcccgcaaagacgcccaggacgcgaaagccaatgtaaatttaccggctgactggaataacgccgaagctaaaaacaagacggcaacagacgccaagcggagcactgtcgccgagataaaagcggcgacgcccttatacaccgcggcggcggacgcttatgatgatcttatcaagaaaaacgtggccttgaacgcgcaaggccagaaatcggcggaggacgccaggacccgcgcgacacaggaaaggcaaaaagccctggacgccaaggccaacatcgccgtagcgacggaatttaacggcgcggatacggtctttaaacaggcggcgggcggaatttga

SEQ ID NO: 38794 - protein, 275 aa, Unknown
  Obtained from environmental sample
  misc_feature (1)..(275): Xaa is any amino acid
MDVNGHTYFANDWKNAEAQNTAAKGAKKTTAEEIKAATALFASVAAAYDDIAGKSQQRFAKEKDDANKALQAAIARADKSRQAATAANAQTLLPNDWRNAETKNTSAKAAKTGTLDEMKAAAALFVSAADAYDDVARKSQQQAAKEKDDATKAMQAAMARMNKSRKDAQDAKANVNLPADWNNAEAKNKTATDAKRSTVAEIKAATPLYTAAADAYDDLIKKNVALNAQGQKSAEDARTRATQERQKALDAKANIAVATEFNGADTVFKQAAGGI

SEQ ID NO: 38795 - DNA, 666 bp, Unknown
  Obtained from environmental sample
  misc_feature (1)..(666): n is a, c, g, or t
ttggactgcccgacggacatttcggcgggaatcgtagagcaagcgacgagagaagacaatcgggttttggcggttcgacattctgaaaatttggggcttccgtccgcacgaaatacaggcgttagaaacgcttccggcgaatatatgcatttcattgattccgacgacctaatcagccctgatttttacgatattatggtaaacgccgccgttgacgcggacacagacgtggcggcgtgttctgttttctacgagaagaagccgtggcgtagcatttggtttaaagaaagcgagattttatcgggttacgccaaaataaaaaagactgaagtggctattctagggtggtcatggcggtatttaatcaggagaagcttttggaacgctcacaagttctcgtttccaaaccttgtcccaatggaagatatgcctgtcatgatacctatgatatactacgcaaacaaagtcgttctttgtccaaacgcggtatatttttataaacacagagcgcgttcaatactgaatgacaattatgatcctgaacgtaaaaaattacatagtaagaatagacgaaaagcacgtaaaattttccgtgagtttatgcgcgttaataagattaagcgtccaagcagattgttatactatataagaaagaggtttttatga

SEQ ID NO: 38796 - protein, 221 aa, Unknown
  Obtained from environmental sample
  misc_feature (1)..(221): Xaa is any amino acid
MDCPTDISAGIVEQATREDNRVLAVRHSENLGLPSARNTGVRNASGEYMHFIDSDDLISPDFYDIMVNAAVDADTDVAACSVFYEKKPWRSIWFKESEILSGYAKIKKTEVAILGWSWRYLIRRSFWNAHKFSFPNLVPMEDMPVMIPMIYYANKVVLCPNAVYFYKHRARSILNDNYDPERKKLHSKNRRKARKIFREFMRVNKIKRPSRLLYYIRKRFL

SEQ ID NO: 38797 - DNA, 480 bp, Unknown
  Obtained from environmental sample
  misc_feature (1)..(480): n is a, c, g, or t
atgggttcgctctttttgttcctgctccttgccaatatcattcccgtcttgtcacctttgggactgaaagcctttgggcgtgaattaacaccgctctttgaaatccgccccccaacaagggacatcaatgtaacggcggcgcttgcggtcatatcaatcttacttgtccttgtctgcggatttgctgcgcgcggttttacgggctggttcaaaaaactttttcaacctgtacctttcatgcttcccttcaacatcatggaatacggaacgcgcctaatctctcttgccctgcggttatttggaaacatgttaggcggttatgtcctgatgagcatgatcgagggattacttccgcttgccctccccgtcgtcttctcgctctactttgatttttttgacggactgatacaagcggcaatatttgtattcttaaccagcctctacattggcgaggctgttaaaataaatgaggaagcataa

SEQ ID NO: 38798 - protein, 159 aa, Unknown
  Obtained from environmental sample
  SIGNAL (1)...(26)
  DOMAIN (2)...(151): ATP synthase A chain
  misc_feature (1)..(159): Xaa is any amino acid
MGSLFLFLLLANIIPVLSPLGLKAFGRELTPLFEIRPPTRDINVTAALAVISILLVLVCGFAARGFTGWFKKLFQPVPFMLPFNIMEYGTRLISLALRLFGNMLGGYVLMSMIEGLLPLALPVVFSLYFDFFDGLIQAAIFVFLTSLYIGEAVKINEEA

SEQ ID NO: 38799 - DNA, 1035 bp, Unknown
  Obtained from environmental sample
  misc_feature (1)..(1035): n is a, c, g, or t
atgtttatgcgttttcattttgtgccgcttagggcggttgtgctttttttcctcacaagtttatgcggatatgcgacacctgttgtctcattggaaaccgggggcagttacgagtctgtctggaaaggcaagggagggtatttccccaggatttactttacggaagtaattgaagccgccagaaaggcggaggacgcgagtccgtactgggcgaatacgctggcggagcaggaagctatagatcgcatgtctagcgattacacctccctgattttgaataatgacatactcgcgttttacggccatccccgttccacgattatgggcattgtcggccgttttccgatagaagagcttgataaaaaactcaccgcccttgccaatgattacaaagccgtaagcggcgggagaaatataatacaagcgttttatatcatttatggcacggtttggcccgaaggcgagattggcgttatcaactcggagcttcttaccagttggattgaatacgcccaaaagcgggatatgcttgtttttatcgatcaccagattggccgttacgatcctgtcgcttccctcaggcgcatgctgccctggcttaaatatcccaatgtccacctggcccttgaccccgaatggcgcactaccaggccgatgagggaaatcggatcggtcaccgccgatgagattaaccgcgcccagaaggagatggaggattatataatcgccaataacattcccggcgagcgtcttttggttatccaccagtttaactggcgcatgattagaaacagggagacggtgaaaagcgatttccagcgcgtgcggcttgtccactgcgccgacggtttcggctcaccgcgcataaagcgcgattcttacgcgtataacgccgaggcggccaatataccggttaaggcgttcaaactgttctacaatttcggaacacccggcgcgggttacgacagccccctgatgagccccagcgacgtatacgcgctgaaaccgcggccatatctcatcatgtaccagtag

SEQ ID NO: 38800 - protein, 344 aa, Unknown
  Obtained from environmental sample
  SIGNAL (1)...(25)
  misc_feature (1)..(344): Xaa is any amino acid
MFMRFHFVPLRAVVLFFLTSLCGYATPVVSLETGGSYESVWKGKGGYFPRIYFTEVIEAARKAEDASPYWANTLAEQEAIDRMSSDYTSLILNNDILAFYGHPRSTIMGIVGRFPIEELDKKLTALANDYKAVSGGRNIIQAFYIIYGTVWPEGEIGVINSELLTSWIEYAQKRDMLVFIDHQIGRYDPVASLRRMLPWLKYPNVHLALDPEWRTTRPMREIGSVTADEINRAQKEMEDYIIANNIPGERLLVIHQFNWRMIRNRETVKSDFQRVRLVHCADGFGSPRIKRDSYAYNAEAANIPVKAFKLFYNFGTPGAGYDSPLMSPSDVYALKPRPYLIMYQ

SEQ ID NO: 38801 - DNA, 1137 bp, Unknown
  Obtained from environmental sample
  misc_feature (1)..(1137): n is a, c, g, or t
atgatggattcagccaacattcaggcgcgcgacgctatatacttaaagaataaggccgataaaaagggcggagaattcgactggactcctctttacaatgagcaggacgtaatcgcggcggtaagtcaaacaataggggtttcgtataacaggccgatgtctctggacaacggagtaagttttgaattttacgacgcgggccatattttaggctccgccattgcggatataaagataaaaaaaggcggcgaagagatgaatatccttgccaccggagaccttggacggaaaggcaagcctattatccgaaatccggatattccaaaatccgctccggactacataattcttgaaagcacctacggcgaccggaggcacgattccacggacgacgcccttaaaaagctggccgaaatggcacagcggattgtggaaaaaaaaggaaaaattttgatcccggctttcgcgattgagcgcacacaggagcttgtttactattttcaccttcttgtagacgacggcataattcacgaagtgccgattttcgtagactcgccgatggcaactaacgcgacgactatttttcaggttcaccctgaatgttacggcgaagaaataaaacaggcttttattaaacaccataaaaacccgtttggttttaacagtctgcattttgtaacaagcgtggatgagtcaaaggcgttaaacgatcataaggggccgcttatcataatttcggcggacggaatgtgcgaggccggacgcatacagcaccaccttatccacaacatacaggacccgaaacacacgattatgaccgtaggctacatggcggaaaacactcttgggcggcgcatacgcagccgcgaaagcgaggtaaaaatccacggaatgtggctcaagctaagggcccatgtcgaggagataaacgcgttcagcgcccatgcggattatgtagaaacggtagaatggctcaaagaactggataaatcacgcctaaagggaatttttttggttcacggcgaaaagaaggcgcaagcggcgttaaaaaatttccttgccgaacaagggtatgccaacacggagatagtcaagtacggcaaaacctacgagatgcaggtaacaggtaataggtaa

SEQ ID NO: 38802 - protein, 378 aa, Unknown
  Obtained from environmental sample
  DOMAIN (300)...(344): RNA-metabolising metallo-beta-lactamase
  misc_feature (1)..(378): Xaa is any amino acid
MMDSANIQARDAIYLKNKADKKGGEFDWTPLYNEQDVIAAVSQTIGVSYNRPMSLDNGVSFEFYDAGHILGSAIADIKIKKGGEEMNILATGDLGRKGKPIIRNPDIPKSAPDYIILESTYGDRRHDSTDDALKKLAEMAQRIVEKKGKILIPAFAIERTQELVYYFHLLVDDGIIHEVPIFVDSPMATNATTIFQVHPECYGEEIKQAFIKHHKNPFGFNSLHFVTSVDESKALNDHKGPLIIISADGMCEAGRIQHHLIHNIQDPKHTIMTVGYMAENTLGRRIRSRESEVKIHGMWLKLRAHVEEINAFSAHADYVETVEWLKELDKSRLKGIFLVHGEKKAQAALKNFLAEQGYANTEIVKYGKTYEMQVTGNR

SEQ ID NO: 38803 - DNA, 405 bp, Unknown
  Obtained from environmental sample
  misc_feature (1)..(405): n is a, c, g, or t
gtgtcggaagctttaaccccttccgttatcgaagccggcataaaaaacgcgaagccttngtcggaatatgaccttttggctgcccagggtttcgcgaggcagagggccgactggcttgtcggcatgaacctgtcgcggtttatgagcgtgggcaacccgccgccgccttttacggtcgggcgcgtccagacggccgtccttgcttcaattgccggccgcaacaacgaagtaaaaaactttacggccgttccatataaaaaactggaagcctctattaagtccaaggacggcgtcagcatcaaggcttatctggagaatccgaaaacgggcagcgcttctttctttgaatgcgactggccttaccttattgacgccttggggaattgcaagaaccaggggcactga

SEQ ID NO: 38804 - protein, 134 aa, Unknown
  Obtained from environmental sample
  misc_feature (1)..(134): Xaa is any amino acid
MSEALTPSVIEAGIKNAKPXSEYDLLAAQGFARQRADWLVGMNLSRFMSVGNPPPPFTVGRVQTAVLASIAGRNNEVKNFTAVPYKKLEASIKSKDGVSIKAYLENPKTGSASFFECDWPYLIDALGNCKNQGH

SEQ ID NO: 38805 - DNA, 447 bp, Unknown
  Obtained from environmental sample
  misc_feature (1)..(447): n is a, c, g, or t
atgaagttatatagccgtggtcaggttttatttttttcgtttttaagcgccgttattgtcctgctatttgccgtaggttttgggtttataaaacccctgttgcccaagtcaaatattgattctaccgttttacgggaacaggaagcgccgacggacgagtttaaattgttacagtccgaatacaggatacttaacacggccgataatgttcaattttccgacggcgagcgcgaaaatatcgatatttacgaaaaattaaattcagccgttgtaaatataaccacggaaactatggcgataaactggtttcttgagcctgttccgcaggaaggtagttccggttccggttccattattgatagaagaggttatgttcttacaaataatcatgtgatacaaaatgcgcataaggtttttattaatcttggcggacggttctcagtttga

SEQ ID NO: 38806 - protein, 148 aa, Unknown
  Obtained from environmental sample
  SIGNAL (1)...(24)
  misc_feature (1)..(148): Xaa is any amino acid
MKLYSRGQVLFFSFLSAVIVLLFAVGFGFIKPLLPKSNIDSTVLREQEAPTDEFKLLQSEYRILNTADNVQFSDGERENIDIYEKLNSAVVNITTETMAINWFLEPVPQEGSSGSGSIIDRRGYVLTNNHVIQNAHKVFINLGGRFSV

SEQ ID NO: 38807 - DNA, 822 bp, Unknown
  Obtained from environmental sample
  misc_feature (1)..(822): n is a, c, g, or t
atgcgcataaggtttttattaatcttggcggacggttctcagtttgaggggacagtcgtaggcgttgacagcgagagcgatttggcggttttaaaatttaatcctcccgccggaatggtattgcagacaatcatgtacggcgactcaaaaagtttaaaagtagggcagaaagttttggcgataggcaatcccttcgcgcttgaacgcacattaacagtcgggattgtttcaggcttgggacgccctgttcaaacgagcagaaaccggataatccgcgacatgattcagactgacgcgtcgataaaccccggcaattcaggcggtccgcttttggatactcaaggcagaatgataggcgttaatacgatgatctattctccgtccggcggctctgtcggtattggttttgccgttcccgttaacaccgcaaaacgcgttgtaaacgagcttattcaatacggaaaagtccgccgaggctggattgacgcgactgtcgttcagctttttcccagccttgtccgttacgcgaaattgccggtagacgccgggcttcttgtttcccgcaccaaaaaaggaggtcttgcggataaagccggcttacggcagggcaacgaacccgttcaatacggacgcagtgtaatttatcttggcggcgacattatcacttccataaacggcttaaagacaaacaccttggcggatctttacgcatcgttagaagcaagcaagcccggtgatgttgtgaaagtggagataatgcgcggcggacagacaactactttgcagataacattggcggatagggaagaagtgatgaattga

SEQ ID NO: 38808 - protein, 273 aa, Unknown
  Obtained from environmental sample
  DOMAIN (1)...(147): Trypsin
  misc_feature (1)..(273): Xaa is any amino acid
MRIRFLLILADGSQFEGTVVGVDSESDLAVLKFNPPAGMVLQTIMYGDSKSLKVGQKVLAIGNPFALERTLTVGIVSGLGRPVQTSRNRIIRDMIQTDASINPGNSGGPLLDTQGRMIGVNTMIYSPSGGSVGIGFAVPVNTAKRVVNELIQYGKVRRGWIDATVVQLFPSLVRYAKLPVDAGLLVSRTKKGGLADKAGLRQGNEPVQYGRSVIYLGGDIITSINGLKTNTLADLYASLEASKPGDVVKVEIMRGGQTTTLQITLADREEVMN

SEQ ID NO: 38809 - DNA, 816 bp, Unknown
  Obtained from environmental sample
  misc_feature (1)..(816): n is a, c, g, or t
ttgttattgggcgaagaaaagcaccatggcgcgattcttgctatggcgcggcagaatgcggcggaagatttgcgcaaacggctgaaggagaggggggcggggcccgccttggacgaattgctgagggtgttgaatttgcatactaagccggagcggattgaagggtttgatatttctcatcttgacgggaaacatcctgtcgcttcgcttatctcttttaagaacggggttccggatcgcaagaattaccgttattttaaactgcgcacggtaatcggaaaagtggacgactttgcagccatgcgcgaagcggtacagcggcgttattcccgcctattgcgcgaagaaaaggaaatgcccaatttaattcttgtagacggcggcatagggcaggtgaacgcggcaaaaacagtgttagatgaaatgggtattaattgcgatattgccggtcttgccaagcgtgaagaggaactgtggctgcccaacgcgaaagagcctgttgtgctttcaaggcaatcggaagcgttgaaagtgctacaatttgtccgcgacgagtgccatcgttttgccaccgggcttaatataaagctccgttcaaaggatttgttttttccggtattggaatcagttgaaggcatcgggcccaagcgcgcggcggcaattatgcgctcttacgaaacgctggaaaacatagccgcggcgtctttaacggaaatggctgaacgctgcaaaataagcgaagacgccgccagagcggttcgcgccgtagcgaaactcgcgcttgaagagaagaaggggccgcgtaaacgggagtaa

SEQ ID NO: 38810 - protein, 271 aa, Unknown
  Obtained from environmental sample
  DOMAIN (40)...(191): UvrC Helix-hairpin-helix N-terminal
  misc_feature (1)..(271): Xaa is any amino acid
MLLGEEKHHGAILAMARQNAAEDLRKRLKERGAGPALDELLRVLNLHTKPERIEGFDISHLDGKHPVASLISFKNGVPDRKNYRYFKLRTVIGKVDDFAAMREAVQRRYSRLLREEKEMPNLILVDGGIGQVNAAKTVLDEMGINCDIAGLAKREEELWLPNAKEPVVLSRQSEALKVLQFVRDECHRFATGLNIKLRSKDLFFPVLESVEGIGPKRAAAIMRSYETLENIAAASLTEMAERCKISEDAARAVRAVAKLALEEKKGPRKRE

SEQ ID NO: 38811 - DNA, 636 bp, Unknown
  Obtained from environmental sample
  misc_feature (1)..(636): n is a, c, g, or t
gtgccggccttggcgacgaagcacggggtgacgaagcagtcgcgtagcttttcggcgtggagccacgtggtttctatgctgttcgcccatctcagccacgccatgagtctgaacgatgtctgtgacacgctgcggctgcacagcggggctctttcaacgatccggaacgcgacgccgcccagtcgcaacggtctgtcccacgccaacaagatacgcagcgcggaaatggccaaagagcttttttatgcggttttagggcatctgacctgcctttacccgaaattcgggcggacggacgccgcattcaagctgcctcgccgcctgaagcgcgtggtcaatatagtggattccaccacgatacagctcttcgcgaactgcatggactgggcgaagcaccgcagacggaaggcggcggctaaatgccatttgatgctggacgcgcagacgtttctgcctagattcgccgtggtgaagggtgccgatacggcggacgcaggttatgcgacgcgctacgggccggcgagatcgtggtttttgaccaagcgtatgtggattacaagcatctgttcgagctgtcccaacgaggggtactctgggtcacaccccaaaagaaaacatggcgtaccgtatcgctaa

SEQ ID NO: 38812 - protein, 211 aa, Unknown
  Obtained from environmental sample
  misc_feature (1)..(211): Xaa is any amino acid
MPALATKHGVTKQSRSFSAWSHVVSMLFAHLSHAMSLNDVCDTLRLHSGALSTIRNATPPSRNGLSHANKIRSAEMAKELFYAVLGHLTCLYPKFGRTDAAFKLPRRLKRVVNIVDSTTIQLFANCMDWAKHRRRKAAAKCHLMLDAQTFLPRFAVVKGADTADAGYATRYGPARSWFLTKRMWITSICSSCPNEGYSGSHPKRKHGVPYR

SEQ ID NO: 38813 - DNA, 822 bp, Unknown
  Obtained from environmental sample
  misc_feature (1)..(822): n is a, c, g, or t
atgacagaacatcacggccaatcggatgcgccaaaaccgaaaaaattccgcaattttacttcaagcggcggatttaaaatcgccgtgcttatcatactgattttaattttattgatacctgtttcaatggttcgctcattgataagcgagcgcagttaccgctcgaatgacgcggaaagggaaatcatgcaagcctggggcagtcagtttaaattgtacggtcccatagtccgtattcctgttgtcgaacgcacggaggtcaggacaaaaacggaaaaggaaggggaaaaaatcgaaataataacgacaaattacacgctttggattacgccgaataatgttgatattaacgccgatttttccgcccagaaaaaacgcaggggcattttctccgtcgcgctgttttcgggcaacctttccctttccggagagttcaaccttgaaagggcgaaagctgagctaaagcaaaaccagacaatgaatcttgatcaggctgaaatcatcatagggctggcaagtcaaaaaggaatacgcagagttatcaaggcggactggaacggcagcgaactttcttttaagccgggaaaccgtaattttacgcttggttcatcaggcaataacggcgtcaacgctttaagccccttcaaagcaaacggaccaaatactttcgacattcaattcgcggtgcagggaggaaaatcgcttagagcgcttcccataggcgagacaactcgtgtgcgcgtaaagaccgattggccgtcgcccctcgtttcagggaggtttcttgcctgtaagttatacgctgtccgaaagcggttttga

SEQ ID NO: 38814 - protein, 273 aa, Unknown
  Obtained from environmental sample
  DOMAIN (21)...(273): Inner membrane protein CreD
  misc_feature (1)..(273): Xaa is any amino acid
MTEHHGQSDAPKPKKFRNFTSSGGFKIAVLIILILILLIPVSMVRSLISERSYRSNDAEREIMQAWGSQFKLYGPIVRIPVVERTEVRTKTEKEGEKIEIITTNYTLWITPNNVDINADFSAQKKRRGIFSVALFSGNLSLSGEFNLERAKAELKQNQTMNLDQAEIIIGLASQKGIRRVIKADWNGSELSFKPGNRNFTLGSSGNNGVNALSPFKANGPNTFDIQFAVQGGKSLRALPIGETTRVRVKTDWPSPLVSGRFLACKLYAVRKRF

SEQ ID NO: 38815 - DNA, 1014 bp, Unknown
  Obtained from environmental sample
  misc_feature (1)..(1014): n is a, c, g, or t
atgcgtgatttatcatcagttgatgaactgccttcctgcaacaaagattcaacaatactatggattaatgtaaacggcttaaaagataccggctcgataaaaaaactggaaaaaatatataatatccatcctctgactattgaagacgcccttgataccaggcagcagccaaaagtcgaaacattcgagaaataccgttttatttccctaaaatcaataaggcatgaaaagaaagtccatttgataaaacaggaaattaaaaaaagttattttagaagaaaccgaanaaacctaattgaaacactggaagacatgaaggaatttgttattgatcatatcaatataatcataatgaagaatgtgttaataaccattcaggaaataccgggcgattcattcggggatataagaaaacgtattttggaaaacatcgggcagattcgcaaaatgggaacggattatctcgcctattcattgattgatactgtggttgacgaatattttattacactggctcatttggaagctgatattgaagatctggaagatcgcgccgtaaagacagataatgacgcgttcatttccgaaatacaggaaacaaaaaaattccttttctatataaaacgggcaatgctgccattgcgggagaatcttatgattatatcccgccaggatatgctgttagcaaacgaagaactaaagccgttccttcaggatttgcgggaaaatttatcgaatgcgatagactcagtagagacctaccgtgaatggctgacaaacataatggacgtaaacctttcggttctgtcataccaattaaacaaagtgatgaaaatactggcagtaatatccgcaatatttattccattaacttttatcgcggggatatacggcatgaattttgaatttatgcctgaaataagacaacctttaggctaccctcttgtgctgggcttcatgggaactgttgcgctgtcaatggttatattatttaaaacacggaaatggttttaa

SEQ ID NO: 38816 - protein, 337 aa, Unknown
  Obtained from environmental sample
  DOMAIN (16)...(337): CorA-like Mg2+ transporter protein
  misc_feature (1)..(337): Xaa is any amino acid
MRDLSSVDELPSCNKDSTILWINVNGLKDTGSIKKLEKIYNIHPLTIEDALDTRQQPKVETFEKYRFISLKSIRHEKKVHLIKQEIKKSYFRRNRXNLIETLEDMKEFVIDHINIIIMKNVLITIQEIPGDSFGDIRKRILENIGQIRKMGTDYLAYSLIDTVVDEYFITLAHLEADIEDLEDRAVKTDNDAFISEIQETKKFLFYIKRAMLPLRENLMIISRQDMLLANEELKPFLQDLRENLSNAIDSVETYREWLTNIMDVNLSVLSYQLNKVMKILAVISAIFIPLTFIAGIYGMNFEFMPEIRQPLGYPLVLGFMGTVALSMVILFKTRKWF

SEQ ID NO: 38817 - DNA, 813 bp, Unknown
  Obtained from environmental sample
  misc_feature (1)..(813): n is a, c, g, or t
atggcgacggcaaagataaagacggcggctaaacatcaaatcgtttcgcacccatccgagctgaagtttgattccttggattggaaggttcctctgggcgaccgtcaccgcgttgcgcttacgaacggcaaaaatgcgaccggccccgtcgcctacgtcgccgttgattccacgctgccgcttgtttccataacggcctacatccgcagcggttctctgaccgaccccgccggcaaggagggtttgggctctctcatgaccaggcttatgcgtaccggcggcaccgagcgttaccatgccgacacgctcgacgcgttgattgaccaattggcgatgagtttctcattttcgcaaggagaggcggacatctcgtttagggcttcgttcctctctgaatatcttgacaccgccatggttattatgaaggagatgttcttccatccggcgtttgacccaaagaaattggaacgcgagcgctccatcacgttggaaggtatcagtaatcgttttgccaaccccggccccacgctctccgtcgcgtaccgcaaacacgcctaccagaagtccgcgcccgcgagaatatcaacggcggcgtcggtaaagtctataaagcgcaacgacatcgtagcgttgcacaaggcggcgttcagttcctgcgaaatcatattagcggcatccggaaaattcgatagggacgatatgatatcgaggctcaacgcggtcttctccgcgccgatagcgccgaagccgcaaccatcccggagatcgncgtggccccgcaaactcgcgcgctcgtcgtacacaaggatataa

SEQ ID NO: 38818 - protein, 270 aa, Unknown
  Obtained from environmental sample
  DOMAIN (52)...(194): Insulinase (Peptidase family M16)
  misc_feature (1)..(270): Xaa is any amino acid
MATAKIKTAAKHQIVSHPSELKFDSLDWKVPLGDRHRVALTNGKNATGPVAYVAVDSTLPLVSITAYIRSGSLTDPAGKEGLGSLMTRLMRTGGTERYHADTLDALIDQLAMSFSFSQGEADISFRASFLSEYLDTAMVIMKEMFFHPAFDPKKLERERSITLEGISNRFANPGPTLSVAYRKHAYQKSAPARISTAASVKSIKRNDIVALHKAAFSSCEIILAASGKFDRDDMISRLNAVFSAPIAPKPQPSRRSXWPRKLARSSYTRI

SEQ ID NO: 38819 - DNA, 339 bp, Unknown
  Obtained from environmental sample
  misc_feature (1)..(339): n is a, c, g, or t
atggacgatgactttaacacgccctcggcgatttcccatgtttacgctattgttaaattgctgaatacggaaacgcacagcgacgcgccggatcctggcaagataaaaacaatactggattttttctcaagccatgtcgagcctgttttgggtttcaactttgacgcgcagacgaccggttcaaatgaccagacgcaggagcttgtcacatacctttctgacatacgccaaaagctgagagacgcgaagcaatttgagcttgccgacaaaatcagaacagacctggaatccgtgtttaatgttaatgtcaaggatgggaagattggaaatccccgctaa

SEQ ID NO: 38820 - protein, 112 aa, Unknown
  Obtained from environmental sample
  misc_feature (1)..(112): Xaa is any amino acid
MDDDFNTPSAISHVYAIVKLLNTETHSDAPDPGKIKTILDFFSSHVEPVLGFNFDAQTTGSNDQTQELVTYLSDIRQKLRDAKQFELADKIRTDLESVFNVNVKDGKIGNPR

SEQ ID NO: 38821 - DNA, 651 bp, Unknown
  Obtained from environmental sample
  misc_feature (1)..(651): n is a, c, g, or t
gtgcaaaacgatgtttacgaaaatgttttcaaagctgctttaaaatggttttattatcaaagatctagcactgccctaccctttgaatttgccggcaaatggatgcgggcagccgggcacccagacaccagcgttggcttttacccagaagccggaaaaccagcaggctggaaaatcagcagtccaaagggctggtacgatgcaggcgactatggcaaatatgttgtgaacagcggtatttccgttttcactcttttggaactatatgaacattttgaaaaagaactcaaaataatttccttgaacattcccgaaagcaaaagcaaaacaccggatattttagaagaagtacgctggaacctagactggatgctaaccatgcaagacccggaagatggcggggtttatcacaaattaaccacagcaagattcagcgggcacgaattgccagaaggcgatattgcaaaaagatatgtggttatgaaaacaagcaccgctgctttaaactttgcagcagttatggcacaggcaagccgcatttacaaaccctttgacgcaaattctccgcaacagccattgccgccgcagaaaaagcctttgaatgggcaacaaaaaatccatcaattctattcaaacaacccgaaggtatga

SEQ ID NO: 38822 - protein, 216 aa, Unknown
  Obtained from environmental sample
  DOMAIN (5)...(216): Glycosyl hydrolase family 9
  misc_feature (1)..(216): Xaa is any amino acid
MQNDVYENVFKAALKWFYYQRSSTALPFEFAGKWMRAAGHPDTSVGFYPEAGKPAGWKISSPKGWYDAGDYGKYVVNSGISVFTLLELYEHFEKELKIISLNIPESKSKTPDILEEVRWNLDWMLTMQDPEDGGVYHKLTTARFSGHELPEGDIAKRYVVMKTSTAALNFAAVMAQASRIYKPFDANSPQQPLPPQKKPLNGQQKIHQFYSNNPKV

SEQ ID NO: 38823 - DNA, 396 bp, Unknown
  Obtained from environmental sample
  misc_feature (1)..(396): n is a, c, g, or t
atgaacacaggaccatacgctcctagcgatgaaacagttcaagacgaaaagctatgggcagcagcagaactctatatcagcacaaagaaaaaatcttacgaaaatataattgatagcgttccatttgacgggcaaacaccttggtggggcaatgtgaatttcttgactgtgtacagaatttccgatgctaaaaatggatttaaaaaagatttgaacaaaaaggctcaagatacccttatcactgttgcanatatgctcaaagatatagcagaaaattccgcttatggcgtaccagtaaataaatggaactttgtttgggngtcaaattctgccgnttngcaatatggcattttgcttttgcacgcatattatttaacaaaaacaaaagctatttag

SEQ ID NO: 38824 - protein, 131 aa, Unknown
  Obtained from environmental sample
  misc_feature (1)..(131): Xaa is any amino acid
MNTGPYAPSDETVQDEKLWAAAELYISTKKKSYENIIDSVPFDGQTPWWGNVNFLTVYRISDAKNGFKKDLNKKAQDTLITVAXMLKDIAENSAYGVPVNKWNFVWXSNSAXXQYGILLLHAYYLTKTKAI

SEQ ID NO: 38825 - DNA, 795 bp, Unknown
  Obtained from environmental sample
  misc_feature (1)..(795): n is a, c, g, or t
ttggtaattaccgatctctggatgcctggtctttccggtgaagagctgctggaaaagattctggccgaaagccccgggattccggtaatcatcctgacgggtcacggtactattgaagccgccgttaaaaccatgcgtgccggagcgtgggacttccttataaagccggttaacttggactacctttcgcttttggtcaagcaggccctggacaaccgggagctggtcctaaagcacaagcggcttctggaggagctggcgcatcacaagcgctttcagaccatcatcgggacaagcgctgttatgcgcaaggtttatgacaccacaagccgcgccgcccccaccaaggcgtcaatcctgatcacgggcgaatccggcgttgggaaggagctcgtggcggatgctattcacgagctttcgccccgcaaggacaagcccctcatcaaggtgcattgcgccgccctggctgccagcttattggaaagcgagcttttcggccatgagaagggagcttttaccggcgctgtggcgaggaagcggggtcgctttgaactggcgaacgaaggcaccctatttctggacgaaatcggcgaaatcgatcagaacatccagataaaactgctgcgggttttgcaggaaaagaaatttgaaagggtgggcggggaagaaaccatagaaaccgacgttcgtatcgtcgccgccaccaacaaggatctgaaagcggagatcgaaaaaggcaacttccgcgaagatctttatttccgccttaacgctcgtgccgctctccgaatctga

SEQ ID NO: 38826 - protein, 264 aa, Unknown
  Obtained from environmental sample
  DOMAIN (114)...(259): ATPase family associated with various cellular activities (AAA)
  misc_feature (1)..(264): Xaa is any amino acid
MVITDLWMPGLSGEELLEKILAESPGIPVIILTGHGTIEAAVKTMRAGAWDFLIKPVNLDYLSLLVKQALDNRELVLKHKRLLEELAHHKRFQTIIGTSAVMRKVYDTTSRAAPTKASILITGESGVGKELVADAIHELSPRKDKPLIKVHCAALAASLLESELFGHEKGAFTGAVARKRGRFELANEGTLFLDEIGEIDQNIQIKLLRVLQEKKFERVGGEETIETDVRIVAATNKDLKAEIEKGNFREDLYFRLNARAALRI

SEQ ID NO: 38827 - DNA, 873 bp, Unknown
  Obtained from environmental sample
  misc_feature (1)..(873): n is a, c, g, or t
ttgggactaagcgaaagcggcactaaggaagagctgcagggaaggctccgaacatattacaacttgcgtcctcgtggaaacacttatcggcctgggcagcagatcattaccattgaggccgccaagaccacagagtactttaccattgaagtggttgacgaagagtacgcccggcttaaaggagatgtaatagtaagccttaaagatggagccacggtccaccggattaaagcctgggagatattgtacaaccgtacacgtaacgtgatgaccgctacaggaaatgtagagtacaccaaagaggaaggggctaccgttgaaactttcaagggtgattccattacggttaatctggataactggtcgggtattttcatggacggcgcgtcgcaaaaatctaccgtaggcggatcagccgcattcaggttttcgggaacagttatttcaaaaaatgacgaaggcgctactgtcctttccggggcagatataaccaatcccgcaaacgaagaagcttattggtcactgcacgcttcaaagttatggcttctacccggaaacgactgggcaatttttaacgccgttctaaaagtaggcaatattcccctgctatatcttccgtttttcttttaccccgcagatgaaattatttttcaccccgtgcttggttaccgttccagggaagggacgtttctgcaaactacaacttacatacttggcaggccaaagtcttcgggatcgtcgggaaattcaattaccaggattttcgggggcgactccgacagcgagggaaaagtcagggaaggcgtattccttagagcttctaatgaaaagaccagtagataccagcgcgacgcagttttcggttctttttga

SEQ ID NO: 38828 - protein, 290 aa, Unknown
  Obtained from environmental sample
  misc_feature (1)..(290): Xaa is any amino acid
MGLSESGTKEELQGRLRTYYNLRPRGNTYRPGQQIITIEAAKTTEYFTIEVVDEEYARLKGDVIVSLKDGATVHRIKAWEILYNRTRNVMTATGNVEYTKEEGATVETFKGDSITVNLDNWSGIFMDGASQKSTVGGSAAFRFSGTVISKNDEGATVLSGADITNPANEEAYWSLHASKLWLLPGNDWAIFNAVLKVGNIPLLYLPFFFYPADEIIFHPVLGYRSREGTFLQTTTYILGRPKSSGSSGNSITRIFGGDSDSEGKVREGVFLRASNEKTSRYQRDAVFGSF

SEQ ID NO: 38829 - DNA, 804 bp, Unknown
  Obtained from environmental sample
  misc_feature (1)..(804): n is a, c, g, or t
gtgaatgtggggcagttgagtaatggcgagggttgtgccataactgatgcgagcaattctgcgtattatcttataacctgcggcagcacttctgggcagcttgcaaaagcctggtgcgtggaaaaggcttacgaccctgcaaaaatgatatgcaacaacggtattctcacatttagctttacagatgctcgcgataacaaggtgtataaagcggtggtgataggcacacagacttggatggcggagaatttgaactataatgccccaagcagtaaatgttacgccgagggagttgatggtgtttctaatgatagcattgctaaaaattgtgccaaatacggcaggctgtataactgggcaacggcaatggctctgtccgctgattgcaacaccagtctttgtgcttcgcaggtaacagaaaagcacgggggcgtttgccctgctggttggcatatccctagcgatgccgaatggaatgttttgatgaaagtagctaatccgagttgctccaacaatagcaattgcgcaggtgctggaaccaaattgaaagctagaagcggttggaatccgcgtgatggaattccctcaggcacggacgattttggcttttcggctctgccgggcggctacggcaattcaggtggcagtttcctcggtgtcggcaactacggctactggtggagtagcacggaggacaatgccgacctcgcctacggccggggcatgagttacaactacgagagtgtctacagggacgacgacggtaagagctacttgcaaagtgttcgttgtctccaggactga

SEQ ID NO: 38830 - protein, 267 aa, Unknown
  Obtained from environmental sample
  misc_feature (1)..(267): Xaa is any amino acid
MNVGQLSNGEGCAITDASNSAYYLITCGSTSGQLAKAWCVEKAYDPAKMICNNGILTFSFTDARDNKVYKAVVIGTQTWMAENLNYNAPSSKCYAEGVDGVSNDSIAKNCAKYGRLYNWATAMALSADCNTSLCASQVTEKHGGVCPAGWHIPSDAEWNVLMKVANPSCSNNSNCAGAGTKLKARSGWNPRDGIPSGTDDFGFSALPGGYGNSGGSFLGVGNYGYWWSSTEDNADLAYGRGMSYNYESVYRDDDGKSYLQSVRCLQD

SEQ ID NO: 38831 - DNA, 366 bp, Unknown
  Obtained from environmental sample
  misc_feature (1)..(366): n is a, c, g, or t
atggtatttctgtcttttattataaaacccctgccggttcaaattattatttttctgttaatttccggagttctgttgttctttacccgccctatcgcgataaagaaattaaaaaccggaaaggttaaaacaaacgtagacagccttgtcggaatgcatgcccttgtaacaaagaagataagcgaatttgacaggggagaggtaaaattaaacggacagttttggacttcccgttccgaagacggttctacaattgaagaggggacaaagtgcgaagtggtgcgcatagagggcgtgcaggcgattgtgcgcatattaaaagatacgcaagaatcagatacgcaggtatcagaaaataacgaataa

SEQ ID NO: 38832 - protein, 121 aa, Unknown
  Obtained from environmental sample
  DOMAIN (1)...(107): Nodulation efficiency protein D (NfeD)
  misc_feature (1)..(121): Xaa is any amino acid
MVFLSFIIKPLPVQIIIFLLISGVLLFFTRPIAIKKLKTGKVKTNVDSLVGMHALVTKKISEFDRGEVKLNGQFWTSRSEDGSTIEEGTKCEVVRIEGVQAIVRILKDTQESDTQVSENNE

SEQ ID NO: 38833 - DNA, 876 bp, Unknown
  Obtained from environmental sample
  misc_feature (1)..(876): n is a, c, g, or t
gtgcaactcaacgtcgtccgaatcgggtcaaagcagatcgagtttatagttgacatcgatgaaaatctaccgtcaaagctttacggcgacgagttgcggatcaaacagatactgaacaatctgctttccaacgcaataaagtataccaatgaggggtgcgtaaatttgtcggtgggttatttaacagacggcgacggtgtaacgttgcgttttacggtagaagataccggacagggcattaagccgcaggacaaggagcggctcttttcggaatacatgcgtttcaacgccgaaaccaaccgcgccaccgagggtacggggcttggtctgaatatcacaaaaaagttagtggagatgatggacggcacgatcggagcggagagcgagtacggtaaaggcagcgtgtttaccgtgaccgtccggcaaaaagcggtggagtgtccggccataggcgcaagagttgcggagcaactgcgtaaattcactttcaccggcgataggcgcatggctaatctgcggataaaccgcgagcttatgccctacgggcgcgtactggtggtggacgacgtggccactaatatatatgtggcggcagggttgctggcgctgtatcaattaaacatagatacggcggacagtgggttcgaggccattgaaaaagttaaaagcggcggcgtttacgacgatatgttcaagcaaaagggattcgacgggttcatcgccaagcctatcgaanatcgtcagttgaatgaggttttaaacaaatttgtccgcgacaagtatcctgaggaggctaagaagtacgccgcggaaacgccggaaacagggcgactcgcgtcaggaggcgacgcagcgccatataaatcagagcaataa

SEQ ID NO: 38834 - protein, 291 aa, Unknown
  Obtained from environmental sample
  DOMAIN (29)...(143): Histidine kinase-, DNA gyrase B-, and HSP90-like ATPase
  misc_feature (1)..(291): Xaa is any amino acid
MQLNVVRIGSKQIEFIVDIDENLPSKLYGDELRIKQILNNLLSNAIKYTNEGCVNLSVGYLTDGDGVTLRFTVEDTGQGIKPQDKERLFSEYMRFNAETNRATEGTGLGLNITKKLVEMMDGTIGAESEYGKGSVFTVTVRQKAVECPAIGARVAEQLRKFTFTGDRRMANLRINRELMPYGRVLVVDDVATNIYVAAGLLALYQLNIDTADSGFEAIEKVKSGGVYDDMFKQKGFDGFIAKPIEXRQLNEVLNKFVRDKYPEEAKKYAAETPETGRLASGGDAAPYKSEQ

SEQ ID NO: 38835 - DNA, 765 bp, Unknown
  Obtained from environmental sample
  misc_feature (1)..(765): n is a, c, g, or t
atgctgctggtcaacgatgaaaaaatgaaagcaatttacgacaacggtgttgcgcctaacctaaaggcgggcatgacgctttgttttgcccacggctttaacatcagattcgggcaaatcgctcccccaaaaaacgtaaacgtcattatgattgcgcccaaaggcccggggcatactgtaagaagccagtacctggaaaacaggggagtgccctgtcttattgccgtggaaaacaacgctacaggcgacgcgaaagaaatcgccctggcttacgcttccggcataggcggcggcaggggaggcattctggagaccacctttaccgaagagaccgagaccgacctctttggcgaacagtgcgttttgtgcggcggcgttaccgctttgatgaaagccgggtttgagacccttgtaaacgcgggttatcagcctgaaagcgcctactttgaatgtatacacgaaatgaagctgatcatcgatctggttataaagggcggcctgtcctttatgcgctactcggtcagcgacacggcggagtacggcgattactgcatcggtgacaggatcatcacgcaggctaccaaggacgaaatgaaaaaggtgctggccgcgattcgggacggctctttcgcgaaacagtggctaaaggaaaacgccgacggaaggccaaatttcacggcgcggcgcaaggccgagaccgagcttcaggtagaggtagtcggcagggagcttagggagaaaatgagctggagcgacaagaagtga

SEQ ID NO: 38836 - protein, 254 aa, Unknown
  Obtained from environmental sample
  DOMAIN (1)...(101): Acetohydroxy acid isomeroreductase, catalytic domain
  misc_feature (1)..(254): Xaa is any amino acid
MLLVNDEKMKAIYDNGVAPNLKAGMTLCFAHGFNIRFGQIAPPKNVNVIMIAPKGPGHTVRSQYLENRGVPCLIAVENNATGDAKEIALAYASGIGGGRGGILETTFTEETETDLFGEQCVLCGGVTALMKAGFETLVNAGYQPESAYFECIHEMKLIIDLVIKGGLSFMRYSVSDTAEYGDYCIGDRIITQATKDEMKKVLAAIRDGSFAKQWLKENADGRPNFTARRKAETELQVEVVGRELREKMSWSDKK

SEQ ID NO: 38837 - DNA, 504 bp, Unknown
  Obtained from environmental sample
  misc_feature (1)..(504): n is a, c, g, or t
atgaaaaaatttattacagcggtaatcgtcttatttgtatgcgccgttaccgggtttgccgccgatccggtggaaggtttttggctgagcgtagaccctataacaaaggaaattcaatccggttgggaaatgtacgaaagcaacggttatttgtatggaaaaatgctttccgcggttcgctgcgcgccaaccgataaggctcataaatgcaatgatagttatcccgattttcccataaccggaaaagtaaacgagtttcccattctcggcaccccatggatattcggccttagcatggaaagccccggacattggactaacggctatatcatcaaccccgatgacggcaatatatataaattatcgcttacatttcatccggcggacggcgggaagtttcagcatgaaacgctggaaatgcacggacaacttcttcatcttcatttagctgtaagccaatactggcggcgggcaacccgcgaagaagcaagcgcgctgaaataa

SEQ ID NO: 38838 - protein, 167 aa, Unknown
  Obtained from environmental sample
  SIGNAL (1)...(20)
  misc_feature (1)..(167): Xaa is any amino acid
MKKFITAVIVLFVCAVTGFAADPVEGFWLSVDPITKEIQSGWEMYESNGYLYGKMLSAVRCAPTDKAHKCNDSYPDFPITGKVNEFPILGTPWIFGLSMESPGHWTNGYIINPDDGNIYKLSLTFHPADGGKFQHETLEMHGQLLHLHLAVSQYWRRATREEASALK

SEQ ID NO: 38839 - DNA, 843 bp, Unknown
  Obtained from environmental sample
  misc_feature (1)..(843): n is a, c, g, or t
atgccgcctctgtccggcatccctttcgtcctggtttttgaagacgtgctgcgcggcaaaatcggctttaagggcatagtgattaccgatgatctgatgatgaacggcgcgacggactgggcgggcagtctttcccgaaccgcgaaacaggccctgcttgcgggtaacgatattattttgatttccaaaacgccctttctttttgatccggtgtggacttttttggtttcttcgatgaaagacgacgctgaattccgcctgagcgtacgcgcggctgcccgccgcatacttgccctgaaactacgcgaccttcgcggcgaaaacaaggttccctatattcccgacctgagaaaagcggcagccggagtgcccgatccgcagggcacggcttttttcctgaatctcgcggcgcgcagcgttaccattgtaaagccttccccggcagggtcccttttcccgctgacagagcaaaaagccgggcgcgtattattggcaggccagtacagcgattttttcaaggcgggaaggaccgctttccccggcgctggtatgtactggtattccgaatcgcaggccccggcggacatagtgccttacgcgcgtaacgcggatacggtaattttctgtctttccgacacgacagatttgcgtttattgcgctctattcagcaattaggcaaaaaagttatagttctttcggtattaaaccccgtatatatagaaagcgtcccctgggtaagcggagccgtcgcggtttacagttacgcgcccgaatcattcgccgcgggattttccgccataatcggcagaattcccgcgcggggaattctgccctatgagtaa

SEQ ID NO: 38840 - protein, 280 aa, Unknown
  Obtained from environmental sample
  misc_feature (1)..(280): Xaa is any amino acid
MPPLSGIPFVLVFEDVLRGKIGFKGIVITDDLMMNGATDWAGSLSRTAKQALLAGNDIILISKTPFLFDPVWTFLVSSMKDDAEFRLSVRAAARRILALKLRDLRGENKVPYIPDLRKAAAGVPDPQGTAFFLNLAARSVTIVKPSPAGSLFPLTEQKAGRVLLAGQYSDFFKAGRTAFPGAGMYWYSESQAPADIVPYARNADTVIFCLSDTTDLRLLRSIQQLGKKVIVLSVLNPVYIESVPWVSGAVAVYSYAPESFAAGFSAIIGRIPARGILPYE

SEQ ID NO: 38841 - DNA, 966 bp, Unknown
  Obtained from environmental sample
  misc_feature (1)..(966): n is a, c, g, or t
atggacaaactgcccctgaaactgattgagggcattaccattgccggttttacgttccgggcgcaagccgggtatatctacgtgcggggcgagtaccggaagattcaaaaacggcttcttaccgccattgaaaacgcccggaacgcgcggttcctcggcgggaatattctcggcacgggatttgattttgatattcacgttatttccggcgcgggggcgtatgtctgcggggagaattcggcgctgcttaattccaccgagggcaaagtcggacggccccgcattaagccgccccatctggcggaagtggggctgttcctncagccgactctggtgaacaatgttgaatcacttgccagtattcccgccattatcgaaatgagcggggatgaacacctcaagatgggccatcccgattcaggggggacaaaattgatatgcctttccggccatgttcaaaaccgcggagtctttgagattccgcttggcaagctgactttgcgtgagatcatcttcgatcatgaattggggggcggagttccgcaaggcaggaaacttaaatttttccaccttggcggaaagagcggccaaatcggcgggcccgatctgttggacacggcgtacagttacaccgacctgagaaaagcgggcctgagcgtaggctcgggcgcaatcgtagtcatggatgagacggtttcgatcctcgaatacctgcaatgcgtcactgaatttttcattcatgaatcctgcggcaagtgcataccctgccgcgagggcaacaggcagatcctcaagatactcaaaaaaatctccgcttccggagcgaccgacaatgatttgcataccctgcgccgccttatccgcgccatgaccgacgcttcattctgcggccttgggcagaccgccgccaaagccctggaaagcgcgtggaaatgctttaagacggaaatcgaggtaaaaccatga

SEQ ID NO: 38842 - protein, 321 aa, Unknown
  Obtained from environmental sample
  DOMAIN (1)...(201): Respiratory-chain NADH dehydrogenase 51 Kd subunit
  misc_feature (1)..(321): Xaa is any amino acid
MDKLPLKLIEGITIAGFTFRAQAGYIYVRGEYRKIQKRLLTAIENARNARFLGGNILGTGFDFDIHVISGAGAYVCGENSALLNSTEGKVGRPRIKPPHLAEVGLFLQPTLVNNVESLASIPAIIEMSGDEHLKMGHPDSGGTKLICLSGHVQNRGVFEIPLGKLTLREIIFDHELGGGVPQGRKLKFFHLGGKSGQIGGPDLLDTAYSYTDLRKAGLSVGSGAIVVMDETVSILEYLQCVTEFFIHESCGKCIPCREGNRQILKILKKISASGATDNDLHTLRRLIRAMTDASFCGLGQTAAKALESAWKCFKTEIEVKP

SEQ ID NO: 38843 - DNA, 432 bp, Unknown
  Obtained from environmental sample
  misc_feature (1)..(432): n is a, c, g, or t
atgatggccnatatccatgggtccggtgctggtggtttcctctggatgtataccggtacttatgtgattatctttttggcgaatttgcagaaaatcgacccctcaattattgaggcttcaaagatcgacggcgcaagtgaaatgcagactttgcgttttattgtattgcccgccttgtccggcgttattgttacctgcgcgattcttgcgatttcaggttcgcttaaatcttttgatctggtatatgtaatgactcagggagggccggcccatagaacaagcctccttgccttttatatgtatgaaaaagcgttcaggggcgcgccgaattatccggtggccaatgccatttctacggtaatgatgattatcagttttatactgatagtgattacccgtgtcattgaaaaacgctttgcacaggaggagtag

SEQ ID NO: 38844 - protein, 143 aa, Unknown
  Obtained from environmental sample
  misc_feature (1)..(143): Xaa is any amino acid
MMAXIHGSGAGGFLWMYTGTYVIIFLANLQKIDPSIIEASKIDGASEMQTLRFIVLPALSGVIVTCAILAISGSLKSFDLVYVMTQGGPAHRTSLLAFYMYEKAFRGAPNYPVANAISTVMMIISFILIVITRVIEKRFAQEE

SEQ ID NO: 38845 - DNA, 702 bp, Unknown
  Obtained from environmental sample
  misc_feature (1)..(702): n is a, c, g, or t
ttgacgaagcggttcccgcccagcttgaagcggttgtttatcttgaaaaaaatggcttctaagcttaaaaggcatttatacatcggaggccattcaaaaggcgggaatctgtccgtatatgctgcggcctgctgccgcaaaagaattcaaaagcgtataaaagatatttacagtttcgactcgcccggttttcaggataaaattttatcaagtaaaggttttaccctgattaaagaaaaaattcaatcattcattccgcaggcatcggttgtaggaatgttttttgaacacgggtgcagtcaaaaaattgttaaaagcgtatcatccggcctgttgcagcatgagctttatacgtgggaagtgacacataacgatctggtttatgctgatgacattactccggcgagccgctttgttgataaaactgtcaaggaatggatagcgggactgaacaaggaacagcgcgaacaatttctaaacgcgctctattccattttagataattcggaagtaaaatcgcttcaggattttgaagcctcgtggtttaaggcggcagggcgtatgttaaaaacattcggcggcattgatgaaaataaaaaacatcttattcaaaaaacttttggagatctgtttaacattgcccgccgtaattttgacaccctgttaaatcatcattcgccggataagaaaacagaaaaatga

SEQ ID NO: 38846 - protein, 233 aa, Unknown
  Obtained from environmental sample
  misc_feature (1)..(233): Xaa is any amino acid
MTKRFPPSLKRLFILKKMASKLKRHLYIGGHSKGGNLSVYAAACCRKRIQKRIKDIYSFDSPGFQDKILSSKGFTLIKEKIQSFIPQASVVGMFFEHGCSQKIVKSVSSGLLQHELYTWEVTHNDLVYADDITPASRFVDKTVKEWIAGLNKEQREQFLNALYSILDNSEVKSLQDFEASWFKAAGRMLKTFGGIDENKKHLIQKTFGDLFNIARRNFDTLLNHHSPDKKTEK

SEQ ID NO: 38847 - DNA, 537 bp, Unknown
  Obtained from environmental sample
  misc_feature (1)..(537): n is a, c, g, or t
ttgaagcaaaggccgttttctagagggagcagcggtaaatttatgctgatttatttgagtattggcatgaaggggagacctggtttttcacagtcacctcttaatcctgttgacagtttaatttttccccagctatcttatttgccttttgacggtattgttccgcctccggatgaaaaaggcagtataagtatacgtgacgcggcggaattattcggggcaaagcttaatgatgattcttccgaagaaaaattaacgatactgtttgaaaatgatcctgaactgcttggcgcgcttgctttttcaaaccgctttggaaattgcaaactttccggttatgtgaacattgttgacaatgagcgcggaattcaattttccgctgtttgtgtaaatttggatgataaagcttcttttgtcgtataccgcgggacagaccgtaatattgtcggctggaaagaagattttaacatgagttttgacgaagcggttcccgcccagcttgaagcggttgtttatcttgaaaaaaatggcttctaa

SEQ ID NO: 38848 - protein, 178 aa, Unknown
  Obtained from environmental sample
  misc_feature (1)..(178): Xaa is any amino acid
MKQRPFSRGSSGKFMLIYLSIGMKGRPGFSQSPLNPVDSLIFPQLSYLPFDGIVPPPDEKGSISIRDAAELFGAKLNDDSSEEKLTILFENDPELLGALAFSNRFGNCKLSGYVNIVDNERGIQFSAVCVNLDDKASFVVYRGTDRNIVGWKEDFNMSFDEAVPAQLEAVVYLEKNGF

SEQ ID NO: 38849 - DNA, 435 bp, Unknown
  Obtained from environmental sample
  misc_feature (1)..(435): n is a, c, g, or t
ttgatggccgaggagccgcgaagccaggggaagcacacggggattttccccttaaagcctgaagatgccggaaaagtcctgctgaccggtcagtaccttgattttttcaaagtgggcagggccgccttccccggcgcaatttcctactggtactccgaagactttaatatagatagtctcctgacttatgccagggccgctgacacggttatcttctgcctttcggataccgaaggcttaagaatattgaagcgtcttgaagcgttgaaaaaaaggatagttgtgctgtcggtattgaaccccgtctaccttgaaaacatcccctggattgacggagctgtagcggtgtacagcgactcttttgaatcgcttgcggcgggcttttcggctatcatcggaagaatccccgccgagggaagactcccttatgaatga

SEQ ID NO: 38850 - protein, 144 aa, Unknown
  Obtained from environmental sample
  misc_feature (1)..(144): Xaa is any amino acid
MMAEEPRSQGKHTGIFPLKPEDAGKVLLTGQYLDFFKVGRAAFPGAISYWYSEDFNIDSLLTYARAADTVIFCLSDTEGLRILKRLEALKKRIVVLSVLNPVYLENIPWIDGAVAVYSDSFESLAAGFSAIIGRIPAEGRLPYE

SEQ ID NO: 38851 - DNA, 936 bp, Unknown
  Obtained from environmental sample
  misc_feature (1)..(936): n is a, c, g, or t
ttgaatcgcttgcggcgggcttttcggctatcatcggaagaatccccgccgagggaagactcccttatgaatgagccgcttttctggcgctggaagaaaatgaacaaatcgcatatcgccggcgttgaagagctgttgcgggccaatgaacgctggtgcatgaacgcctgtagcagatttataaaaggcggctcccccgtatggatactgggccagggcgatcctttggcgcttgttatacatgccagacagaccttactccctgtgttatgcgatcaagaaaaagttcctcaaccgcgttttctccgtggttttttcggtggtaaggtttccctccattcattgcagggacgcaaggatgacgcgctggttatggagaaggctctggaagaaatggggctgtatgccgttgaaaaaaaagattacgacattatgtgccttgatcatcctctcttatcctgtaattcagccgcccccgtaaaccttgttatacgcaagcctgtgccgcaggacatgaacgcgcttgccgcgctgcacgccgcttacgaaaaggaagaggttttgcccgccgagtcggtttttcgccccgctgccagccgccggaatattgagcgtatctttgcggaagagcagattctcgtggccgaacttggcggctgtttgataggtaaaatcaataccaatgccgttacatttacgcgctgtcagattggaggcgtgtatgttcatccggattaccggggtctgggaatagcgggcagaatgacattcgaatttgcggtaagccttgccgcccagggcaggggcatatcactctttgtcaacaaaacaaatatcgccgcccgcagggtttatcagcgcataggttttgaaataatgggcgattatagaatcgactactttgggactggggacgcagagaaggcacggcgttaa

SEQ ID NO: 38852 - protein, 311 aa, Unknown
  Obtained from environmental sample
  DOMAIN (216)...(298): FR47-like protein
  misc_feature (1)..(311): Xaa is any amino acid
MNRLRRAFRLSSEESPPREDSLMNEPLFWRWKKMNKSHIAGVEELLRANERWCMNACSRFIKGGSPVWILGQGDPLALVIHARQTLLPVLCDQEKVPQPRFLRGFFGGKVSLHSLQGRKDDALVMEKALEEMGLYAVEKKDYDIMCLDHPLLSCNSAAPVNLVIRKPVPQDMNALAALHAAYEKEEVLPAESVFRPAASRRNIERIFAEEQILVAELGGCLIGKINTNAVTFTRCQIGGVYVHPDYRGLGIAGRMTFEFAVSLAAQGRGISLFVNKTNIAARRVYQRIGFEIMGDYRIDYFGTGDAEKARR

SEQ ID NO: 38853 - DNA, 555 bp, Unknown
  Obtained from environmental sample
  misc_feature (1)..(555): n is a, c, g, or t
gtgagctgcgccatgctcaagtccgtcggcgttacctacgtcatcatcggccactccgagcagcgccagtacttcggcgagaccgacgagacggtcaacaagaagatcaaggccgcgttagccgccggtttgctccccattgtctgtgtgggcgagacgcttgacgagcgtaaaggcggcaagatggacgcggtcatagagcggcagacccgcggcgcctttgccgatatcagcgccggcgacgcggcaaagtgcaccatcgcctacgaacccgtgtgggccataggcaccggcgaaacggccacgccgcagcaggcgaacgaggcgcacatatttataaggaatatactgacgcagctctacggtaaggagacggccgacggtatccgtatccagtacggcgggagcatgaagccggacaacgcgaaggaactgctggcccagagcgatgtggacggcggtttgataggtggcgcggcgctcaaggcgggcggatttcgcggggattgttcagcccaagtgactgggccggcggcccggattaaactcggatga

SEQ ID NO: 38854 - protein, 184 aa, Unknown
  Obtained from environmental sample
  DOMAIN (1)...(170): Triosephosphate isomerase
  misc_feature (1)..(184): Xaa is any amino acid
MSCAMLKSVGVTYVIIGHSEQRQYFGETDETVNKKIKAALAAGLLPIVCVGETLDERKGGKMDAVIERQTRGAFADISAGDAAKCTIAYEPVWAIGTGETATPQQANEAHIFIRNILTQLYGKETADGIRIQYGGSMKPDNAKELLAQSDVDGGLIGGAALKAGGFRGDCSAQVTGPAARIKLG

SEQ ID NO: 38855 - DNA, 396 bp, Unknown
  Obtained from environmental sample
  misc_feature (1)..(396): n is a, c, g, or t
atgtttttcgcgattttgctggttttgtttctgttggtgtgcgtgttcatctgtttgctcatcctcatccagtccgacaagggcggcgggatatccggtgctatcggcggcttgagcggggccaacagctttttaggtactcaagacacggccaacgtgctcacgaagggcacgtacatattcggcgccgtatttttggtgctttgcgtactgatgacgctctttgaaccgggcggcggggtcgcgaagagcgggttgcagaagagggcggagaaagtgcagacggtcaccccggtgccggcttcggcgttcggggcggacgggttcattgacgacgacggcggggcgccgggtgcgggcggcggcgcggccgatgagggagcgccggctgagtag

SEQ ID NO: 38856 - protein, 131 aa, Unknown
  Obtained from environmental sample
  SIGNAL (1)...(28)
  DOMAIN (3)...(77): Preprotein translocase SecG subunit
  misc_feature (1)..(131): Xaa is any amino acid
MFFAILLVLFLLVCVFICLLILIQSDKGGGISGAIGGLSGANSFLGTQDTANVLTKGTYIFGAVFLVLCVLMTLFEPGGGVAKSGLQKRAEKVQTVTPVPASAFGADGFIDDDGGAPGAGGGAADEGAPAE

SEQ ID NO: 38857 - DNA, 468 bp, Unknown
  Obtained from environmental sample
  misc_feature (1)..(468): n is a, c, g, or t
atgaataagcacaaaaacggttgggccctggttctttcggggggtggggcaatgggacttgcgcatataggtcttctcaagggaatagaagaggccggcttccccaggccatcccttgtggctggtacttcgatgggcgctatcgtgggcggcttatacgctatcgtaatgtcagcggcggaaatggagagtttcgttcttgacgaatttaactttgcagattaccttgacagttttgtttttaagatagacgggccctttggcaggataattcaaaccgggcaggcactggcgattctcgcgggcaagccggggatagatccggggcagagggcgcttgagcttcttgaaagccttacagctggaaagcacttcgatgaaaccgagattcctttccgttgcaacgcggtggatttgattagtgccagggaaattgtgtttaataccggttcttgtggcaaaagctag

SEQ ID NO: 38858 - protein, 155 aa, Unknown
  Obtained from environmental sample
  SIGNAL (1)...(21)
  DOMAIN (10)...(153): Patatin-like phospholipase
  misc_feature (1)..(155): Xaa is any amino acid
MNKHKNGWALVLSGGGAMGLAHIGLLKGIEEAGFPRPSLVAGTSMGAIVGGLYAIVMSAAEMESFVLDEFNFADYLDSFVFKIDGPFGRIIQTGQALAILAGKPGIDPGQRALELLESLTAGKHFDETEIPFRCNAVDLISAREIVFNTGSCGKS

SEQ ID NO: 38859 - DNA, 609 bp, Unknown
  Obtained from environmental sample
  misc_feature (1)..(609): n is a, c, g, or t
gtgacacctaacgctctcgacaggcttataaccctattttcaaaacttcccggcatcggaaaaaaaagcgctggcagaataacgtatcacctgcttgattcaagtcccgcccttgcgcaaactttggcaaaagaactttcaggtcttcatcaggcgataagacggtgtagcgtctgcggcggttttaccgaggacgatccctgctctgtttgttccaacacggagcgcgatcactcgatcatctgcgtggtggaaagcgcgcaagatatgcgaatcatcgaagactcgcatgagttccccggagtataccatgttcttggcggactaatcgcgcctcttgaagggataaatccggcaaacctttccatagataaacttatcagccgcctgcgcgccaatgcacctaacggtactcgcgtcaaagaactaatcctcgcgcttaaccccacagtcgaaggggacacgacggcgctgtatctgcaaaagacgctaaaagatttccctgtagaaatttcccgcctcgcttcgggaatgcctgttgggggaaatattgaatatattgacaagcttacgctctcgcggagttttaaggggagggtgagggtgtga

SEQ ID NO: 38860 - protein, 202 aa, Unknown
  Obtained from environmental sample
  DOMAIN (79)...(177): Toprim domain
  misc_feature (1)..(202): Xaa is any amino acid
MTPNALDRLITLFSKLPGIGKKSAGRITYHLLDSSPALAQTLAKELSGLHQAIRRCSVCGGFTEDDPCSVCSNTERDHSIICVVESAQDMRIIEDSHEFPGVYHVLGGLIAPLEGINPANLSIDKLISRLRANAPNGTRVKELILALNPTVEGDTTALYLQKTLKDFPVEISRLASGMPVGGNIEYIDKLTLSRSFKGRVRV

SEQ ID NO: 38861 - DNA, 804 bp, Unknown
  Obtained from environmental sample
  misc_feature (1)..(804): n is a, c, g, or t
atgtttgacgatcagaaagacaagattcccccccgaccgaacttaaaaggtaatgggcagccgaatcgttntgcgttgatttttttcctcctgatggccggccttttcatagcttatttctttagatccagcgaaacgcccgcaaaacaggaaataccctattctgttttcacgaaagccctggaactcaacgagattaccgatgtaacaatccacgacaataatattatcgaaggcatacgccgtaacgagggaaacaggcaactgttcagaactttaataccataccaggatcctgatcttctcccaatgttaagggaaaaaggagtcagcgtatccggggccacaggcggaataagcccgttaaggctgcttttggacatactcccctggataatcggttttggtttcatctggttcatgttcagaaatatgcagggcacgggaaacaaggctttccagttcggcaaaagccgcgccaagaggtaccaggatgaggggaagaagatcacctttcaggatgtggcaggccaaaaggacgccaagtacgaacttgaggaagttgtttcttttttgaaggatccgcagaagtttaccaaaatgggcgcacgcatacccaaaggggtgctgcttgtcggcatgcccggtacaggcaaaaccctcatggccaaagcggtggccggagaagcaaaggtcgcttacttccacatgtccggctcggattttgttgagatgtttgtaggcgtcggcgcaagccgcgtccgcgatcttttgaacaggggcggcgcagcgctccctgcataa

SEQ ID NO: 38862 - protein, 267 aa, Unknown
  Obtained from environmental sample
  DOMAIN (50)...(182): FtsH Extracellular
  misc_feature (1)..(267): Xaa is any amino acid
MFDDQKDKIPPRPNLKGNGQPNRXALIFFLLMAGLFIAYFFRSSETPAKQEIPYSVFTKALELNEITDVTIHDNNIIEGIRRNEGNRQLFRTLIPYQDPDLLPMLREKGVSVSGATGGISPLRLLLDILPWIIGFGFIWFMFRNMQGTGNKAFQFGKSRAKRYQDEGKKITFQDVAGQKDAKYELEEVVSFLKDPQKFTKMGARIPKGVLLVGMPGTGKTLMAKAVAGEAKVAYFHMSGSDFVEMFVGVGASRVRDLLNRGGAALPA

SEQ ID NO: 38863 - DNA, 915 bp, Unknown
  Obtained from environmental sample
  misc_feature (1)..(915): n is a, c, g, or t
atggaaacgatatacgggataaagcataaaaacggcgcgatacgccgcatgaatgtaaatattgccgcaacaactgtagataattacaaactgctcaaggatgccggtatcggaacatatattttgtttcaggaaacatataaccgggaaaggtatgaaaagctgcacccgtccggccccaaatcggactacgattggcacgccgaagctatggacagggccatgcagggcggtatagatgacgtagggttaggtgttttattcggcctcggtcagtatctttacgaatttatagcgattcttatgcacgcagagcatctggaagcggcgcacggcgtaggacctcataccatcagcgttccgcgcatacgcgccgccgagggaataaatcccggctctttcaaaaacggcatagatgatgatacgtttgccaggattgccgcctgcctgcgaatcagcgtcccctacacaggaattattgtctccacgcgggaaagcgaagaatgcagaaaaagggttctggaactgggggtttcccaaatcagcggcggttcccgcaccagcgttggcggttacgagaaagaggaaaaggaaaacacgcaacaatttgaagttaatgacaaccgctctcttgatgaagtggtaagctggcttataaaagataaatttattcccagtttctgcacggcgtgttaccgcgaggggcgcaccggtgaccgttttatgtcgctgtgcaaatcangccagatacagaactgctgcctgcccaacgcgcttatgacgctgcaggaatacctgattgattacgcggcaagcggcaccagggccgccggagaagagttgataaaaagcgaaattgaaaatataccgaaatacaatatgcgctcgctggtcatgaacgcctggaagaattaa

SEQ ID NO: 38864 - protein, 304 aa, Unknown
  Obtained from environmental sample
  DOMAIN (117)...(225): Biotin and Thiamin Synthesis associated domain
  misc_feature (1)..(304): Xaa is any amino acid
METIYGIKHKNGAIRRMNVNIAATTVDNYKLLKDAGIGTYILFQETYNRERYEKLHPSGPKSDYDWHAEAMDRAMQGGIDDVGLGVLFGLGQYLYEFIAILMHAEHLEAAHGVGPHTISVPRIRAAEGINPGSFKNGIDDDTFARIAACLRISVPYTGIIVSTRESEECRKRVLELGVSQISGGSRTSVGGYEKEEKENTQQFEVNDNRSLDEVVSWLIKDKFIPSFCTACYREGRTGDRFMSLCKSXQIQNCCLPNALMTLQEYLIDYAASGTRAAGEELIKSEIENIPKYNMRSLVMNAWKN

SEQ ID NO: 38865 - DNA, 828 bp, Unknown
  Obtained from environmental sample
  misc_feature (1)..(828): n is a, c, g, or t
ttgaatgaagaaataaaatttatacagtatttacttcaaaatggtttaaatgttcttgagcctcttatgtcaaaacaaggaaattatctgttaaacaaaaacacaccttggggaaaataccttgtatgttcttttaaaagagtaggaggagatcgcatggatggttttaatagtgaaggtattgactggactgatgaattaattaccggttatggaaaagagcttgggaaaatccataaattttcaagtaagtataaaaacgtacccaaaaagtcatgttttgaaatgatagaagaaatggattatttcataaaaactaaaataaaaaataatgaaataatttcaaaagaattggaagaattaaagaatttattgcaaaaaatacctcaaaataaatcaaattatggcttgatacatggagattatgaattggataatgtattttatgataagaatacaaaaaaatactccataattgattttggaagcagtatatatcattggtttacaatggatatagaaatatcactaaataatttgcaggaggaattaccgaaaaaggaatttgaagaaataaaaacattattcagaaacggatacaaggaagaataccaaatcagtgaagatgaaattaaatatttaccattattcagacgttttgaaaatttacgtgaatatataggattaaaagactcgcttgaagaaacatgggacaatgaaccattgtggatgttagaattaagagaaaatcttaataatcatctgaaagaattagagaatattttaataataatatgtaatatggcgcttcacacatttttggggtaa

SEQ ID NO: 38866 - protein, 275 aa, Unknown
  Obtained from environmental sample
  misc_feature (1)..(275): Xaa is any amino acid
MNEEIKFIQYLLQNGLNVLEPLMSKQGNYLLNKNTPWGKYLVCSFKRVGGDRMDGFNSEGIDWTDELITGYGKELGKIHKFSSKYKNVPKKSCFEMIEEMDYFIKTKIKNNEIISKELEELKNLLQKIPQNKSNYGLIHGDYELDNVFYDKNTKKYSIIDFGSSIYHWFTMDIEISLNNLQEELPKKEFEEIKTLFRNGYKEEYQISEDEIKYLPLFRRFENLREYIGLKDSLEETWDNEPLWMLELRENLNNHLKELENILIIICNMALHTFLG

SEQ ID NO: 38867 - DNA, 897 bp, Unknown
  Obtained from environmental sample
  misc_feature (1)..(897): n is a, c, g, or t
gtgactggtatagatcaatttttacaatacctggtaagcgccttggccttggggagtctgtatgccctgatagccattggctataccatggtttacgggatcctcaggctgataaactttgcccacggcgaggtattcatgctggggggctatatcgccttttacgccgttactatcttttttatgccctggtgggccggctttattgtagcattgggccttaccggaatctttggcattggccttgagcgggtggcttaccgcccgttgcgccattcgccaaagatttcaattatgattagcgccatcggggcgtcttttttaatgcaaaaccttgcgattgttatttttggcggaagaccgaaaggtttccccattcctgaattatttaacaagatcgtaaaaatacacaccgcttctgtggttaatgtcagcataattattcctgtcataaccgcggtattattaggaatacttttaataatcgtacacaagacaaaaacaggaatggcaatgcgggctgtcgcaacggaccttcccgcagccaggcttatgggaatagacgtaaatcaaattgtttcattcactttcggtaccggatcaactttggctgccattgngggagtgatgtgggctttgaaatatccccagcttaaccccacaatgggaatgattccggggctaaaatgcttcattgctgcggtcatcggcggcataggcaacatttccggcgcggtgctgggcggattgcttttaggcctgattgaaatcatggtgatcgccgcccttcctacgctgacaggctaccgcgacgcatttgctttcatcttgttgataattgtattgcttttaaaaccatccgggcttttgggtaaaaaccaaattgaaaaggtataa

SEQ ID NO: 38868 - protein, 298 aa, Unknown
  Obtained from environmental sample
  DOMAIN (10)...(282): Branched-chain amino acid transport system / permease component
  misc_feature (1)..(298): Xaa is any amino acid
MTGIDQFLQYLVSALALGSLYALIAIGYTMVYGILRLINFAHGEVFMLGGYIAFYAVTIFFMPWWAGFIVALGLTGIFGIGLERVAYRPLRHSPKISIMISAIGASFLMQNLAIVIFGGRPKGFPIPELFNKIVKIHTASVVNVSIIIPVITAVLLGILLIIVHKTKTGMAMRAVATDLPAARLMGIDVNQIVSFTFGTGSTLAAIXGVMWALKYPQLNPTMGMIPGLKCFIAAVIGGIGNISGAVLGGLLLGLIEIMVIAALPTLTGYRDAFAFILLIIVLLLKPSGLLGKNQIEKV

SEQ ID NO: 38869 - DNA, 663 bp, Unknown
  Obtained from environmental sample
  misc_feature (1)..(663): n is a, c, g, or t
atggttcaatcaaaaggtttatcaaaaaagcagaataatatatataccctcattttgattcttgtaattgccgtgtttgtaattatcgctgataaatttttcagctcgtttattttgcgtatctttaatctttgtggcatttacatcattctggcgctttccctcaatttgattaatggctttaccggacttttttcgcttggccatgccggctttatggccgtaggggcgtacaccagcgcccttctgacgatgagttccgcttctaagcagatgaattttttccttaccccgattgtcgcgccgttggcaaatctaagtcttccttttattcccgccctnatcgtcgctggtctttttgcgggattggcaggctttcttatcggcgctcccgttctgcgtctgcgcgacgattaccttgccattgccaccctgggcttttcggaaataatcagggtggttattactaatttgcagtcagttaccaacggcgctttgggacttaaggggctgcccagatattcaacgacttacatgatctggggcgttgcttttgtctcgattgtatttattctcgcgctaataaattcggcttttggacgttcctgcaaagctgtaagggataacgaaatcgccgcctcggccgatctgatcattgtctaa

SEQ ID NO: 38870 - protein, 220 aa, Unknown
  Obtained from environmental sample
  misc_feature (1)..(220): Xaa is any amino acid
MVQSKGLSKKQNNIYTLILILVIAVFVIIADKFFSSFILRIFNLCGIYIILALSLNLINGFTGLFSLGHAGFMAVGAYTSALLTMSSASKQMNFFLTPIVAPLANLSLPFIPALIVAGLFAGLAGFLIGAPVLRLRDDYLAIATLGFSEIIRVVITNLQSVTNGALGLKGLPRYSTTYMIWGVAFVSIVFILALINSAFGRSCKAVRDNEIAASADLIIV

SEQ ID NO: 38871 - DNA, 483 bp, Unknown
  Obtained from environmental sample
  misc_feature (1)..(483): n is a, c, g, or t
atgcgcctaggtatctgtggacaggcggacgttgtagaatttcaccgcgtaaccgataccgaaaacggtatcaatcttccagacgcgcatggcaaatggaaaccctatcctattgagtacaaaaggggtaaaccaaagactaatagatgcgatgaagttcagttatgcgctcaagcattgtccattgaagaaatgcttggtgttaccattaacgaaggcgctctttactactatactccaaaaaggcggacgatcattgaatttaatatcgatattaggacagaaacagaggcggcaattcgcaaattgcacgagctcattcggtcaaggcaaacgccgaaggcaatatacggcgataaatgcaaacaatgctctctcaaagacatttgcttacctcaaatcagtaattatggaactgtagcgaactatattgaacaagaacttggcataagcgaggaacattccgatgaaacgacttcttaa

SEQ ID NO: 38872 - protein, 160 aa, Unknown
  Obtained from environmental sample
  misc_feature (1)..(160): Xaa is any amino acid
MRLGICGQADVVEFHRVTDTENGINLPDAHGKWKPYPIEYKRGKPKTNRCDEVQLCAQALSIEEMLGVTINEGALYYYTPKRRTIIEFNIDIRTETEAAIRKLHELIRSRQTPKAIYGDKCKQCSLKDICLPQISNYGTVANYIEQELGISEEHSDETTS

SEQ ID NO: 38873 - DNA, 999 bp, Unknown
  Obtained from environmental sample
  misc_feature (1)..(999): n is a, c, g, or t
atgaaacgacttcttaacactctctatatcacccgccatggcgctcacatctctaaagagggaatgactatagtggtcttcgctgacggcgaacggcttttacagatacctgtccttaccatatccggcgtggtatgttttggaggtgtgtcgtgtacgccgccggctatggaactttgctcggaacatggcgtgatcatcacattcctgagtgaaagcggtcgatttttgggtagggttgtaggtccggtgcacggcaacgtgctgttgcggcgcgaacaataccgaatagctgatgatgaggcgcgctccgcagaaatcgcccgtatgtttatcatcggcaagatatgcaactctcgtcaagtattaatgaggggtgcacgcgaccgtaaagacccgcaagtgattgacgacctcaaagcggcatcgcgccgattgatccaaaccgcacgccatataaagcaaggcacgcccgccgatgagttactcggcaaggaaggagactctgccaaaacctattttgcctcctttaatagcctgataacgtctccgcaacaggaatttcagttcactgtccgcagccgaagacctccgcttgattgtgtgaacgcaatgctgtcatttgtatatacattactctcgcatgatgctaccgccgcgctagagagcgtaggtcttgatccatatgtaggctttttccacaaagaccgtcccggaagaccgggtcttgcgcttgatttgatggaagagtttcggtctctactcgctgataggatcgtactttctctaatcaacctacaacaagtaaatccaaaaggatttaccancacgganagcggcgctgtaatgatggacaaagatacacgcacagctgtaatctccgcataccananacggaaacaagaagagataccgcaccccttttttaaacgaaagtatgcccatcggtctactcatccacgcacaagcgttgcttttggcgcggcatatccgtggtga

SEQ ID NO: 38874 - protein, 332 aa, Unknown
  Obtained from environmental sample
  DOMAIN (6)...(331): Protein of unknown function DUF48
  misc_feature (1)..(332): Xaa is any amino acid
MKRLLNTLYITRHGAHISKEGMTIVVFADGERLLQIPVLTISGVVCFGGVSCTPPAMELCSEHGVIITFLSESGRFLGRVVGPVHGNVLLRREQYRIADDEARSAEIARMFIIGKICNSRQVLMRGARDRKDPQVIDDLKAASRRLIQTARHIKQGTPADELLGKEGDSAKTYFASFNSLITSPQQEFQFTVRSRRPPLDCVNAMLSFVYTLLSHDATAALESVGLDPYVGFFHKDRPGRPGLALDLMEEFRSLLADRIVLSLINLQQVNPKGFTXTXSGAVMMDKDTRTAVISAYXXRKQEEIPHPFFKRKYAHRSTHPRTSVAFGAAYPW

SEQ ID NO: 38875 - DNA, 411 bp, Unknown
  Obtained from environmental sample
  misc_feature (1)..(411): n is a, c, g, or t
atgatagatgtggattattttaagaaatacaatgattcattagggcatttggaaggagacaaggcgcttattgctatagcgcaatgtctaaggaataatgtaaaaagggaaactgattttgtcgcgagatttggcggtgaggaatttgtgtgccttttaccgtttattgaaaaagatgaagccctggaattcgcgaaaacattggtacaaaacgttgaagccatgaaaataccacaccccatgagtttacactcaaaatacataacaatcagcgcaggtatggtaacgactgtgccaaaggataataattctcacgcccaattattggatgaagcggataaggcgttatattcagcaaaggaatcgggaagaaacagggttgtactgtcttgtcatacctatctcagttaa

SEQ ID NO: 38876 - protein, 136 aa, Unknown
  Obtained from environmental sample
  DOMAIN (1)...(126): GGDEF domain
  misc_feature (1)..(136): Xaa is any amino acid
MIDVDYFKKYNDSLGHLEGDKALIAIAQCLRNNVKRETDFVARFGGEEFVCLLPFIEKDEALEFAKTLVQNVEAMKIPHPMSLHSKYITISAGMVTTVPKDNNSHAQLLDEADKALYSAKESGRNRVVLSCHTYLS

SEQ ID NO: 38877 - DNA, 687 bp, Unknown
  Obtained from environmental sample
  misc_feature (1)..(687): n is a, c, g, or t
atggcgaggaactgtctttttccagaagattgcgccctttgcgaaagcgcgctaatttacccgtatgaaatgcggttggggctgtgcgaggactgccttgcctcaattaaccctgaagtaacggacaaaaagtgcgcggtttgcgggaaaccgctgattagcgaagttgatacctgcctgtcttgcagagacaatcaacgttcctttgaccgtttatggactattttcccgtataccggaaaataccgtaaacttctttccgcgtataagtttgaaaaaaaactgccgcttgcggatcttttcgcggaaaggattgcggaagttatcaaaaatgagccgctcttacacaatgcggtaattattcccgttccgccgagaccgggtaaaattaaaactgccggttgggatcaggtagagtgtcttgtaaaaagactggaaaaacatctgcctggcgttgttgtaaaccgttgtttaaaacgcagtaaatctaaggtacagaaagaattaaaccgtaatgaccgtattaataacttaaaagggcgaatagtcttaaacggcagtgcgcctgatattgcgcttataatcgacgatgtaataactacggggtccacaatggaagtatgttcttctgttctaaagaacagcggaacgcaaaaagtttacgggctttgcgtgttttatgattaa

SEQ ID NO: 38878 - protein, 228 aa, Unknown
  Obtained from environmental sample
  misc_feature (1)..(228): Xaa is any amino acid
MARNCLFPEDCALCESALIYPYEMRLGLCEDCLASINPEVTDKKCAVCGKPLISEVDTCLSCRDNQRSFDRLWTIFPYTGKYRKLLSAYKFEKKLPLADLFAERIAEVIKNEPLLHNAVIIPVPPRPGKIKTAGWDQVECLVKRLEKHLPGVVVNRCLKRSKSKVQKELNRNDRINNLKGRIVLNGSAPDIALIIDDVITTGSTMEVCSSVLKNSGTQKVYGLCVFYD

SEQ ID NO: 38879 - DNA, 873 bp, Unknown
  Obtained from environmental sample
  misc_feature (1)..(873): n is a, c, g, or t
atgnccgctccttcgccttctatgcttcttatgcagatggaaaaaagcgtaaaacttggtatgcgtatcggtttccattgtgaaacgaacgaaataaactcatactactcaggcgtttgtaaaaacagaaccggttttagcgacggctatttgcttgagcaggcaagacccgtaatatcggaaacattggcgattcaaacggttattttttacgccgattacacaaaggcaaaagttcacattcaccatgttacatcacgtaacggcgttttacttgttaccgaagcaaagaaaaaaaatattgacatatcggcggaaacctgtcctcattatcttttatttgatgcggaaaaatgcgcccataaggtatacccgccaatccgcggtatggagcacagtaaagctattttgcaggctcttaaaaaaggcgggatcgacatgatagcaagcgatcacgctcctcatacgcttgagcaaaaatctcttccaatttgggaagcgcctgcgggtctttgcggggtggaaacttccgtccctcttatgctgaacgaagtaaataagggcaagttaactcttaacgattttgtccgcgttgcaagcgaagcgcccgcaaaaatttggggtatttacccgcaaaaaggaaacctgcaaatcggcgcggacgctgattttacaatcgttgacatgaaaatgaaaaaaactctcgccgcaagcgagcttcactctaagagcaaaaccaccccgtatgaaggaatggaagtacaaggctgtcccgcagcgacgatagtaaggggaaaatttgtaatgaaagacggcagtcttacaggcgttaagggacagggagagtacgttaaaccaaatcttacgcgttaa

SEQ ID NO: 38880 - protein, 290 aa, Unknown
  Obtained from environmental sample
  misc_feature (1)..(290): Xaa is any amino acid
MXAPSPSMLLMQMEKSVKLGMRIGFHCETNEINSYYSGVCKNRTGFSDGYLLEQARPVISETLAIQTVIFYADYTKAKVHIHHVTSRNGVLLVTEAKKKNIDISAETCPHYLLFDAEKCAHKVYPPIRGMEHSKAILQALKKGGIDMIASDHAPHTLEQKSLPIWEAPAGLCGVETSVPLMLNEVNKGKLTLNDFVRVASEAPAKIWGIYPQKGNLQIGADADFTIVDMKMKKTLAASELHSKSKTTPYEGMEVQGCPAATIVRGKFVMKDGSLTGVKGQGEYVKPNLTR

SEQ ID NO: 38881 - DNA, 384 bp, Unknown
  Obtained from environmental sample
  misc_feature (1)..(384): n is a, c, g, or t
ttgatatcgtcaataaaagggttgggctccgtaccggtgagaggtgtgaaaataggggcgccggagagtgcggaagtcgcggaggcattaagcaagtgttcgctgttggtcaactgcacgagtgtgggtatgcgtccgaatataggcgacacgccgcttaacaagagtttctttcacgccggtatgacggttttcgatgcggtgtacaatcccggggagacgagatttttgagagaggcgtcggaggccggttgcagggtgaagaacgggttgctgatgctgttgtatcaggggttggagtcttttaggtattggacgggtatggaggcgccggaggatatttttgaagaggcgtggttgcaatcgttggtagataatggttga

SEQ ID NO: 38882 - protein, 127 aa, Unknown
  Obtained from environmental sample
  misc_feature (1)..(127): Xaa is any amino acid
MISSIKGLGSVPVRGVKIGAPESAEVAEALSKCSLLVNCTSVGMRPNIGDTPLNKSFFHAGMTVFDAVYNPGETRFLREASEAGCRVKNGLLMLLYQGLESFRYWTGMEAPEDIFEEAWLQSLVDNG

SEQ ID NO: 38883 - DNA, 420 bp, Unknown
  Obtained from environmental sample
  misc_feature (1)..(420): n is a, c, g, or t
atgaacccatctacaccaaaaaaaattctagacttttgccttgaggctggggcggattttgctgagatttacgaagaagaaacaagaaaatcgcatttggcattcaaagacaatgcaatagagggtgcatctgcttccataatctatggaattggaattagaatgttatacggaacggaagttctttacggcttcacaagcgatgactcggaagaagtgctgatgaacatagctaggaacttatctctctcaaaaaataaaagaggagaggcgaattttcagtttggcaaagaagatagttatgtatcttatataaaagacagtttcaaagaccctcgcaaatttgggcagcaatataaaaaagattttttgtttgcggcaaattcagcagctagaatcgattcaaaattttgcaggtag

SEQ ID NO: 38884 - protein, 139 aa, Unknown
  Obtained from environmental sample
  misc_feature (1)..(139): Xaa is any amino acid
MNPSTPKKILDFCLEAGADFAEIYEEETRKSHLAFKDNAIEGASASIIYGIGIRMLYGTEVLYGFTSDDSEEVLMNIARNLSLSKNKRGEANFQFGKEDSYVSYIKDSFKDPRKFGQQYKKDFLFAANSAARIDSKFCR

SEQ ID NO: 38885 - DNA, 867 bp, Unknown
  Obtained from environmental sample
  misc_feature (1)..(867): n is a, c, g, or t
ttgcaggtagaagcctcaattgcagatgccgagcaaaacataaatatatggaatagcgaaggcttgcaagtttgcgacaacagagccagaacgagattttctgtaaatgcaacagcaggggagaattcggaacgcgcatctgcccacgaaggtcctggtgcgcttggcggctttgaatttttggataaattgcccgttaaggaactcgctaaatcttgcgcagaaagagctttgagaatgttgaaggctccatatataaaaggcgggcaaatgcccgttattatggggaacgcttttggtggggttatttttcacgaggcttgcgggcatcccttggaaacagaatccgtgcgtaggcaggcaagccctttttgcggaaagatcggcgaacaagtggcgcaaagcgtgctaaccgccatagacgatggcactttaaaaggagtgtgggggagccttgaaatagatgatgagggtactccaacgcaaaaaaccattttgattgaaaacggaattttgaaaaactttttgagcgaccgcgttggagccaaggaattagggcttcccttaactggcagcgcgcgcagggaatcttacaaatacgcacctgtaagcagaatgagaaatacattcatagcaccaggcaattcaaccctgcaagatatgctagccaccgttgacgatgggctttatgcggcaaaaatggcaggcggctctgttaatcctgcaacaggggagttcaattttgcggtggaagagggctacgaaattaaaaacggcaaattaggcgatgcagtgcggggagctacgctcatagggcttgggcacgagattttgccaaaaataagcatggttggcagtgatctttga

SEQ ID NO: 38886 - protein, 288 aa, Unknown
  Obtained from environmental sample
  DOMAIN (1)...(175): Putative modulator of DNA gyrase
  misc_feature (1)..(288): Xaa is any amino acid
MQVEASIADAEQNINIWNSEGLQVCDNRARTRFSVNATAGENSERASAHEGPGALGGFEFLDKLPVKELAKSCAERALRMLKAPYIKGGQMPVIMGNAFGGVIFHEACGHPLETESVRRQASPFCGKIGEQVAQSVLTAIDDGTLKGVWGSLEIDDEGTPTQKTILIENGILKNFLSDRVGAKELGLPLTGSARRESYKYAPVSRMRNTFIAPGNSTLQDMLATVDDGLYAAKMAGGSVNPATGEFNFAVEEGYEIKNGKLGDAVRGATLIGLGHEILPKISMVGSDL

SEQ ID NO: 38887 - DNA, 369 bp, Unknown
  Obtained from environmental sample
  misc_feature (1)..(369): n is a, c, g, or t
gtgagcgacccgttgtaccctatgggcgacgttggggaggactggtttttggtcatcgcgtacatgcggttgtccatgcagattacggtgatgtcgaaattttttctcgcggcgtggacgaagtgcgccgcgcctatggacagcaggtcgccgtcgcccgtcgccactattaccggtatatcggggcgcgcgagccttgcgcctatggcggcaggcagcggcctgccgtgcagggtgtgcatgccgtgtgtgttcagaaacaggggcaaccgcgaggagcagcctattccggagaccacgcatactccgtcctccgcgaagccgcgttcttcgaagtactccgtgagcgctgagagcacggcgaagtag

SEQ ID NO: 38888 - protein, 122 aa, Unknown
  Obtained from environmental sample
  misc_feature (1)..(122): Xaa is any amino acid
MSDPLYPMGDVGEDWFLVIAYMRLSMQITVMSKFFLAAWTKCAAPMDSRSPSPVATITGISGRASLAPMAAGSGLPCRVCMPCVFRNRGNREEQPIPETTHTPSSAKPRSSKYSVSAESTAK

SEQ ID NO: 38889 - DNA, 405 bp, Unknown
  Obtained from environmental sample
  misc_feature (1)..(405): n is a, c, g, or t
ttgccgccagaatgcgggacaacagcccgcccgccgacttatgctgttatctcttggggcttctgcgcggaaatgacgcgcaaagctgtggcctcgctacgaaaacgcggcatgaaaatcgcgtgcctctatccgcgcctcatcttcccgtttatcaacgggcattacttcgaactgctcaactactgcccgcgcatagcagtgatagagtcgaactacacggggcaactggcctcccttatacgcatacaaacgggaatcaataccatctccattaagaaatataacggcgagcctttcactccggaggagatagaagcggaactcctcggtatcattgagatggagaaattcataaccgacctcaacaaaccaaacagcgacggagcggcgacaaatgggtga

SEQ ID NO: 38890 - protein, 134 aa, Unknown
  Obtained from environmental sample
  misc_feature (1)..(134): Xaa is any amino acid
MPPECGTTARPPTYAVISWGFCAEMTRKAVASLRKRGMKIACLYPRLIFPFINGHYFELLNYCPRIAVIESNYTGQLASLIRIQTGINTISIKKYNGEPFTPEEIEAELLGIIEMEKFITDLNKPNSDGAATNG

SEQ ID NO: 38891 - DNA, 384 bp, Unknown
  Obtained from environmental sample
  misc_feature (1)..(384): n is a, c, g, or t
atgcccacgaagcacagccaggactatttgatggcggcgatattcggcggccacggcgaggggcagcggatcgttctgtccgcctccaacatagaggagtgcttctacctaactatagaggcgttcgacatggcgcggcgcttccgctgccctgtgataatcctgacagacagcgctctggggaacctggaaatgacttgcaagcggctgaacgcctccgaggacatcgacgggcatcccctgaccggggcaaccgactccgcccaaactaccgatcccaatacgacggcccgccgcataacccggctggaacacgacgtcgacggggtcccgagcaacaccgctaacaaccgcgtccggcaacagtacaaacgcttcagctag

SEQ ID NO: 38892 - protein, 127 aa, Unknown
  Obtained from environmental sample
  misc_feature (1)..(127): Xaa is any amino acid
MPTKHSQDYLMAAIFGGHGEGQRIVLSASNIEECFYLTIEAFDMARRFRCPVIILTDSALGNLEMTCKRLNASEDIDGHPLTGATDSAQTTDPNTTARRITRLEHDVDGVPSNTANNRVRQQYKRFS

SEQ ID NO: 38893 - DNA, 663 bp, Unknown
  Obtained from environmental sample
  misc_feature (1)..(663): n is a, c, g, or t
gtgcggactttagtccgatgcctcaccttaaccgccacagacgtgtattcaggctgggtagaactgcacccaaccctcaacaaggcccataaatgggtttttgaggccctgctggacataaaggcaaccctcccttttccactttcaggcatagacagcgataacggctctgagttcatcaattctgccctgctcaaatggtgccaagacgagcgcatccagtttacaagatcgcgggcttaccgcaaaaacgacaactgctttgtcgagcagaaaaacttcacctgcgtcagaaacttcgtgggctattaccgcttctctgcggaggcggaacgcgatgcactcgccgatgtctaccgctccctgtgcccgctactgaacttctttatgtcaactatcaagcttataagtaaaacaagagttggtacaaaaataaaaaaggtatatgataaaaaaatcataagcccttaccaaaggcttatggcttcttcttatctttctgctgatgttaaagctgagctgtacaggcgttttgccatgtacgaccctgttaagctccagagggaagtccacaaggccgtagacgccttggtgtcgcataacagggctataaatcttgaagggggaaaagccctcgccgcttccgcccttcaagccatctga

SEQ ID NO: 38894 - protein, 220 aa, Unknown
  Obtained from environmental sample
  DOMAIN (3)...(161): Integrase core domain
  misc_feature (1)..(220): Xaa is any amino acid
MRTLVRCLTLTATDVYSGWVELHPTLNKAHKWVFEALLDIKATLPFPLSGIDSDNGSEFINSALLKWCQDERIQFTRSRAYRKNDNCFVEQKNFTCVRNFVGYYRFSAEAERDALADVYRSLCPLLNFFMSTIKLISKTRVGTKIKKVYDKKIISPYQRLMASSYLSADVKAELYRRFAMYDPVKLQREVHKAVDALVSHNRAINLEGGKALAASALQAI

SEQ ID NO: 38895 - DNA, 1458 bp, Unknown
  Obtained from environmental sample
  misc_feature (1)..(1458): n is a, c, g, or t
atgatggccgaaaaagcgggcgcttatcagcgtattttaaaagacggaattttggaattggcttcgtacctgaacggggcaggctgggagattctttcaaccggcggcacttcaaaacatttgaaggataataatatcaccgtaaccgatgtttcctcggtgacgggttttcccgaatgtcttgacggcagggtaaagaccctgcatcccgcaatccacgccggtcttctggcccgtagagatgaaaagagccacatggatacgctgcaggaactgggacttggaaccatcgatcttgtctgcgtcaacctgtaccccttttttgaaaaggtacaggcgaaacttacccttgaacaaaccgttgagtttatcgacataggcgggccgaccatgcttcgttccgccgcgaaaaattatcacgatgtcgttgtccttacagaccctgcggattacgccgaaacgattaacggcctgaaagcggaaaatgtcccgcttgaattcaaaaaacggcttgccggcaaggttttcaatttgacatccgcttatgatgccgccgtttcccgctatctccttgaagatgaataccctgagtactggcccctgtctctgaaaaaagggcaaagcctccgttacggcgaaaacggccatcagtcggccgcgctctatttgcatactgaccggcccggtgttttgggcggcatggttaagctccatggcaaggaacttggctacaacaatatcagggatctggatttggcatggaaagccgcctgcgcctttgggcttgcggctgatggaacagaaccgattggtgagagtgaagtcagaaaattgattccacaggcggcgagcaccggcaaagtatgctgtgtcgcggtgaagcacaataccccctgcggaatagcccttggggacactttgctggaagcgtatcaaaaaacattcgactgcgatccggtttcaatattcggcggcatagtggcaagcaccgtgaaagttgacgctcaaacggcggcgaagttgggcgagctgtttttggagatcgttgccgccccggactttgagccgcaggcgctggaaatacttatgcagaaaaaaaatcttcgcataataaaactttcaaaggcccctgttgaagcccatgaatacatcgctgttgacggcggtcttttggttcagcaaagcgaccgcaaacttcttgaaaaatgggaggttgtgacaaaaaccgtgcccgccgtcggggacttgcgggacatgatcttcggcatgagggcagtaacctttgtaaaatcgaacgcgataatgattgttaaagacgaggctgccaccggtatagggggagggcaggttaaccggatatggccgacggttcaatcgctggaacggagcgcggctgtacaaaggacagcccggtcagggtgcttgcctccgacgcgttttccccttgccgatgtttga

SEQ ID NO: 38896 - protein, 485 aa, Unknown
  Obtained from environmental sample
  DOMAIN (16)...(130): MGS-like domain
  misc_feature (1)..(485): Xaa is any amino acid
MMAEKAGAYQRILKDGILELASYLNGAGWEILSTGGTSKHLKDNNITVTDVSSVTGFPECLDGRVKTLHPAIHAGLLARRDEKSHMDTLQELGLGTIDLVCVNLYPFFEKVQAKLTLEQTVEFIDIGGPTMLRSAAKNYHDVVVLTDPADYAETINGLKAENVPLEFKKRLAGKVFNLTSAYDAAVSRYLLEDEYPEYWPLSLKKGQSLRYGENGHQSAALYLHTDRPGVLGGMVKLHGKELGYNNIRDLDLAWKAACAFGLAADGTEPIGESEVRKLIPQAASTGKVCCVAVKHNTPCGIALGDTLLEAYQKTFDCDPVSIFGGIVASTVKVDAQTAAKLGELFLEIVAAPDFEPQALEILMQKKNLRIIKLSKAPVEAHEYIAVDGGLLVQQSDRKLLEKWEVVTKTVPAVGDLRDMIFGMRAVTFVKSNAIMIVKDEAATGIGGGQVNRIWPTVQSLERSAAVQRTARSGCLPPTRFPLADV

SEQ ID NO: 38897 - DNA, 825 bp, Unknown
  Obtained from environmental sample
  misc_feature (1)..(825): n is a, c, g, or t
ttgatacgcttccagcaaagtgtccccaagggctattccgcagggggtattgtgcttcaccgcgacacagcatactttgccggtgctcgccgcctgtggaatcaattttctgacttcactctcaccaatcggttctgttccatcagccgcaagcccaaaggcgcaggcggctttccatgccaaatccagatccctgatattgttgtagccaagttccttgccatggagcttaaccatgccgcccaaaacaccgggccggtcagtatgcaaatagagcgcggccgactgatggccgttttcgccgtaacggaggctttgcccttttttcagagacaggggccagtactcagggtattcatcttcaaggagatagcgggaaacggcggcatcataagcggatgtcaaattgaaaaccttgccggcaagccgttttttgaattcaagcgggacattttccgctttcaggccgttaatcgtttcggcgtaatccgcagggtctgtaaggacaacgacatcgtgataatttttcgcggcggaacgaagcatggtcggcccgcctatgtcgataaactcaacggtttgttcaagggtaagtttcgcctgtaccttttcaaaaaaggggtacaggttgacgcagacaagatcgatggttccaagtcccagttcctgcagcgtatccatgtggctcttttcatctctacgggccagaagaccggcgtggattgcgggatgcagggtctttaccctgccgtcaagacattcgggaaaacccgtcaccgaggaaacatcggttacggtgatattattatccttcaaatgttttga

SEQ ID NO: 38898 - protein, 274 aa, Unknown
  Obtained from environmental sample
  misc_feature (1)..(274): Xaa is any amino acid
MIRFQQSVPKGYSAGGIVLHRDTAYFAGARRLWNQFSDFTLTNRFCSISRKPKGAGGFPCQIQIPDIVVAKFLAMELNHAAQNTGPVSMQIERGRLMAVFAVTEALPFFQRQGPVLRVFIFKEIAGNGGIISGCQIENLAGKPFFEFKRDIFRFQAVNRFGVIRRVCKDNDIVIIFRGGTKHGRPAYVDKLNGLFKGKFRLYLFKKGVQVDADKIDGSKSQFLQRIHVALFISTGQKTGVDCGMQGLYPAVKTFGKTRHRGNIGYGDIIILQMF

SEQ ID NO: 38899 - DNA, 621 bp, Unknown
  Obtained from environmental sample
  misc_feature (1)..(621): n is a, c, g, or t
atgacagattcggcacgaggtttttgccgcagaatttttgccaaaccaaccgatgaaaaattctcggaggaactcacaaaaacattgtgcgaaataatttccaaaagcaatcgcaatgtgataatttttacagatatgttctccatttcaaaattgcaagcggagattaaaaaagatgaaagtctgcaaagcaaaacctgtttctttcaaggaactgatggcaactttttcaatttggcaggttttttatcaaaagaagctggcaatattttaataggaactcctgatgaattaaaatctctggaagaaatggaactgccagaaaattgccttatagtgatttctaggcttcccttccccgacctcaaagaaccggttacttcaaagaggatggaaattttaaaggaacaggataaaaacggctttatattggtgacaatgccagaaacttctctaatactgcgcagagcttattccgcgattttgcgttcaaataaaaaacagaccttgcttttgctcgatagccgcgtaataagcgagcaatacggaacaaaaatccaaaaactctttccaaacctcaaaaccctgagccatagagtattttccaccaactttttttaa

SEQ ID NO: 38900 - protein, 206 aa, Unknown
  Obtained from environmental sample
  misc_feature (1)..(206): Xaa is any amino acid
MTDSARGFCRRIFAKPTDEKFSEELTKTLCEIISKSNRNVIIFTDMFSISKLQAEIKKDESLQSKTCFFQGTDGNFFNLAGFLSKEAGNILIGTPDELKSLEEMELPENCLIVISRLPFPDLKEPVTSKRMEILKEQDKNGFILVTMPETSLILRRAYSAILRSNKKQTLLLLDSRVISEQYGTKIQKLFPNLKTLSHRVFSTNFF

SEQ ID NO: 38901 - DNA, 801 bp, Unknown
  Obtained from environmental sample
  misc_feature (1)..(801): n is a, c, g, or t
atgtccgcgagaacagttataggtataggggaggtgctttgggatgtgttccctgagaggagaatcctcggcggagcacctgccaattttgcctattacgcttctaaattcggttttaagggatgtcttgtcagtgcggttgggaaagatttgcccggcaaggaacttttggacgttttggcagaaagaaaacttgaacttctcgttgaaaccgtggattatccaacaggagaggttcacgtcgctttaaatgcccagggtattccgcaatacgaaatatgcgaaaattcagcctgggacaatatcccatttaccaaacgtgcagaggaacttgcacggagttgcagcgcggtttgctttggaactctcgcgcaacgcagcgaggtatcgcgggcaacaattcaacgttttttggaacttgtccctaaaaatgcgtataaaatttttgacataaatttaaggcagcatttttacagcaaagagataatacaccaatctttgcagctctgcaatatattgaagatgaacgaagaagaaatcgcggaaatagcacgtatttttggttttgccaatatgaccgagcaggaaatatgtttgcatttattgaaaacttatgatttgaaaattgttgtagaaacaaaaggcgcggctggtagctatgtattcaccgccgatgaaacctcgtattcgacttctccaaaaataacagtgacgaacacggttggcgcgggcgattcgtggataggcgcatttgtggcagcattgctcaacggagaaaatttcagaacgcgcacaaattag

SEQ ID NO: 38902 - protein, 266 aa, Unknown
  Obtained from environmental sample
  misc_feature (1)..(266): Xaa is any amino acid
MSARTVIGIGEVLWDVFPERRILGGAPANFAYYASKFGFKGCLVSAVGKDLPGKELLDVLAERKLELLVETVDYPTGEVHVALNAQGIPQYEICENSAWDNIPFTKRAEELARSCSAVCFGTLAQRSEVSRATIQRFLELVPKNAYKIFDINLRQHFYSKEIIHQSLQLCNILKMNEEEIAEIARIFGFANMTEQEICLHLLKTYDLKIVVETKGAAGSYVFTADETSYSTSPKITVTNTVGAGDSWIGAFVAALLNGENFRTRTN

SEQ ID NO: 38903 - DNA, 345 bp, Unknown
  Obtained from environmental sample
  misc_feature (1)..(345): n is a, c, g, or t
atgtgcgacaaatccgtattagacgagataacgtcaagggtctgcgccgccgctaaggaggttttgggcgacaagttggagaaggtaatcctcttcggttcatacgcgcggggagattacgacgaggagtcggacatagacatcatgataatcgccgacatcgcgttggaggataagaccgagacgcggcagaatatccataaggtagccggagaccttagtttggaatatggcgttcttgttactttttgtatgacttgcagcgacatatttcacaaataccacgacatttccggcttttacataaacgtagagaaagacggggtgttattgtatgccgcttga

SEQ ID NO: 38904 - protein, 114 aa, Unknown
  Obtained from environmental sample
  DOMAIN (7)...(111): Nucleotidyltransferase domain
  misc_feature (1)..(114): Xaa is any amino acid
MCDKSVLDEITSRVCAAAKEVLGDKLEKVILFGSYARGDYDEESDIDIMIIADIALEDKTETRQNIHKVAGDLSLEYGVLVTFCMTCSDIFHKYHDISGFYINVEKDGVLLYAA

SEQ ID NO: 38905 - DNA, 1383 bp, Unknown
  Obtained from environmental sample
  misc_feature (1)..(1383): n is a, c, g, or t
atggccgagtggtgcgctggtatccgtccccaagcgcttatcaccgaagctctctgtcttatcgcagtaaaacaagctggcggtgcgctgagagatgttccggaggcgctgaagaccgaggtcctctgccttgccgctgtgaaagataattatcaggcactggactatgtccccgaagcgctgaagaccgaggaagtctgtcttgccgcagtgaaacaaagaggccatttcctacgatacgtcccagaggcgatgaggaccgaggccgtctgccttgccgccgtacaacaagactgtagagcgtttgaatgtgtccccgaaacgcagaagaccgaagccctctgccttgccgctgtgcagcaaaactattgggcgctccaatatgtccccaaaacggtgaggactgaagccgtctgccttgccgctgtgcaaaaaaacggcggcgaactgggtgacgtccccgaggagctgaggaccgaagccctttgctttatcgcagtgcaacaaaacggcgaggcgctctattttgtccccgaggcgctgaagaccgaggccctctgccttgccgctgtgcagcaaaacggctgggccttactatacgttcccgaggcgctgatgaccgaagccctttgccttgaagcgatacaaataaatgaccgtgcacaacaatatcttccgtatattccggaagacttggaagccaaagttaaaaaggcgtttataaacgctttctcgacagaggcgctgtgccttgccaaagttcagagaaatggaagggcgcttcagtatgtccctgaagagtttaagacagaagccgtctgccgcgcagccgtgcagcaattcggccatgcgcttgaattcgtccccgacgcgctgaaggaaaaatttgtccaccgtgctgagaagngaatacagataggggacaccggccctgccggaggcatcgtgttttacgacaagggctttgtctcggacggctggcggtatctggaggccgcgcccgccgggacggaattcaccgccgattgggggtggtatgaaacgaatgtcgccggaaccggaacggaagtcggaagcggaaggcggaacacccggctcattgtcgcggctttgggggcaaacgaaagcgcggcgcggctatgcgccagcctgaatgtcaacgagtacgcggactggtttttgcccggcattgacgagctggatttgatttacaaaaacctgaagcagaacgggcttggcggctttaaggacggattttactggtcttcgtcgcaggactccggcaactacagcctcgcattgagcaggtcgttcagcgacggcaaacagtacatgggctacaaggactacgccaacaacgtgcgggcagtgcgggcgttctaa

SEQ ID NO: 38906 - protein, 460 aa, Unknown
  Obtained from environmental sample
  misc_feature (1)..(460): Xaa is any amino acid
MAEWCAGIRPQALITEALCLIAVKQAGGALRDVPEALKTEVLCLAAVKDNYQALDYVPEALKTEEVCLAAVKQRGHFLRYVPEAMRTEAVCLAAVQQDCRAFECVPETQKTEALCLAAVQQNYWALQYVPKTVRTEAVCLAAVQKNGGELGDVPEELRTEALCFIAVQQNGEALYFVPEALKTEALCLAAVQQNGWALLYVPEALMTEALCLEAIQINDRAQQYLPYIPEDLEAKVKKAFINAFSTEALCLAKVQRNGRALQYVPEEFKTEAVCRAAVQQFGHALEFVPDALKEKFVHRAEKXIQIGDTGPAGGIVFYDKGFVSDGWRYLEAAPAGTEFTADWGWYETNVAGTGTEVGSGRRNTRLIVAALGANESAARLCASLNVNEYADWFLPGIDELDLIYKNLKQNGLGGFKDGFYWSSSQDSGNYSLALSRSFSDGKQYMGYKDYANNVRAVRAF

SEQ ID NO: 38907 - DNA, 429 bp, Unknown
  Obtained from environmental sample
  misc_feature (1)..(429): n is a, c, g, or t
atgaaaaaagacgcggaagaacagcttaaaaaattaattgaatcagacccggcaatcaaggaagaatgggaaaaaaaacacaagttaaaaaatgatcctagaataacggctatcggaagaatactgcgccgtacaagttttgatgaattcccgcagcttatcaatattcttaaaggagaaatgagccttgtaggtccgcgcccaatcgtatacgaagaaattgaaaaatacggcgatgattttgatcgcattttttctattaacccagggcttacgggtctttggcaggtatcaggaaggtcagatacaaattatcaggaacgaatttcttatgatacatattatcttcaaagctggtcagtctggctggatctttggattatattaaaaacatttgatactatttttttcggaaaaggcgcgtattaa

SEQ ID NO: 38908 - protein, 142 aa, Unknown
  Obtained from environmental sample
  DOMAIN (1)...(142): Bacterial sugar transferase
  misc_feature (1)..(142): Xaa is any amino acid
MKKDAEEQLKKLIESDPAIKEEWEKKHKLKNDPRITAIGRILRRTSFDEFPQLINILKGEMSLVGPRPIVYEEIEKYGDDFDRIFSINPGLTGLWQVSGRSDTNYQERISYDTYYLQSWSVWLDLWIILKTFDTIFFGKGAY

SEQ ID NO: 38909 - DNA, 582 bp, Unknown
  Obtained from environmental sample
  misc_feature (1)..(582): n is a, c, g, or t
atgacagattggcacgagggatttacactaagttacagaaaatcattgtccgaacgggaaataattaaaaacaggcttgctttttccgttaatgtggatacgaggctgttttataaccttcaaaagtacacagaatcgaactttcaattttcaacgggctttaccttaaaaataaataatttcctggacttgacgctgtcggcaacgtcggaaaacgcggttgttttcagatatctaaaaaacattcccggaatggaagaatatacaaaaatgtatattgacgggccgcaaaataatgtttttacagaccttgttgactcattcaatttctttgacgattcaaaaaggcaaagatccggttttaaaatgaaaaggtttaaccttacggccgttcaccatttaggggactgggacgcgacttttgatattgccatgtccccgtacctggatccggcgtcaaatccgccaaaatatgatattaacgcggaaataaccttccttgtacaatggtcggccatttcagatataaaaacagacataaaatatgaaaaaagatacgaaaaatggacgcaaaacaagtaa

SEQ ID NO: 38910 - protein, 193 aa, Unknown
  Obtained from environmental sample
  misc_feature (1)..(193): Xaa is any amino acid
MTDWHEGFTLSYRKSLSEREIIKNRLAFSVNVDTRLFYNLQKYTESNFQFSTGFTLKINNFLDLTLSATSENAVVFRYLKNIPGMEEYTKMYIDGPQNNVFTDLVDSFNFFDDSKRQRSGFKMKRFNLTAVHHLGDWDATFDIAMSPYLDPASNPPKYDINAEITFLVQWSAISDIKTDIKYEKRYEKWTQNK

SEQ ID NO: 38911 - DNA, 849 bp, Unknown
  Obtained from environmental sample
  misc_feature (1)..(849): n is a, c, g, or t
ttggaggacggcataactattgcccttgacaacagggagcttctttccggaatttgcggcgcaaatgacggaaatctcaagataatcgaaggttccctgggcggaagcattactgcaagaggcaatgaaatccactttgaaagctgcggcgaagacggggtaaggcgtttcagatccatgatggacagccttgtttcgtcggtaaaaaaaggggaaattccctcccccgattatgtccgcgcccttgcctcggaatttatccaaaatgaggaagacggctcgtctcatatcgaatccgacgaaaaaggggaagcttttttccgcgattcaatgatacagatacctcacggtatacgccatgtctatccgcgaaccaaaaatcaggcgcactacatccgcggcatgagggagaatgaaatatgtttctgcgtagggccggcgggaacaggcaaaacattccttgccatcgctcacgcgctccagacggcgctttcaaaaaaaacgcgaaagattgtccttacccgccccgtggttgaagcaggtgaaaatctcggctttttaccgggagacttaagccagaaaattgacccctacctgcgccctctttacgacgccatggacgcgcttgtcccttatgaagtaattcacaaaatggaagaaacaagggcgattgagatagctccccttgcctacatgagagggcgcagtttgaacgactgcgttgtaattcttgacgaggcgcagaacaccacaaaagaacagatgaaaatgtttcttacaaggataggggcgggggcaagggcggtaataacgggagacgccacacaaatgaccttcccgctgcgataa

SEQ ID NO: 38912 - protein, 282 aa, Unknown
  Obtained from environmental sample
  DOMAIN (120)...(282): PhoH-like protein
  misc_feature (1)..(282): Xaa is any amino acid
MEDGITIALDNRELLSGICGANDGNLKIIEGSLGGSITARGNEIHFESCGEDGVRRFRSMMDSLVSSVKKGEIPSPDYVRALASEFIQNEEDGSSHIESDEKGEAFFRDSMIQIPHGIRHVYPRTKNQAHYIRGMRENEICFCVGPAGTGKTFLAIAHALQTALSKKTRKIVLTRPVVEAGENLGFLPGDLSQKIDPYLRPLYDAMDALVPYEVIHKMEETRAIEIAPLAYMRGRSLNDCVVILDEAQNTTKEQMKMFLTRIGAGARAVITGDATQMTFPLR

SEQ ID NO: 38913 - DNA, 654 bp, Unknown
  Obtained from environmental sample
  misc_feature (1)..(654): n is a, c, g, or t
ttgattaagaatctaaccacggagttacacggagttacacggaggaagaaaatattacataccaaaactccgtggtactccgtgatactccgtggttttattttctttatcttctattcctcattcctaattcctaattcctcattgtcggcttctccgacaaactacacctacaactacgatttctgggaggaacaagtcgcttccccggacgcgtattatgtaagcgcctatgttctgggtaccggattgggcatcggcaatttccgcgatccgcaggggctttttgtcagggataaccgcgtttatatctgcgattcgggcaataaccggatagtcctgctggcttatgaaaacggagaacaccggctggtgtcggtgatgaaatcggtgacgattaacggcgttgagagtccctttaattatcccatggatatttttgaaagcagggatggttctctgtatgtagccgatactaataaccaccgcatactcaagctggataaagactggaactatatttcttccatattaaagcccgatgatgaaagcatcgacgaagacgcggaatttctgccgcttaaacttgtcgttgattttgccaaccgcctctttgtgcaggcccgtactcaacaagggctcgtgccgctctga

SEQ ID NO: 38914 - protein, 217 aa, Unknown
  Obtained from environmental sample
  DOMAIN (89)...(115): NHL repeat
  misc_feature (1)..(217): Xaa is any amino acid
MIKNLTTELHGVTRRKKILHTKTPWYSVILRGFIFFIFYSSFLIPNSSLSASPTNYTYNYDFWEEQVASPDAYYVSAYVLGTGLGIGNFRDPQGLFVRDNRVYICDSGNNRIVLLAYENGEHRLVSVMKSVTINGVESPFNYPMDIFESRDGSLYVADTNNHRILKLDKDWNYISSILKPDDESIDEDAEFLPLKLVVDFANRLFVQARTQQGLVPL

SEQ ID NO: 38915 - DNA, 894 bp, Unknown
  Obtained from environmental sample
  misc_feature (1)..(894): n is a, c, g, or t
ttgggacataaggggcatattatgataaaaagacaaaaaaaactgattggcggcagaagattaaacaggtcttacggcggcgacgcgtttattattacattactcacgatctttggcgtgtttttcgcgtttccccttgtttttaacattaatcacgcgtttaaaccgttaaatgaaattttcctttttccgcccaatgtttgggtgcgcaatcccacgacaaataactttcaggacctgtttattataatgagcaaatcctgggttaccttttcgcgttatatttttaacaccgtctttattaccgcggtcggaacgctggggttaatattcttcgcgtcgatgggagcgtttgttgtttcaaagtataattttccgggcgcgaagattttctttcagggcgttatcataactcttatgttttccggttatgtaacggcaattcccaactaccttgtaatggcaaaactcggctgggttgacacttacctttcgattattgttcccgcctttgctttcccaatcggcttcttccttttaaggcagtttatcgacacaatacctaattcgctgctggaagcggcgactgtagacggcgcgaaggaattcggcatcttcgtctggatcattatgcctatgataaaacccgcctggcttaccgtaatgatcttctccgtgcagaatctctggaatttaagggcgtctaacatgatctattcggagcagcttaaaactctgccctacgcgctttcgcagatcatcacaggcggcatagcccgcgccggagtaggagccgcggtaacgctttttgtaatgatagtgccgttggtaatgttcattttcgcgcagagcaacattctgcaaacaatggccagttcagggataaaggagtaa

SEQ ID NO: 38916 - protein, 297 aa, Unknown
  Obtained from environmental sample
  DOMAIN (91)...(297): Binding-protein-dependent transport system inner membrane component
  misc_feature (1)..(297): Xaa is any amino acid
MGHKGHIMIKRQKKLIGGRRLNRSYGGDAFIITLLTIFGVFFAFPLVFNINHAFKPLNEIFLFPPNVWVRNPTTNNFQDLFIIMSKSWVTFSRYIFNTVFITAVGTLGLIFFASMGAFVVSKYNFPGAKIFFQGVIITLMFSGYVTAIPNYLVMAKLGWVDTYLSIIVPAFAFPIGFFLLRQFIDTIPNSLLEAATVDGAKEFGIFVWIIMPMIKPAWLTVMIFSVQNLWNLRASNMIYSEQLKTLPYALSQIITGGIARAGVGAAVTLFVMIVPLVMFIFAQSNILQTMASSGIKE

SEQ ID NO: 38917 - DNA, 597 bp, Unknown
  Obtained from environmental sample
  misc_feature (1)..(597): n is a, c, g, or t
ttgctgttgggaattattatattccttgcatcgcgtaaattgggctcaagtcctaaccgtgtcatgtcggaaatcgcttctactgacggcaaaactccgcgcgataatacaaaatttgtggatcacagcaaagaacttgcaaaatacgcgtcggttccgaacagacgatccactccatacgacgctcatccgtttaaacccgatactcacaaaccagtaattaatccttccggtccgcttcttttaaatctttttgtagaagatcaaaatacagcgataggaaaacggaacattcattctttaaagtcaggttacagtttatcagtcggaggcggaaaatcggacgatttcatgattttccttgttcccattcctccgcacataggcgagatacacaggagcggaagctctcttacatttattccaaagaaacataaatattttccggatggcgcanatgaagttaaagactgcataaacaaaactatcagagtaatttcagataaacattacgagatgcgtttcaggtttgaaatgtacgaagatccgttagatgcgcttaaccgcgttcttatgtcggtaaaaataccgggttag

SEQ ID NO: 38918 - protein, 198 aa, Unknown
  Obtained from environmental sample
  misc_feature (1)..(198): Xaa is any amino acid
MLLGIIIFLASRKLGSSPNRVMSEIASTDGKTPRDNTKFVDHSKELAKYASVPNRRSTPYDAHPFKPDTHKPVINPSGPLLLNLFVEDQNTAIGKRNIHSLKSGYSLSVGGGKSDDFMIFLVPIPPHIGEIHRSGSSLTFIPKKHKYFPDGAXEVKDCINKTIRVISDKHYEMRFRFEMYEDPLDALNRVLMSVKIPG

SEQ ID NO: 38919 - DNA, 405 bp, Unknown
  Obtained from environmental sample
  misc_feature (1)..(405): n is a, c, g, or t
atgaaaggtgagacatcaggcaatacgttaaaattattgcgtttgaggacagactgcgacagggacgcgctgctcgccgttgctgaaccggcaggccctgtctgtcatacgggcgcgtggtcgtgctttgcgactaaccgggactatacattgcaatttttgcaaaatataattcaagagcgttttcgaaatcccgtgccggggtcttataccgccacccttgacgatgagcttgtccgtgaaaaaataatggaagaggcaaaagaactctgcgaagcacacacacatgaagaaattatctgggaagccgcggatctgctctatttcgcgacagtgttaatgacaaaagccggaatcaccgtccaggaaattcttgatgagcttgacaggaggcataaaaagtaa

SEQ ID NO: 38920 - protein, 134 aa, Unknown
  Obtained from environmental sample
  DOMAIN (1)...(45): Phosphoribosyl-AMP cyclohydrolase
  misc_feature (1)..(134): Xaa is any amino acid
MKGETSGNTLKLLRLRTDCDRDALLAVAEPAGPVCHTGAWSCFATNRDYTLQFLQNIIQERFRNPVPGSYTATLDDELVREKIMEEAKELCEAHTHEEIIWEAADLLYFATVLMTKAGITVQEILDELDRRHKK

SEQ ID NO: 38921 - DNA, 492 bp, Unknown
  Obtained from environmental sample
  misc_feature (1)..(492): n is a, c, g, or t
atgagcgcgtactggaacagccgcattaaaaatctttctccgtatatacccggcgagcagccgaaagaccggcaatttatcaaattaaataccaacgaaaacccttatcccccttcgcccaaggttattaaggagattcaaaaggccgtcaatgacagcctgcggctgtaccccgatcctgaatgtactgtgtttcgggaagcgatcgccgcccactgcagggtgcggactgaacaggtttttgccggcaacggttccgatgaaatactggcctttgcttttggcgcgttttttgatagttccggcgcgggaaaaacagagccaattctttttcccgatattacctacagtttctatcccgtgtacgcccgtttttgggacattccctgtcgtaccattccgttaaacgatgatttttccattaacatcgctaaatataaaatcccctcaggcggcgcggtatttccaaatcgaacgccccgaccgggatag

SEQ ID NO: 38922 - protein, 163 aa, Unknown
  Obtained from environmental sample
  misc_feature (1)..(163): Xaa is any amino acid
MSAYWNSRIKNLSPYIPGEQPKDRQFIKLNTNENPYPPSPKVIKEIQKAVNDSLRLYPDPECTVFREAIAAHCRVRTEQVFAGNGSDEILAFAFGAFFDSSGAGKTEPILFPDITYSFYPVYARFWDIPCRTIPLNDDFSINIAKYKIPSGGAVFPNRTPRPG

SEQ ID NO: 38923 - DNA, 378 bp, Unknown
  Obtained from environmental sample
  misc_feature (1)..(378): n is a, c, g, or t
atgacagattggccgagcggcgcgaagatgacgaagataacgattattaccaaccagaataagcttaccctgcttcacgcggctctcgacaagatcggcattaccggtctgacggttaccaacgttcttggccacggaatgcaaaagggccatgtggaatactaccgcggcgctccggttaatatccggctgctgcccaaggttcaggttgacatagtcgtatgcaagataccgccgcagacagtaattgatacggtgaagaaggtattgtataccggaaaagtgggcgacggcaaaatattcattacggatattgaaaatgtcgttaaagtccgcaccggcgagcaaggttacgacgctttacaggacaacgagtaa

SEQ ID NO: 38924 - protein, 125 aa, Unknown
  Obtained from environmental sample
  DOMAIN (13)...(114): Nitrogen regulatory protein P-II
  misc_feature (1)..(125): Xaa is any amino acid
MTDWPSGAKMTKITIITNQNKLTLLHAALDKIGITGLTVTNVLGHGMQKGHVEYYRGAPVNIRLLPKVQVDIVVCKIPPQTVIDTVKKVLYTGKVGDGKIFITDIENVVKVRTGEQGYDALQDNE

SEQ ID NO: 38925 - DNA, 873 bp, Unknown
  Obtained from environmental sample
  misc_feature (1)..(873): n is a, c, g, or t
ttgggagcaattaatatgaagattagcgatatattgaatataggaaaaattaccgtatcatgcgagctgtttcccccaaaacatggctccggccttgccggcgctcagaatattgtccgtgaaaccgcggccctgcgcccgtcgtttataagcatcacctatggagcggggggaggaacaagcgattatacggcaagccttgcggctgaaacgcaaaaacacggaataacggcgctggcacatctgacctgcgtttcatcggatcgccggacgataagaggcgttttatcgaaacttgcggctgacaaaattgaaaatgtccttgccttacggggcgatataccggacggactccctgctgacgctcagtatctccatgcctgcgatttaatgaaagagattcaaagcgcgggcgatttctgtataggcggcgcgtgttatcccgaaggacatcctgaatcggaaaaccttgaaaaagatatagaaagcctaaaaatcaaagtggattgcggttgtagtttttttacgacgcagatgttctttgataacaacattttctataattttttgtaccgccttntgcattataaaattgatattcctgtgatcgccggaattatgcccgttatcaacggacagcaaatcgcccgcatctgcaagctttcgggaactattctgccgccgcgtttccgcgcgattgtggataaattttcaggaaacagcgccgcgatggcacaggccggcattgcctacgctaccgagcagattatcgatcttatagcaaacgacgtgcgcaacattcatatttatacgatgaacaaaccggacatcgccgggaagataatggaaaatttgtcggaaatatttaaataa

SEQ ID NO: 38926 - protein, 290 aa, Unknown
  Obtained from environmental sample
  DOMAIN (7)...(286): Methylenetetrahydrofolate reductase
  misc_feature (1)..(290): Xaa is any amino acid
MGAINMKISDILNIGKITVSCELFPPKHGSGLAGAQNIVRETAALRPSFISITYGAGGGTSDYTASLAAETQKHGITALAHLTCVSSDRRTIRGVLSKLAADKIENVLALRGDIPDGLPADAQYLHACDLMKEIQSAGDFCIGGACYPEGHPESENLEKDIESLKIKVDCGCSFFTTQMFFDNNIFYNFLYRLXHYKIDIPVIAGIMPVINGQQIARICKLSGTILPPRFRAIVDKFSGNSAAMAQAGIAYATEQIIDLIANDVRNIHIYTMNKPDIAGKIMENLSEIFK

SEQ ID NO: 38927 - DNA, 576 bp, Unknown
  Obtained from environmental sample
  misc_feature (1)..(576): n is a, c, g, or t
atggaagaacctccgataagcctctacgcgaataacgccggtttcttcggaaatatttggcgcgaagggccgcagtttatcgaagcccttttccgcatggcgcagggctacagggatttacagtttgttactcccagctcttatattttcagctgtaagcttaattcccttcaggttgtcgcccccgaattttcatcgtttggcgttaacggctatgccgaaacatggctggacacttccaacgactggatataccgccaccttatccgctctatggaaagaatgactgaattagccgagcgtttcccggacgacacgggactgaaagagcgcgccttgaatcaggccgcccgcgagatactgcttgcccagtcttccgactggccgtggcttcttcacaggcaggagtcaaccgaatttgcgcgtaacaacgctgaaaacgccctgcgcaactttaccacgatatacgaggccttaggcagcaactacataagcaccgaatggcttacaacccttgaacgccgccacaatatcttcccgaatatcaattaccgcgttttcaggagaaagaaataa

SEQ ID NO: 38928 - protein, 191 aa, Unknown
  Obtained from environmental sample
  misc_feature (1)..(191): Xaa is any amino acid
MEEPPISLYANNAGFFGNIWREGPQFIEALFRMAQGYRDLQFVTPSSYIFSCKLNSLQVVAPEFSSFGVNGYAETWLDTSNDWIYRHLIRSMERMTELAERFPDDTGLKERALNQAAREILLAQSSDWPWLLHRQESTEFARNNAENALRNFTTIYEALGSNYISTEWLTTLERRHNIFPNINYRVFRRKK

SEQ ID NO: 38929 - DNA, 786 bp, Unknown
  Obtained from environmental sample
  misc_feature (1)..(786): n is a, c, g, or t
ttgagacttaagaaaaatatttttttggaggattttatggaggaaaagaaggaactacccatttcggacacggtctctagtcagactcaaggaggcttaccgaaacaagaaaaaaacgccgcgctaagaatagcggctgtatgtatattgagtctgattgttttgttgacgggaagctgtgataaaaagcaaaagctttacatttacaactggacatattacacgccggattccgtaattgaaaagtttgagaaagagtacaatgtcagggtcatttacgatgaatttgcgtctaacgaggacatgtacgcaaaacttaaatcgggaggaagcggctacgatattgttttcccgtcggcggattacacgtcaattatgatcaagcagggtatgcttgaaaaaatagataaatcattaattccgaatctgacaaatgtagacccggtcgttcttaaattcgcggtgtacgattcaaatatggattattccgttccttattacttcggcgcggctggcgtatgcgtaaatactgaaaaagttcccaactatgaaaaaagctggtctatcttcgcaagagatgatcttcgcggacgcatgacaatgttagacgatatgcgcgaagtaatgggcgatgctcttgccttttacggctattcggttaatactacgaataaggatcagataacgagagccagggaccttatnncacattcatggaaaccccaccttgtaaaattcgacgccgacgctttcggcaaggtttcgcaaacggggaattctgggtag

SEQ ID NO: 38930 - protein, 261 aa, Unknown
  Obtained from environmental sample
  misc_feature (1)..(261): Xaa is any amino acid
MRLKKNIFLEDFMEEKKELPISDTVSSQTQGGLPKQEKNAALRIAAVCILSLIVLLTGSCDKKQKLYIYNWTYYTPDSVIEKFEKEYNVRVIYDEFASNEDMYAKLKSGGSGYDIVFPSADYTSIMIKQGMLEKIDKSLIPNLTNVDPVVLKFAVYDSNMDYSVPYYFGAAGVCVNTEKVPNYEKSWSIFARDDLRGRMTMLDDMREVMGDALAFYGYSVNTTNKDQITRARDLXXHSWKPHLVKFDADAFGKVSQTGNSG

SEQ ID NO: 38931 - DNA, 444 bp, Unknown
  Obtained from environmental sample
  misc_feature (1)..(444): n is a, c, g, or t
atggaaaccccaccttgtaaaattcgacgccgacgctttcggcaaggtttcgcaaacggggaattctgggtagttcaggggtatcctgaagtagtatttgaagaaatagcggaagataaaaaaatgcaggcaaacaccgttttcttctttccagtggaaggaggccccgcatatatcgacagcatgtgtattttaaaaggctcaaagaacgtcaagcttgcacatcaatttatcaattttatccataaaccggaaatttacgccgagtttacggatgagtttggatttcccgcgacggcgaacatacccgcgcgcaagtttaaaaaaggaattccaatgtacgaagcggaggaactgctaaaaacggaaatcaagtttgatcttggttccgatttagacctctacaatgacgcatggtttaactccataagggttggcgaatag

SEQ ID NO: 38932 - protein, 147 aa, Unknown
  Obtained from environmental sample
  misc_feature (1)..(147): Xaa is any amino acid
METPPCKIRRRRFRQGFANGEFWVVQGYPEVVFEEIAEDKKMQANTVFFFPVEGGPAYIDSMCILKGSKNVKLAHQFINFIHKPEIYAEFTDEFGFPATANIPARKFKKGIPMYEAEELLKTEIKFDLGSDLDLYNDAWFNSIRVGE

SEQ ID NO: 38933 - DNA, 1455 bp, Unknown
  Obtained from environmental sample
  misc_feature (1)..(1455): n is a, c, g, or t
ttgagcctcattacccaagacctcgtgatgatggacagcgacgaattggtcaccgtacagaacgacaaaaagaaacacaatgacacgcttatagaagtcatggagagacgcgtagaagaaacacccggcgatccggagggcgcgtatcttgccatattaggccgcttggaattcaacaacgatccggattttgtgcgcggagtatgcggtatgatcgccgtttcacgtaacggcttacgggaaagcgatttgaagggcgccttcgaaaaattaaaaatgaaatttaatccggccgatttctcatggttacggcagatgctacgcgttcatttcgcgcagggagatatgcggcagtgggactttgctcatcaaagtctgcgtcgggcaatcaaaaaacattggtcggaagaaaaactgaaacgacttaacaacggaatcatagattatttccgcagcataatcgcgcatgatgacttcgccgcacgtgagataatgcaccatttatgcgttgctggcaaatctagcatcgcggcagaaataataaccgagcaatgtgagagtcaaggtacgatgtcggtatgtgatcgtctggtacgcggtcttgcggatgtttacgctgagaataatgggccgaaatttttaaagaaattgcctgaaatcgaaagcaaagatatagatggggcgaaacgcctattcatcgcgaatattattttggaagttttaccgttgttacctgaaaacattcaatcctttagctttcaaattgaacttatgaagataactcttggcggcattagtgacaaaaaaagtatcgaagccatgaagatagaagccgaggccgaaaacgctattgccgagttatgcatgaaaataggtaatatggaagacgccgatattcattacaaagcggcccgtaaaacgatgctacgcgtttgcgaacgtaccgatgaaaagtcagcgcatatgcgtttattgtcgataaccattaatctcggggattgccttatggcattaggcaatgtacacgcggcggacgcgtattaccgagaagctattgggttatttattataccagaatacgagaccatgtcggaatatgcggaattgtcggcggcgttgtacaataaagtagggaatcaacgagcggcgttaggtaatacgaaagatgccgatatgttttaccaaatggctattgaccagacgaagctaattgatgagcagagacgtaaaacattagtatgcgtagcgatgttgtacaatgatatgggaaatcacaatgtggcgttaggcaaaatggatgaagcctataagtattaccgtgacgccattgaggtgagagaacgaatttacaatcaaaccggcacaatgtcggcactacgtgatttgtctgaatcgcacaatagtatgtggattcacaaactgcgtttaaatgagaaagacatcgcctattcctaa

SEQ ID NO: 38934 - protein, 484 aa, Unknown
  Obtained from environmental sample
  DOMAIN (416)...(449): Tetratricopeptide repeat
  misc_feature (1)..(484): Xaa is any amino acid
MSLITQDLVMMDSDELVTVQNDKKKHNDTLIEVMERRVEETPGDPEGAYLAILGRLEFNNDPDFVRGVCGMIAVSRNGLRESDLKGAFEKLKMKFNPADFSWLRQMLRVHFAQGDMRQWDFAHQSLRRAIKKHWSEEKLKRLNNGIIDYFRSIIAHDDFAAREIMHHLCVAGKSSIAAEIITEQCESQGTMSVCDRLVRGLADVYAENNGPKFLKKLPEIESKDIDGAKRLFIANIILEVLPLLPENIQSFSFQIELMKITLGGISDKKSIEAMKIEAEAENAIAELCMKIGNMEDADIHYKAARKTMLRVCERTDEKSAHMRLLSITINLGDCLMALGNVHAADAYYREAIGLFIIPEYETMSEYAELSAALYNKVGNQRAALGNTKDADMFYQMAIDQTKLIDEQRRKTLVCVAMLYNDMGNHNVALGKMDEAYKYYRDAIEVRERIYNQTGTMSALRDLSESHNSMWIHKLRLNEKDIAYS

SEQ ID NO: 38935 - DNA, 996 bp, Unknown
  Obtained from environmental sample
  misc_feature (1)..(996): n is a, c, g, or t
atgccgagaaagaagaaataccgcaacgtatccatattcgtgtccagcacgttcaaagatatgcaggccgagcgtgacgcgctacgggaccatgtgctgccggaagtcaatgaatttgccgaaaagtacggttgcgtcgtggaaatcatcgatctgcgctggggggtggacaccgccgctgtttcggaggcggagcagaacgcaagggtgttacgcagctgcctggatgaaatcgaacgcagccgcccttttttcctggggctgatcggcgaccgttacggctggacgccgccgcgcacgtatatggaagcggcgctggaggcgtcgtatttttcacttgaaaatccaaacatgagcgttaccgcgctggaaatcgaatacggcgtgctccgttccaacaaaactccggtctgccttttctatttccgcgaaagccccgattacaaggttatgccggaaagccttcgcctaatctatcaggatgaagcggagggtctgacgaaactggcaaaactgaaagaagcaatcggggcccgttttgcgaaagacataaaaaattacgttgccgaagccgatgaaaacggcttggttgtttccaaagattgggctgatatggtggctgcggacatcatagcaaaattgcgggaggaatggggcgagccggcagagacgccgccaacatggaaagagcaggaacgcgatatgcaggataatttccgtgaaaaccggacactgcattttgccggcagagacgccgcaatagcggatatggccgctttctgcctgggcaggaatacaaagccgcacgaacctgaggttcgacttctcatgctgcaaggggaagcgggcagcggcaaaagcggactgctatgcaaagtgatggacgagatcgaagatcaatgcctgctgttgccgtttagctgcggaatatcgtcccgttcaagccttgttgaaaacatgctgaggtattttgttttcctccttgcgaaagattag

SEQ ID NO: 38936 - protein, 331 aa, Unknown
  Obtained from environmental sample
  misc_feature (1)..(331): Xaa is any amino acid
MPRKKKYRNVSIFVSSTFKDMQAERDALRDHVLPEVNEFAEKYGCVVEIIDLRWGVDTAAVSEAEQNARVLRSCLDEIERSRPFFLGLIGDRYGWTPPRTYMEAALEASYFSLENPNMSVTALEIEYGVLRSNKTPVCLFYFRESPDYKVMPESLRLIYQDEAEGLTKLAKLKEAIGARFAKDIKNYVAEADENGLVVSKDWADMVAADIIAKLREEWGEPAETPPTWKEQERDMQDNFRENRTLHFAGRDAAIADMAAFCLGRNTKPHEPEVRLLMLQGEAGSGKSGLLCKVMDEIEDQCLLLPFSCGISSRSSLVENMLRYFVFLLAKD

SEQ ID NO: 38937 - DNA, 717 bp, Unknown
  Obtained from environmental sample
  misc_feature (1)..(717): n is a, c, g, or t
atgactgaatacgatatcgtttcttttggcggcatcggagacggcgtttatgacaattccaacgcatttcaggcggcacttaacacaataaaagaagcgggtggcggcgttctgcgcgtaggggaaggaacctggcgtaccgggccgattgaaatttactcgcatactacactggtgttggacgaaggcgcggtcatttctcttatctcggaaccggcgcgttatccaccggtattaacgcgctgggaagggttggaatgttacgctatgcacccctgcgtctttgctaccggacaggaagatatagttatccgggggaaaggcataatagagggcaacgggcagtactggtggaataaaattcgtgaaaaaaatatcggcggacagcgacagccccaatcgcctgaggaattagccctttccgctttaaaccctggatacgaaaaccagccgtcaggcggtggcggcagaaaaaatcagttcctgcggcccccgctggtgcagttctacaattgctcaaaaatacggctggaaggtatcaccctccgcaattccccgttttggacccttcatccggtgtattgtaccggcatagtcatttccactctgtctatcatcaaaccgccggacgcgccaaacacggacgggatggacatcgattcctgcgaagacgttttgatcgaaaactgccatgttacgtgggggacgacggcatag

SEQ ID NO: 38938 - protein, 238 aa, Unknown
  Obtained from environmental sample
  misc_feature (1)..(238): Xaa is any amino acid
MTEYDIVSFGGIGDGVYDNSNAFQAALNTIKEAGGGVLRVGEGTWRTGPIEIYSHTTLVLDEGAVISLISEPARYPPVLTRWEGLECYAMHPCVFATGQEDIVIRGKGIIEGNGQYWWNKIREKNIGGQRQPQSPEELALSALNPGYENQPSGGGGRKNQFLRPPLVQFYNCSKIRLEGITLRNSPFWTLHPVYCTGIVISTLSIIKPPDAPNTDGMDIDSCEDVLIENCHVTWGTTA

SEQ ID NO: 38939 - DNA, 960 bp, Unknown
  Obtained from environmental sample
  misc_feature (1)..(960): n is a, c, g, or t
ttggagatcccccaaaaaatgcccgtcttcacgcgggaggatctttcgattgcctacacacccggggacgcccaaacctgccttgaaataagtaagaatgctgaaaaattctgggagttgaccggacgctggaatactgacgccgttgtcacagacgggaccgccgtcttgggacttggagatattggccctgaagccggaatgcccgtaatggaaggaaaatgtgtactgtttaaagcctttggcggagtggacgcaatccctctgtgcatacgttcaaaagaagttgacgttattgtagaaacggtagcacttcttgcaggaagttttggaggcattaatctggaagacatttccgccccgcgttgttttgaaatagagagaaaattaaagtcacgttgcgacatccccatttttcatgatgaccaacatgggactgcggtagtggtgcttgcggctctgcttaacgcgttaaaactgacaggaaaaaaacttgagaatatcagcgtagttactttaggcgcgggcgcggcgggtattgccgtaatcagactcttacaggcgttgggattgtccgatgtggtactgtgcgaccgtcagggggcaatttacaagggcagggacggccttaacagcgaaaaggcggaaatggctgaaatttcaaaccggcaaatgaaaaagggaagccttgccgacgttctgcggggagccgacgtatttatcggcgtttcagcgcccggcatggtaacgtcggaaatggcaaaatcaatggcacctaacgcgattttattcccaatgtccaacccaacgcctgagatcatgccggatctggctattgccgcaggagcagccgtagtgggaacaggcagaagtgattttgccaaccagatcaataatgtcctcgccttccctggtatattccgggcgctcggagtccggcaagcgacatactcgcgataa

SEQ ID NO: 38940 - protein, 319 aa, Unknown
  Obtained from environmental sample
  DOMAIN (143)...(317): Malic enzyme, NAD binding domain
  misc_feature (1)..(319): Xaa is any amino acid
MEIPQKMPVFTREDLSIAYTPGDAQTCLEISKNAEKFWELTGRWNTDAVVTDGTAVLGLGDIGPEAGMPVMEGKCVLFKAFGGVDAIPLCIRSKEVDVIVETVALLAGSFGGINLEDISAPRCFEIERKLKSRCDIPIFHDDQHGTAVVVLAALLNALKLTGKKLENISVVTLGAGAAGIAVIRLLQALGLSDVVLCDRQGAIYKGRDGLNSEKAEMAEISNRQMKKGSLADVLRGADVFIGVSAPGMVTSEMAKSMAPNAILFPMSNPTPEIMPDLAIAAGAAVVGTGRSDFANQINNVLAFPGIFRALGVRQATYSR

SEQ ID NO: 38941 - DNA, 360 bp, Unknown
  Obtained from environmental sample
  misc_feature (1)..(360): n is a, c, g, or t
atggggatgtcgcaacgtgactttaattttctctctatttcaaaacaacgcggggcggaaatgtcttccagattaatgcctccaaaacttcctgcaagaagtgctaccgtttctacaataacgtcaacttcttttgaacgtatgcacagagggattgcgtccactccgccaaaggctttaaacagtacacattttccttccattacgggcattccggcttcagggccaatatctccaagtcccaagacggcggtcccgtctgtgacaacggcgtcagtattccagcgtccggtcaactcccagaatttttcagcattcttacttatttcaaggcaggtttgggcgtccccgggtgtgtag

SEQ ID NO: 38942 - protein, 119 aa, Unknown
  Obtained from environmental sample
  misc_feature (1)..(119): Xaa is any amino acid
MGMSQRDFNFLSISKQRGAEMSSRLMPPKLPARSATVSTITSTSFERMHRGIASTPPKALNSTHFPSITGIPASGPISPSPKTAVPSVTTASVFQRPVNSQNFSAFLLISRQVWASPGV

SEQ ID NO: 38943 - DNA, 948 bp, Unknown
  Obtained from environmental sample
  misc_feature (1)..(948): n is a, c, g, or t
gtgggatggtttcccgggggacgctgggcggagtggaacgataaattccgcgatgatgtgcgccaatactggaggggcgatcaaaaagaaacgcggtttttggcgacgcgcatcgccggaagttccgatttgtatttgcgcgacgggcgcaagcctttccactcagtcaactttattacaagccatgacggttttacgataaatgatttagtttcgtataacgataagcacaacgaagacaacggggagaataactgcgacggcagcggcataaatttaagttttaattacggggttgaaggggcgaccaacgacccgattattacaacgattcgagaacggcaaataaagaattttttcgccactctgctggtttcgctcggtacgccgatgattcttggcggtgatgaaattggccgtactcaaaacggtaacaataacgcctattgtcaggataacgagacttcgtggtatgattggtcttttctgaaaaagaatgccggtttgtaccgttttgtcaaagaaatgatagctttccgccttagacatcccggttttatgcgccctgaattttacaccgggcaccagggcgactacagcgcgacgccggacattagctggtacaatgaaaaaggcgcaaaccccgactgggagaaagcgagtaacagcctggctttacaggtaaacggcagccgcgccgataccgcaatagacaaggataacaacgacttttacatcatgtttaatgccggaaccgacccggtgatattttccattccgcccactgccagccccggccacaaacgctggtttcgggcggttgataccagcatgcattcccccaaggatatactgcccgctggcagcgaagaagtgcttgacctgccgtataaatacatagtaaaggcccgcagcgtggttattcttatctcaaagagcgcaacatag

SEQ ID NO: 38944 - protein, 315 aa, Unknown
  Obtained from environmental sample
  misc_feature (1)..(315): Xaa is any amino acid
MGWFPGGRWAEWNDKFRDDVRQYWRGDQKETRFLATRIAGSSDLYLRDGRKPFHSVNFITSHDGFTINDLVSYNDKHNEDNGENNCDGSGINLSFNYGVEGATNDPIITTIRERQIKNFFATLLVSLGTPMILGGDEIGRTQNGNNNAYCQDNETSWYDWSFLKKNAGLYRFVKEMIAFRLRHPGFMRPEFYTGHQGDYSATPDISWYNEKGANPDWEKASNSLALQVNGSRADTAIDKDNNDFYIMFNAGTDPVIFSIPPTASPGHKRWFRAVDTSMHSPKDILPAGSEEVLDLPYKYIVKARSVVILISKSAT

SEQ ID NO: 38945 - DNA, 336 bp, Unknown
  Obtained from environmental sample
  misc_feature (1)..(336): n is a, c, g, or t
atgccggaaaaccatcgtgccattgccgaatggtcgcctgagcgtttcatatcctgggcggcaaagacgggggaaaaggccaaggcgtatattacatggctgttagagcgtaaagaacacccgcagcaggcatttagaacctgcgccggtatactccgtataggcgcgaccgtaacgccccagcggatggaagaagcctgcgctctggccttggaacgcaacgtgtactcgtattcgtatttcgcaaaacttctggaaaaccgcaaacccggtacgccgctcgttcatgaaaatttgcggggaaaagactatttcaacggaggcagccatgtttga

SEQ ID NO: 38946 - protein, 111 aa, Unknown
  Obtained from environmental sample
  misc_feature (1)..(111): Xaa is any amino acid
MPENHRAIAEWSPERFISWAAKTGEKAKAYITWLLERKEHPQQAFRTCAGILRIGATVTPQRMEEACALALERNVYSYSYFAKLLENRKPGTPLVHENLRGKDYFNGGSHV

SEQ ID NO: 38947 - DNA, 789 bp, Unknown
  Obtained from environmental sample
  misc_feature (1)..(789): n is a, c, g, or t
atgaaaatttgcggggaaaagactatttcaacggaggcagccatgtttgataatgccaccctcaaccaactccatgaactcaggctctcggctatggctcattgcttcacagagcagcagacacagcccggcattcactcgctgtcgtttgaagaacgcttcgccctgttagtcgaaaccgagtggctgtcccgccgcaacaagcgcaccgaacggctggtcaggcaggcgggcttccggttccccgccgctgttgaggatatcgactgccatgccaaaaaaggtatcggcaagccggaggtcctcaaactctccctctgctcgtatatcaagaaagcccagaatatctttttctcaggccctaccggcgtcggcaaaacctatcttgcctgcgctttgggccgcgccgcatgcgcccaaggctttcaggtcatctataccaggctaaacgatttcttccgccgtgtctccgccgcccatgctcacggccaagctcacttcagagacnagtgcgcaagagttccccttctcatccttgacgactgggggcttaaaaagttttccgttgaagaaagccatgaactctcagagctgtttgaacggcgttatggccgggccgcaaccatcatttcaggacagattccttccacctcctggcatgacttgtttcccgacccgacacaagctgacgcaatcctcgaccgtattgtccataacgcctacacctataatatctcaggtgagtccatgcggaaagccctcgggaaaaaggatcttgaaatgtcctga

SEQ ID NO: 38948 - protein, 262 aa, Unknown
  Obtained from environmental sample
  DOMAIN (37)...(66): IstB-like ATP binding N-terminal
  misc_feature (1)..(262): Xaa is any amino acid
MKICGEKTISTEAAMFDNATLNQLHELRLSAMAHCFTEQQTQPGIHSLSFEERFALLVETEWLSRRNKRTERLVRQAGFRFPAAVEDIDCHAKKGIGKPEVLKLSLCSYIKKAQNIFFSGPTGVGKTYLACALGRAACAQGFQVIYTRLNDFFRRVSAAHAHGQAHFRDXCARVPLLILDDWGLKKFSVEESHELSELFERRYGRAATIISGQIPSTSWHDLFPDPTQADAILDRIVHNAYTYNISGESMRKALGKKDLEMS

SEQ ID NO: 38949 - DNA, 738 bp, Unknown
  Obtained from environmental sample
  misc_feature (1)..(738): n is a, c, g, or t
atgcccaagctggagncagtgaaaatggagcttgcgccaagggacagggtgtgccgtgcgatatttgaggaattggcgcattcggggatgccatgcgtgtttttggacttgtcgcccataaaagcaaagatgaatctggaagagcgatttccaacggtgtttcatgcatgcatggacgaggggattgacccaaggacagaaccagtgccagtggtgccagccgcgcactatttntgcggcggggtgtcggttgacctagacgggagggccagccttgatggcctgtacgcagccggggaagtagcctgcaccggcctgcatggtgcaaaccgcttggccagcaccagccttttggagggcctcttgtgggggtacagggcggccaaggccattgcacaggagtgcaaaacagtcaatttgcccgatgtttccgccataaggccatggcagcccgttgcaaacccagtggtgccagacccattgctgatagagcaggactggaacagcgtccgcacgacgatgtggaattatgcggggacggtgaggacaaaggatcgcctagagaggggctatagcgacatcggctacctgtaccacaggatagaaacgttttatcgcagcgcaccagtgtccaagtcattgctggaactcagaaacgggatagcgtgcgccaggatggtcgtgaaggccgcgctgcagaacccgcagagccgcggctgccatttcagggttgattga

SEQ ID NO: 38950 - protein, 245 aa, Unknown
  Obtained from environmental sample
  misc_feature (1)..(245): Xaa is any amino acid
MPKLEXVKMELAPRDRVCRAIFEELAHSGMPCVFLDLSPIKAKMNLEERFPTVFHACMDEGIDPRTEPVPVVPAAHYXCGGVSVDLDGRASLDGLYAAGEVACTGLHGANRLASTSLLEGLLWGYRAAKAIAQECKTVNLPDVSAIRPWQPVANPVVPDPLLIEQDWNSVRTTMWNYAGTVRTKDRLERGYSDIGYLYHRIETFYRSAPVSKSLLELRNGIACARMVVKAALQNPQSRGCHFRVD

SEQ ID NO: 38951 - DNA, 1677 bp, Unknown
  Obtained from environmental sample
  misc_feature (1)..(1677): n is a, c, g, or t
atgatggccgaggatgacggcgttccggtgaatcttgacgaaagcatcaaactggacaagcaaaaaaaacacagcatagaaattgtggttgaccgtatcgtgattgagcagaatgtccgctcacggctggcggaatcggtggaaaccgccctgcaaaccgcggacgggcttttgctggttctggcaagcgacgaaggcaaaaactccgagcattttttttcgcagaagaactcctgcccggactgcggcgtttccattcccgaacttcagccgcgcctcttttcgtttaataacccttttggagcctgccccagctgtaccggactgggggcaaagctggaatttgatcccgaactggtaattcccgacccttccctttcctttaacgagggcggtgtcgttccctataatcctgacagcgcctggcaccgtagccgttttgcaagccttgccaagcattataaattcagcctggatacgcccctgtcaaaactgcccaaaaaaatactggacgcgattctctggggcagcaaggatgagataaaaattcgttacgataaccgcgaggggacggggcattttgagtatcagtcaaaatttcccggcgtactggaagaccttaaacgccgctaccttgaaacccagtcgccgggcatcaaggaatggcttgaaaagtttatgagccagaaaccctgcgaagactgcggcggcaagcggctcaagccggaagtattggctgtaaccatcgccgganaaaatatctgggagctttcctgtctttcagtgacggattccctgaatttttttaaatcggttaaattnncacagcatgaaaaaaaaatagcgtatcaaattttaaaagaaattaacgcgcgtcttggttttatgcagaatgtagggctggattacctcagccttgaaagaaaggcttctactctctcgggcggcgaagcccagaggatacggcttgcgacgcaaatcggttcaagccttgtgggggttctctacattttagacgaaccttctatcgggcttcaccagagggacaaccagcgcctgatagacaccctgctctacctgcgcgacctgggcaacacgctgattgtggtagaacatgacgaacaaaccctgcgcacggcggaccatatcgtggatttggggccgggcgcgggcgttcacggcggatacgtcgtcgcgcagggcaaccctgaaaaaataatgaaagtgaaggaaagccataccgggcagtatttgtcaggcgcgataagcatggcggttccgaaaaaaagacgcgaaggaaacggctcctttttgaaaatcaagggggcgggcgagcataaccttaaaaatatcaacgtggaaattccgcttggttcctttacctgcataaccggagtttcaggttcgggcaagtccactttgctctccgacgttctttaccccgcccttgcaaaccaaataaacggttccaaccataccgagggcgcgtataagaaaatagagggcgcggaaaatatcgacaagatcatcgacatagatcaaagccctataggaaggactccgcgctcaaacccgataacttacgttgaaggttttaccgcgataagagaccttttcacgaacctgccggaagcgaaaataaggggatacagggcggggcgtttttcattaacgtaa

SEQ ID NO: 38952 - protein, 558 aa, Unknown
  Obtained from environmental sample
  DOMAIN (168)...(389): ABC transporter
  misc_feature (1)..(558): Xaa is any amino acid
MMAEDDGVPVNLDESIKLDKQKKHSIEIVVDRIVIEQNVRSRLAESVETALQTADGLLLVLASDEGKNSEHFFSQKNSCPDCGVSIPELQPRLFSFNNPFGACPSCTGLGAKLEFDPELVIPDPSLSFNEGGVVPYNPDSAWHRSRFASLAKHYKFSLDTPLSKLPKKILDAILWGSKDEIKIRYDNREGTGHFEYQSKFPGVLEDLKRRYLETQSPGIKEWLEKFMSQKPCEDCGGKRLKPEVLAVTIAGXNIWELSCLSVTDSLNFFKSVKXXQHEKKIAYQILKEINARLGFMQNVGLDYLSLERKASTLSGGEAQRIRLATQIGSSLVGVLYILDEPSIGLHQRDNQRLIDTLLYLRDLGNTLIVVEHDEQTLRTADHIVDLGPGAGVHGGYVVAQGNPEKIMKVKESHTGQYLSGAISMAVPKKRREGNGSFLKIKGAGEHNLKNINVEIPLGSFTCITGVSGSGKSTLLSDVLYPALANQINGSNHTEGAYKKIEGAENIDKIIDIDQSPIGRTPRSNPITYVEGFTAIRDLFTNLPEAKIRGYRAGRFSLT

SEQ ID NO: 38953 - DNA, 816 bp, Unknown
  Obtained from environmental sample
  misc_feature (1)..(816): n is a, c, g, or t
gtgtcaccgcgcatacaagacttatccggaaataatgcgcttaaaaccccgaatgaagaagaacttaaagcagtctttaagcgcttgaaaaaatttgaaaaaaaagacatttacaactgtacaagctgcggataccaaagctgcgaattaatggctaaagcaatttttaacaatcttaacaaacctgaaaattgcgcgcattacaatatagagcttttaaaagaacaaacgaaaacggaagaattaaaccgcctgctcaaagaacacattagccgcacgacaggtcttatcgaaagaatttcgcagacagttcatgaccttaacgaaactattgaaatgcaggcgcggtctgtaaaagagtcgtctcaaaaaacagcgtcaatgatagaatcgcttgcctccacttccgaagtttccagaaacaaacagaacgatattcaggaactgcttgataacgccactcagggacaaaagtccatgaaggagacaatacaatcggtacagagcatctctcaatctgtagacggcattagttcggctatcaaaataatcaccgcgattgccgcaaacaccaacctgttatcaatgaacgcggcaatagaggcggctcacgcgggagacgcgggaagaggtttcgcggtagtagccgatgaaatccgccgtctttccgataccacaagggaaaattcccacaatatatccaagaccttaaaaaccatcattgacaatataacggttacttccaaacaatccggcgatacagatgcccgtatacagagatgtcaaaggaaattaaagggttcgcggaaacaatga

SEQ ID NO: 38954 - protein, 271 aa, Unknown
  Obtained from environmental sample
  DOMAIN (38)...(68): Putative Fe-S cluster
  misc_feature (1)..(271): Xaa is any amino acid
MSPRIQDLSGNNALKTPNEEELKAVFKRLKKFEKKDIYNCTSCGYQSCELMAKAIFNNLNKPENCAHYNIELLKEQTKTEELNRLLKEHISRTTGLIERISQTVHDLNETIEMQARSVKESSQKTASMIESLASTSEVSRNKQNDIQELLDNATQGQKSMKETIQSVQSISQSVDGISSAIKIITAIAANTNLLSMNAAIEAAHAGDAGRGFAVVADEIRRLSDTTRENSHNISKTLKTIIDNITVTSKQSGDTDARIQRCQRKLKGSRKQ

SEQ ID NO: 38955 - DNA, 1071 bp, Unknown
  Obtained from environmental sample
  misc_feature (1)..(1071): n is a, c, g, or t
ttgcttacgccgcaggtaaaatcaaggctggaaaaaataagtgtgatgcatgccgtaattgacgaggcgcactgtgtaagcgagtggggagaaagtttccgtcccagctatcttgaaatcggctctatcttacgttctcttaatccgccgcttattaccgcttttaccgccacagcttcctctccggttctggaaaaaataaagaagtacatcttcggtgatttggaagcttgtcaaatcgtgggaaaccctgacaggcccaacatcagttattccgcaaagggctgtgttaaccgcaatctggcggttcgggatttaatttttcaaaacagccgccccgcgatagtattctgttcctcgcgtcccggcacggaaaaactttcccgctatctgcgcgattctttcggcgagatgggactgtcgtggagtaacgaaatccgtttttatcacgcggggttaagcagagaagaaaaagccggcgttgaaaaatggtttatcaacaatccggaagcggttctttgcgccacctgcgcctacggaatgggagtggacaaagccgacgttcgcactgttattcacagggactgcgctccgtcggtagaggcatacttgcaggaagcaggcagggcgggacgcgacggaggccagtcaagcgcttttcttttgtggggtccggaagacgaagcatctctttcaagggcgaaaacagaagcggataaaagcagggtcttatcgctactgcgctacgcgagggacacaagtcattgcaggcggcattcgcttctttccctgttaaattacgattccggcggcgaagtgccggaaaaactctgctgcgacgtctgcgaaaaaaaagcgtccgctgttcttagggaggaaacgacattaataaattttttccaaaaaaacaaaagacgctacacccccgaaaaagccgcctcagtcttagcgtcgagcaaacctcttcactggcaggaagaagaagcggcggcggtaattaattatttgataaaagagggaaagattgaaaagtgcaaacgatttccttggaagaataaaattactttgtaa

SEQ ID NO: 38956 - protein, 356 aa, Unknown
  Obtained from environmental sample
  DOMAIN (138)...(214): Helicase conserved C-terminal domain
  misc_feature (1)..(356): Xaa is any amino acid
MLTPQVKSRLEKISVMHAVIDEAHCVSEWGESFRPSYLEIGSILRSLNPPLITAFTATASSPVLEKIKKYIFGDLEACQIVGNPDRPNISYSAKGCVNRNLAVRDLIFQNSRPAIVFCSSRPGTEKLSRYLRDSFGEMGLSWSNEIRFYHAGLSREEKAGVEKWFINNPEAVLCATCAYGMGVDKADVRTVIHRDCAPSVEAYLQEAGRAGRDGGQSSAFLLWGPEDEASLSRAKTEADKSRVLSLLRYARDTSHCRRHSLLSLLNYDSGGEVPEKLCCDVCEKKASAVLREETTLINFFQKNKRRYTPEKAASVLASSKPLHWQEEEAAAVINYLIKEGKIEKCKRFPWKNKITL

SEQ ID NO: 38957 - DNA, 366 bp, Unknown
  Obtained from environmental sample
  misc_feature (1)..(366): n is a, c, g, or t
atgcgtgatgcaatggggagaaatgttcaaattaatttattattagaaccatcactgaaacatggcggcaaagttagtcaagattcaatgaagatgatgaaatcgttattcccttcggcaaatatttattcatggtcaggaaaatcaaattcaaatataaaacatcctaatggtgcaattcacgctaaatgcgctattgccgatagtgaactggcatttattacaagcgctaatttaacaactgcggcaatggaaaaaaatattgaacttggaatactaattagaggcggaaaaataccaagtgaattaattaagcatttaaattcattgattaatgcaaagatatttgagaaatatagtttatag

SEQ ID NO: 38958 - protein, 121 aa, Unknown
  Obtained from environmental sample
  misc_feature (1)..(121): Xaa is any amino acid
MRDAMGRNVQINLLLEPSLKHGGKVSQDSMKMMKSLFPSANIYSWSGKSNSNIKHPNGAIHAKCAIADSELAFITSANLTTAAMEKNIELGILIRGGKIPSELIKHLNSLINAKIFEKYSL

SEQ ID NO: 38959 - DNA, 903 bp, Unknown
  Obtained from environmental sample
  misc_feature (1)..(903): n is a, c, g, or t
ttgacgttttctgctatgacacgggcatttttttgtagccttgcagacattgttgatgctggggtttttctggaatggcggcgtgacgggcgggccgtcaaaaccagcgccgttttaaacagcccggtcttaaacggtcaaacgccccgttcggtatcgcttattatccctattcataatgaaggccggcgcatggaagggctgctacgcagcctgcttggacaggattatccggccgaaattatctttgttgacgactgttcagacgatgaaagccccgccatgcttgcccaatttgtgcaagacgcggcccggcagggcatgaataactgccgggtaattaccctgaaacacaaccccggccccaaccggaagcagtacgccctgtcggcgggcataaccgcggcgcggggggattacctgttatttaccgatggcgactgtgaagcgccgccgtcatggattagggcaatggcctgccgcatggacgacgcggctgtcggcgcggttatcgggccggtattcaagaaaaagcaggggaggggattttttttcctgtaccagtgctatgaccatgtagtgcgttacaattacctggccggggcaatagggctgggcgcggcgggcggcggctttggcaacaatctgattatcagccgggcggcgctggattctatcggcggctacgacgcggttccgccttcacctaccgaggacgcggcgctcatctcgctgatacgttccggcggcaaataccgcgtccgcgccatcgccctgcccgacgcggcgatagaaaccgtcgccgaaaaaacatggcgcagttttatcagccaaaccctccgctggaacaacggcggcctgttcagccccgagtttataacccgcttaactacaatcttttaa

SEQ ID NO: 38960 - protein, 300 aa, Unknown
  Obtained from environmental sample
  DOMAIN (53)...(227): Glycosyl transferase family 2
  misc_feature (1)..(300): Xaa is any amino acid
MTFSAMTRAFFCSLADIVDAGVFLEWRRDGRAVKTSAVLNSPVLNGQTPRSVSLIIPIHNEGRRMEGLLRSLLGQDYPAEIIFVDDCSDDESPAMLAQFVQDAARQGMNNCRVITLKHNPGPNRKQYALSAGITAARGDYLLFTDGDCEAPPSWIRAMACRMDDAAVGAVIGPVFKKKQGRGFFFLYQCYDHVVRYNYLAGAIGLGAAGGGFGNNLIISRAALDSIGGYDAVPPSPTEDAALISLIRSGGKYRVRAIALPDAAIETVAEKTWRSFISQTLRWNNGGLFSPEFITRLTTIF

SEQ ID NO: 38961 - DNA, 750 bp, Unknown
  Obtained from environmental sample
  misc_feature (1)..(750): n is a, c, g, or t
gtgtggatctgtaagccccgcgttcccgatgaacatattgccgagaattggctggacgcgagaacttccaaagcgcaggaatgtatagacagaatcaatgaggctgaagcaaacaagcaaatcgccgtattgattaaggaaatttttgagaatgttgaagaacttcaacgcatggaaaattattccgtcgccaaaagcgatgtctatcgcagaaaagaattatcctactttgtatatgcccagggactcaactacctttcggtttttttgactgattacatggaaaaagaaattcgcgaactgtgcgatattttgcttatccgggggcagtggaccaacaatacgttctccaaggaaatgtccgaagcggtacatgaactgctggatatgcccgaagcggtctcgcgtttggacgcggcgcttacggatgacggcccggacggttcccggttaaaagcggcgcttctccggtttgatcgggatcgtacccaggcgcgctatatcaatgccattattgataatatcaacgaaacagtgctggaattattgaacaattttcttgaacagatttccgttattgacaagcacttgaagtctctggtggatgatgtgcataaaaagcatcctgagatgattcttaactggcgtgagttggcgatgttttcaaaggatcctttgcatcagcgaataatggatgacagcaaaaaaatcagttgctttatcgagctgatgaatctgtgtatccaatag

SEQ ID NO: 38962 - protein, 249 aa, Unknown
  Obtained from environmental sample
  misc_feature (1)..(249): Xaa is any amino acid
MWICKPRVPDEHIAENWLDARTSKAQECIDRINEAEANKQIAVLIKEIFENVEELQRMENYSVAKSDVYRRKELSYFVYAQGLNYLSVFLTDYMEKEIRELCDILLIRGQWTNNTFSKEMSEAVHELLDMPEAVSRLDAALTDDGPDGSRLKAALLRFDRDRTQARYINAIIDNINETVLELLNNFLEQISVIDKHLKSLVDDVHKKHPEMILNWRELAMFSKDPLHQRIMDDSKKISCFIELMNLCIQ

SEQ ID NO: 38963 - DNA, 882 bp, Unknown
  Obtained from environmental sample
  misc_feature (1)..(882): n is a, c, g, or t
atgtttatcttgctgttcgcctttgtggggcctgttttcgtgccatatacctatgagcgtgagatccgtggctccggaaacctgaaaatgatggcgtattccgaaaaggaacgggaacgcatcgccgcggaggaatccgtgttcccacatgtgttcggcacggataatgctgggcgggatatcatggcgcgggtgatgtatggtacccgtatttccctgatcatcggtgtgttcgcctcgctgatcgttctggtgatcggcacgctgtacggggcggcggcggggtatttcggaggcagggtggattttatcatgatgcggattgtggatatcatctacgccatacctgaaatgctcatggtgctgttgctgagcgccatcatcaaagaacctctccgaaggtggatcaacagcagtcaaaatcccatcgtgcataacctgggcggcgtgggccacggcattgtttccattttcgtcgtgttcggcctgttgtattgggtgggcatgagccgcatcatccgaggtcaggtactcatgctgaaagaacaggagtttgtcatggcctcccgggccatgggcgcttccagcggccgtattatccgtaaacacttgattcccaactgcgtggggcagatcatcgtgacgaccatgatgcaaatccccagcgctatttttctggagtcttttttgagtttcctgggcatgggcgtctccgcccccaccgccagcctgggcagcctggcttccgacgccctgggcggtatatacagctatcccagccggctggttatccctagcctctttctatgtgtgctgattctgtcttttaacctgtttggggacngcctgcgggatgccttggatccgcgcatgaaaaagtga

SEQ ID NO: 38964 - protein, 293 aa, Unknown
  Obtained from environmental sample
  DOMAIN (69)...(293): Binding-protein-dependent transport system inner membrane component
  misc_feature (1)..(293): Xaa is any amino acid
MFILLFAFVGPVFVPYTYEREIRGSGNLKMMAYSEKERERIAAEESVFPHVFGTDNAGRDIMARVMYGTRISLIIGVFASLIVLVIGTLYGAAAGYFGGRVDFIMMRIVDIIYAIPEMLMVLLLSAIIKEPLRRWINSSQNPIVHNLGGVGHGIVSIFVVFGLLYWVGMSRIIRGQVLMLKEQEFVMASRAMGASSGRIIRKHLIPNCVGQIIVTTMMQIPSAIFLESFLSFLGMGVSAPTASLGSLASDALGGIYSYPSRLVIPSLFLCVLILSFNLFGDXLRDALDPRMKK

SEQ ID NO: 38965 - DNA, 1041 bp, Unknown
  Obtained from environmental sample
  misc_feature (1)..(1041): n is a, c, g, or t
atggcaaaaaaaatcagtcgagcagccatacacgaagctctcagcggctttgtgcccccaggctttagttcaagtttgctggcgatgaaggccgttatatctgcagagttagatggcgggcgcgtgctattgactctacggcttccaggggattgcaaggaaaattggcccgcaatccaagccatgcttacagagcgcgtttctgcaattgaaaacgtcgagagcgtaagtgtcagcattgaatgggagccatcgccagagggcaagaagccaaacctgttgccattcgtcaaacacattgtcgtcataggcagcggaaagggcggggtggggaagagcacagtcgcggcaaacctggcctgttccttggccgcgagggggcatgccgttggcctgttggacgcagaccttcatgggcccagcatgggcatgatgtttggcgtgggcggcgatgacggccccatcgtttcgccgagcggaatgatagcccccgttgaaaaatatgggctaaagataatgtccatgggatttctgatagaagaagaaaggcccgtcatctggcgcggccccatgctacacaaagcgctggagcagttcatggccgaagtggaatggggggcgctggacatccttttgattgatctgccccctggcacgggcgacatacttatttccattgtcaacagcgtccgcgtcggcggcgccgtggtagtaagcaccccgcaagatgtcgcattcctagacgcaaaaaaggccatagccatgttcagcgaggcaaacatccccatccttggtgtgatagagaacatgtccagctttgtctgccccaagtgcggcgaagagacccaaatatttggcagcggcggtgttcgcaaagcggcacaagcgatgggcctccccttcttgggagagatacccattgacctgcaaataagaatgacctgcgaccaaggcgcacccatagcggccatcagcccagatagcccacaggcgaaggtgtttggggggatagcgggtagggtctgggggaagacgcattag

SEQ ID NO: 38966 - protein, 346 aa, Unknown
  Obtained from environmental sample
  DOMAIN (101)...(313): CobQ/CobB/MinD/ParA nucleotide binding domain
  misc_feature (1)..(346): Xaa is any amino acid
MAKKISRAAIHEALSGFVPPGFSSSLLAMKAVISAELDGGRVLLTLRLPGDCKENWPAIQAMLTERVSAIENVESVSVSIEWEPSPEGKKPNLLPFVKHIVVIGSGKGGVGKSTVAANLACSLAARGHAVGLLDADLHGPSMGMMFGVGGDDGPIVSPSGMIAPVEKYGLKIMSMGFLIEEERPVIWRGPMLHKALEQFMAEVEWGALDILLIDLPPGTGDILISIVNSVRVGGAVVVSTPQDVAFLDAKKAIAMFSEANIPILGVIENMSSFVCPKCGEETQIFGSGGVRKAAQAMGLPFLGEIPIDLQIRMTCDQGAPIAAISPDSPQAKVFGGIAGRVWGKTH

SEQ ID NO: 38967 - DNA, 816 bp, Unknown
  Obtained from environmental sample
  misc_feature (1)..(816): n is a, c, g, or t
ttggtgtttcatttggctgctcagccattggtgcggctttcttaccgcgagccggcggctacctatgagaccaatgttattgggacggtgaatatacttgaggcgctacgtgcaactccatctgtaaaatcttttgttaatgttactaccgataaagtatatgaaaacatggaatggcattggggctatcgggaaaatgaaaatttgtgcggctatgatccatattcaaacagcaagtcatgcagtgaattggtaacgtacagttaccgcaattcattttttaccgatgtgaatacaactgcaatttctactgcccgttccggcaatgttataggcggcggtgattacgccgaagaccggatcattcccgattgtatccgggcagtaaacgataaaaaagaaataatagtgcgtaaccccaattccatacgcccctatcagcatatactggaatgtctttgcgggtatctggttttggcggaaaaacaatacagcgataaatcattggaaggggcgtataacttcggccccaatgatgaaagctgtgttaccaccggagaccttgccggacttttttgcgctgtctgggcttcaggcgctgcctggcaagttcagggagacggtggccctcatgaggcgaattttttgaaattggattgctcanagtcaaaagccgtattgggctggaagccgcgttgggatatacaaactgcggtaaaaaaaaccgtggaattcgccaaacttcaatcggataatgagcggttggcttgtattgatgggcagataaaggaatattttggagagaatcatgtttga

SEQ ID NO: 38968 - protein, 271 aa, Unknown
  Obtained from environmental sample
  misc_feature (1)..(271): Xaa is any amino acid
MVFHLAAQPLVRLSYREPAATYETNVIGTVNILEALRATPSVKSFVNVTTDKVYENMEWHWGYRENENLCGYDPYSNSKSCSELVTYSYRNSFFTDVNTTAISTARSGNVIGGGDYAEDRIIPDCIRAVNDKKEIIVRNPNSIRPYQHILECLCGYLVLAEKQYSDKSLEGAYNFGPNDESCVTTGDLAGLFCAVWASGAAWQVQGDGGPHEANFLKLDCSXSKAVLGWKPRWDIQTAVKKTVEFAKLQSDNERLACIDGQIKEYFGENHV

SEQ ID NO: 38969 - DNA, 861 bp, Unknown
  Obtained from environmental sample
  misc_feature (1)..(861): n is a, c, g, or t
ttggagagaatcatgtttgaatccatgacaaaagatcaggcaacccaacacattcttgacagtgtgaaagaatactataagactttcatgcaaaaaccaccgtacagggatggggatcgcattccctgcgcatcgcgcgtgtttgatgaaagagagatgctaaacctggttgacagctccctggagttttggcttacattcgggcgttacactgatcgctttgaaaaacagcttgcggattaccttcatgttaatttttgttcgctggtaaactccggttcatccgccaaccttgcagtctttatggccctcacctccccattgttgggagatcgtgcggttaggcggggcgatgaggtgatcaccgttgcggcgggtttcccaaccaccgttactcccattttacaatttggggcagtgccggtatttgtggatgttactattccacaatacaatattgacgcttcgttacttgaaagggcttactcccctaaaacaaaagcggtaatgttggcgcatactttggggaacccatttgacattaaagctgtaaaagccttttgttccgcccataacctttggctggtggaagacaattgcgacgcattaggttcaacatataatatcaatggcgtaacaaagtttaccggaactatcggcgatataggcacatccagtttttatcccgcacaccatataactatgggagaaggcggggccgtttatacagacgatcctttgcttcataaaataatcaggtccatgcgtgactggggacgtgattgtgtatgccccggcggaaaaataatatgtgcggccacccgttttgacaacagtatggtgaacttcacttgggtatga

SEQ ID NO: 38970 - protein, 286 aa, Unknown
  Obtained from environmental sample
  DOMAIN (46)...(286): DegT/DnrJ/EryC1/StrS aminotransferase family
  misc_feature (1)..(286): Xaa is any amino acid
MERIMFESMTKDQATQHILDSVKEYYKTFMQKPPYRDGDRIPCASRVFDEREMLNLVDSSLEFWLTFGRYTDRFEKQLADYLHVNFCSLVNSGSSANLAVFMALTSPLLGDRAVRRGDEVITVAAGFPTTVTPILQFGAVPVFVDVTIPQYNIDASLLERAYSPKTKAVMLAHTLGNPFDIKAVKAFCSAHNLWLVEDNCDALGSTYNINGVTKFTGTIGDIGTSSFYPAHHITMGEGGAVYTDDPLLHKIIRSMRDWGRDCVCPGGKIICAATRFDNSMVNFTWV

SEQ ID NO: 38971 - DNA, 480 bp, Unknown
  Obtained from environmental sample
  misc_feature (1)..(480): n is a, c, g, or t
atgagaacagcatccgaagagatcaggcagctcgtcgtgaaggcgtgcgaatcaggggccgccagcagggagcagctcgcggcgattttcggctacagcctccgcacgatcgccaggtgggtggcggagagccgcgggtcgggccgcacgtccccgctgccgaggggccacaggcgccccgccttcgacgccggggagcgcgaggagctcgccgcgttcatcgaggggacccccgacgcgacgctggcggagatcagggagcgcttcgggaagacctgctcgctcgcggccgtgtgcaagaccgtggtgaagctggggtacgtctataaaaaaaacgctgcgggcaagcgagcaggacaggcgggacgtggcggaaggcagggccgcgtggctggagttccaggcgggggtggaggggcggcgcctggtgttcctcgacgagtcctgcgcgaagaccggcatggcaaggctgtacggtag

SEQ ID NO: 38972 - protein, 159 aa, Unknown
  Obtained from environmental sample
  misc_feature (1)..(159): Xaa is any amino acid
MRTASEEIRQLVVKACESGAASREQLAAIFGYSLRTIARWVAESRGSGRTSPLPRGHRRPAFDAGEREELAAFIEGTPDATLAEIRERFGKTCSLAAVCKTVVKLGYVYKKNAAGKRAGQAGRGGRQGRVAGVPGGGGGAAPGVPRRVLREDRHGKAVR

SEQ ID NO: 38973 - DNA, 441 bp, Unknown
  Obtained from environmental sample
  misc_feature (1)..(441): n is a, c, g, or t
gtggacgctgaggttgtcgagcaccagtatgtcgcctggcgcaagggtcggggcgagcacttggcttatgtactcgtcgaacacggcccggtccgtcgccccctcgaaaaccacgctgtgggtggacccgtccagcctcaccgccgagagcatcgtcacccttttccagtgccccgccggggccttgccgtggcagcggctcccgccgagcgacctaccgtacagccttgccatgccggtcttcgcgcaggactcgtcgaggaacaccaggcgccgcccctccacccccgcctggaactccagccacgcggccctgccttccgccacgtcccgcctgtcctgctcgcttgcccgcagcgttttttttatagacgtaccccagcttcaccacggtcttgcacacggccgcgagcgagcaggtcttcccgaagcgctccctga

SEQ ID NO: 38974 - protein, 146 aa, Unknown
  Obtained from environmental sample
  misc_feature (1)..(146): Xaa is any amino acid
MDAEVVEHQYVAWRKGRGEHLAYVLVEHGPVRRPLENHAVGGPVQPHRREHRHPFPVPRRGLAVAAAPAERPTVQPCHAGLRAGLVEEHQAPPLHPRLELQPRGPAFRHVPPVLLACPQRFFYRRTPASPRSCTRPRASRSSRSAP

SEQ ID NO: 38975 - DNA, 597 bp, Unknown
  Obtained from environmental sample
  misc_feature (1)..(597): n is a, c, g, or t
atggctgagaatatgaactacaatgttacgggtagcaaatgcggaggaacaactctatatacggactcgtctttcagcgagaatcttggagaatggtttataaatacatattatcttcttgaagataaaaatactataaactgtgataaatacggtcgtctttatgattgggtgacggctatggcattgccaaatagttgctataacactctttgtgtatcacaagcaaaacaccaaggtatttgtccttctggttaccacattcctacaaatgcagattgggacaaattggtcctttatgcaggtggcaaagaaactgcagccatatatttaagggctacagttgggtgggctatttgcggtagcggtagttctgatagctacaaatgcaaggataaatacggctttactgctctgccgggcggtagtggcggcggcgattactatgttcagccaaccaccaacggctcttggtggagtagttcagaatttacccaaagtgctaacctaatcataatggattataggtcggaacttgcgatgaatgggactaacagtaaatccgacttaaatagtgttcgttgtgttaaagattga

SEQ ID NO: 38976 - protein, 198 aa, Unknown
  Obtained from environmental sample
  misc_feature (1)..(198): Xaa is any amino acid
MAENMNYNVTGSKCGGTTLYTDSSFSENLGEWFINTYYLLEDKNTINCDKYGRLYDWVTAMALPNSCYNTLCVSQAKHQGICPSGYHIPTNADWDKLVLYAGGKETAAIYLRATVGWAICGSGSSDSYKCKDKYGFTALPGGSGGGDYYVQPTTNGSWWSSSEFTQSANLIIMDYRSELAMNGTNSKSDLNSVRCVKD

SEQ ID NO: 38977 - DNA, 1038 bp, Unknown
  Obtained from environmental sample
  misc_feature (1)..(1038): n is a, c, g, or t
ttgcgcaacctcattttctcttccaacgaaaccataaaggaatccttggagcctaccgcgaataccgaagaggttttgcaagctacggaaaaacgaatttttgatttggtatctgaccaagtgaaagagaatgcggaggctttgggcaaggttgcgatggattttttgaacaagctcgctatgcggcagcacggcttgctctccggttgcccaaccgatttcaaagacttggacaatttgacaaacggattgcaaaaaaccgatttgataattttggcggcacgcccttctatgggaaaaacagcacttgcactcaatatagccgcaaatgcagcaaagcaaaataaaaccgtgctgttctttagcctagagatgaacgcacagcagctggctataagagtgctcagctcggaggcagaaattgaccaaagtctgttacggcatggaaagatagacgtgggaacggttcattctttgcttgcaaaatcaaaagagatggcggatatgccgctttttatagatgattcaagcgaagtacgcgcttttgatttgatttccaagtgcaggatattcaaaagaaagcacaataacaatttagacctcgttgtggttgattatttgcagatgatgaagataaatggaaactcggaaaacagggcagttggcgttgcagaaaattcccgtatgctaaaagtgttggcaaaggaactccaggttccagttctcgcccttgcccagctgaacagaaatgtggaaaatcgccctacgggtggacgcccgcagctttcggatttgcgtgattccggggcgatagagcaggacgccgacctcgtcctctttgtataccgcgacgaggtatataacaaggacgatatcgccaataagggcaaggccgagataataatcggtaagcagagaaacgggcccatcgggagcgtggaagtagcgtttgttaaagaatacgcgaaatttgagaatttgtcgattcgccctgacgacggcatgcctcaaagggagcctgacgatgccatcgggtga

SEQ ID NO: 38978 - protein, 345 aa, Unknown
  Obtained from environmental sample
  DOMAIN (66)...(265): DnaB-like helicase C terminal domain
  misc_feature (1)..(345): Xaa is any amino acid
MRNLIFSSNETIKESLEPTANTEEVLQATEKRIFDLVSDQVKENAEALGKVAMDFLNKLAMRQHGLLSGCPTDFKDLDNLTNGLQKTDLIILAARPSMGKTALALNIAANAAKQNKTVLFFSLEMNAQQLAIRVLSSEAEIDQSLLRHGKIDVGTVHSLLAKSKEMADMPLFIDDSSEVRAFDLISKCRIFKRKHNNNLDLVVVDYLQMMKINGNSENRAVGVAENSRMLKVLAKELQVPVLALAQLNRNVENRPTGGRPQLSDLRDSGAIEQDADLVLFVYRDEVYNKDDIANKGKAEIIIGKQRNGPIGSVEVAFVKEYAKFENLSIRPDDGMPQREPDDAIG

SEQ ID NO: 38979 - DNA, 387 bp, Unknown
  Obtained from environmental sample
  misc_feature (1)..(387): n is a, c, g, or t
ttgacgttaggtttaattgttgcgatttttatcgtctgtatgataacttgccgaaaccataaaggtttgaagattgtcaagttagccgttattttagtcggacttattgcaatcggcattcttggtaataaagtgttagcaaacaaatccccaaaaccgcaaacaacagagacaacgcaaggcgcaaacacaaacccgtcggctgaaataacgaaaaatgtaaacttccgcaaaggtccttcaactaacgatgcagtaatcaggcaattaaagcagggcgacattgttatattgacaggcgaagtatcaggcggttggacgcaaataacccacaacggcgatacaggttgggtcagcacggagtatttgaaagtatacggtaaatga

SEQ ID NO: 38980 - protein, 128 aa, Unknown
  Obtained from environmental sample
  DOMAIN (70)...(127): Bacterial SH3 domain
  misc_feature (1)..(128): Xaa is any amino acid
MTLGLIVAIFIVCMITCRNHKGLKIVKLAVILVGLIAIGILGNKVLANKSPKPQTTETTQGANTNPSAEITKNVNFRKGPSTNDAVIRQLKQGDIVILTGEVSGGWTQITHNGDTGWVSTEYLKVYGK

SEQ ID NO: 38981 - DNA, 1230 bp, Unknown
  Obtained from environmental sample
  misc_feature (1)..(1230): n is a, c, g, or t
gtgctatcagcaatgacatcatattcccaaaaagagggcgttatgaaggttcataatgattttaccttgtattttcgggttatcccttcggggaaacgggtcgtgtatttctatgcctatgacgaaaacggcaagcggacgcaaggcaggtctaccgggcagaccaacaaaactgcggcaagggttgtggtgaacaggcttttgaaagaaggggcattgctgccgaaaaaagacagcgtgcctacatttggcgaatacgccgtaaactggtgggattgggaaaaatgcgaatacatgaaaaaaaggcgcaagcgggctaacctgacccaaagctactccgaccacatgaagcggaatttggacaaagtcgtgctgccgtatttcaaaaatataaaaatggacacgattaccccagcggtgattgaagcgtttctggacagccttataaagcaaaaatataagaataccacgattaacggctactacggcactttcaaaaccatgatgattgaagccgtagagcgtgggattattactacagacccaaccgccaaagtggagcgtctgataaacgatcgcaatgaaataaagattatcactccccttgaattcaaaaagctgtttgtggtggattggcgcaaagcttgggaagacaatttcatcgcctgtaccgtgaacaagctggcggctctgtcgggcatgagggtgtccgagattttggggcttaaagggagttgcctgttcgatgaccatatttacgtctgtatgcagcatgatatttacggctacaggccgaccaaaacaaaagacaagcacaatgtaccccttcccgcttccctaattgccgatttgaagttactgaaagagacaagcggggacggctacctgttttccactaacggcgggggcagccctatttgcaggaaaactgttttgatgtatctgcgaaaggctttgataaatatcgggatcaccgccgccgaaattaaagcccggaatttgcatatccacgcatggcggcattttttcaatacggaaatgttgaagggcgggatgactacagaacaggcgcaagcgataaccacgcataagagcgaaaggatgactgaacggtacactcattttgacccgcttgaatttgtaaaggcgaaagaaatacaagaagcattgttgcagcctgtcggcgaaaaactgcaagggctggaagcggaaaaaaggaaatgccgctga

SEQ ID NO: 38982 - protein, 409 aa, Unknown
  Obtained from environmental sample
  DOMAIN (209)...(382): Phage integrase family
  misc_feature (1)..(409): Xaa is any amino acid
MLSAMTSYSQKEGVMKVHNDFTLYFRVIPSGKRVVYFYAYDENGKRTQGRSTGQTNKTAARVVVNRLLKEGALLPKKDSVPTFGEYAVNWWDWEKCEYMKKRRKRANLTQSYSDHMKRNLDKVVLPYFKNIKMDTITPAVIEAFLDSLIKQKYKNTTINGYYGTFKTMMIEAVERGIITTDPTAKVERLINDRNEIKIITPLEFKKLFVVDWRKAWEDNFIACTVNKLAALSGMRVSEILGLKGSCLFDDHIYVCMQHDIYGYRPTKTKDKHNVPLPASLIADLKLLKETSGDGYLFSTNGGGSPICRKTVLMYLRKALINIGITAAEIKARNLHIHAWRHFFNTEMLKGGMTTEQAQAITTHKSERMTERYTHFDPLEFVKAKEIQEALLQPVGEKLQGLEAEKRKCR

SEQ ID NO: 38983 - DNA, 729 bp, Unknown
  Obtained from environmental sample
  misc_feature (1)..(729): n is a, c, g, or t
atgagagagcctattgcagacgagtccgtattcctgcgggttacggaatttaagaacgggctgatccaatttacggacagcactaatgccatgcgccttgtcaaagagcatgggcgcaatatcaggtacaacgccgcatggagaaaatgggttgtgtggaacggcaagtattgggaaatggacgagggaggcgttttgatacacgaaaagggtcttgaaatggttcgcaacatttatgatgagcttctgaaaaccgccgattacagggaacggatagacattgaaaaggcggcaatgatgagcgaaagcgtaaggcggcgaaaggcttttgtagaggcggcgacatgggtttccgctttgcgggttagaactgacgagcttgactgcaatccatggctactgaacgtgaagaatgggactatagatattcaaagcggggaattccgggagcataggcaagaggacatgataacaaaaatagccaatgtggattatgaccctgcggctgactgcccgatgtggaagcagtttgtcagggaaataatgaactacaaatcggaaataataaagtttgtccagactgcggcggggtggtcgttgtccggcgacatttcagagcagacaatgtttattctgtacggtactggcgcgaacggcaagtctactttcttgaatacgataatgtacctgttaggcgattacgcaacggcaacgcctcgtgccatctga

SEQ ID NO: 38984 - protein, 242 aa, Unknown
  Obtained from environmental sample
  misc_feature (1)..(242): Xaa is any amino acid
MREPIADESVFLRVTEFKNGLIQFTDSTNAMRLVKEHGRNIRYNAAWRKWVVWNGKYWEMDEGGVLIHEKGLEMVRNIYDELLKTADYRERIDIEKAAMMSESVRRRKAFVEAATWVSALRVRTDELDCNPWLLNVKNGTIDIQSGEFREHRQEDMITKIANVDYDPAADCPMWKQFVREIMNYKSEIIKFVQTAAGWSLSGDISEQTMFILYGTGANGKSTFLNTIMYLLGDYATATPRAI

SEQ ID NO: 38985 - DNA, 1083 bp, Unknown
  Obtained from environmental sample
  misc_feature (1)..(1083): n is a, c, g, or t
atgctaaaaaactatgattacagatataagctggcgaaagcgcagcgtcctttgctaatcggcgtgatagttttgtttttctttgtgcttgtcctcgttataatactattgataagaagccgtaattccggcaggcacttgcagcagttggtaaatcataggacaaacgctcttgaattcgaaacatccaaactaaaagcggttcttgattcaattcccgattttatgttctgcaaagatataaattacagatacactcaatgcaacaatttctttgaagaatttttaggcgtccatgaagctgatattctgggcaaaaccgacgaggaaggcaattttctgcatcctgaacatatggaaatgattcacaagacagagcaggctgtaataaatgaagacaagatatattccgttgaggaaaaaattcaatcgcccgttacgggaaaagaacggttttttgaaagtgttaaagcgccaatcaagcaaaacggcgctgtcgtggggataatcgccattatacgagacataaccaagcgcaaggaaatggaaaaagaactggctattcagacttcattgtttaagacgatgctgagttcgcttcccgacgccgtattctgcaaagatttgaattttaagtataccttatgcaataattacatgacggatatacttaataaaaaagcggaagatataatcgggaaggatgaaatagaagcgctgggactgcctgtcgaaacggctgccattgccaaagaaaccgataaaaaagttatgatcggacaacagcgggtatcgtatgaggaaaagatactgtgcggggacggcgttacacggctttttgaaacggtaaaatcgccgctgataattaacaacgaagtagtcggggttatggcgatagcccgcgacataactcggcgcaaagaaatggaagaagacgcacaagccgcttcgcgcgccaagtcgtctttccttgccaatatgagccatgaactgcgaacgcctcttaacgtggttatcgggcttaccgaattaatattggaagacgacatgagcgatcatgtaagaaaaaatttaataaaataa

SEQ ID NO: 38986 - protein, 360 aa, Unknown
  Obtained from environmental sample
  DOMAIN (319)...(359): His Kinase A (phosphoacceptor) domain
  misc_feature (1)..(360): Xaa is any amino acid
MLKNYDYRYKLAKAQRPLLIGVIVLFFFVLVLVIILLIRSRNSGRHLQQLVNHRTNALEFETSKLKAVLDSIPDFMFCKDINYRYTQCNNFFEEFLGVHEADILGKTDEEGNFLHPEHMEMIHKTEQAVINEDKIYSVEEKIQSPVTGKERFFESVKAPIKQNGAVVGIIAIIRDITKRKEMEKELAIQTSLFKTMLSSLPDAVFCKDLNFKYTLCNNYMTDILNKKAEDIIGKDEIEALGLPVETAAIAKETDKKVMIGQQRVSYEEKILCGDGVTRLFETVKSPLIINNEVVGVMAIARDITRRKEMEEDAQAASRAKSSFLANMSHELRTPLNVVIGLTELILEDDMSDHVRKNLIK

SEQ ID NO: 38987 - DNA, 675 bp, Unknown
  Obtained from environmental sample
  misc_feature (1)..(675): n is a, c, g, or t
gtgatgtctggggcgcggatcatcacggttacgcccccccgcatgcgcgccgccatggcggctttcggccggccccccgaatactttgacgtgtttctgatccaactcgtcaccctgctgcaaaagggcgaaaccatcgccatgtccacccgcgacggcacgttcgtgcctctggccgatctcgtgcgcgatgtcggcgtggacgcggcccgcttcatatttttgtcccgcaaaagcgacagtccgctggactttgatcttgatctggtcaaacagcgcaccatggacaatccggtctactatgtgcagtatgcccacgcccgcgcctgttccatgctgcgccgggcggaggaggagggcctgattctgccgccgcgcacgccgcaggctgtcctggcggctctggatcagcccgaggaactgagcctcttgcgcgctctggacagcttcgccgatgtggcggcgtctgccgccgccgatctcgccccgcacagcgtcagccactacctgatggacttggccggacagctgcacagctactatgccaggcatcccgtgctccaggccggcaacgccgatctgactgtggcccgtctgtccctgatgcgcgccttggggcaaaccatccgcaacggacttaacttgctcggcgtaagcgcgcccgacagcatgtag

SEQ ID NO: 38988 - protein, 224 aa, Unknown
  Obtained from environmental sample
  DOMAIN (102)...(224): DALR anticodon binding domain
  misc_feature (1)..(224): Xaa is any amino acid
MMSGARIITVTPPRMRAAMAAFGRPPEYFDVFLIQLVTLLQKGETIAMSTRDGTFVPLADLVRDVGVDAARFIFLSRKSDSPLDFDLDLVKQRTMDNPVYYVQYAHARACSMLRRAEEEGLILPPRTPQAVLAALDQPEELSLLRALDSFADVAASAAADLAPHSVSHYLMDLAGQLHSYYARHPVLQAGNADLTVARLSLMRALGQTIRNGLNLLGVSAPDSM

SEQ ID NO: 38989 - DNA, 849 bp, Unknown
  Obtained from environmental sample
  misc_feature (1)..(849): n is a, c, g, or t
gtggcagataataaacgaatagaatttctgataaagaatatgggtgaattgcccactattcccagtgtatttttaaccgtaaacaaaatgttgtctgatccgcacacctcagctattgatgttgggcaagtggtatctagcgatcaggttatagctgctaaaattttgaaactcgcaaacagcgcattttacggatttgctggcagggtaaacactgttccgcatgccattgcggttctcggttttaatgcaacaaaaaacgtggtgcttacaactggtgttttatctgccttgaaattgaaaacacccatagacggattcaatctctctgctttttggaaacattcagctgcggtgggagcaatagcgaggctcgtagctgaggaattttattctcaaagaaaagaagaagcctttatagctggtattttgcacgatattggcaagctcattttggctatttgctccccagaagattttgcacgttgcatagacctagccacaagcaaaggctgtctatttttagatgcagaaaaagaggtgctagggatttgccacacagacatatctgactgggtaaacaggagatggaacctacccagagaaatagctgcggtgatgataaatcatcataggaacatcaacgtattgggcgagcataccagaatgattgccattgttaaactggcagatgttttggcaagaggcttgcaacttgggcatccctgcgattattccatgcctattttggaatctgatgtttcttctttgctcaaagtgactccaaaaaaattagatactattttatcggccagttttggggcaattcaaagctcaatggatttttaa

SEQ ID NO: 38990 - protein, 282 aa, Unknown
  Obtained from environmental sample
  DOMAIN (112)...(236): HD domain
  misc_feature (1)..(282): Xaa is any amino acid
MADNKRIEFLIKNMGELPTIPSVFLTVNKMLSDPHTSAIDVGQVVSSDQVIAAKILKLANSAFYGFAGRVNTVPHAIAVLGFNATKNVVLTTGVLSALKLKTPIDGFNLSAFWKHSAAVGAIARLVAEEFYSQRKEEAFIAGILHDIGKLILAICSPEDFARCIDLATSKGCLFLDAEKEVLGICHTDISDWVNRRWNLPREIAAVMINHHRNINVLGEHTRMIAIVKLADVLARGLQLGHPCDYSMPILESDVSSLLKVTPKKLDTILSASFGAIQSSMDF

SEQ ID NO: 38991 - DNA, 498 bp, Unknown
  Obtained from environmental sample
  misc_feature (1)..(498): n is a, c, g, or t
ttgggacttgaattaagtacaagcatgttggaagaagaacgtaacaaatatcttaatcaaagtacaatagacgaattaacccagcttaataaccgcagggattttatgcagacttttcaaaggtatctgcataactaccgggcttacgacgactggctgtgtgtcgctatcgccgatattgattttttcaaaaacttcaatgatcattacggtcatcctaaaggcgatgaatgtctgcgcggcgtcggctcgatatttgccaaagtaaaggaaaatatgggcgtatataccgccagagtcggcggagaagagtttgcgatgctttggtttgaaaaagacgttactcatgtagacgctgttatttcctatttttccggcttaataagagacatgaatatgccgcacgaaaaatcaaaagtttcggatcatgtaacaatgagcgttggggtatatgttgaacagttggggagaatccagcgacgttcagactctgtatga

SEQ ID NO: 38992 - protein, 165 aa, Unknown
  Obtained from environmental sample
  DOMAIN (17)...(164): GGDEF domain
  misc_feature (1)..(165): Xaa is any amino acid
MGLELSTSMLEEERNKYLNQSTIDELTQLNNRRDFMQTFQRYLHNYRAYDDWLCVAIADIDFFKNFNDHYGHPKGDECLRGVGSIFAKVKENMGVYTARVGGEEFAMLWFEKDVTHVDAVISYFSGLIRDMNMPHEKSKVSDHVTMSVGVYVEQLGRIQRRSDSV

SEQ ID NO: 38993 - DNA, 1284 bp, Unknown
  Obtained from environmental sample
  misc_feature (1)..(1284): n is a, c, g, or t
ttggataccgaccgttattgtatggtgacgtttaacagatgggcgacagacccaaaatttattaacggcgacatttcaattattcttttaacggaaaaccttgccgatatttcttcccgccttataggttctccgtcaactgtaaaaataagcgtgccgtttcccggcgtacaggtaagggaaagttttttgcgctcaagggaaaaagaaggaaaacttctgcttgatcgcgggcttactcccgaaaaactcgctatggtaacatccggcattaatcttatgaacttgaaccgtcttgccgccgaaagttttgaggaaaacaagccgatatcgcttgattttatgcggatgaaaaaaaaggagataatagaaacagaggcggcgggacttttggaatttatggaaacttcttttaatctctcccatgtttcgggtcatgactttgtcaagaagcggtttaagaacgcggcaaaagcgataaagatggggcggcccgacgtgctgcctatgggttatcttatcgcgggccctgtcggaacgggaaaaagttttatggtaaacgcgtttgccggagagataggaattcccatggtaaaattccgcaacttccgcaccaagtggcaaggcgaaaccgaggcgaatcttgagaaagctttaaacatacttaccgcgatggcgcctgtcggcgtaatgatagacgaagcggacgcgttcctgggcgatcgcgatcagaggggagattcaggcaccagtaaccgcgtgtntgcgcaaatagcgagcttcatgggggataccgcttaccggggaaagatcatctggttccttatcacctgccgtcccgatcttcttcccatagaccttaaacgtcagggccgggcggaagaacactttgccctcttttacccggaaaccctggcggagaaagtagcgctttttgaaactctggtggaaaaactcaagtttggggttcacactttttcggttcccgatcttttcaggagatacgatcacgaagtttccggggcggaaatagagtccatgcttgtaagggctatgcagatggctgttatggaaggccggactatgatctccaaaaaagatatggaagaagtaattgaagattttcgcccgccctattaccccaacgcgatacggcttcagaaccttgttgcagcggttgaatgtacttccaggaaaatggtgcctaagcgtttccagcttgataattcccaaatggttcgggagatacaggagctgaaaactctgctgggcgagaggaagtaa

SEQ ID NO: 38994 - protein, 427 aa, Unknown
  Obtained from environmental sample
  DOMAIN (171)...(357): ATPase family associated with various cellular activities (AAA)
  misc_feature (1)..(427): Xaa is any amino acid
MDTDRYCMVTFNRWATDPKFINGDISIILLTENLADISSRLIGSPSTVKISVPFPGVQVRESFLRSREKEGKLLLDRGLTPEKLAMVTSGINLMNLNRLAAESFEENKPISLDFMRMKKKEIIETEAAGLLEFMETSFNLSHVSGHDFVKKRFKNAAKAIKMGRPDVLPMGYLIAGPVGTGKSFMVNAFAGEIGIPMVKFRNFRTKWQGETEANLEKALNILTAMAPVGVMIDEADAFLGDRDQRGDSGTSNRVXAQIASFMGDTAYRGKIIWFLITCRPDLLPIDLKRQGRAEEHFALFYPETLAEKVALFETLVEKLKFGVHTFSVPDLFRRYDHEVSGAEIESMLVRAMQMAVMEGRTMISKKDMEEVIEDFRPPYYPNAIRLQNLVAAVECTSRKMVPKRFQLDNSQMVREIQELKTLLGERK

SEQ ID NO: 38995 - DNA, 321 bp, Unknown
  Obtained from environmental sample
  misc_feature (1)..(321): n is a, c, g, or t
gtgctctgcaagccagccttcgcttttggcagcaacgcttgcaatgcgaagagcaaggcattttttgccgagcagtgcatttccaccgtagccagagccgtagctccaaattgttttttcttcggggaagtgagcaatgtatttcttttcaattggagcacaaggccatttgccattgtcgtcttggcaagagagaagcggtttgcctatggagtgcaagcagggaatgaattcgcctttagcacccaaaacatccaaaacctttgtaccaacgcgagccattatgtgcatatttatcacaacataaggagaatctgttaa

SEQ ID NO: 38996 - protein, 106 aa, Unknown
  Obtained from environmental sample
  misc_feature (1)..(106): Xaa is any amino acid
MLCKPAFAFGSNACNAKSKAFFAEQCISTVARAVAPNCFFFGEVSNVFLFNWSTRPFAIVVLAREKRFAYGVQAGNEFAFSTQNIQNLCTNASHYVHIYHNIRRIC

SEQ ID NO: 38997 - DNA, 948 bp, Unknown
  Obtained from environmental sample
  misc_feature (1)..(948): n is a, c, g, or t
gtgaagcatccgcaggatgcaacgcactcaaaggtgcgatatttcataccgttattttgcatagggcaggataacaaatcaggagtttttatgaaaaggaaagtaattttagcgttggcgctttttgcgctcatggcggtaggagtgtacgcccagacggaagccgattttagggtaaaaaagtcggcagacggtaaatcgattacgattactgcgtacataggaaccgtaaaggcggtcaacattccggcaaagatacagaatttgccagttaccagcattggtggttccgcttttcgagatgacattgatattacaagcgtaacaatacccaacggcgttactagcattgggaatatggcttttgtgggttgcaccagtcttactagcgtaaccttcgctggttcaattccgtcaagcggttttgatgttgctgcttttgatgacggcgacattcgtgacaagtaccttgccgcaggaggaagagcaggaacgtacactagacttgatacaaatagcacaacatggaggaaacaggggacttcaaccgccgctgcgccagcatacgacggtactcgcggactcgaatttacgcttaccagagacggaaagggttacagcgtcaaagcaggaggtacatttccagtaacagaaaacacgttggttatacccgccacgtacaataatctgcccgtaacgactatctcccaaaaggggttcgatggctgtcctaaaattagcagtgtgacaataccggcgagcgttaccgaaattcaattaggtgcttttatgcaatgcccagagcttaaaagcgtaacctttgggggggcgaatactgtcttttacgataatgcattcccagacggcgacttatctcaaaagtacaaagccggaaaagcagggacgtacacgagaccagcaaacggcaaaacatggacgaaaaagtag

SEQ ID NO: 38998 - protein, 315 aa, Unknown
  Obtained from environmental sample
  misc_feature (1)..(315): Xaa is any amino acid
MKHPQDATHSKVRYFIPLFCIGQDNKSGVFMKRKVILALALFALMAVGVYAQTEADFRVKKSADGKSITITAYIGTVKAVNIPAKIQNLPVTSIGGSAFRDDIDITSVTIPNGVTSIGNMAFVGCTSLTSVTFAGSIPSSGFDVAAFDDGDIRDKYLAAGGRAGTYTRLDTNSTTWRKQGTSTAAAPAYDGTRGLEFTLTRDGKGYSVKAGGTFPVTENTLVIPATYNNLPVTTISQKGFDGCPKISSVTIPASVTEIQLGAFMQCPELKSVTFGGANTVFYDNAFPDGDLSQKYKAGKAGTYTRPANGKTWTKK

SEQ ID NO: 38999 - DNA, 888 bp, Unknown
  Obtained from environmental sample
  misc_feature (1)..(888): n is a, c, g, or t
atgatcagatggccgagaattatgactgagaaatccaatggaatgaattacgctccgatagggaagcccgctcctgtagtaaaaaaaggcgagtttgttttttcggcgatagggctggatcacggacatatttacgggcaatgcaacgggttaatcgaagccggcggagttctaaaaagcgtgtatgatcccgatcctgccaagatggataaattctgtcagacttattcaggcgtaaaacgagcggcaagcgaggatgaaatttttaacgacaaagaagttttgctggtagccggagcggcggtaacatcggagcgatgcgctcttgggctgcgtgtcatgtcggcgggaaaagattattttaccgacaaagcgccgcttaccacattggaacagcttgaagcggcgaaagcaaaagtaaaagagaccggaaaaaaatatatggtgtactacagcgagcgtattcatgtggaaagcgccgtgtttgcgggacagttaattgaacagggagcgattggcaaggtgatacaggtaatgggtcttggtccccacagacttagcgcgccgtcgcgtcccgagtggttttttaaaaaagaaaaatacggcggaatactctgcgacataggcagtcaccaaatagaacaatttttattttacgcaggcgtgaaggatgcggaagttgtacgaagccaaatagcgaattacaatcatccgcaatatccagagcttgatgatttcggcgacgccgtgcttgtcggcgacaacggagcggctcattacttccgagtggactggttcactcccgacggattgcaaatgtggggagacggacgctcgtttattcttggcacggaaggctacattgaacagcgcaatatatgcagttag

SEQ ID NO: 39000 - protein, 295 aa, Unknown
  Obtained from environmental sample
  DOMAIN (32)...(151): Oxidoreductase family, NAD-binding Rossmann fold
  misc_feature (1)..(295): Xaa is any amino acid
MIRWPRIMTEKSNGMNYAPIGKPAPVVKKGEFVFSAIGLDHGHIYGQCNGLIEAGGVLKSVYDPDPAKMDKFCQTYSGVKRAASEDEIFNDKEVLLVAGAAVTSERCALGLRVMSAGKDYFTDKAPLTTLEQLEAAKAKVKETGKKYMVYYSERIHVESAVFAGQLIEQGAIGKVIQVMGLGPHRLSAPSRPEWFFKKEKYGGILCDIGSHQIEQFLFYAGVKDAEVVRSQIANYNHPQYPELDDFGDAVLVGDNGAAHYFRVDWFTPDGLQMWGDGRSFILGTEGYIEQRNICS

SEQ ID NO: 39001 - DNA, 843 bp, Unknown
  Obtained from environmental sample
  misc_feature (1)..(843): n is a, c, g, or t
gtggacggtcaacaacgaataacaactatttcaatgattattcaggcgttagtagattgtcttgacaaggaaaacaaagatttttacagtcgcatttatataaaagaagaagatcgctatcgccttttgccgttaaatagagataaagattattttgttaatttactagataaaaaaattcttgaaccggagaataaaagtcagcgtgcgttaaaagaggctatggaggaaataaggtataaaattcaacccattgaaaacaaacttgcatttttaaagtcagttgtgaaattacaaataatggagtttattgaaaacacggaaggtgatgctattaggatatttcaaacggttaacgatcgtggaaaacaattgtcaaaaatggaaaaagcaaaaagcgtattgatttatttttccaatcgctatttatcaggaaagttagatacgaaaatcagtaatgattttagcgagatatttgaaatttacgatgatataaaacaaagtggagaagaattgaatattgatattatcaaaaatagaagtttcgatgaagacaatattatgaactaccattatataactttctctaacgaaaattatgcgccaaccgcagattttgttttgcagaaattgaaagatgggttagcagaaaagaggtctgatattaacggattagaagcatttataattaaatatgtggatagtataaaagagttttttgtagcaacaaaatctgtaatagaaaaagctagttctctagaaaaatattataaattattttctatattgaaagtatctgcaacactttaccccgtgataataaggttggagacatttacataa

SEQ ID NO: 39002 - protein, 280 aa, Unknown
  Obtained from environmental sample
  misc_feature (1)..(280): Xaa is any amino acid
MDGQQRITTISMIIQALVDCLDKENKDFYSRIYIKEEDRYRLLPLNRDKDYFVNLLDKKILEPENKSQRALKEAMEEIRYKIQPIENKLAFLKSVVKLQIMEFIENTEGDAIRIFQTVNDRGKQLSKMEKAKSVLIYFSNRYLSGKLDTKISNDFSEIFEIYDDIKQSGEELNIDIIKNRSFDEDNIMNYHYITFSNENYAPTADFVLQKLKDGLAEKRSDINGLEAFIIKYVDSIKEFFVATKSVIEKASSLEKYYKLFSILKVSATLYPVIIRLETFT

SEQ ID NO: 39003 - DNA, 369 bp, Unknown
  Obtained from environmental sample
  misc_feature (1)..(369): n is a, c, g, or t
gtgaccgatgttatggggaatatcctcgccgtcaatgtacataacgcaaataaacacgacacaaaaggcggcgtttttgtctttgaaaaggcgcggtatcggtatccgtcgattcaggcggggtgcggcgacgaaggctatcgcggaactttcaaaaacacttttgaatggtttcataatatccgaattgatatttcgccgaaaattaagccggatgaagggatttcaccgaaaagatggcgggtggaacgcactttttcttggcttggttggtcccgcagactttcaaaggattatgaaataaaaaccgtttctgaggaaaatatggtgattatctcgcattttcatacgcttttgaagagattttaa

SEQ ID NO: 39004 - protein, 122 aa, Unknown
  Obtained from environmental sample
  misc_feature (1)..(122): Xaa is any amino acid
MTDVMGNILAVNVHNANKHDTKGGVFVFEKARYRYPSIQAGCGDEGYRGTFKNTFEWFHNIRIDISPKIKPDEGISPKRWRVERTFSWLGWSRRLSKDYEIKTVSEENMVIISHFHTLLKRF

SEQ ID NO: 39005 - DNA, 423 bp, Unknown
  Obtained from environmental sample
  misc_feature (1)..(423): n is a, c, g, or t
ttgcgaggggcgaccttaaatcttgcgccgtttgtggagtgtctgaaaatatttcaatccacgcccccttgcgaggggcgacaaaagcgtttaacctcggtttatctccattatgcatttcaatccacgcccccttgcgaggggcgacaccgatacagtcgcttacggctttttcggggtttatttcaatccacgcccccttgcgaggggcgacctccgtcgttaaaaagcagagaaaagccgcgacgaatttcaatccacgcccccttgcgaggggcgacgaaatatcaccgcccgcgaccgcgcgaggtgtcatttcaatccacgcccccttgcgaggggcgacttacaggcgaattacaagcccgcgaccgtgaagcatttcaatccacgcccccttgcgaggggcgacgtccacattaa

SEQ ID NO: 39006 - protein, 140 aa, Unknown
  Obtained from environmental sample
  misc_feature (1)..(140): Xaa is any amino acid
MRGATLNLAPFVECLKIFQSTPPCEGRQKRLTSVYLHYAFQSTPPCEGRHRYSRLRLFRGLFQSTPPCEGRPPSLKSREKPRRISIHAPLRGATKYHRPRPREVSFQSTPPCEGRLTGELQARDREAFQSTPPCEGRRPH

SEQ ID NO: 39007 - DNA, 339 bp, Unknown
  Obtained from environmental sample
  misc_feature (1)..(339): n is a, c, g, or t
gtgtctgaaaatatttcaatccacgcccccttgcgaggggcgacaaaagcgtttaacctcggtttatctccattatgcatttcaatccacgcccccttgcgaggggcgacaccgatacagtcgcttacggctttttcggggtttatttcaatccacgcccccttgcgaggggcgacctccgtcgttaaaaagcagagaaaagccgcgacgaatttcaatccacgcccccttgcgaggggcgacgaaatatcaccgcccgcgaccgcgcgaggtgtcatttcaatccacgcccccttgcgaggggcgacttacaggcgaattacaagcccgcgaccgtga

SEQ ID NO: 39008 - protein, 112 aa, Unknown
  Obtained from environmental sample
  misc_feature (1)..(112): Xaa is any amino acid
MSENISIHAPLRGATKAFNLGLSPLCISIHAPLRGATPIQSLTAFSGFISIHAPLRGATSVVKKQRKAATNFNPRPLARGDEISPPATARGVISIHAPLRGATYRRITSPRP

SEQ ID NO: 39009 - DNA, 1131 bp, Unknown
  Obtained from environmental sample
  misc_feature (1)..(1131): n is a, c, g, or t
atgatccgcgcggcgcgggattcgcgggatgaactgactaaagtattttttgatttttccgccatgctggacggcaagctccgcgccgtgcaggaaatggtcaataactccgcgcgggttaaccgcgaggaacttgcggcttcgctcaagacattcggggaacagtttgccgccagcgtcaaatcgtttaatgatttacagaaagaaaaattcagcgaattgattgccaataacagcatgcggctggataaaatgcaggaaacggttgacgagaaactccataaaacgcttgaaacccgcctgggtgaatcgttcaaactggtcagcgaaaggctggagatggtacaaaagggcctgggtgaaatgcagggtcttgccaacggcgtgggcgacttaaaaaaggttttgaccaatgttaagtcacggggcgttttgggcgagtatcagttgggcggcattctggaacagatactctcgccgggccagtatgctcaaaatgttaaaacaaaagcgggttccggcgacaatgttgaatttgccgtaaaaattcccggcaaggaagatccatccaaaacaatttggctgccgatagacgccaaattccccactgaggattacgagaaactgaacgccgcttatgaatccggcaatgttgatgagattgaacattacaaaaaagaactggaaaaaagaataaaacaattcgcaaaagatattaaaacaaaatatgttgatccccccaataccaccgacttcgccataatgttcctgccctttgagggactctacgccgaggtattgcgcataccgggccttctggaatcaatgcagcgggattttaaaatcagcataaccggcccgacaacgcttgccgcgtttctgaacactttacagatgggattccgcagtctcgcggtagaaaaacgtaccagcgaaatatgggaacttctgggggcggtgcgaaccgaatttggtaaatttggcgaggtactggagaagacaaaggcgaaacttgatcaggcaagcaaagaaattgacaacgccgaaattcgttcccgcgccatagagcggaaactccgcgatgtgcaaaccctgcccgaagctcaggcgcaaaaattattggatgaataa

SEQ ID NO: 39010 - protein, 376 aa, Unknown
  Obtained from environmental sample
  DOMAIN (79)...(376): RmuC family
  misc_feature (1)..(376): Xaa is any amino acid
MIRAARDSRDELTKVFFDFSAMLDGKLRAVQEMVNNSARVNREELAASLKTFGEQFAASVKSFNDLQKEKFSELIANNSMRLDKMQETVDEKLHKTLETRLGESFKLVSERLEMVQKGLGEMQGLANGVGDLKKVLTNVKSRGVLGEYQLGGILEQILSPGQYAQNVKTKAGSGDNVEFAVKIPGKEDPSKTIWLPIDAKFPTEDYEKLNAAYESGNVDEIEHYKKELEKRIKQFAKDIKTKYVDPPNTTDFAIMFLPFEGLYAEVLRIPGLLESMQRDFKISITGPTTLAAFLNTLQMGFRSLAVEKRTSEIWELLGAVRTEFGKFGEVLEKTKAKLDQASKEIDNAEIRSRAIERKLRDVQTLPEAQAQKLLDE

SEQ ID NO: 39011 - DNA, 465 bp, Unknown
  Obtained from environmental sample
  misc_feature (1)..(465): n is a, c, g, or t
ttgtttaactccggtttccgccccgcgatagacgtaggcctttcggtaagccgcgtcgggggttccgcccagacaaaggcgatgcggaaaatttccggccgcatcaggctggaccttgcccagtaccgcgaaatggcggccttcgcccagttcggcagcgatttggacaaggccacccaggacaagctggcccagggagagcggcttatggaagtgctgaaacagccgcagctttcgccgtacccgctggaaacccagatcgccattctttttctcgcggtgaacggctatcttcttgatattaagaaggaaaatatttcctcgtttgtaaaagatttcctgtcgcaccttaaggatcaaaaagcggagctgatgaggagcatcgcggaaacaggcgtcgtctccaaagagcaggaagacgaattgcgcctgacagtggaagcctttaaaggaaataagaagtaa

SEQ ID NO: 39012 - protein, 154 aa, Unknown
  Obtained from environmental sample
  DOMAIN (29)...(133): ATP synthase alpha/beta chain, C terminal domain
  misc_feature (1)..(154): Xaa is any amino acid
MFNSGFRPAIDVGLSVSRVGGSAQTKAMRKISGRIRLDLAQYREMAAFAQFGSDLDKATQDKLAQGERLMEVLKQPQLSPYPLETQIAILFLAVNGYLLDIKKENISSFVKDFLSHLKDQKAELMRSIAETGVVSKEQEDELRLTVEAFKGNKK

SEQ ID NO: 39013 - DNA, 813 bp, Unknown
  Obtained from environmental sample
  misc_feature (1)..(813): n is a, c, g, or t
atgcactggaggcttgcccgaacccaagtctgcctttgcgacccatgccatctggccatcctcaacctgacgcccgacagcttcagcgacggcggcatgtacgacagccctgcaagcgccgccgaccatgcactgcggatgctgacccagggcgcccaagtcattgacattggagccgaaagcaccagaccaaacgcacgccaagtagaggcgcgggaagagtgggcgcggctcgccccagtgattggcatcctccgcagcgaaagccccgatgcaatcatcagcatagacacacggcaccaggaggtcgcgcacttggctttggatgctggcgcggacgcaataaatgatgtcacaggcttccaagaccctgaaatgctcagattggcttcgacctacggatgcggggtggtcgccatgcgttcgcggctgaaggacgggcggatatggatgcccgattactttgatccgtcaccaaaaaaagtccacgccgccgttgcagagattggggatgtcagagaccgcctgctgggcgcaaacatagagccagagcatattctgcttgaccctggttttggcttcgggaccacttttttggaagactgcgccatttgggacgcactgcccaaattgcctgccttgctggaatggcctgtcgaaaggttttgtatcggcatttccaggaaaaggtttgtggcccacagatttggagtcagcgggaacgactcccttgacgcaaaaaccgccgacatgcatacaatagccatgcacgctggctacaaagtgtttcggacacattcgctcctggggtga

SEQ ID NO: 39014 - protein, 270 aa, Unknown
  Obtained from environmental sample
  DOMAIN (20)...(236): Pterin binding enzyme
  misc_feature (1)..(270): Xaa is any amino acid
MHWRLARTQVCLCDPCHLAILNLTPDSFSDGGMYDSPASAADHALRMLTQGAQVIDIGAESTRPNARQVEAREEWARLAPVIGILRSESPDAIISIDTRHQEVAHLALDAGADAINDVTGFQDPEMLRLASTYGCGVVAMRSRLKDGRIWMPDYFDPSPKKVHAAVAEIGDVRDRLLGANIEPEHILLDPGFGFGTTFLEDCAIWDALPKLPALLEWPVERFCIGISRKRFVAHRFGVSGNDSLDAKTADMHTIAMHAGYKVFRTHSLLG

SEQ ID NO: 39015 - DNA, 1095 bp, Unknown
  Obtained from environmental sample
  misc_feature (1)..(1095): n is a, c, g, or t
atgagcaagataggctcgtacagcggcgtcagcggtgtcaaagaatcattgaccggtgagatggacgatattgcccgcgaacacgatgttgatcttcgcggagcaactgcgccgggagatatgctgaagagaaccattgttgacgtttccaaaaaacataacacaccggcggttgtaatcgtggacgaatacgacaggccgtttttagacttctacaacaagcctctgatggcgcaggaagttcgcgatattatgagaagttattactcgcaattaaaagcgaatgaaccacatatacgatttttgtttatgaccgggatttccaaatttactaaagccggggttttctcgacgctgaataacttgtatgacctctcgcttgatgaaaaattcggtgcgttgctcgggtacaccgaaaaggaactcgccgacaattttagcgaatatcttgaggtcggagccaaaaagttaaatataacgatagacgagcttgtggataaactgagaggctattacaacggattttgtttcgacggaatccaaagggtatactgcccgttttctattcttaatttctttgagcggtatcaattccttaatatttggatagacagcggcggctcgaagataatagccgattacatgaaagataaacatctcacggtagagcagttccgggggtttcaggtttcgagagattttgcgtttcgtcccggtgaaatcgagaccgcgccgccggagagttttttctatcagtccggatacctgacgctcagagaaggcccaggcgacgactttacgctcgactatcccaacgccgaggtgctaaattctatgtctgaattggtttacaaaaacatgctccaatgcggcggcggcgattttgcagatttgcgtaccccgctcgtacgctcgctcgccgacggagatagcgaatgcctaatcgaaacgtttaaccgcctcttggcaagtattccctacgaagactatgataacgccgcaaaacaaggattgatggtatccggattgaaaataacaacgcaggaatggctctaccgctcgaacattctagcgttctacgctcggccgatctga

SEQ ID NO: 39016 - protein, 364 aa, Unknown
  Obtained from environmental sample
  DOMAIN (1)...(350): Protein of unknown function (DUF1703)
  misc_feature (1)..(364): Xaa is any amino acid
MSKIGSYSGVSGVKESLTGEMDDIAREHDVDLRGATAPGDMLKRTIVDVSKKHNTPAVVIVDEYDRPFLDFYNKPLMAQEVRDIMRSYYSQLKANEPHIRFLFMTGISKFTKAGVFSTLNNLYDLSLDEKFGALLGYTEKELADNFSEYLEVGAKKLNITIDELVDKLRGYYNGFCFDGIQRVYCPFSILNFFERYQFLNIWIDSGGSKIIADYMKDKHLTVEQFRGFQVSRDFAFRPGEIETAPPESFFYQSGYLTLREGPGDDFTLDYPNAEVLNSMSELVYKNMLQCGGGDFADLRTPLVRSLADGDSECLIETFNRLLASIPYEDYDNAAKQGLMVSGLKITTQEWLYRSNILAFYARPI

SEQ ID NO: 39017 - DNA, 798 bp, Unknown
  Obtained from environmental sample
  misc_feature (1)..(798): n is a, c, g, or t
ttgactgctgacatcggtaaagttgacgtagttatcggcggaccgccatgtcaagggttttcaaatgcaaaccgtcaaaagaatcatgctataagtcataataattcgcttgtgaaaaaatatgtacaagctgttcttcacttgaaccctatggcttttattatggaaaatgtgagtatgcttcagtccaaaatccacagattctatgtagactcaaatgattcggctgatataaaaaaatacgaaataaaaacagaagaaacagacatccttttgcttgatgctggcttcttgtttgagggggtttctgatattatagctgacgcagacaaaataaaccattacctttggaataatgaaaatgattatcttgccctaaatgttgtatataaataccgcaagaatcccaaaaaacttactgcatctttaaataagcataagagcaggcttcttgcccttgcgaaacggcttacttgtaatcaagctgagaacgaccatattgtgactgaggagaacttaactggtatggcaattattgaatatttcactgagaaaggctccatagattcaaattcgctttgcgaagctattgagccaacaataatgatccaacggatgctctccaagggaaaagaaatatttgacaataatattgcagtgtctgtgttctctgctgaacacggactcattgcaacggtttcatcaatggcaattattgattatatagaggctatcctcggcgcatccagcaacggatatagtataacaagaggcgtcttgtctgccgaaattcggtga

SEQ ID NO: 39018 - protein, 265 aa, Unknown
  Obtained from environmental sample
  misc_feature (1)..(265): Xaa is any amino acid
MTADIGKVDVVIGGPPCQGFSNANRQKNHAISHNNSLVKKYVQAVLHLNPMAFIMENVSMLQSKIHRFYVDSNDSADIKKYEIKTEETDILLLDAGFLFEGVSDIIADADKINHYLWNNENDYLALNVVYKYRKNPKKLTASLNKHKSRLLALAKRLTCNQAENDHIVTEENLTGMAIIEYFTEKGSIDSNSLCEAIEPTIMIQRMLSKGKEIFDNNIAVSVFSAEHGLIATVSSMAIIDYIEAILGASSNGYSITRGVLSAEIR

SEQ ID NO: 39019 - DNA, 1044 bp, Unknown
  Obtained from environmental sample
  misc_feature (1)..(1044): n is a, c, g, or t
gtggtaattatgataacgcttgaagaaatggcaattcccctggaaggggaaaaccccgcgggtgaaagcatggaatacgattctctctacctggagatggattctctggcaataagcgtaccggacagtcaaatgggagaatcaaaaatcgaaggcagagggccggattggaaaaagttaaaagaaaactgtcaaaagctctggggtaaaacccgggatttgcgtgtggcttcatatttggcggttgcggaaaccgcggacggcggccttgaggattgcgcggcggcttttaaattgattctttttctggtacgggatatgtgggacgccatgtacccaaagcttgaaattgacgacgaaaatgatcctaccgaacggcttaacattctgaccatgctctccccggaacccggagctattaacgatcctgttatgtttatatcaaaattcaggactatcaggctggttcctgtcctgccatacaccctaagggatcacctgatttcaatcaacgaatttgaagctgcggacggtcaaaccgttaatccgggccttatctcaggcgaactcatgcggattccgcgggaagaagtggagaaacaggccgccctggccggggaactcaaagaaaccgtcgaagccatctgctcggccgcaaacgaaaaaatgcaaagcggttacagcctggcaatgggttccctgattggagagatcaacaaactctgcaagttttatgcgcaatactcaggcggttcaagcggagaaacagaaaacattgaagactcgtcttcaattaccgcagttccggcatcgggcggctttaaccttgcttctttcattccgggcacccgctccgacgccctgctcctgctccgcaaaggagccgaatactttcagcgccaggaacccaacagtcccatcccgttcctcgtaaaccgggcgctgcgtttctcggaaatgagtttcattgacttgctggaagacatagtcccggacgcgttgtcccacggcaaaacagtactggggattaaggataacgggtaa

SEQ ID NO: 39020 - protein, 347 aa, Unknown
  Obtained from environmental sample
  DOMAIN (56)...(116): ImpA-related N-terminal
  misc_feature (1)..(347): Xaa is any amino acid
MVIMITLEEMAIPLEGENPAGESMEYDSLYLEMDSLAISVPDSQMGESKIEGRGPDWKKLKENCQKLWGKTRDLRVASYLAVAETADGGLEDCAAAFKLILFLVRDMWDAMYPKLEIDDENDPTERLNILTMLSPEPGAINDPVMFISKFRTIRLVPVLPYTLRDHLISINEFEAADGQTVNPGLISGELMRIPREEVEKQAALAGELKETVEAICSAANEKMQSGYSLAMGSLIGEINKLCKFYAQYSGGSSGETENIEDSSSITAVPASGGFNLASFIPGTRSDALLLLRKGAEYFQRQEPNSPIPFLVNRALRFSEMSFIDLLEDIVPDALSHGKTVLGIKDNG

SEQ ID NO: 39021 - DNA, 423 bp, Unknown
  Obtained from environmental sample
  misc_feature (1)..(423): n is a, c, g, or t
atgaacgcagctcttctgcgccaatccatacactctttcgctgaggcaagtttctcgcgctccagggggccgggcgggcagaatgtgaataaggtcagtactaaggtgacgttacgcttgcaggttgcggaattggtcgggctttcagaggcggaaacggagcgggtcaaatcggtgctggcgaacaggctcacaaaagagggcgaaattgttataacctcggacgaggagcgctctcagcggacaaatcttgagagggcgtattttcgcatggaggcgctgattacggcggcggcaaggctgccgagagcgcgaaagcctacgaagccaagcaaggcggcaaaagaaaagcgcctccttgcaaagaggcgccaatcacaaaagaaggcggaaagggggaaacaggcggattgtttcacgtga

SEQ ID NO: 39022 - protein, 140 aa, Unknown
  Obtained from environmental sample
  DOMAIN (5)...(132): Peptidyl-tRNA hydrolase domain
  misc_feature (1)..(140): Xaa is any amino acid
MNAALLRQSIHSFAEASFSRSRGPGGQNVNKVSTKVTLRLQVAELVGLSEAETERVKSVLANRLTKEGEIVITSDEERSQRTNLERAYFRMEALITAAARLPRARKPTKPSKAAKEKRLLAKRRQSQKKAERGKQADCFT

SEQ ID NO: 39023 - DNA, 654 bp, Unknown
  Obtained from environmental sample
  misc_feature (1)..(654): n is a, c, g, or t
gtggtcgccctgattgcgttggccggcggcggatatttcttctttatgaataagggcggcgggtcggatgccgacgaagcgcccgcctcggcttccgcaccggtatccacagcgggcagccaaagctccggcgaggagggggagatccccatcgccactatagaggtgggaacgccgaagcccgacccctacgcgtctgccggaaagcaggataaggacaagaagggcgataagccggatcccaagcagaagcctgcgccgtccccggctccggcgccgaccccgtcctacacgccgaccccgcctccgcagccggtctacacgccgaccccggaaccggctccgcctccccctcccaaggtcgagcagattagagtcacctccaacccgtcgggcgcgatagtcgaggtcgacgacaggagggtcggcaacacgccgtacaccttcaagccggcagcgtggggcgagatcaagatcgccgtattcacaagcggctatgaaaagttgacgaaggaggtagatttcgcgggcggaacgatggacgtgcacttcccgctgtcgagggctgccgccgcgccgccgcctccgccgccaccggccccggccccggtttacacgccgacgccggcctccgggccccggcacccggtctaa

SEQ ID NO: 39024 - protein, 217 aa, Unknown
  Obtained from environmental sample
  DOMAIN (121)...(190): PEGA domain
  misc_feature (1)..(217): Xaa is any amino acid
MVALIALAGGGYFFFMNKGGGSDADEAPASASAPVSTAGSQSSGEEGEIPIATIEVGTPKPDPYASAGKQDKDKKGDKPDPKQKPAPSPAPAPTPSYTPTPPPQPVYTPTPEPAPPPPPKVEQIRVTSNPSGAIVEVDDRRVGNTPYTFKPAAWGEIKIAVFTSGYEKLTKEVDFAGGTMDVHFPLSRAAAAPPPPPPPAPAPVYTPTPASGPRHPV

SEQ ID NO: 39025 - DNA, 483 bp, Unknown
  Obtained from environmental sample
  misc_feature (1)..(483): n is a, c, g, or t
gtggagctgctccgttgcctccgccaggatccttttttggcctgcgatatcatagctgccttccctggggaaacagagtgtgaatttgaaaagacctgcgctttgatggaaaagctctcctttgcgtggattcacgcctttccttattccaggcggcctggaactgcggctttcgatttccccgttaatgtaagcggaaaggactctttaaagcgggttgagcttttgacaaatttggccaggaaaggccgccgggattatattcagcgctggataggaagagaagtagaagccgttgtggaggcaggggaaaatctgccggaaggtatggttcaagcgcttacggaaaactacctgaaagtccgggtaaattacaaagatgaaaaagcccctgccccaggaagccttatccgctgccgtatagcggataaccccgaaaccagcaattatgacgccctggcggaggaaataatatctctctaa

SEQ ID NO: 39026 - protein, 160 aa, Unknown
  Obtained from environmental sample
  misc_feature (1)..(160): Xaa is any amino acid
MELLRCLRQDPFLACDIIAAFPGETECEFEKTCALMEKLSFAWIHAFPYSRRPGTAAFDFPVNVSGKDSLKRVELLTNLARKGRRDYIQRWIGREVEAVVEAGENLPEGMVQALTENYLKVRVNYKDEKAPAPGSLIRCRIADNPETSNYDALAEEIISL

SEQ ID NO: 39027 - DNA, 588 bp, Unknown
  Obtained from environmental sample
  misc_feature (1)..(588): n is a, c, g, or t
ttgcgtccggcaacgtacggcgccttaagccgggcgtttgcgcatgatcagccattgttgggcgatggacagcaggttgttgaagaaccagtaaaccacaagcccggacggaaaattcaggaacatgaccgtgaagacgataggcatggccagcatgattttctgctgaaggggctcgccgacaggcggcgacatcttttgctgcaaaaacatggtggcgcccataagcagcggcgaaacataaatgggatcggcggccgacagatcggccagccaggagatgccggtgaacggcacatagggaatgaacaccgcatggcgcagttcaagcgagttgagcagggcctggtacaggccgaaaaataccggaatctgcaccaggatcggcaggcagccgctgaccgggctggcgccgtaggtcttgtacaactgcatgacttcgcggttgagtttttccttgtcgttgccgtatttttctctcaacttgacgatcatgggctggagcgtcttcattttttccatggacttgtagctcttttgccacaagggaaaaaagacgatcgcgcacaagacaggtcaagaggatga

SEQ ID NO: 39028 - protein, 195 aa, Unknown
  Obtained from environmental sample
  misc_feature (1)..(195): Xaa is any amino acid
MRPATYGALSRAFAHDQPLLGDGQQVVEEPVNHKPGRKIQEHDREDDRHGQHDFLLKGLADRRRHLLLQKHGGAHKQRRNINGIGGRQIGQPGDAGERHIGNEHRMAQFKRVEQGLVQAEKYRNLHQDRQAAADRAGAVGLVQLHDFAVEFFLVVAVFFSQLDDHGLERLHFFHGLVALLPQGKKDDRAQDRSRG

SEQ ID NO: 39029 - DNA, 546 bp, Unknown
  Obtained from environmental sample
  misc_feature (1)..(546): n is a, c, g, or t
ttgtgcgcgatcgtcttttttcccttgtggcaaaagagctacaagtccatggaaaaaatgaagacgctccagcccatgatcgtcaagttgagagaaaaatacggcaacgacaaggaaaaactcaaccgcgaagtcatgcagttgtacaagacctacggcgccagcccggtcagcggctgcctgccgatcctggtgcagattccggtatttttcggcctgtaccaggccctgctcaactcgcttgaactgcgccatgcggtgttcattccctatgtgccgttcaccggcatctcctggctggccgatctgtcggccgccgatcccatttatgtttcgccgctgcttatgggcgccaccatgtttttgcagcaaaagatgtcgccgcctgtcggcgagccccttcagcagaaaatcatgctggccatgcctatcgtcttcacggtcatgttcctgaattttccgtccgggcttgtggtttactggttcttcaacaacctgctgtccatcgcccaacaatggctgatcatgcgcaaacgcccggcttaa

SEQ ID NO: 39030 - protein, 181 aa, Unknown
  Obtained from environmental sample
  DOMAIN (4)...(180): 60Kd inner membrane protein
  misc_feature (1)..(181): Xaa is any amino acid
MCAIVFFPLWQKSYKSMEKMKTLQPMIVKLREKYGNDKEKLNREVMQLYKTYGASPVSGCLPILVQIPVFFGLYQALLNSLELRHAVFIPYVPFTGISWLADLSAADPIYVSPLLMGATMFLQQKMSPPVGEPLQQKIMLAMPIVFTVMFLNFPSGLVVYWFFNNLLSIAQQWLIMRKRPA

SEQ ID NO: 39031 - DNA, 1125 bp, Unknown
  Obtained from environmental sample
  misc_feature (1)..(1125): n is a, c, g, or t
gtgttcgtgcngacggccgggcgcgaagtcagggtggacacgcccctgtacacggcggtctttcactccggcggcggcgtgctcaaatcgttcgaactcaaaaagcaccgcgaggacatcaagcccggatcgtccctgaagcgccttgccgatgaacgcagctacccgatggcgcccatgggcctgacgctgaacagcctgccttcctggtccgccggcgaatggtcctttacaggctccgatctcaagctcaacgacggcgaaagcgcaaccttgaccttcaccggcatggttgacggcatccgcgtcgcccgtgagctgacgtttgcggcctcaacctttctcattgcggaaacagtgcgccttggcggcgtgaacgcggcccgcaccgtgcggctcggcttcaaggccggcagttccagcctgggcggcgccagcaactacgatgtgccccgcgtggcctgggatgaaaacaattccatcaaggaagaaagcgacgaaaaaaagctgctcgccggaggcatgcaggcccagggctccttcaattggggcggggtcatgaacaactatttcatgactgtggccgcgctggccgacaacaaggccgtcaccctgaaagcccgcatccaggacacgttctggggcgcgctcatggaacagaacgacatcatcatcccgccgggcggcgaggtccaggttcaggctttctggtggtacggcgccaaggatcgcgacctgttgacgggcgccccttccaatctgagcgcgaccgtcaatctgggcctgttcagcgtcatcgcccggcccctgctcagcctgctcgtcttcttccacagctatgtgggcaatgggggcgtggcgatcatcctcttgacctgtcttgtgcgcgatcgtcttttttcccttgtggcaaaagagctacaagtccatggaaaaaatgaagacgctccagcccatgatcgtcaagttgagagaaaaatacggcaacgacaaggaaaaactcaaccgcgaagtcatgcagttgtacaagacctacggcgccagcccggtcagcggctgcctgccgatcctggtgcagattccggtatttttcggcctgtaccaggccctgctcaactcgcttga

SEQ ID NO: 39032 - protein, 374 aa, Unknown
  Obtained from environmental sample
  misc_feature (1)..(374): Xaa is any amino acid
MFVXTAGREVRVDTPLYTAVFHSGGGVLKSFELKKHREDIKPGSSLKRLADERSYPMAPMGLTLNSLPSWSAGEWSFTGSDLKLNDGESATLTFTGMVDGIRVARELTFAASTFLIAETVRLGGVNAARTVRLGFKAGSSSLGGASNYDVPRVAWDENNSIKEESDEKKLLAGGMQAQGSFNWGGVMNNYFMTVAALADNKAVTLKARIQDTFWGALMEQNDIIIPPGGEVQVQAFWWYGAKDRDLLTGAPSNLSATVNLGLFSVIARPLLSLLVFFHSYVGNGGVAIILLTCLVRDRLFSLVAKELQVHGKNEDAPAHDRQVERKIRQRQGKTQPRSHAVVQDLRRQPGQRLPADPGADSGIFRPVPGPAQLA

SEQ ID NO: 39033 - DNA, 861 bp, Unknown
  Obtained from environmental sample
  misc_feature (1)..(861): n is a, c, g, or t
ttggattacctttcggaactcggagtggatgctatatggctatcgccggtttattcatctccgatggtggatatgggttacgatattgccgattacaaaaatatagacgagcattacggaacaatggatgatttcaaaaaactgctaaatgaagtccataaaaggggaatccgcataataatggacttggtgctaaaccacacatccgatttgcatccgtggtttttggaatcaaggtcttctgtgactaaccctaagcgcaattggtatatatggagacctccgaaagataatataaagggcagaaaaccgaataattggaaaacaaacttcggcaaaaaagcttggcgatatgaccataaaacaaaagagtattactatcattcattcttttggcaacaaccggatttgaattggcgaaaccccgaagtgaaaaaagcgttgttcgatataatgcgccattggctggacttgggtattgacggttttcgcttggatgtcatcaatttgctctacaaagacagagaattaagagataacgaaattggacttttaaaaaaaacaaagatatacaatcgcaatcaacccgaagtgtatgaccttttaagggatttcaggaaattgctggatagctaccctgaaaagacgagcgtgggcgagatttacgtgccgccccccggaaacacggatttggcggtgagttttttggggaacggcaccgatatgctgcacttggttttcgatttctcgctgatattcacgctgtggaaagcgtctagctattacaagataataactaattattatgaaaaaatacctgcgactgggtggcccagtttttttctctccaccatgatatag

SEQ ID NO: 39034 - protein, 286 aa, Unknown
  Obtained from environmental sample
  DOMAIN (1)...(286): Alpha amylase, catalytic domain
  misc_feature (1)..(286): Xaa is any amino acid
MDYLSELGVDAIWLSPVYSSPMVDMGYDIADYKNIDEHYGTMDDFKKLLNEVHKRGIRIIMDLVLNHTSDLHPWFLESRSSVTNPKRNWYIWRPPKDNIKGRKPNNWKTNFGKKAWRYDHKTKEYYYHSFFWQQPDLNWRNPEVKKALFDIMRHWLDLGIDGFRLDVINLLYKDRELRDNEIGLLKKTKIYNRNQPEVYDLLRDFRKLLDSYPEKTSVGEIYVPPPGNTDLAVSFLGNGTDMLHLVFDFSLIFTLWKASSYYKIITNYYEKIPATGWPSFFLSTMI

SEQ ID NO: 39035 - DNA, 603 bp, Unknown
  Obtained from environmental sample
  misc_feature (1)..(603): n is a, c, g, or t
atgaaaaaaatttacgttttaacagcattattaatcgctcttacggtatccgccaacgcccagccgaaattcggggtgccgaccgcttttcaaaaaacaataaatgaacttttaagcaaaattcccataaacattgccgggaactcaattaggctgaccttagagggagatacctggcgcgggcagttaaacgggcaagacctgttggcgggcgtgtttaagattgacgaaggcccggacggggcgattataaccatcaagcagtcgttcttgtacgcggacacagggaaaaaagtcccggttacgggaaagcccatcgccgcgtgggtagataccccgggaccggaattgttccttgagtacaagaaaagcccgactatatccattctgcccatttcgcaggaagcggctacagccgccattgccgcaatcaagagcggcgcttcgatagcgtcggcagtaacaggcgcggcggcggcagccccggcggcggcggctcctgcagcagctccgacagccgcggcttcggcggcggcaacaccggcagcggcaagcgctccggcggtttccgccgtgccgcccgctgcctcaaataaagtttga

SEQ ID NO: 39036 - protein, 200 aa, Unknown
  Obtained from environmental sample
  SIGNAL (1)...(20)
  misc_feature (1)..(200): Xaa is any amino acid
MKKIYVLTALLIALTVSANAQPKFGVPTAFQKTINELLSKIPINIAGNSIRLTLEGDTWRGQLNGQDLLAGVFKIDEGPDGAIITIKQSFLYADTGKKVPVTGKPIAAWVDTPGPELFLEYKKSPTISILPISQEAATAAIAAIKSGASIASAVTGAAAAAPAAAAPAAAPTAAASAAATPAAASAPAVSAVPPAASNKV

SEQ ID NO: 39037 - DNA, 627 bp, Unknown
  Obtained from environmental sample
  misc_feature (1)..(627): n is a, c, g, or t
atgagtaagaccgaagcatttaacatcggcagggtcaggttcctcatttttaccgcagtggcaattcttcacgtccttatcattctgctggtcgcgtttaatattgaaactatcatcgccattccggagccggtcgcgggagtgatgaaactggttgacgttgaggaaaaaattcttcctcccgaaagaccggttgagacagtaacaaatacaatggaaacaattgccgaaacaatgatcgaaaccgatgaagccccgccgcctccggtggtatataccgaacccgtccccgtccccgtttctccccctgaggaaattgtttacctccagcagcatctggttacctcccttgcggttctgcccgaaaaagagatcgtcagcgccgccgtttacccgcccatcgcgttaaggtcgggaattgagggaacagcatttctcgatctttttattgaccagtacgggaatatccgtgaaataaccatattgcgggaaagtcctccgggccggggtttcggcgaggcggctgtaaacgcctttaagggattcaaagcaaagcccgctgaagtcgacggaaccccagtagcggcgcggctaaggttcaacttcactttcaaaatcaagcagtaa

SEQ ID NO: 39038 - protein, 208 aa, Unknown
  Obtained from environmental sample
  misc_feature (1)..(208): Xaa is any amino acid
MSKTEAFNIGRVRFLIFTAVAILHVLIILLVAFNIETIIAIPEPVAGVMKLVDVEEKILPPERPVETVTNTMETIAETMIETDEAPPPPVVYTEPVPVPVSPPEEIVYLQQHLVTSLAVLPEKEIVSAAVYPPIALRSGIEGTAFLDLFIDQYGNIREITILRESPPGRGFGEAAVNAFKGFKAKPAEVDGTPVAARLRFNFTFKIKQ

SEQ ID NO: 39039 - DNA, 753 bp, Unknown
  Obtained from environmental sample
  misc_feature (1)..(753): n is a, c, g, or t
atgaagatcagtaagatcaagatctttgttgaaggcattttctttgcatataacgaaaaatctgtttttgacggacttaacgcggcatttgacgagcttgacggtccccttgtaatacttggcccttccggctccggaaaaactaccctcttaaaacttcttggcgggttattgaaaccattaagcggcgatattaattttatgcgcgaaggggaagtaaaaaacggcgcgcctgtttctgccttcatgtttcaggagccaaggcttcttccctggcttacggttctggaaaatatcagcattccgcttgaaaaagtttacggaaaggaaggggcaaaaaaaagggcccgcgattttctttcgcttgtttcgcttgaagaaaaagaaaaagtatttccacctgaactttccggaggccaggcgcagcgtatttccatggccagggctttttcatggaacgcgcccgtgcttttaatggacgagccttttcagtcccttgatattccccttagaaaaaacctgatggatttagccctcttgcttttggaaaaagaaaaacgctttcttgtcatggcgacgcacgatccgggggaagcggtttatatgggcgggcgtgttatcgttttggggaaaagcggcggtggaattgtctttgacagggttattgataatcgcggcgggaaaatgagctatggttcctcaaaaggcacagatctggaaaaggagattatcgattcactgattactgcttga

SEQ ID NO: 39040 - protein, 250 aa, Unknown
  Obtained from environmental sample
  DOMAIN (34)...(213): ABC transporter
  misc_feature (1)..(250): Xaa is any amino acid
MKISKIKIFVEGIFFAYNEKSVFDGLNAAFDELDGPLVILGPSGSGKTTLLKLLGGLLKPLSGDINFMREGEVKNGAPVSAFMFQEPRLLPWLTVLENISIPLEKVYGKEGAKKRARDFLSLVSLEEKEKVFPPELSGGQAQRISMARAFSWNAPVLLMDEPFQSLDIPLRKNLMDLALLLLEKEKRFLVMATHDPGEAVYMGGRVIVLGKSGGGIVFDRVIDNRGGKMSYGSSKGTDLEKEIIDSLITA

SEQ ID NO: 39041 - DNA, 366 bp, Unknown
  Obtained from environmental sample
  misc_feature (1)..(366): n is a, c, g, or t
gtgaacgtgcgcaccatctatcaatatgttcatcccgccgtctgcaaaagctgccagttggtcatgggcatgacggtgcttgaagaaggatcggtctggaataccatgccatgccacacgcacgagaggcgcatggaagtttacctgtattttgatataaaaccgggagccgtagtcttccatatgaacggccggccgcatgaaacgcgccatattgtcatgaacaacgaacaggcggttatttcgccttcatggtcgatccattccggcgcgggaaccgcggcttatacgtttatctgggcgatggcgggagagaaccagacgtttgacgatatggacaatgtaacaacggcggacttaaaataa

SEQ ID NO: 39042 - protein, 121 aa, Unknown
  Obtained from environmental sample
  DOMAIN (1)...(121): 5-keto 4-deoxyuronate isomerase
  misc_feature (1)..(121): Xaa is any amino acid
MNVRTIYQYVHPAVCKSCQLVMGMTVLEEGSVWNTMPCHTHERRMEVYLYFDIKPGAVVFHMNGRPHETRHIVMNNEQAVISPSWSIHSGAGTAAYTFIWAMAGENQTFDDMDNVTTADLK

SEQ ID NO: 39043 - DNA, 741 bp, Unknown
  Obtained from environmental sample
  misc_feature (1)..(741): n is a, c, g, or t
atggaatcggtttcgccatcgctcaggcttttcataaagcgggcgcgggtattgtttttaacgacaatggccaggaacaggttggataagggacttcaaacatacaaagaggctgggattcctgtacatagctatatctgcgatgttaccgacgaaaaagccgtgattgaaacggcggcaaagatagaaaaggaagtcggtgcggtggatattctggttaataacgcgggaataatcaaacgcgtacctatgacggaaatgagcgcgtcggatttcaggctggtaatagacgtagaccttaacgctccctttatcgtttcaaaagcggttatcccgtccatgataaaaaaaggcggcggcaagattatcaatatttgcagcatgatgagcgagcttggccgcgagactgtcagcgcttatgccgcggcaaaaggcgggcttaaaatgcttaccaaaaatatcgccagcgaatacggcgagttcaacatacaatgcaacggaatcggtcccggttacattgaaacgccgcagacggctccgttacgtgaacgtcaaagcgacggaagccgccacccctttgaccggttcatcatagccaaaaccccggccgccaggtggggcaagcccgaagaccttgaaggccccgcggttttcctcgcctccggcgcttcggattttgtaaacggacatatactgtatgtagacggcggcatccttgcctatatcggaaaacaaccatag

SEQ ID NO: 39044 - protein, 246 aa, Unknown
  Obtained from environmental sample
  DOMAIN (9)...(159): short chain dehydrogenase
  misc_feature (1)..(246): Xaa is any amino acid
MESVSPSLRLFIKRARVLFLTTMARNRLDKGLQTYKEAGIPVHSYICDVTDEKAVIETAAKIEKEVGAVDILVNNAGIIKRVPMTEMSASDFRLVIDVDLNAPFIVSKAVIPSMIKKGGGKIINICSMMSELGRETVSAYAAAKGGLKMLTKNIASEYGEFNIQCNGIGPGYIETPQTAPLRERQSDGSRHPFDRFIIAKTPAARWGKPEDLEGPAVFLASGASDFVNGHILYVDGGILAYIGKQP

SEQ ID NO: 39045 - DNA, 765 bp, Unknown
  Obtained from environmental sample
  misc_feature (1)..(765): n is a, c, g, or t
ttgactttgcggaccatgtggccacaaactgctctcatacggaaagcttctttgaccggagccatgatggacttgaaaacgatggttggtacagtcaatgactgggtctggggctatccgctggtgctgctgtgcctgggcgcggggctgtttttttctgtctggacgcgctttttgcagcttcggcacataaaggggatggtgggtcagctgtggtcgggaaaagcctcggcaagcggcatcagcagctttcagggctttgccatggcccttggcgggcgcgtcggcacggggaacatagtgggcgtggctacggctatagctatgggcggacctggggccatgttctggatgtgggcgatagcttttctgggcgcaggttcggcatttgtggagtcaacgctggcccaagtctggaaggagaaacgggcgggcgaataccgcggcgggccctcgtactacatcgagcatggactggggctgaggtggttcgcagttctgttcgccgttgcagccgtgctgtcctgcgggctactgttgccgggcatccaggccaacagcatcgcaaaggcctgtcaaagcggcttcggagtgcccacgttggcctccgctatagccgtcaccctgcttctggcactcgtgattttcggcggagccaagcgcatagggagggtggccgagctggcagtccccttcatggcgctggcttacatcgtcatggcggtgatagtcatagcggttacttccgccgcgtgcctgaaatga

SEQ ID NO: 39046 - protein, 254 aa, Unknown
  Obtained from environmental sample
  DOMAIN (64)...(254): Sodium:alanine symporter family
  misc_feature (1)..(254): Xaa is any amino acid
MTLRTMWPQTALIRKASLTGAMMDLKTMVGTVNDWVWGYPLVLLCLGAGLFFSVWTRFLQLRHIKGMVGQLWSGKASASGISSFQGFAMALGGRVGTGNIVGVATAIAMGGPGAMFWMWAIAFLGAGSAFVESTLAQVWKEKRAGEYRGGPSYYIEHGLGLRWFAVLFAVAAVLSCGLLLPGIQANSIAKACQSGFGVPTLASAIAVTLLLALVIFGGAKRIGRVAELAVPFMALAYIVMAVIVIAVTSAACLK

SEQ ID NO: 39047 - DNA, 561 bp, Unknown
  Obtained from environmental sample
  misc_feature (1)..(561): n is a, c, g, or t
atgaatcaaagtcttccccatgagtaccggaaagttgccgaagccttgttcccctcggacagcttcccgtccaaaaaagggacaagccttgcggaagcagccgcttttgccgaagcgctgggaataggctccgagtaccaaaggcttctgggagttaagaaaaacgccgcggagatgcgcaaatttctggctcattttcaaaataaccttgatcttttgatacagaaaacatgggttgagaaggcggatgaatcgcgcaaggagaaagtacaagacaatgttttgccctttatggcccggattgaacaggggaatttccagcaggctattgagcaatttggctcaatactggaagaacttgcgtatctgctttttggacagcaaagttccaaagaggattttaccgagtataccttcaggatcgatttgcagatggggctgttctggtggtacggcacccggcttggcagtctgaaagacgcaggaaaaacaggcgctgtaagcgatgaaaccctctgggcaattctactcatcggtatttgctatctgactaatttttaa

SEQ ID NO: 39048 - protein, 186 aa, Unknown
  Obtained from environmental sample
  misc_feature (1)..(186): Xaa is any amino acid
MNQSLPHEYRKVAEALFPSDSFPSKKGTSLAEAAAFAEALGIGSEYQRLLGVKKNAAEMRKFLAHFQNNLDLLIQKTWVEKADESRKEKVQDNVLPFMARIEQGNFQQAIEQFGSILEELAYLLFGQQSSKEDFTEYTFRIDLQMGLFWWYGTRLGSLKDAGKTGAVSDETLWAILLIGICYLTNF

SEQ ID NO: 39049 - DNA, 819 bp, Unknown
  Obtained from environmental sample
  misc_feature (1)..(819): n is a, c, g, or t
gtggagctcgaaaacgccgcgtacgcgctggactccacgacaatagacctgtgcctgtcgctgttcccctgggcgcgtttccgcaaggcgaagggggcggtgaagctgcacaccctgctaaacctcaggggcaacatacccgagttcgtccacatctcgcctggcagggtgcacgacgtgaacgcgctggacatgctcgccgtccagccgggggcgttctatgtcatggacaggggctacctggacttcgcccgcctctattcgctgcacgatgcgcgggcgttcttcgtgacgagggcgaagaggcggatgctgcaccgtcggcgccgctcccgacccgtggacaaagccagcggcctccggtcggaccagaccatcgcgctggcggggcgggcaaccgcgaaggcgtacccggccccgctgcggcgcgtctcctacgcagaccctgaaacggggaaggcgctcgtgttcctgacgaacaacttctccctgcccgcgctggccatagccaaactttacaaggcccgctggcaggtcgagcttttcttcaaatggataaagcagcacctgcggatcaaggcgttctacgggacttcggagaacgccgtaaagacgcaggtgtgggtcgccgtctcggtctatgtgctggtggccgtcataaaaaagcggctcgggctggcccacagcctctacacaatactgcaaattctgagcatcgcccttttcgaaaaaaagcccattttgcaagtgttttcggaacgcgaagacacttttttggatgacccgcttcctaaccgcttgccattgctagacttataa

SEQ ID NO: 39050 - protein, 272 aa, Unknown
  Obtained from environmental sample
  DOMAIN (7)...(216): Transposase DDE domain
  misc_feature (1)..(272): Xaa is any amino acid
MELENAAYALDSTTIDLCLSLFPWARFRKAKGAVKLHTLLNLRGNIPEFVHISPGRVHDVNALDMLAVQPGAFYVMDRGYLDFARLYSLHDARAFFVTRAKRRMLHRRRRSRPVDKASGLRSDQTIALAGRATAKAYPAPLRRVSYADPETGKALVFLTNNFSLPALAIAKLYKARWQVELFFKWIKQHLRIKAFYGTSENAVKTQVWVAVSVYVLVAVIKKRLGLAHSLYTILQILSIALFEKKPILQVFSEREDTFLDDPLPNRLPLLDL

SEQ ID NO: 39051 - DNA, 648 bp, Unknown
  Obtained from environmental sample
  misc_feature (1)..(648): n is a, c, g, or t
ttggcgattcgctctctggaactattttgcggggctggtggtcttgcacttgggctgcaccaagctgggtttgagcctgctgcgctgctggagcgggacaaaaattcctgcgacagcatcaaagccaacatcgccaatggatttaccagaatcgcgaaatggaacgtagtgcaaaccgatgtcaggaatgtccattattcagatttcgggagcgacattcagttcgtgacggggggccccccctgccagccattctccttgggcggcaagcacaacgcaaatagcgattcccgcgatatgttccccgaagctgtgcgggccgtccgcgaggtcagacccctagggtttatattcgagaacgtaaaaggattgctaagacggtcttttagctcttatttcaattacattttgcttcaactctcgcacccggagatcgcgctgcgcgatggtcaagattggaaagagcatcttgtgcggctggagaaacaccatacgtctggctcacattcagggctttcctacaacgtgatctttaggcttgtgaacgccgccgactatggagttcctcaaatgcggcacagagtgattatcgttggcttccgccaagacctcaatgccaactggtcgttcccggctcggccgatctga

SEQ ID NO: 39052 - protein, 215 aa, Unknown
  Obtained from environmental sample
  DOMAIN (3)...(214): C-5 cytosine-specific DNA methylase
  misc_feature (1)..(215): Xaa is any amino acid
MAIRSLELFCGAGGLALGLHQAGFEPAALLERDKNSCDSIKANIANGFTRIAKWNVVQTDVRNVHYSDFGSDIQFVTGGPPCQPFSLGGKHNANSDSRDMFPEAVRAVREVRPLGFIFENVKGLLRRSFSSYFNYILLQLSHPEIALRDGQDWKEHLVRLEKHHTSGSHSGLSYNVIFRLVNAADYGVPQMRHRVIIVGFRQDLNANWSFPARPI

SEQ ID NO: 39053 - DNA, 519 bp, Unknown
  Obtained from environmental sample
  misc_feature (1)..(519): n is a, c, g, or t
gtgcatctcgatggcgcaagggtgtggcatgcggccgtggccactggggacagcctagccagcctatgttggggcaccgacactgtttcagtgtgcctttccaaagggctgggcgcgcccatgggcagcctgctagctggaagtagggccattgttgaagaggcccgcaggataagaaaaatgctgggtggcggcgtgcgccaaggcggggtcgtggcagccgccggccttgtggcgctggactacattccacacttggcccaagatcacgcaaaagcgtctaccttggccgatgggctaatttcactgggttttaaggccaccaagccggagaccaacatactcatagttcctgttccaagggctggcgaagccgtggcaaagctagaatctgtcggcatccgctgcctcacggtcgggagcgcgttgcgcttcattgcccaccgcgacttggctgcggcagatgttggcgaagccatagagagaatcaagccgatagcggaaggcataatttcctag

SEQ ID NO: 39054 - protein, 172 aa, Unknown
  Obtained from environmental sample
  DOMAIN (1)...(122): Beta-eliminating lyase
  misc_feature (1)..(172): Xaa is any amino acid
MHLDGARVWHAAVATGDSLASLCWGTDTVSVCLSKGLGAPMGSLLAGSRAIVEEARRIRKMLGGGVRQGGVVAAAGLVALDYIPHLAQDHAKASTLADGLISLGFKATKPETNILIVPVPRAGEAVAKLESVGIRCLTVGSALRFIAHRDLAAADVGEAIERIKPIAEGIIS

SEQ ID NO: 39055 - DNA, 318 bp, Unknown
  Obtained from environmental sample
  misc_feature (1)..(318): n is a, c, g, or t
gtgggcgattactccggcaacggcgtcaacatatcattcaaatccgtgggaagcggcatggtgaacttttacgcgccggtattcacaggcataaagtacagaatggcgaaggcggtccccaactacgcggaggaactcaacaaccacttagccgacttccacgacgcgcactcggtcttctcctgcaactgcatcctaaacttcctatacggggagcttgagggtaagaacatagagctgttcagggggccgataacattcggggagatagcgtaccagcttgtgaaccagacgctggtgtacgtctccgtgctgtaa

SEQ ID NO: 39056 - protein, 105 aa, Unknown
  Obtained from environmental sample
  misc_feature (1)..(105): Xaa is any amino acid
MGDYSGNGVNISFKSVGSGMVNFYAPVFTGIKYRMAKAVPNYAEELNNHLADFHDAHSVFSCNCILNFLYGELEGKNIELFRGPITFGEIAYQLVNQTLVYVSVL

SEQ ID NO: 39057 - DNA, 321 bp, Unknown
  Obtained from environmental sample
  misc_feature (1)..(321): n is a, c, g, or t
atggccatgacgggcgagatagacctgcgcggcgacgccctgcccataggcggcctgaaagaaaaagccctggccgccctgcggatgggagtgtttgagataatcatccccgcagccaacatgaaggatctggaggaaatcggtccagaggcccgcggacaattggtgttccgcccagttgggcatgtggaggaggtcttcgaactggcgctgatggactgggcacccaccaagccggtcaaaccagcggcaccagtcaagccgcccaaaccagccatgccggtcacgaaaaaccaaaagacaaggcaggtgacatgttag

SEQ ID NO: 39058 - protein, 106 aa, Unknown
  Obtained from environmental sample
  DOMAIN (1)...(73): Lon protease (S16) C-terminal proteolytic domain
  misc_feature (1)..(106): Xaa is any amino acid
MAMTGEIDLRGDALPIGGLKEKALAALRMGVFEIIIPAANMKDLEEIGPEARGQLVFRPVGHVEEVFELALMDWAPTKPVKPAAPVKPPKPAMPVTKNQKTRQVTC

SEQ ID NO: 39059 - DNA, 564 bp, Unknown
  Obtained from environmental sample
  misc_feature (1)..(564): n is a, c, g, or t
ttgcggtgggttgtcttctgctctatcgagatggccggcgacagcccctctatgctgtcgacgtcaggcttctccatctggtccaggaactgccgggcgtacgccgagaggctctccacgtatcgcctctgcccctcggcgtacagcgtgtcgaaggccaggctggacttgcccgacccggacagacccgtgatgaccaccagcttgttgcgcgggatggtcaggtctatgttctttaggttgtgctccctagcgcccttgattgttatgaagtccatggtgccactatcgttgctgtgctgggggctgcgtccttggttttcccatagtctattccgtcggcggcttcaatttggtcagtttggccttgagcagggcggacgtggcgccggcgccggagcggttggcctcggctatggactcatagacctcgcgcctgtatatccccatctcgcggggggcgttgatgccaaggcggaccccgtccctgcttatgcccgtcacgacaatctctatgcagtcattgatgattatcgactcgttggtcttgcgcgtgatgactaa

SEQ ID NO: 39060 - protein, 187 aa, Unknown
  Obtained from environmental sample
  misc_feature (1)..(187): Xaa is any amino acid
MRWVVFCSIEMAGDSPSMLSTSGFSIWSRNCRAYAERLSTYRLCPSAYSVSKARLDLPDPDRPVMTTSLLRGMVRSMFFRLCSLAPLIVMKSMVPLSLLCWGLRPWFSHSLFRRRLQFGQFGLEQGGRGAGAGAVGLGYGLIDLAPVYPHLAGGVDAKADPVPAYARHDNLYAVIDDYRLVGLARDD

SEQ ID NO: 39061 - DNA, 993 bp, Unknown
  Obtained from environmental sample
  misc_feature (1)..(993): n is a, c, g, or t
atggacttcataacaatcaagggcgctagggagcacaacctaaagaacatagacctgaccatcccgcgcaacaagctggtggtcatcacgggtctgtccgggtcgggcaagtccagcctggccttcgacacgctgtacgccgaggggcagaggcgatacgtggagagcctctcggcgtacgcccggcagttcctggaccagatggagaagcctgacgtcgacagcatagaggggctgtcgccggccatctcgatagagcagaagacaacccaccgcaacccgcgctctatcgtgggaacagttacggaaatttacgattactaccgcctgcttttcgccaggataggcgttccgcattgcccggtntgcggcaaggagattcgtgaacagcccatcgatcaaattatcgaaaccattttgcagatgaaagatggaagcaagatacagcttcttgccccggttattcgcgggaaaaaaggtgagcaccagaagataatcgaggacgcgaaaaaagccgggtttgcgcgggccaggattgacggagtgcctgtgagcttggacgaaaagataagccttgacaagcagaaaaagcacaccattgagatagtggtggatcgcctggttatgggaacaggcattagacagcgcctggccgaatcatgcgaggcggctttgcaggcggcggacggggtgatgcttgttctatgccagggtcctaagggctctgaggggcccgagggcccggttaccgagcattttttcagccagaagaacgcctgcccggactgtggtgtttccataccggagctgcagccaaggctcttctcgtttaacaatccctttggcgcctgtccggcctgtacgggccttggaatcaaaatggaattcgatccctcgcttataatgccgaatccctccctttcgtttaacgaaggcgggttagtgccttacaatcccgattccgcctggtaccggagccgcttgaaagcatag

SEQ ID NO: 39062 - protein, 330 aa, Unknown
  Obtained from environmental sample
  misc_feature (1)..(330): Xaa is any amino acid
MDFITIKGAREHNLKNIDLTIPRNKLVVITGLSGSGKSSLAFDTLYAEGQRRYVESLSAYARQFLDQMEKPDVDSIEGLSPAISIEQKTTHRNPRSIVGTVTEIYDYYRLLFARIGVPHCPVCGKEIREQPIDQIIETILQMKDGSKIQLLAPVIRGKKGEHQKIIEDAKKAGFARARIDGVPVSLDEKISLDKQKKHTIEIVVDRLVMGTGIRQRLAESCEAALQAADGVMLVLCQGPKGSEGPEGPVTEHFFSQKNACPDCGVSIPELQPRLFSFNNPFGACPACTGLGIKMEFDPSLIMPNPSLSFNEGGLVPYNPDSAWYRSRLKA

SEQ ID NO: 39063 - DNA, 555 bp, Unknown
  Obtained from environmental sample
  misc_feature (1)..(555): n is a, c, g, or t
gtgctttttctgcttgtcaaggcttatcttttcgtccaagctcacaggcactccgtcaatcctggcccgcgcaaacccggcttttttcgcgtcctcgattatcttctggtgctcaccttttttcccgcgaataaccggggcaagaagctgtatcttgcttccatctttcatctgcaaaatggtttcgataatttgatcgatgggctgttcacgaatctccttgccgcanaccgggcaatgcggaacgcctatcctggcgaaaagcaggcggtagtaatcgtaaatttccgtaactgttcccacgatagagcgcgggttgcggtgggttgtcttctgctctatcgagatggccggcgacagcccctctatgctgtcgacgtcaggcttctccatctggtccaggaactgccgggcgtacgccgagaggctctccacgtatcgcctctgcccctcggcgtacagcgtgtcgaaggccaggctggacttgcccgacccggacagacccgtgatgaccaccagcttgttgcgcgggatggtcaggtctatgttctttag

SEQ ID NO: 39064 - protein, 184 aa, Unknown
  Obtained from environmental sample
  misc_feature (1)..(184): Xaa is any amino acid
MLFLLVKAYLFVQAHRHSVNPGPRKPGFFRVLDYLLVLTFFPANNRGKKLYLASIFHLQNGFDNLIDGLFTNLLAAXRAMRNAYPGEKQAVVIVNFRNCSHDRARVAVGCLLLYRDGRRQPLYAVDVRLLHLVQELPGVRREALHVSPLPLGVQRVEGQAGLARPGQTRDDHQLVARDGQVYVL

SEQ ID NO: 39065 - DNA, 699 bp, Unknown
  Obtained from environmental sample
  misc_feature (1)..(699): n is a, c, g, or t
gtggccgggactaaacaagaaacaagccagggaatagttaataagccgaaccttccaaaaaaatacattcccgatgggtgcaaggcaaaagaccttataggcattccgtggatgctggcttttgccttacgcgcagacggctggtatttaagacaagatattatttggcacaaacctaatccaatgcctgaaagcgttgatgaccgttgcacaaaatcgcatgaatatatttttttattaagcaaatctgcgcggtactattttgataataaaactatacaggaaattgccgcttatgacgggcgcaaagataccagaatgaaaggcagccataaatacagcgggaataatgtttatcctagaaacgctccgcagtcattcgccgccagggaacatgagcggtggcgcaaagacgagaccggaaattatttgcgaaataaaagggacgtatggatagttagcaataaatctttttattgcgcacactttgccgtattcccggagaagctaatactcccctgcatactttgcggctgtcctgaaaacggcatagtccttgacccgttcatgggttcaggcacaacggcggtggtggcaataaagaattttcgcaaatatatcgggtgcgaaataaacccggagtatatcaaaatcgcggagcaacgcatatcgggcgagaaggggctttgggatgattaa

SEQ ID NO: 39066 - protein, 232 aa, Unknown
  Obtained from environmental sample
  DOMAIN (13)...(221): DNA methylase
  misc_feature (1)..(232): Xaa is any amino acid
MAGTKQETSQGIVNKPNLPKKYIPDGCKAKDLIGIPWMLAFALRADGWYLRQDIIWHKPNPMPESVDDRCTKSHEYIFLLSKSARYYFDNKTIQEIAAYDGRKDTRMKGSHKYSGNNVYPRNAPQSFAAREHERWRKDETGNYLRNKRDVWIVSNKSFYCAHFAVFPEKLILPCILCGCPENGIVLDPFMGSGTTAVVAIKNFRKYIGCEINPEYIKIAEQRISGEKGLWDD

SEQ ID NO: 39067 - DNA, 837 bp, Unknown
  Obtained from environmental sample
  misc_feature (1)..(837): n is a, c, g, or t
ttggatataggctcggattctatcacctttaacggcgaatggggaatgattaccctttcggggagaattacttcgtcaacctttggtcccacaatagtcctgatcaacggagcttccataacaagcacggcagatattaccaatacatctaccctcagcagacctgcaattcgcaacaagggcgatggtacggtaaacatcagcggcggaacagtttcgtcagtgggcaactcgcttaattctgactatggagcagtaacgtcctctggagcagtaaatatcagtggcggagagatatcggctatagggatatatgcgattcgtatttccactggcaaaatcacagtgtcgggcaatgcaaaggtaacatcggatagtgtatccgcaatttatttgacaaacgcagataatgtcgataacaaagccgagcggcttttaataactggtggaacggtggaaaatatagctagcggtccgactattttcagccagcgtggtgttttaaacataagcggtggaaaggttctaggcaacaaaagctacgctatccgtctcaatggtggaagtctcaacataagcggcggagaggtatcatccacaaattataatggaagtacggtttacaattatggcggtggaaatataaccataagcggtggagaggtatcatccaaaaatggaggtacagtttacaatgctggtggtggaaatataaccataagcggtggaaaagtctcgtcagaaaaaggctatgctgttggatgtgatgccgtaggtaccagcggatcatcaatactaataagtggcggaattgttcatcaaacagctcggccataa

SEQ ID NO: 39068 - protein, 278 aa, Unknown
  Obtained from environmental sample
  misc_feature (1)..(278): Xaa is any amino acid
MDIGSDSITFNGEWGMITLSGRITSSTFGPTIVLINGASITSTADITNTSTLSRPAIRNKGDGTVNISGGTVSSVGNSLNSDYGAVTSSGAVNISGGEISAIGIYAIRISTGKITVSGNAKVTSDSVSAIYLTNADNVDNKAERLLITGGTVENIASGPTIFSQRGVLNISGGKVLGNKSYAIRLNGGSLNISGGEVSSTNYNGSTVYNYGGGNITISGGEVSSKNGGTVYNAGGGNITISGGKVSSEKGYAVGCDAVGTSGSSILISGGIVHQTARP

SEQ ID NO: 39069 - DNA, 519 bp, Unknown
  Obtained from environmental sample
  misc_feature (1)..(519): n is a, c, g, or t
atggataaaaaaactattgtattaaccctatatggaacgggaaacgctattaatgattttacgataactcttttagacgaaggcagtcacaattacggtaaaagtacagtacaggactattgctttaacattaacgagcttgaacttaaagatgataaatggatctatgcgactatagtagaagaaaaccaaaaaatcaagtttgaaaaaccagggagatatacagattttgatatcctcggcactcttgacaataggtcaattcagaaagtgcttcgtgaggttgacagtaccgaattaggaatggcattaaaatcagccaaaaaggaaacattcaaagcaatactaagaaacatgagcaagcgggcggccaggatgttagttgaaaatatgggatacatgggcccggtatttataagggatgtaaagcaagctcaaagaaagattgttgatattatacggcatctggaggatacaggcgaaataatcatcccaaaattcggtcaggatgtggtgtaa

SEQ ID NO: 39070 - protein, 172 aa, Unknown
  Obtained from environmental sample
  DOMAIN (56)...(165): FliG C-terminal domain
  misc_feature (1)..(172): Xaa is any amino acid
MDKKTIVLTLYGTGNAINDFTITLLDEGSHNYGKSTVQDYCFNINELELKDDKWIYATIVEENQKIKFEKPGRYTDFDILGTLDNRSIQKVLREVDSTELGMALKSAKKETFKAILRNMSKRAARMLVENMGYMGPVFIRDVKQAQRKIVDIIRHLEDTGEIIIPKFGQDVV

SEQ ID NO: 39071 - DNA, 576 bp, Unknown
  Obtained from environmental sample
  misc_feature (1)..(576): n is a, c, g, or t
atgccggaagcaataatgcaaatggggaaaatgtattacaaaatatcggcatccgaagaagggaatatggaaaaagccattaatatgtatgtcaaagctatccaactaaaacctgattatgcggcggcatataataaccttggcgttctttatgcttctgaggcatattcccgtatgaagaatgataattctaatttgaataaagcgataaatgagtacacagaagccattaagatacggccctttgacgcgctttactattttaatcgcggtacagattatttgaaactcgaaaagcatgagaaagcgatagaggatttttccagcgcaatacattacggttcagatgagtttaagaggatgacatttattttttacctaagaggagatgaataccaacggttaagagagtacgaaaaagccatcggcgatttttcagaatcaatacgcttgaaccctgcccacattaggtctctgtttatgcggggaaacgcctatcttgcgctcggcgaaaaaaacaaagcaaaggcggatcttgatgaatatttgcgttgcaagagattcttgaaaaaatag

SEQ ID NO: 39072 - protein, 191 aa, Unknown
  Obtained from environmental sample
  DOMAIN (122)...(155): Tetratricopeptide repeat
  misc_feature (1)..(191): Xaa is any amino acid
MPEAIMQMGKMYYKISASEEGNMEKAINMYVKAIQLKPDYAAAYNNLGVLYASEAYSRMKNDNSNLNKAINEYTEAIKIRPFDALYYFNRGTDYLKLEKHEKAIEDFSSAIHYGSDEFKRMTFIFYLRGDEYQRLREYEKAIGDFSESIRLNPAHIRSLFMRGNAYLALGEKNKAKADLDEYLRCKRFLKK

SEQ ID NO: 39073 - DNA, 1623 bp, Unknown
  Obtained from environmental sample
  misc_feature (1)..(1623): n is a, c, g, or t
gtgaacaggggaggcgggggaattgtggatgaaatttgttcctccgccgagattggaactccttcagcgctgtttaacaccctggaaattatcaaaaatgagggccttgcctctacggaattcggccgggctatggcaaacgtctgcataaccctgctaaaaacgctttatccctcagatgcttccggtcttcctgcgccggatcctccgcttacgcatctttactcccggattttgcgggaagccggaagggggatttatgttccgcccaggaaaaattcgccggactatctggaatatgttcttccgtttttaagtatttatcccggcgagaaagctgtttcagctaacagatacctttcggcgctgccggatttggaaagagcggtggaactgaacggcgaatctgtccttgcgccttatttcatgggaattgcctttgaatatctgaatcgaaaggaaggggcttttaggcagtatacggaggtttggaaagcattccccgattgttaccctgccgccctcggccttgcgcgggtaatggaaggggagggcagataccttgaggccgagagcttcctttcggatctggcggatcgtattcccgataatacgcagatccagcgccaactggccttctcttactatcactcaggcagatggcagctcgcccatgctgcagtggacgaaattttgcagaaaaaccccagggatggggagtttgtcttaatgaaagcccatatccttgttgagcaggggcagctcttgcaagcccaggcccctttggatttatatgccgggataaaccctaatgaccgctttgccctttttctccgcgcaggggttcaggcggaagcttacaacaacagggaaggggctatgaattacctgagatccataatcagaagctcaactccggcgaatgactattataatgaagccgcgatatacgcggccaggcttttgatggagtccagtcgccagcaggatcagacagaaggcagggatctgctggttaagcttttggctgttccctcggactttagtccgcatccctctctggaagcgttaagccttgccgtgtgggacgcaatccggcgggagtcataccgggacgcaaggctctaccttgggcggcttttggaagaacgccgttcaacgcaggatcttctggcggcatacaccgtcgaaaaagagcagggaaatgccgcctcggcgctttcttatgcacgggagctttatcagcgggatcgttcaaacgatgatggaatactggcttatatttcagcgttgatagatacaggccgcagggacgaagcggccggtatgatagaaagtcggcttgcaggcgtggccggcggcgcgcttaaaagcaggtattattacctccgcagcctgacaacgggcaacgaggaattgcagatgaatgatctccgctccagcctttttgaagattcgcgcaatttaaattccctgattgcgttatttgaaatttatctgcgccgcaatgacgagaggcgggcggtttcctacctcaggcaggccctggctttggctccggataacccgcagcttaagcgctacgaggccgaatactcatctgcccttaggggcggcaattaa

SEQ ID NO: 39074 - protein, 540 aa, Unknown
  Obtained from environmental sample
  misc_feature (1)..(540): Xaa is any amino acid
MNRGGGGIVDEICSSAEIGTPSALFNTLEIIKNEGLASTEFGRAMANVCITLLKTLYPSDASGLPAPDPPLTHLYSRILREAGRGIYVPPRKNSPDYLEYVLPFLSIYPGEKAVSANRYLSALPDLERAVELNGESVLAPYFMGIAFEYLNRKEGAFRQYTEVWKAFPDCYPAALGLARVMEGEGRYLEAESFLSDLADRIPDNTQIQRQLAFSYYHSGRWQLAHAAVDEILQKNPRDGEFVLMKAHILVEQGQLLQAQAPLDLYAGINPNDRFALFLRAGVQAEAYNNREGAMNYLRSIIRSSTPANDYYNEAAIYAARLLMESSRQQDQTEGRDLLVKLLAVPSDFSPHPSLEALSLAVWDAIRRESYRDARLYLGRLLEERRSTQDLLAAYTVEKEQGNAASALSYARELYQRDRSNDDGILAYISALIDTGRRDEAAGMIESRLAGVAGGALKSRYYYLRSLTTGNEELQMNDLRSSLFEDSRNLNSLIALFEIYLRRNDERRAVSYLRQALALAPDNPQLKRYEAEYSSALRGGN

SEQ ID NO: 39075 - DNA, 939 bp, Unknown
  Obtained from environmental sample
  misc_feature (1)..(939): n is a, c, g, or t
ttgcgggcgctggcctcggcccagacgaacggaatgctcgacagcttcaattacgtggccacggcgaaggcgcccgtctggtccggcggcggttccggctccgtgtactggcttgaagccgcggagacccgcaacccggcgtccgccctgctgtacgccctgcggggcagggccgcgcagcagtccgttgatcccggcgacatagactggccttcccttgaggcgttctatacgtggtgcgatcaaaaagacgaagacggcgattacaaatatacttgcgacgcgtacctctccgaatccgtcaccatcgccgagatcatgcggatgataggcaataccgcccgcgccgacatcctgcggatcgattcaaaaatttccgtcgtgcaggatatcgaacggccttcccccatgcagctgttcacccccaaaaactcggtcgcttacagcatcgccatgttcaacgccgacgtccccggcgccatcgccctgcagttcattgacgaggccgccggttacgcgcaaagcgagctgaaagtatataacactcccgacggcaaccccgccaacaacacagggccggaaaccgtccagaaggccggtttatggggggtcgccaattcaaaacaggcgcgccgcatcgggatgtacaattacgcgtgccttaaaaaccgccccttcgtgcataccatcgaggcggacatcgagtatctgatatgcaacaaaggcgactggatacagtacgcggggggacatcgccctggcgggatcggcgcagggcaggataaagggtgttatctggtcggacggggtatgcgtaggcgtcgacacggacgagcccatggttatggccgacggcaagcagtacgcggtgcgcatacggcggtcggacgggaccatcatcctcaaggacgtggtattcagcctcgggaaacggcgtga

SEQ ID NO: 39076 - protein, 312 aa, Unknown
  Obtained from environmental sample
  misc_feature (1)..(312): Xaa is any amino acid
MRALASAQTNGMLDSFNYVATAKAPVWSGGGSGSVYWLEAAETRNPASALLYALRGRAAQQSVDPGDIDWPSLEAFYTWCDQKDEDGDYKYTCDAYLSESVTIAEIMRMIGNTARADILRIDSKISVVQDIERPSPMQLFTPKNSVAYSIAMFNADVPGAIALQFIDEAAGYAQSELKVYNTPDGNPANNTGPETVQKAGLWGVANSKQARRIGMYNYACLKNRPFVHTIEADIEYLICNKGDWIQYAGGHRPGGIGAGQDKGCYLVGRGMRRRRHGRAHGYGRRQAVRGAHTAVGRDHHPQGRGIQPRETA

SEQ ID NO: 39077 - DNA, 894 bp, Unknown
  Obtained from environmental sample
  misc_feature (1)..(894): n is a, c, g, or t
atgcaacaaaaaaacataaatatcttcggcatagtctcattcaaaaaaacatcggctgttgctgatgtactggagcgtattcgagtatgggcttcgggcaacggggccgacgttatatatcatcccatactcgcgggtcaactcccgttaagcgaacacgccgaaatatccgaggcggtttttcttgacaagtgcgacgccatcgtctcggtcggcggggacgggacgtttctctccgtggcgcggatgagcggattttccgaaaaacctatcgtgggagtgaatctcggcggacttggattcttgaccgacataggccctgaagatttggaagaacatctcgataaaatcaggcgcggcggctataccacaatcagccgcatggtattggaagcccgcgtcatacgcgacggcgcggaagttcaccgattcaaagcgttgaacgacgtttacgtcaaccgcgtcaatatgcccaaactgacctctatctccgcgtggtgcggcgacgcgttcatcacagaattcttcgccgacggaatcatcgtcgccacgccaagcggttctacggcgtactccctctccgccggggggccgattgtcgaaccgtccgtgcaagcgttcctgctgaccccgatatgcccgcactccctaaccgaacgcccgctgatactgccggcggacgtcaacatcaagttagcggtgaacgacaaaaaccctgatctactactgaccgcggacggcttagaatctttcaacctgcactccggcgacgaggtaatcgtctcctacagcggggtaagaaaaaacttgattcaactggcggaaaaatcttatttttcattattgcgggaaaaattaggatggggacggggatacaagaaaggcagcgattag

SEQ ID NO: 39078 - protein, 297 aa, Unknown
  Obtained from environmental sample
  DOMAIN (5)...(273): ATP-NAD kinase
  misc_feature (1)..(297): Xaa is any amino acid
MQQKNINIFGIVSFKKTSAVADVLERIRVWASGNGADVIYHPILAGQLPLSEHAEISEAVFLDKCDAIVSVGGDGTFLSVARMSGFSEKPIVGVNLGGLGFLTDIGPEDLEEHLDKIRRGGYTTISRMVLEARVIRDGAEVHRFKALNDVYVNRVNMPKLTSISAWCGDAFITEFFADGIIVATPSGSTAYSLSAGGPIVEPSVQAFLLTPICPHSLTERPLILPADVNIKLAVNDKNPDLLLTADGLESFNLHSGDEVIVSYSGVRKNLIQLAEKSYFSLLREKLGWGRGYKKGSD

SEQ ID NO: 39079 - DNA, 774 bp, Unknown
  Obtained from environmental sample
  misc_feature (1)..(774): n is a, c, g, or t
atgttaccgcgggcgcggcccatcgggaccaccctgaatgttcttgaggacaaggtgcggaatgttattaccgcggaaatcccctatgatgatgacgttctgattgagtacgccggggacaacgcggaaatgatgagtatgttgaaaaatttcgtccttatcatggtagtggcgatagctttggttttcggggtcatggccagcctctntgagtcgttcagggaccccttcatcgttattttcaccattccgctttccgtaatcggcatagtggccatatatttaataaccggggaaaccttcaatgtactggttctggtcgggcttctggtgctggccggcatcatcgtcaacaacggcattgtgctggttgactacaccaacctgctcaggaaacgcggcctttcccttcgcgacgcgtgtgtggaggccgccggcaacaggctgcgtcccatattgatgaccacgcttacaaccattctgggccttatccccatggcgttcttccccggggaaggttcggagttagtctctcccataggtaaaaccgttttgggagggctttcttttggaacgctcatgaccctgttccttatgcccgcgatttattatctggtcaacaagcgctccgacgaacgggccgccaaagccgaggccaggcgcgaacgcattgccgccgggctttccagaaaagaagccgccgccattatatccggggagaagtcataccccaattcgccggcaactgaacagcataaccaggaggtcctatga

SEQ ID NO: 39080 - protein, 257 aa, Unknown
  Obtained from environmental sample
  DOMAIN (14)...(209): Protein export membrane protein
  misc_feature (1)..(257): Xaa is any amino acid
MLPRARPIGTTLNVLEDKVRNVITAEIPYDDDVLIEYAGDNAEMMSMLKNFVLIMVVAIALVFGVMASLXESFRDPFIVIFTIPLSVIGIVAIYLITGETFNVLVLVGLLVLAGIIVNNGIVLVDYTNLLRKRGLSLRDACVEAAGNRLRPILMTTLTTILGLIPMAFFPGEGSELVSPIGKTVLGGLSFGTLMTLFLMPAIYYLVNKRSDERAAKAEARRERIAAGLSRKEAAAIISGEKSYPNSPATEQHNQEVL

SEQ ID NO: 39081 - DNA, 747 bp, Unknown
  Obtained from environmental sample
  misc_feature (1)..(747): n is a, c, g, or t
ttgctttttcgggcggagtggattccacgttttttattaaaaaccgcacacgatgttttgggcgactgcgttattgctgccagtgcccgttcctgctcattcccaaaacgcgaattagacgaggcaaccgctttttgcaaaaaagaaggcatagtccacgtaacattcgattccgaagaactagaaattgaaggattttcccaaaacccagcaaatcactgctatctgttgcagagagaacttttcaccccaattctaactatagcaaaggaacacagaattttgcacatagccgaaggctcaaacaaagacgatgagggcgactatcgcccaggattaaccgcggtggcagaactgggcataaaaagccccttgcgttatgctgaactgaacaaacgagaaatccgccacctttccaaagagatgaacttacccacttggaataaacaatcgtttgcctgcctctcttctcgctttccatacggcgaagagattaacccagagcgaatggctaaaatagacaaagcggagcaatttttgttggacaatggttttcatcaagtacgcgtgcgctatcatggcaacctcgttcgcatagaaacagatgaggaaggttttgcgctgatgtcatcgcctgagaaacgggagaaaatctatgctgcgttaaaggaactcggttttacatatatcgctttggatttgctcggttaccggactggaagcatgaatgaaacgctaacgagttaa

SEQ ID NO: 39082 - protein, 248 aa, Unknown
  Obtained from environmental sample
  misc_feature (1)..(248): Xaa is any amino acid
MLFRAEWIPRFLLKTAHDVLGDCVIAASARSCSFPKRELDEATAFCKKEGIVHVTFDSEELEIEGFSQNPANHCYLLQRELFTPILTIAKEHRILHIAEGSNKDDEGDYRPGLTAVAELGIKSPLRYAELNKREIRHLSKEMNLPTWNKQSFACLSSRFPYGEEINPERMAKIDKAEQFLLDNGFHQVRVRYHGNLVRIETDEEGFALMSSPEKREKIYAALKELGFTYIALDLLGYRTGSMNETLTS

SEQ ID NO: 39083 - DNA, 612 bp, Unknown
  Obtained from environmental sample
  misc_feature (1)..(612): n is a, c, g, or t
atgagcgcaggaaagacgaaaccctcaatagctatcatgatctccgctgccgaatggaaacttgtagaggcggacgcgaaagcggctggcgttgaacgttatttacagaagccgctgttccgttccgatattgttgattgtcttaacagtttctttggccccaaaaaaagtgaagagatccaggtgcagaatataaaagacaactttgaaggtttccgaatccttcttgttgaagacctggagataaaccgcgaaattgtgcttgcctatctggagccgacagggttgaagatagactgcgccgtaaacggcaaggcggcgttgaaaatggttatggacgctgaaaaaccctacgatatgatttttatggatctgcagatgcccgagatggacggttatgaagccgcctataaaatcaggcagttcgagaaaggccgttacggaggaaaggaagccggaaaacaaattcccattatcgccatgacggcaagcgtatcccgtgatgatattgaaaaatgcatggaggcgggcatgaacgaccacataggcctgcccatggatgttgaggacatgctgaagaaactccgttcctgcctgctggcgcctcaatag

SEQ ID NO: 39084 - protein, 203 aa, Unknown
  Obtained from environmental sample
  DOMAIN (72)...(196): Response regulator receiver domain
  misc_feature (1)..(203): Xaa is any amino acid
MSAGKTKPSIAIMISAAEWKLVEADAKAAGVERYLQKPLFRSDIVDCLNSFFGPKKSEEIQVQNIKDNFEGFRILLVEDLEINREIVLAYLEPTGLKIDCAVNGKAALKMVMDAEKPYDMIFMDLQMPEMDGYEAAYKIRQFEKGRYGGKEAGKQIPIIAMTASVSRDDIEKCMEAGMNDHIGLPMDVEDMLKKLRSCLLAPQ

SEQ ID NO: 39085 - DNA, 849 bp, Unknown
  Obtained from environmental sample
  misc_feature (1)..(849): n is a, c, g, or t
atgtactccaaagccaaagccgatacaaaagcaaaaacaaaggcaaaggctaaacccgaaaccgatacagagtcagaagcatcgtctgcggcagcagacgcggcctcgtctgcggcagcagacgcagccaggacggaggcgctcgccaaagccaaagcagaagcaagggtacaatggtacgaagccgcggggataagcgaggaacggcagcttattattctgatccacatcctcgatcttacctacagggacattgaaaaccagcgggaaacaaccgaggcgcgcaagatcaataaacaggtttataatattcttttcaaggaagatgttcttggctcgtttgtcgataccgcggatacggaaattatttccagaatctacagattcgtcagtgatgtaaaaaaccttgacccacaggacaagataaacctgcgaagcaggatacaggacaagcatccggactttaagtttattgacagcatggaaaaacggatatcccaggggcttaccgttacaaggagcaaattcgaggaaaaacaaaaacagcttgtcaacatcatggatgtcgagattccggcgaattccaaagagattgaagctgcaaggcttcacggcgatcttaaggaaaacgcggaatacattgccgcgaaggaaaaacaggttctgcttaatacgacggcggaaaggctcaaggaagatcttgaccgcgcccagtatttgacccggcgcagtnngattcttccagagtgtcattcgggaccgtgtttattctgcataaccaagcaanggacaagaaagagaaatacaccctccttggcccatgggaatcggatcctgacaacaacgtaa

SEQ ID NO: 39086 - protein, 282 aa, Unknown
  Obtained from environmental sample
  DOMAIN (167)...(239): Prokaryotic transcription elongation factor, GreA/GreB, N-terminal domain
  misc_feature (1)..(282): Xaa is any amino acid
MYSKAKADTKAKTKAKAKPETDTESEASSAAADAASSAAADAARTEALAKAKAEARVQWYEAAGISEERQLIILIHILDLTYRDIENQRETTEARKINKQVYNILFKEDVLGSFVDTADTEIISRIYRFVSDVKNLDPQDKINLRSRIQDKHPDFKFIDSMEKRISQGLTVTRSKFEEKQKQLVNIMDVEIPANSKEIEAARLHGDLKENAEYIAAKEKQVLLNTTAERLKEDLDRAQYLTRRSXILPECHSGPCLFCITKQXTRKRNTPSLAHGNRILTTT

SEQ ID NO: 39087 - DNA, 750 bp, Unknown
  Obtained from environmental sample
  misc_feature (1)..(750): n is a, c, g, or t
atggtaaacaatatcgattcggtaaacgagactctgcaaaaaaacctggagaatgtacataacttaaaagaagcctcggaaataggccgaagcggattacaggaagtggcggcggacattcaggaaatatcccgcgaatccgaagggctgatggaaattaacggggtaatggaaaacatagccagccagaccaacctgctttcgatgaacgcggcgatagaggcggcccatgcgggtgagtcgggcaaaggctttgccgttgtcgccgacgagattcgcaaactggcggagagttccagcgtacaatccaaaacaatcagcaatgttttgaagaagataaaaggctcaattgacaagataacccactctacagaaaatgtgcttaaccggttcgaggcgattgacacaggcatcaatacggtggcggagcaggaagaaaatatacgtcaggctatggaggagcagggcgaaggaagcaagcagcttcttaagggcaccagcaatttgaccaatattaccgagaaagtacgggacggttccgcggaaatgcttgaaggcagcaaggaagtaatacaggagagtaaggcccttgaacaagcgactcaggaaataaccggcggcatgaacgagatggcctccggcgcggatcagataaatatcgcggtgaaccatgttaatgagataagcaacaggaaccgcgagggcattgatgttctgatccgtgaagtagccaggttcaaggttgaataa

SEQ ID NO: 39088 - protein, 249 aa, Unknown
  Obtained from environmental sample
  DOMAIN (3)...(214): Methyl-accepting chemotaxis protein (MCP) signaling domain
  misc_feature (1)..(249): Xaa is any amino acid
MVNNIDSVNETLQKNLENVHNLKEASEIGRSGLQEVAADIQEISRESEGLMEINGVMENIASQTNLLSMNAAIEAAHAGESGKGFAVVADEIRKLAESSSVQSKTISNVLKKIKGSIDKITHSTENVLNRFEAIDTGINTVAEQEENIRQAMEEQGEGSKQLLKGTSNLTNITEKVRDGSAEMLEGSKEVIQESKALEQATQEITGGMNEMASGADQINIAVNHVNEISNRNREGIDVLIREVARFKVE

SEQ ID NO: 39089 - DNA, 825 bp, Unknown
  Obtained from environmental sample
  misc_feature (1)..(825): n is a, c, g, or t
ttgtcagacgtggatattgcgaccgctaacccgattgagggcgataatcgcaataatattgtctacacgctgcatttttattcggctactcacaaggacactctcagaataaaagcgagaacggccttgaacacgaacggcaaagcgctttttgtctccgagttcggcgtcagcaacgcacaagcgaacccaccgctggacaccgccgaagccaccaaatggctgaatttcctcgactcgaacatggtgagttgggtcaattggtctatatccgacaaggacaagaatgacaaaggcgtagcggagataacgtccgctatagtgaaaaacggaggtacaaacggcggttggacgacagacaaacttacgacgtcaggcaattacatccgctccaaattgatagctgcgtaccagcgcgaggaggacgcgtggagcacggctgcgctggccgcggagcgtgtggtgccaaacaccccgcaggcgggcggatcggcggttgtagcgcccgtcgtcgccccgtcgaacaagttctccgtaggcccggtcccggcaagcaaggccgacggcggcgtcaaattcttctggcagggtaaggccgtcaataacgggtcgctggttatctacgacgctatggggagcagcgtgaagagcatccgcgtaacggaggcctcggcgagcggcctatcgaagtttacggtagccgcgtgggacttgacagacgttaaaggtcgcccggttccggcgggcagttatctggtgaaaggcaaggtaaccgagtcggacggaagcgtcgcgagtgtgtcggctattgtaggcgtcaaataa

SEQ ID NO: 39090 - protein, 274 aa, Unknown
  Obtained from environmental sample
  misc_feature (1)..(274): Xaa is any amino acid
MSDVDIATANPIEGDNRNNIVYTLHFYSATHKDTLRIKARTALNTNGKALFVSEFGVSNAQANPPLDTAEATKWLNFLDSNMVSWVNWSISDKDKNDKGVAEITSAIVKNGGTNGGWTTDKLTTSGNYIRSKLIAAYQREEDAWSTAALAAERVVPNTPQAGGSAVVAPVVAPSNKFSVGPVPASKADGGVKFFWQGKAVNNGSLVIYDAMGSSVKSIRVTEASASGLSKFTVAAWDLTDVKGRPVPAGSYLVKGKVTESDGSVASVSAIVGVK

SEQ ID NO: 39091 - DNA, 612 bp, Unknown
  Obtained from environmental sample
  misc_feature (1)..(612): n is a, c, g, or t
atgtctaaacctaaattgttattacatatntgctgcgcgcccgatgaggcctatgctgttgatctgatcaaagatcagtacgagattcattgctttttctgcaaccccaatatcttccccgatgaagaatctcaactgcgattaaacgaggcaaagagggcggcggaaatttatggggttccttttacgtgggacgattacaaccacggtgtatgggttgacgctacggccggcctcacggagaccccggagggcggcgcccggtgccgcgagtgcttctgtctgcggctcaaacgcgctgcggaggtctgcaaggatatggggtggccggccttcgggacagtgatgagcgtcagcccgcataagaaaacggctatgcttgacgaggcgggaagaagcgccgcggcggcgtgcggggttgagtatgtgccgtttgaccttaagaagagagacgggttcagaaagagcgtcgccctcagccgacggcttggactgtatcggcaggactactgcgggtgcgaacttagtttgggggaggcggagatgagaaaaaaagggcggccgcgcgaggccgcccctgcgatatcggtaccgaatgtattaattatttga

SEQ ID NO: 39092 - protein, 203 aa, Unknown
  Obtained from environmental sample
  DOMAIN (6)...(199): Uncharacterized BCR, COG1636
  misc_feature (1)..(203): Xaa is any amino acid
MSKPKLLLHXCCAPDEAYAVDLIKDQYEIHCFFCNPNIFPDEESQLRLNEAKRAAEIYGVPFTWDDYNHGVWVDATAGLTETPEGGARCRECFCLRLKRAAEVCKDMGWPAFGTVMSVSPHKKTAMLDEAGRSAAAACGVEYVPFDLKKRDGFRKSVALSRRLGLYRQDYCGCELSLGEAEMRKKGRPREAAPAISVPNVLII

SEQ ID NO: 39093 - DNA, 1098 bp, Unknown
  Obtained from environmental sample
  misc_feature (1)..(1098): n is a, c, g, or t
atgcccgtcaaaacgaccgtaaaaaagaccgtcaaaaagaagcgtatcgcgaccgccgtcaaaaccgccgtgaaaaccgccgccaagaagcccgccgagcgcgagttggtctcgtttgacttcgccgtcaaatacctattgcgcggcaagcgcgactacgtcgttctcaacggctttctctccgaacttctcggcaaaaaggtcgaggtcaagtctctcgacaatatagaaaacattaaggacgacaaggacgataagaccaaccgcgtagacctgaaagcgcagataaacggcggcgagatcgtagtatttgaaattcagtttttgcaagaatgggatttcttcggcaaagcgcttttcggcgtatgcagcgccataaaggatcaggttgaggcgggcgatgtgtacaacataaaaaaagtctattcggtaaacatcgcgtactttaatttaaaatccaaaaaggagtatctgttttccggcaagttaaacggctttcagggcgtccactacaaggacgaagtgatccctttcgctcaatcccgctctaaaaagtcaaaaaaacagttcgagattcatcctgagtattatctgattttaccgagaatgttcgacgaaaaactgcgcggacgtttcgacgaatgggtctacatcctgaaaaactcgaaagcccgcgccgacttcaaggccgccggaatcaaagaggccaagaccaagttagactacctgcgcatgacgcccgaaaagaaaaaagagtacgcaagatttttagaacaccgccgaagcgccagaagcgcgttagaaacggcggtaggccaaggcgaacttagaggcgagcgcagaggcatacggaaaggcctacagcaaggcttacaaaaaggtctacagcaaggcttacaaaaaggtctacagcaaggcttacaaaaaggtctacagcaaggtctacagaaaggcctacagaaaggcagacagaaaggttgggatgaggcaagtaccaaacacgccaaaagtatgtacaaaacaggctttacggtcaaacagatcgcaaaagccctcgaactttcagaaaccgctgtcaagcgaattttaggcttgtag

SEQ ID NO: 39094 - protein, 365 aa, Unknown
  Obtained from environmental sample
  misc_feature (1)..(365): Xaa is any amino acid
MPVKTTVKKTVKKKRIATAVKTAVKTAAKKPAERELVSFDFAVKYLLRGKRDYVVLNGFLSELLGKKVEVKSLDNIENIKDDKDDKTNRVDLKAQINGGEIVVFEIQFLQEWDFFGKALFGVCSAIKDQVEAGDVYNIKKVYSVNIAYFNLKSKKEYLFSGKLNGFQGVHYKDEVIPFAQSRSKKSKKQFEIHPEYYLILPRMFDEKLRGRFDEWVYILKNSKARADFKAAGIKEAKTKLDYLRMTPEKKKEYARFLEHRRSARSALETAVGQGELRGERRGIRKGLQQGLQKGLQQGLQKGLQQGLQKGLQQGLQKGLQKGRQKGWDEASTKHAKSMYKTGFTVKQIAKALELSETAVKRILGL

SEQ ID NO: 39095 - DNA, 384 bp, Unknown
  Obtained from environmental sample
  misc_feature (1)..(384): n is a, c, g, or t
ttgatcgtctacaagcctaaaattcgcttgacagcggtttctgaaagttcgagggcttttgcgatctgtttgaccgtaaagcctgttttgtacatacttttggcgtgtttggtacttgcctcatcccaacctttctgtctgcctttctgtaggcctttctgtagaccttgctgtagacctttttgtaagccttgctgtagacctttttgtaagccttgctgtagacctttttgtaagccttgctgtaggcctttccgtatgcctctgcgctcgcctctaagttcgccttggcctaccgccgtttctaacgcgcttctggcgcttcggcggtgttctaaaaatcttgcgtactcttttttcttttcgggcgtcatgcgcaggtag

SEQ ID NO: 39096 - protein, 127 aa, Unknown
  Obtained from environmental sample
  misc_feature (1)..(127): Xaa is any amino acid
MIVYKPKIRLTAVSESSRAFAICLTVKPVLYILLACLVLASSQPFCLPFCRPFCRPCCRPFCKPCCRPFCKPCCRPFCKPCCRPFRMPLRSPLSSPWPTAVSNALLALRRCSKNLAYSFFFSGVMRR

SEQ ID NO: 39097 - DNA, 513 bp, Unknown
  Obtained from environmental sample
  misc_feature (1)..(513): n is a, c, g, or t
atgtccgaagaaatccaaaaaatgtccgaagaaatcaccaaagtaaccaaaaacttcaacgacggttacggtgggattagcgcaagattaggttccttaactgaactcatcgttgtccctaaattgcgtcacagcatgaacgtatatggccataactttgaaacaacggagccggatacacaacttcgcggcattgtccgtggtagaaaagaagatattactcaagtagacttgatcttacgcggcccctcagagatattagctgtagaaataaaggcccgtttgaaagaaaaacacgtgagagaacacttggaacgtctgcgcgacttacgcgacaacgaagatattgtccacattgacggcaaaaaaatgttcggtgcggtagccggtattgctatagaccgcgaggcaaggtccgtcgcattggaacacggcctatatatcgtgatgatccaggaagaaaagagcaacctggccatcgaaaaacccgaaacagggtgccgcccttattaa

SEQ ID NO: 39098 - protein, 170 aa, Unknown
  Obtained from environmental sample
  misc_feature (1)..(170): Xaa is any amino acid
MSEEIQKMSEEITKVTKNFNDGYGGISARLGSLTELIVVPKLRHSMNVYGHNFETTEPDTQLRGIVRGRKEDITQVDLILRGPSEILAVEIKARLKEKHVREHLERLRDLRDNEDIVHIDGKKMFGAVAGIAIDREARSVALEHGLYIVMIQEEKSNLAIEKPETGCRPY

SEQ ID NO: 39099 - DNA, 333 bp, Unknown
  Obtained from environmental sample
  misc_feature (1)..(333): n is a, c, g, or t
atgtcaagaaagaagatcaccggagagaagccgtccggtactcggaaaacgtatgacgacgcgtttaaggcgaaggttgtgttagcggcgttacgagagacgatgccgctcaacgagcttgcgtcgaagtacggagtccaccctaaccaaatcggccaatggaaagcgaaggcattggaaaaactgccggaggttttcagcggcaagacgcccgaacagcaagaggtggagcatctgcgccgtgagaaagagcaactgatacacaagatcggcgaacaggcggttgacattgatttcttaaaaaaaaacttgaagaagttgaacctgctgtga

SEQ ID NO: 39100 - protein, 110 aa, Unknown
  Obtained from environmental sample
  DOMAIN (15)...(86): Transposase
  misc_feature (1)..(110): Xaa is any amino acid
MSRKKITGEKPSGTRKTYDDAFKAKVVLAALRETMPLNELASKYGVHPNQIGQWKAKALEKLPEVFSGKTPEQQEVEHLRREKEQLIHKIGEQAVDIDFLKKNLKKLNLL

SEQ ID NO: 39101 - DNA, 600 bp, Unknown
  Obtained from environmental sample
  misc_feature (1)..(600): n is a, c, g, or t
gtgaggcgcaagatggtgaaaaagcatgataaattgagccggtctcggcagtgccgccttctttccatcgggcgtacatccgtgtactatgcccccaaggagagcgagctgacgctggatttgatgcggcggatagacgaactttacaccgaagacccgacctacggtgcacggcggatgtgcgccgcattgcgcggcaggggcgttataatcggtcggtataaggtacggcggttgatggaaaagatgggcttggaggccatttaccgcaaacccaaactgtccgaaccgcaccccggccacaaaatttatccgtacctattgcgcggagtaacggttacccgtgtcaatcaggtctggagcacggacatcacgtacatccggttgcggcacggctttgtgtatcttacggctgttatcgactggtatagtcgttgcgtgctgtcgtggcggctctcgacgagtcttgacacgaccttttgtgttgacgtgcttgaggaagccatcgagcgttatggcaccccggacgtcttcaacaccgatcagggggcacagtttaccagcacggcctttacggacgtcttgaaaaacacggcgtga

SEQ ID NO: 39102 - protein, 199 aa, Unknown
  Obtained from environmental sample
  misc_feature (1)..(199): Xaa is any amino acid
MRRKMVKKHDKLSRSRQCRLLSIGRTSVYYAPKESELTLDLMRRIDELYTEDPTYGARRMCAALRGRGVIIGRYKVRRLMEKMGLEAIYRKPKLSEPHPGHKIYPYLLRGVTVTRVNQVWSTDITYIRLRHGFVYLTAVIDWYSRCVLSWRLSTSLDTTFCVDVLEEAIERYGTPDVFNTDQGAQFTSTAFTDVLKNTA

SEQ ID NO: 39103 - DNA, 729 bp, Unknown
  Obtained from environmental sample
  misc_feature (1)..(729): n is a, c, g, or t
atgttcaatttatctaagaaatgggtttttatcacaggtgccgctcgcggcattggcaagcaggcagctttggcatttgcagagcagggagcaaacttaattttgcacagccgcagcttggagcacacaaaaactcttgaggcagaaataaaggcaaaaggcgtggaggttttttccgttgccgccgagcttggcgacagcaagcaaagaaaaaatcttttagcggaaatagattcaaaaaatttacggatagaagttgtttgcaacaatgccggcttgcaacctccataccgcgaaaattattgggaagtgcatgagcaagattatctaaccagttttcaagtgaataccatagccccaatttttataagctgccattttttaccaaaaatgctgctcgctggttttggcagggtaatttgcacaacaagcggaatagcaggcgaaccggagcaaatggcttatgctgcgggtaaagctgcgctggataaattcgttagagataccgcgccaaagctaaaaggcacagacgtaactttgaatttgctagacccaggctggctccgcacagatttgggaggtcccaatgctccaaacgctgtggaatcagtaattcccggagccatagcagccgcattcgcaaacaactccgtgaatggcaagtggattagcgcacaggattatgcgggtttgtctttggaagaggctgtgaagaaattggaagggtaa

SEQ ID NO: 39104 - protein, 242 aa, Unknown
  Obtained from environmental sample
  SIGNAL (1)...(27)
  DOMAIN (7)...(174): short chain dehydrogenase
  misc_feature (1)..(242): Xaa is any amino acid
MFNLSKKWVFITGAARGIGKQAALAFAEQGANLILHSRSLEHTKTLEAEIKAKGVEVFSVAAELGDSKQRKNLLAEIDSKNLRIEVVCNNAGLQPPYRENYWEVHEQDYLTSFQVNTIAPIFISCHFLPKMLLAGFGRVICTTSGIAGEPEQMAYAAGKAALDKFVRDTAPKLKGTDVTLNLLDPGWLRTDLGGPNAPNAVESVIPGAIAAAFANNSVNGKWISAQDYAGLSLEEAVKKLEG

SEQ ID NO: 39105 - DNA, 366 bp, Unknown
  Obtained from environmental sample
  misc_feature (1)..(366): n is a, c, g, or t
atgaaattagctcttatcattggaataggtagctttataggcggtttttctcgctatctgctatctttgttaatacaagcaaaaacagcatcgccgtttccattgcatactttgataataaatatcataggttgtttttggattggaattgtttttggattttttgataaagggcaaatttcagaggaatggaaattgttctttgcaacgggtattcttggtggattcactactttctctgcgttttcaattgaaacattgactttatttaaagaaggatatgcgtgttatgccttggtttatattttctctagcgtttttttagggctgttgctaacgtacttagcttattctatggtaaagtaa

SEQ ID NO: 39106 - protein, 121 aa, Unknown
  Obtained from environmental sample
  SIGNAL (1)...(27)
  DOMAIN (4)...(120): CrcB-like protein
  misc_feature (1)..(121): Xaa is any amino acid
MKLALIIGIGSFIGGFSRYLLSLLIQAKTASPFPLHTLIINIIGCFWIGIVFGFFDKGQISEEWKLFFATGILGGFTTFSAFSIETLTLFKEGYACYALVYIFSSVFLGLLLTYLAYSMVK

SEQ ID NO: 39107 - DNA, 498 bp, Unknown
  Obtained from environmental sample
  misc_feature (1)..(498): n is a, c, g, or t
atgaaaaactgcccctgcggttcaggccgcccttatgccgaatgctgcgaaccgtacatcaccggcaaggcgcaagcccccaccgccgaagcccttatgcggagccgctattccgcttacgttgaacacgaaatcgactacattatcaatacctgtatccgtaaagaaaccaacgacatcgactacgagtcaacccgcaactggagcgagcgatcaacctggctgggccttaaaattatttcctgcgaaaaaggcggccccgccgacaccgagggaatcgtagagttcgaggcaacctatgaaagcaagggcctgagggatgtccactatgaaaaagcgaaattcaaaaaacagaatggtaacgccgcaggcgaatggctctacgatgaaggaaccgttgccccccgcactattgtccgcaccgggccaaagaccggccgtaacgacccctgcccctgcggttcgggcaaaaaattcaaacactgtcatggcaaatga

SEQ ID NO: 39108 - protein, 165 aa, Unknown
  Obtained from environmental sample
  DOMAIN (2)...(20): SEC-C motif
  misc_feature (1)..(165): Xaa is any amino acid
MKNCPCGSGRPYAECCEPYITGKAQAPTAEALMRSRYSAYVEHEIDYIINTCIRKETNDIDYESTRNWSERSTWLGLKIISCEKGGPADTEGIVEFEATYESKGLRDVHYEKAKFKKQNGNAAGEWLYDEGTVAPRTIVRTGPKTGRNDPCPCGSGKKFKHCHGK

SEQ ID NO: 39109 - DNA, 450 bp, Unknown
  Obtained from environmental sample
  misc_feature (1)..(450): n is a, c, g, or t
atggtatccattctggaatccattgccgattacgcgcctgtgtcaaaaaacatctggtttcttacggaaaaagcccgtcaggcccttgccagccagatatgcagccagtatgccgacgacgaccgcaggcttcgcgttcttacgattgatccttcgcttgagcaaaagatcatcgacagtaaatatgaaaccccgtcggggattatgtccgccatggatcctccttctcagaaaatgtggatcaacgccgtcagcaaagctgttacggcagtcaaggaaaagggttggatgcctgttgtcctctgttccgaacaggcgcgtttccttgttaagaattcaactgatcgcgaaatgccggatttggcggtattgtccgttcccgaaatagtgccggatgttattcctgaagcggtgggaatgatacggatagaaaatagtacaacggagtaa

SEQ ID NO: 39110 - protein, 149 aa, Unknown
  Obtained from environmental sample
  misc_feature (1)..(149): Xaa is any amino acid
MVSILESIADYAPVSKNIWFLTEKARQALASQICSQYADDDRRLRVLTIDPSLEQKIIDSKYETPSGIMSAMDPPSQKMWINAVSKAVTAVKEKGWMPVVLCSEQARFLVKNSTDREMPDLAVLSVPEIVPDVIPEAVGMIRIENSTTE

SEQ ID NO: 39111 - DNA, 780 bp, Unknown
  Obtained from environmental sample
  misc_feature (1)..(780): n is a, c, g, or t
atgcctcggcaattttattgccatgtacctttcaaggaggatcgtatgatcattaatcacaacctgagcgcaatgtttgcggacaggtccctcaaggttaccgaagtctaccttaacaagactatggaaaagctctcttccggccagcggatcaaccgcgctggggatgacgcttccggcctggccgtatccgagaaactgcgggcgcagatccgcggtctcaatatggcctcgttcaacgcatccaatgatatttccttcatccaggtcagtgaagggtatctccaggaaactgaagatattcttcaacgtatccgtgaactgtcggttcagtctgccaacggtatttacaccgatgaagacagaatgtacattcaggtggaaatttcccagcttgttgatgaggttgaccggattgccagcgctgcccagtttaacggcatgaatatgctgaccggacgttttgcccgctcaaacggccagaatatccccaccgcttccatgtggttccacattggcgccaacatggatcagaggatacaggcgtatatcggtaccatgaccgccgaagggctgggtattcgcgatgtcggcgatggcaccaagatcaacctgcaaactccggaagatgccaatcgcgccattggcactgttgacttagccctgaagctggtcaataaacagcgcgccgatctgggtgcttaccagaaccggctggaacacgcggttcgcggcctcgatgtaggcgccgagaacctccaggccgctcggccgatctga

SEQ ID NO: 39112 - protein, 259 aa, Unknown
  Obtained from environmental sample
  DOMAIN (208)...(257): Bacterial flagellin C-terminus
  misc_feature (1)..(259): Xaa is any amino acid
MPRQFYCHVPFKEDRMIINHNLSAMFADRSLKVTEVYLNKTMEKLSSGQRINRAGDDASGLAVSEKLRAQIRGLNMASFNASNDISFIQVSEGYLQETEDILQRIRELSVQSANGIYTDEDRMYIQVEISQLVDEVDRIASAAQFNGMNMLTGRFARSNGQNIPTASMWFHIGANMDQRIQAYIGTMTAEGLGIRDVGDGTKINLQTPEDANRAIGTVDLALKLVNKQRADLGAYQNRLEHAVRGLDVGAENLQAARPI

SEQ ID NO: 39113 - DNA, 1041 bp, Unknown
  Obtained from environmental sample
  misc_feature (1)..(1041): n is a, c, g, or t
ttgatagaggagtgggatggttacacgtggcgccgtgtattcggcaacgggcctcttcccgggcgcgaggtgatgaacgtcgtgatccgcgacaccataccgcagggcgtgacgtttataaatttcatagaaccgtaccccttcggcaaagcgcccaaaataaacgggcgcgttatcacgtgggagaccgacaaactgctggtcggccaaaaggggagcataaaatacaccgtacgcgccgacacgccgcctgacaataagaacgtcatcgtcacctcgcgggcgtgggcgtccgccgacaaggagtcgccgatgcgcggcacggcgacgctcgtgatcacgagggactcgctgccgccgccgccgcccgaaccgaccaccctgtacaagagggccaacaaggaggcctattcccgcggcgacacggtggtctacactatcgcctacaagcagacgcacggataccccgccgtcagtacatcgtcgaaccagtgggagggtacgaagccgtccggctttgacgggagaacaatttccttcgggacaagttctttcgacatgcgctttacgccagcgtccggcacgaacgtcacgcttaccggcactatggcgccgcagtcttacggcccgccactttacatattcgcgaggcgtaccgctcaaggctcggttgaactgaaatttgagcgcaagtacatacaatcgggggattaccccggaattgagatcaccgttacctcaaacggccgtgtcgttaacaacgtcaccaatgagtccggtgtgaaaatgaatgataatgagacatctaaaaattacaagttagtctttaagaacgacagtctgctggtatggtttaaagataccgcctcgctattcccagatttggtgtataaggggatcgccgttcagaagggcgacgcgggcgtacgttacgtatctaccggcggcggcagttcgtctcagattaccaattgggcgagcaaatccgatttggcctacgacgtaaccgttcgggacaccgtcccgtacggcgttaggtag

SEQ ID NO: 39114 - protein, 346 aa, Unknown
  Obtained from environmental sample
  misc_feature (1)..(346): Xaa is any amino acid
MIEEWDGYTWRRVFGNGPLPGREVMNVVIRDTIPQGVTFINFIEPYPFGKAPKINGRVITWETDKLLVGQKGSIKYTVRADTPPDNKNVIVTSRAWASADKESPMRGTATLVITRDSLPPPPPEPTTLYKRANKEAYSRGDTVVYTIAYKQTHGYPAVSTSSNQWEGTKPSGFDGRTISFGTSSFDMRFTPASGTNVTLTGTMAPQSYGPPLYIFARRTAQGSVELKFERKYIQSGDYPGIEITVTSNGRVVNNVTNESGVKMNDNETSKNYKLVFKNDSLLVWFKDTASLFPDLVYKGIAVQKGDAGVRYVSTGGGSSSQITNWASKSDLAYDVTVRDTVPYGVR

SEQ ID NO: 39115 - DNA, 987 bp, Unknown
  Obtained from environmental sample
  misc_feature (1)..(987): n is a, c, g, or t
atgacagatcggccgagacctgatgttcaaacccatatcggcccggcggaggacacggccagcatcatctatctgcggccggaaaccgcccaggggatctacgtcaactataaaaatatcatccagtcaaaccggatgaagatacccttcggcatagcccagataggcaaggctttccgcaacgagattgtcaccaagaactttattttccgcacctgtgaatttgagcagatggaaatgcagttttttgtaaagccgggcagcgatgacgaatggtttaatgaatggagaaaacggcgctgggcctattacgggaagctgggagtcaaaatggatcatctccgctggcaccagcacgggccggacgaactggcccattacgcaaaggacgcctacgatatcgaatacctgtttcccatgggctggcgggaactggaaggcgtgcataaccgcaccaattacgaccttaaccgccatacccaatactccggcaaggatatgcagtatatcgaccaggacaataacaacgaacgttacattccctttatcattgagacttcggcgggccttacgcgtaacgtgctgatgatcctctgcgacgcctatgacgaagagcaggtagccgacaaaggcaacgacgacgattggcggaccgtattgcgcttccatccgagcctcgcccccgtcactgtggcggtgctgcccctgatgaaaaaagacggcctcgcggaacttgcccaggacatacgccgtgaattaaaagaagattttgcaaccgattacgatcaggcgggggccatcggcagacgctaccgccggcaggacgaggcgggcacgcctttctgcgtaaccgttgactaccagtccaaggatgacggcactgtcaccctgaggttccgcgattctatgaaacagatcagggtgccaaaatcggaactcacagcacggctgcgccaggagataaaagaatataaacgagtaaaataa

SEQ ID NO: 39116 - protein, 328 aa, Unknown
  Obtained from environmental sample
  DOMAIN (1)...(141): tRNA synthetase class II core domain (G, H, P, S and T)
  misc_feature (1)..(328): Xaa is any amino acid
MTDRPRPDVQTHIGPAEDTASIIYLRPETAQGIYVNYKNIIQSNRMKIPFGIAQIGKAFRNEIVTKNFIFRTCEFEQMEMQFFVKPGSDDEWFNEWRKRRWAYYGKLGVKMDHLRWHQHGPDELAHYAKDAYDIEYLFPMGWRELEGVHNRTNYDLNRHTQYSGKDMQYIDQDNNNERYIPFIIETSAGLTRNVLMILCDAYDEEQVADKGNDDDWRTVLRFHPSLAPVTVAVLPLMKKDGLAELAQDIRRELKEDFATDYDQAGAIGRRYRRQDEAGTPFCVTVDYQSKDDGTVTLRFRDSMKQIRVPKSELTARLRQEIKEYKRVK

SEQ ID NO: 39117 - DNA, 300 bp, Unknown
  Obtained from environmental sample
  misc_feature (1)..(300): n is a, c, g, or t
gtgcgaccaaagcatttaattacactgctggatattgtcagtttcaatccacgcacccgcaaagggtgcgaccgcgccacccaccgacagctatttccacatgatccgtttcaatccacgcacccgcaaagggtgcgacggccgcccaaactgattttccccaacactggaaaattgtttcaatccacgcacccgcaaagggtgcgaccgcattgctctatcatctgctctgaaaggtgggagtttcaatccacgcacccgcaaagggtgcgaccggtacttcatcccatgcaaggctaa

SEQ ID NO: 39118 - protein, 99 aa, Unknown
  Obtained from environmental sample
  misc_feature (1)..(99): Xaa is any amino acid
MRPKHLITLLDIVSFNPRTRKGCDRATHRQLFPHDPFQSTHPQRVRRPPKLIFPNTGKLFQSTHPQRVRPHCSIICSERWEFQSTHPQRVRPVLHPMQG

SEQ ID NO: 39119 - DNA, 453 bp, Unknown
  Obtained from environmental sample
  misc_feature (1)..(453): n is a, c, g, or t
ttgagcgaactgtcgaagaatatcggtggtttgaacaataggcttgggcagctgacagaggcgatgttttcagcggaattgtggaaaaagtttgacaagcaagggtacggctttaccaaacagtcgcatgacgttaagttcactgaaaacaaacaggttattgcggagtcagatttcttgcttgaagacgggacatatgtcatgcctgtggaggtcaagactgctctatccattgacgacataaacgggcatatagagcgtatagggataatccgccgttatatggacgcccgcggagacacccgcaaactggtgggcgccgccgccaccgcaattgtcaatgaaggcgtcatagcatacgcgcataagaaagggctttacgttttcgtgcagacaggcgacactgttgccatcgccgatactccgcatggcttcaaggcgcgggaatggtaa

SEQ ID NO: 39120 - protein, 150 aa, Unknown
  Obtained from environmental sample
  misc_feature (1)..(150): Xaa is any amino acid
MSELSKNIGGLNNRLGQLTEAMFSAELWKKFDKQGYGFTKQSHDVKFTENKQVIAESDFLLEDGTYVMPVEVKTALSIDDINGHIERIGIIRRYMDARGDTRKLVGAAATAIVNEGVIAYAHKKGLYVFVQTGDTVAIADTPHGFKAREW

SEQ ID NO: 39121 - DNA, 933 bp, Unknown
  Obtained from environmental sample
  misc_feature (1)..(933): n is a, c, g, or t
atgccaacgcgggcgncgcccacaaacgccatttcattctttcgtgacagcggaaagtactacacgtggatacggaatgaagggggaaaagaagtcggttattctgttatcgcttatattccctggatgttccagaatgattcaaatgccactgcggtgttcggcacggatggcaaagtaaagacaatcggaaatgacaacggtcccaccatcggcgcggaattccagcttaacactgctactgtgggcggcagccgggatgccattcttacctggaacgggattaacggtcagtcgtacaaccaggtcaagaattacggcaacgttaagatgattaccggcgatttgtctgcaagaaacattaaccgcgggaacaaagaccctgtttccgtaacaataacgtttgatacgaacggcggaacgcctgcaaacattaatcccatacaggttcccaagggccacgccgcgggcggcgcattccctgagaacccggtcaaaaataatttcaggtttaccggttggtatgacgaatctgttacgccgaataagaaatatgacttggctgtacctattaccaaaaaccttaccctcaaagcgcgctgggttgaaggtaccggtgatattgtattctctctggcggaatggctgttgaatcctccttctaccattaactccagcagcagtcccagacccctggcaagatctaccagtactgttaatcttgaagtagttgatgacagcgttaaagttactgtcacacccggtactactacaattagcgcatatcatggcgtggatttatttattgatgatagtaccgcttccggttcaaatggcggcggcgctggtttggatttggatcccaggaagtacatttatgaagtaaccgttaccggttatgtaattggtacgcctcctgctgggaacaaatga

SEQ ID NO: 39122 - protein, 310 aa, Unknown
  Obtained from environmental sample
  misc_feature (1)..(310): Xaa is any amino acid
MPTRAXPTNAISFFRDSGKYYTWIRNEGGKEVGYSVIAYIPWMFQNDSNATAVFGTDGKVKTIGNDNGPTIGAEFQLNTATVGGSRDAILTWNGINGQSYNQVKNYGNVKMITGDLSARNINRGNKDPVSVTITFDTNGGTPANINPIQVPKGHAAGGAFPENPVKNNFRFTGWYDESVTPNKKYDLAVPITKNLTLKARWVEGTGDIVFSLAEWLLNPPSTINSSSSPRPLARSTSTVNLEVVDDSVKVTVTPGTTTISAYHGVDLFIDDSTASGSNGGGAGLDLDPRKYIYEVTVTGYVIGTPPAGNK

SEQ ID NO: 39123 - DNA, 558 bp, Unknown
  Obtained from environmental sample
  misc_feature (1)..(558): n is a, c, g, or t
atggatgatagcgtaacaatagtacttgactcaaacgacctgctgtcggggatttgcggggccaatgacgggaacctcaagcttattgaggaatcccttggcgggcggatcgcggccagaggcaatgagatccggctggacggggtggatcatgacggggtactgcgcttcaaaaccatgatggataaccttatatccattgtaaaagagggcgaaatcccctcgcccgagtacatttcgacgcttgccggcactgttaacgtccctgatgattcgccttccaataccgttatacaaattccccacggattccgccggatttatcctcgcggcaaggggcaggcggaatatgtgcggggaatgagggcctgcgaggtctgtttctgcgtagggcccgcgggcactggcaaaacatacctggccgtcgccgaggcgatgaggctggttttgtcaaaaagccctgcgcaagctcgtgcttacgcgtcccgtggtcgaggccggagagaacctgggcttccttcccggcgacctgcccaaaaatcagcccctcggccataa

SEQ ID NO: 39124 - protein, 185 aa, Unknown
  Obtained from environmental sample
  misc_feature (1)..(185): Xaa is any amino acid
MDDSVTIVLDSNDLLSGICGANDGNLKLIEESLGGRIAARGNEIRLDGVDHDGVLRFKTMMDNLISIVKEGEIPSPEYISTLAGTVNVPDDSPSNTVIQIPHGFRRIYPRGKGQAEYVRGMRACEVCFCVGPAGTGKTYLAVAEAMRLVLSKSPAQARAYASRGRGRREPGLPSRRPAQKSAPRP

SEQ ID NO: 39125 - DNA, 834 bp, Unknown
  Obtained from environmental sample
  misc_feature (1)..(834): n is a, c, g, or t
gtgtttcatcatcattacctatggggcttttccgcccgctcgattcgtaccgtacaatactccatacgccttaccgggcagggggacggcttgcgcgccgcgttaatctcggacctgcacataggctcgggcgtggggaaaaagcacatagcgaaagttgttaatgttattaaccaggcaaatccggacattgtttttatcgcgggggatatttttgacgggaatctggaagcggtgcgtgatatgcccggcttagcggcggaattcaggcggatacaatcgccgctgggaatctacgcctgcctgggaaaccacgatgttgaccgcatgtccctttccggcggcggtacggagcggattgaggcttttttgcgggaagcggggataaccttattgcaggatgaatttgcggcaataggggacaatatgtacattgccgggcggaaagacgcccggcccatcggcatgaatgcgcggcgggaaaccgttgccgaactgttcgccgccattgacagaaccgccccgccggacagtgagatgccccgcacccttatcgtgctggatcaccagccgacgcagtatgctgaaattgagactgcgggcgcggacctggttctgagcggccatacgcacaggggccagcttttccccgccaacctgataaccaaaggcatgtaccgcaaaatgggggccgcccattacggctactggcggggcaacaccttacaggctgtgattacttccggtgcggggtactgggggccgccgctgcgggttgcaaccaacagtgaagtcgcgtttattaatctaacatttggggaggtcaccaaataa

SEQ ID NO: 39126 - protein, 277 aa, Unknown
  Obtained from environmental sample
  DOMAIN (31)...(213): Calcineurin-like phosphoesterase
  misc_feature (1)..(277): Xaa is any amino acid
MFHHHYLWGFSARSIRTVQYSIRLTGQGDGLRAALISDLHIGSGVGKKHIAKVVNVINQANPDIVFIAGDIFDGNLEAVRDMPGLAAEFRRIQSPLGIYACLGNHDVDRMSLSGGGTERIEAFLREAGITLLQDEFAAIGDNMYIAGRKDARPIGMNARRETVAELFAAIDRTAPPDSEMPRTLIVLDHQPTQYAEIETAGADLVLSGHTHRGQLFPANLITKGMYRKMGAAHYGYWRGNTLQAVITSGAGYWGPPLRVATNSEVAFINLTFGEVTK

SEQ ID NO: 39127 - DNA, 819 bp, Unknown
  Obtained from environmental sample
  misc_feature (1)..(819): n is a, c, g, or t
gtggtgcaggacggccaggtgcagatcgtcgatgaatttaccggacgcattttgcacggcaggcgctattcggacggcctgcaccaggcgatagaggcaaaagaacggataaagatcgcccagcgcaaccgcacgctggcgactatcaccttccagaattatttcaggctttacacgaaaatatcgggcatgaccggcaccgcggacacggaggccgccgaattcagcaagatttacaaactggaagttgtggttataccgaccaatctgcccgttgcccgtcatgatgaagacgacgtggtgtacctgaatgaaacagacaagtacaaggccctttgcgatgagattgcggaggcaaacaaaaaagggcagccgatgcttgtcggaacggtctcaatcgaaaaatcggagaaaatttccgcgctgctcacaaggcgcggcgtgcgccatgaagtgctgaacgccaagaaccacgcgcgcgaggcgctgataatcgcggaggccggagcgaagggatcggtgacaatcgcgacaaatatggcgggcaggggcacggacattaagctgggcggcagccccgaatcccgcgccagaagacgcgccggaacccaggcgacgccggaacaatacgcggccatgtacaatgaagaatacgagaaatggaaaaaagactatgaagaggtaaaatcgctgggcggcctttacgtcatcggcacggaacgccacgagagccgccgcatcgacaaccagcttcgcggccgttcgggccaggcagggggatcccggcaggagcaaattcttcatctccatggacgatga

SEQ ID NO: 39128 - protein, 272 aa, Unknown
  Obtained from environmental sample
  DOMAIN (1)...(32): SecA preprotein cross-linking domain
  misc_feature (1)..(272): Xaa is any amino acid
MVQDGQVQIVDEFTGRILHGRRYSDGLHQAIEAKERIKIAQRNRTLATITFQNYFRLYTKISGMTGTADTEAAEFSKIYKLEVVVIPTNLPVARHDEDDVVYLNETDKYKALCDEIAEANKKGQPMLVGTVSIEKSEKISALLTRRGVRHEVLNAKNHAREALIIAEAGAKGSVTIATNMAGRGTDIKLGGSPESRARRRAGTQATPEQYAAMYNEEYEKWKKDYEEVKSLGGLYVIGTERHESRRIDNQLRGRSGQAGGSRQEQILHLHGR

SEQ ID NO: 39129 - DNA, 1176 bp, Unknown
  Obtained from environmental sample
  misc_feature (1)..(1176): n is a, c, g, or t
ttggcgagcgactctcgcttggacgcggcgcggacggcttgccccgccggttggcatctgccgacagttcaggagtgggacgccttggttaaagcggccggcggcgaaaaaacggcgggcgcgaaattgaaagcggcttccggttggaatttttttggcaacggttggatacgtaccggcaacggcacggacgattacggtttctcggccctgcccggcggcaaacgttccggtgatttctacgatgtaagcagagaaggctactggtggacggctacggaggacgagaaacgggacgatcgcgcgcattaccggaaaatggacgtgaacagcacagagataaaatggggctactacggcgaaaacatcaagagcaacggactctctgtgaggtgcgttatagatgaggccgcgccgtacaaacttacgctgaccgccgcaaccggcggaagcgtctcggccgatcccgccaaggcctcctatatagccggagaaacggtttctataaccgccgtcccggagagagggtatttattcgcgaaatggacgggcgggaaagcggcggacagcgcctatgttactactaccgttacgatgaactcggatatggccataaccgccgtgttcaataagagcgccgcgccgcccgtcgcatacggcacgcttaccgacgcgcgggacggcaaaaagtacaaaacgacggtgatcggcggtaagagatggatggcggagaatctcaactatcaaacgccggagggttcgtggtgttacgatagaaaaacggataactgcgcaaagtacggcaggctgtacgactggaaaacggcgacgaccgcttgcccctccgggtggcatctgccttccaatcaggagtgggccgctctgatgacggctatgggcggtcacgccgtggccgcgagaaagctgaaagcggtaagcggttggtacaacaacggcaacggaacggatgagttcggtttcgcggcgacgcccggcggcaaccgccgcaacgacggcaaattctacggcataaacaacgacggcagctggtggtcgtccacggagaacgagggcgagcttgcgttctatcgcggcatattctacgcaagcgaaaaggtgtacgagttcaactacgactggggatacgggttctccgttcgttgcgtgcaagattaa

SEQ ID NO: 39130 - protein, 391 aa, Unknown
  Obtained from environmental sample
  misc_feature (1)..(391): Xaa is any amino acid
MASDSRLDAARTACPAGWHLPTVQEWDALVKAAGGEKTAGAKLKAASGWNFFGNGWIRTGNGTDDYGFSALPGGKRSGDFYDVSREGYWWTATEDEKRDDRAHYRKMDVNSTEIKWGYYGENIKSNGLSVRCVIDEAAPYKLTLTAATGGSVSADPAKASYIAGETVSITAVPERGYLFAKWTGGKAADSAYVTTTVTMNSDMAITAVFNKSAAPPVAYGTLTDARDGKKYKTTVIGGKRWMAENLNYQTPEGSWCYDRKTDNCAKYGRLYDWKTATTACPSGWHLPSNQEWAALMTAMGGHAVAARKLKAVSGWYNNGNGTDEFGFAATPGGNRRNDGKFYGINNDGSWWSSTENEGELAFYRGIFYASEKVYEFNYDWGYGFSVRCVQD

SEQ ID NO: 39131 - DNA, 582 bp, Unknown
  Obtained from environmental sample
  misc_feature (1)..(582): n is a, c, g, or t
atgaagaagtttttcaattatataaaagcgcgcccggtggcaatggtgtcgcttgtatgtctggctatcctctaccttatgatgctctttgccgaattttttgctccttattcgcctaacacctctttctcggacaaaagctaccacccgcctaacgtccgcttttatcagtggaaacttcaggcgcaggaatggcgaataacaaactcggtgacgtggaaatacgcccgtgtccgcggccaatactcggcgcttcattttttcggcaaaggagagccttatcttttgtggggcttaattccgttagaaaggcatttattgacaactgaagcgtccgattaccctattttccttatgggcgccgataacctgggcagggatcttttttcccgcattgtccacggctcgcgcgtctcgctgacaataggctttgttgcgacggccatatcgctcgctcttgccgggttagcgggcggtctttccggatttttcggcggcatcacggactggactatcatgagaacctcggaatttttaatgttaatcccaaccctctacctgatactgttcctgcgctcataa

SEQ ID NO: 39132 - protein, 193 aa, Unknown
  Obtained from environmental sample
  SIGNAL (1)...(28)
  misc_feature (1)..(193): Xaa is any amino acid
MKKFFNYIKARPVAMVSLVCLAILYLMMLFAEFFAPYSPNTSFSDKSYHPPNVRFYQWKLQAQEWRITNSVTWKYARVRGQYSALHFFGKGEPYLLWGLIPLERHLLTTEASDYPIFLMGADNLGRDLFSRIVHGSRVSLTIGFVATAISLALAGLAGGLSGFFGGITDWTIMRTSEFLMLIPTLYLILFLRS

SEQ ID NO: 39133 - DNA, 822 bp, Unknown
  Obtained from environmental sample
  misc_feature (1)..(822): n is a, c, g, or t
atggacgagcgagaacgacttgggcttgacagccttttatgttcatatttccgctggctaaaccgcgtaatcgtccacaaagacctgggggtaagccttatttcgcgcgctccggtctcgttccttatcgcctcgcgcattttaaattcgcttcttcttaacataatatcccttgtgctgattacctttttttctttcgcggcgggcatctatttttccaccaaggcgggaacaaaagccgacatagctgtaacattcttcgctcttgtgcttcacgccttcccggggcttttgctccttatccttcttcagctgttcgcttccgtaaccgggctttttcccgtaaccgcctaccctcctttcccgttttcatccgcgcctgttaaatttgtcttctcttacgcgtaccacattttcctgccgctgttgtccgcttttctgggcggaataggcggctccctgcgcatgatacgcgcgactatgctcgaccagcttggacagccgtacatcacaagcctgcgctcccgaggcatagccgaatggcgcgtatatttcgcccacgccttccgcaacactttgaatccctacatcacaggaagcgcgaatctcctggcaagccttttttcaggctcgcttattctggaaattattttcgcttaccccggcataggaagattgatgtacgaggctgtaatccaacaggacattaatcttgtgcttgccaatattatgtttatctcattccttgtgctggtcggaatggcgttagctgacatcactctcgcctttgtagatccccgcatcaggtacgggaaagagtaa

SEQ ID NO: 39134 - protein, 273 aa, Unknown
  Obtained from environmental sample
  DOMAIN (47)...(270): Binding-protein-dependent transport system inner membrane component
  misc_feature (1)..(273): Xaa is any amino acid
MDERERLGLDSLLCSYFRWLNRVIVHKDLGVSLISRAPVSFLIASRILNSLLLNIISLVLITFFSFAAGIYFSTKAGTKADIAVTFFALVLHAFPGLLLLILLQLFASVTGLFPVTAYPPFPFSSAPVKFVFSYAYHIFLPLLSAFLGGIGGSLRMIRATMLDQLGQPYITSLRSRGIAEWRVYFAHAFRNTLNPYITGSANLLASLFSGSLILEIIFAYPGIGRLMYEAVIQQDINLVLANIMFISFLVLVGMALADITLAFVDPRIRYGKE

SEQ ID NO: 39135 - DNA, 978 bp, Unknown
  Obtained from environmental sample
  misc_feature (1)..(978): n is a, c, g, or t
atggaatgtatgagtaaattagaggaaatagcccgtgttcgcattgcggatgtgcgcgggcgcattgttaaaataataggactggttattgaatgcgaaggaccaaatgcgggaattggcgagctttgcgttatagaacaaaacggaaaagctatctgcaatgcagaagttgtgggctttagagaaaccagaactctaattatgccacttggaccccttgaaggaattagacccggaatgtctgttgtggcaaaaggcgataccctaagcgcacctgttggggaagaacttttgggcagagttatagatggaatgggaaacccaatggacgggcttggcgacattaaatacgatgggcgccgctccatttacgcagagccgccttccgctatgcagagaacgcgcataaaagaccccatgttcacagggcttagagccatagacggctttttaaccattgggcgcgggcagaggatgggcatattcgcaggctccggtgttggcaaaagcgtgacgatgggcatgatagccaggaactgccttgcaaaggtaaatgttatagccttgataggcgaacgtggcagagaggttagggaatttatagaaaaggatttggggccggaagggataaagcgctccgtggttatagttgcaacaagcgaccagcccgcccttatccgtttaaaagcgagctttttggctatgagcatagcggagtatttcagagacgctggcgaggatgtgttctttttgatggactcggtgacgcgcctggctatggcgcaacgcgagataggcttggcggttggcgagccgcccgccacaaaaggctacaccccatctgtttttgcgtttttgccaaagctctttgaacgggcgggcaatagcagcaaagggagcataacggggctttacaccgttttggttgacggagacgacttggacgaccctatagcagatgccgtgcgttccatttag

SEQ ID NO: 39136 - protein, 325 aa, Unknown
  Obtained from environmental sample
  DOMAIN (22)...(86): ATP synthase alpha/beta family, beta-barrel domain
  misc_feature (1)..(325): Xaa is any amino acid
MECMSKLEEIARVRIADVRGRIVKIIGLVIECEGPNAGIGELCVIEQNGKAICNAEVVGFRETRTLIMPLGPLEGIRPGMSVVAKGDTLSAPVGEELLGRVIDGMGNPMDGLGDIKYDGRRSIYAEPPSAMQRTRIKDPMFTGLRAIDGFLTIGRGQRMGIFAGSGVGKSVTMGMIARNCLAKVNVIALIGERGREVREFIEKDLGPEGIKRSVVIVATSDQPALIRLKASFLAMSIAEYFRDAGEDVFFLMDSVTRLAMAQREIGLAVGEPPATKGYTPSVFAFLPKLFERAGNSSKGSITGLYTVLVDGDDLDDPIADAVRSI

SEQ ID NO: 39137 - DNA, 456 bp, Unknown
  Obtained from environmental sample
  misc_feature (1)..(456): n is a, c, g, or t
gtggcgggcggctcgccaaccgccaagcctatctcgcgttgcgccatagccaggcgcgtcaccgagtccatcaaaaagaacacatcctcgccagcgtctctgaaatactccgctatgctcatagccaaaaagctcgcttttaaacggataagggcgggctggtcgcttgttgcaactataaccacggagcgctttatcccttccggccccaaatccttttctataaattccctaacctctctgccacgttcgcctatcaaggctataacatttacctttgcaaggcagttcctggctatcatgcccatcgtcacgcttttgccaacaccggagcctgcgaatatgcccatcctctgcccgcgcccaatggttaaaaagccgtctatggctctaagccctgtgaacatggggtcttttatgcgcgttctctgcatagcggaaggcggctctgcgtaa

SEQ ID NO: 39138 - protein, 151 aa, Unknown
  Obtained from environmental sample
  misc_feature (1)..(151): Xaa is any amino acid
MAGGSPTAKPISRCAIARRVTESIKKNTSSPASLKYSAMLIAKKLAFKRIRAGWSLVATITTERFIPSGPKSFSINSLTSLPRSPIKAITFTFARQFLAIMPIVTLLPTPEPANMPILCPRPMVKKPSMALSPVNMGSFMRVLCIAEGGSA

SEQ ID NO: 39139 - DNA, 786 bp, Unknown
  Obtained from environmental sample
  misc_feature (1)..(786): n is a, c, g, or t
atggccgaggttcggacagaacgcgccgccgtggagttatacaacgctatcgagggaacaaactacgagcctgaagctgtgtctatggtaacgttggaggacacgctgtacataacgccggtaaatgacattgcgttcacgataggcaacaaatttgtggtgatgatcgaacatcaatcgactataaaccccaatatgccgctcagaatgttgctctatatagcaatgtgttacatacagttgactgatgatgtggatatatacggacgtacacggaagacaatcccccgcccggagtttatcgtattgtataacggcgaggaagaaagaccggacgtagaggtgctgaaactgtcgggtatgtttgccgcctgcgatatggaataccctataaatcttgagctaattgtacgtgtgtacaacataaataaaggccgtaaccctgaaatggcgcggaaaagcgtgacgctcaacggatatgaggtatttacggccaaagttcgcgaatacgaaaaaacgatgccctttgaacacgcgtttgcccgtgctactgatgagtgtataaaagatggttttttggcggatttcttaacccttaatagaaaggcggtacaaaatatgctgacagccgaatgggattccgaagtagaaaagagagtcataagagatgatgcttttttggaggcgaatataaaggttgcgcgtcgccttaaagccaaaggtatgagcgtagatgagattatcgaactaaccgaactttcggtagacgatgttttaaaggcatga

SEQ ID NO: 39140 - protein, 261 aa, Unknown
  Obtained from environmental sample
  misc_feature (1)..(261): Xaa is any amino acid
MAEVRTERAAVELYNAIEGTNYEPEAVSMVTLEDTLYITPVNDIAFTIGNKFVVMIEHQSTINPNMPLRMLLYIAMCYIQLTDDVDIYGRTRKTIPRPEFIVLYNGEEERPDVEVLKLSGMFAACDMEYPINLELIVRVYNINKGRNPEMARKSVTLNGYEVFTAKVREYEKTMPFEHAFARATDECIKDGFLADFLTLNRKAVQNMLTAEWDSEVEKRVIRDDAFLEANIKVARRLKAKGMSVDEIIELTELSVDDVLKA

SEQ ID NO: 39141 - DNA, 900 bp, Unknown
  Obtained from environmental sample
  misc_feature (1)..(900): n is a, c, g, or t
atgcgtttcagatatagcgaagaaaacggcaggctggttaaaaaagctctggtgtataccgccgatgagcatgggatcagcattgatgatgttgataaagaagcgataagcatagtacacaggctgaaagaagcgggctacgacagttacattgtcgggggcgcggtaagggatctgctcctgaaaaaaaagcccaaggactttgacatagtcagcgaggcaatccccacgcgaataaaaaaaatcttccgcaattcccgcataatcggaaggcggttcaaactggtccatgtgtactttggcccaaggatttttgaagtctcaaccttccgttccctgaaaaacggcctgaccagcaatactttcggatcgataatcgaagacgtgctccgccgcgactttaccatgaacgccctgttttacgatcctgtacagcagacggtcgtggactatgtcggcggcataaaggatattaaggccaaactggtcagacccattatccccctttcacaaatttttattgatgaccccgtgcggatgatccgagcggtaaaatacggaaccagcaccgggtttaccctgcccctcacgctcaaatggaagatcaaaaaacagtcccacttgctttcaacaatttcaccttcccgcctgacagaagaaattttcaagataatccaatcgccgcaggccgcgcgtattgtcgaatccctggatacaatgggcctgtacccctacctccagccggaggccgcaagactgatgagggagccgggatcatttcgcggacgctacctgcgaagcatgacggccatgagcaagcccggcttcaagaacctgcccggcgaagcgctgggggcaaagataaccgactatcttgaggacattattgattggccctaa

SEQ ID NO: 39142 - protein, 299 aa, Unknown
  Obtained from environmental sample
  DOMAIN (107)...(256): Poly A polymerase family
  misc_feature (1)..(299): Xaa is any amino acid
MRFRYSEENGRLVKKALVYTADEHGISIDDVDKEAISIVHRLKEAGYDSYIVGGAVRDLLLKKKPKDFDIVSEAIPTRIKKIFRNSRIIGRRFKLVHVYFGPRIFEVSTFRSLKNGLTSNTFGSIIEDVLRRDFTMNALFYDPVQQTVVDYVGGIKDIKAKLVRPIIPLSQIFIDDPVRMIRAVKYGTSTGFTLPLTLKWKIKKQSHLLSTISPSRLTEEIFKIIQSPQAARIVESLDTMGLYPYLQPEAARLMREPGSFRGRYLRSMTAMSKPGFKNLPGEALGAKITDYLEDIIDWP

SEQ ID NO: 39143 - DNA, 1122 bp, Unknown
  Obtained from environmental sample
  misc_feature (1)..(1122): n is a, c, g, or t
atgatggactccgcgaatatccaggcgcatgacgcaatatatttaaaggcgcaagctcaaaagaaaggagaaaagtttgactggacgccgctttacacggaacaagacgcaatagcggcagttggtcagacaattggtatttcgtataacaggcctatgtttataggagacggagtaagtcttgaattctacgatgcgggacatattctcggctctgctattgccgccataaaaataaaaaaaggcggcgaagaattgaatatccttgcgacaggagaccttggccgcaaaggtaagcctattatccgcaatccggcaattcccgaagttgcgcctgattacatcattcttgaaagcacctacggcgatcgtatgcatgattcctccgatgacgctgttaaaaagctcgctgaaatagcaaaacgggttgtaaaaaacaaagggaagataattatcccttcatttgcgattgaacgcacccaggaacttgtttactattttcatctgctggttgatgacggagtaattcccgaaataccgatctttgtcgattcgccgatggcgactaacgcgaccacgatttttcaggtacaccccgagtgttacggtgaagaaataaaagaggcttttatcaaacatcacaaaaacccgtttggctttaacagccttcattttacaaccagcgtacaggaatcaaaggatttaaatgatcatcaaggaccgcttatcatcatttccgcggacggaatgtgcgaagccgggcgtattcagcatcaccttattcataatatacaggacaccaacacaactatcatgactgtcggctacatggcggaaaacacgctgggcaggcgcatacgcaatcgtgagagcgaagttaaaatccacggtgaatggttcaagctaaaagcgcaggtagaagaaattaacgcattcagcgcccatgccgattataaagaaatgctggaatggctgaaagaagtcgatacttcgcgtttgaaaggaatatttcttgtacacggtgaaaaaaaatctcaagctttcctgaaaaaataccttgaagaaaacggattcccgaatgttaatattgtaaaatacgggaaaacatacgaactaagttga

SEQ ID NO: 39144 - protein, 373 aa, Unknown
  Obtained from environmental sample
  DOMAIN (298)...(344): RNA-metabolising metallo-beta-lactamase
  misc_feature (1)..(373): Xaa is any amino acid
MMDSANIQAHDAIYLKAQAQKKGEKFDWTPLYTEQDAIAAVGQTIGISYNRPMFIGDGVSLEFYDAGHILGSAIAAIKIKKGGEELNILATGDLGRKGKPIIRNPAIPEVAPDYIILESTYGDRMHDSSDDAVKKLAEIAKRVVKNKGKIIIPSFAIERTQELVYYFHLLVDDGVIPEIPIFVDSPMATNATTIFQVHPECYGEEIKEAFIKHHKNPFGFNSLHFTTSVQESKDLNDHQGPLIIISADGMCEAGRIQHHLIHNIQDTNTTIMTVGYMAENTLGRRIRNRESEVKIHGEWFKLKAQVEEINAFSAHADYKEMLEWLKEVDTSRLKGIFLVHGEKKSQAFLKKYLEENGFPNVNIVKYGKTYELS

SEQ ID NO: 39145 - DNA, 1110 bp, Unknown
  Obtained from environmental sample
  misc_feature (1)..(1110): n is a, c, g, or t
atgaaccgcgtaaaccgtatctttatcgagcttatgcttgaaggggacgcggaaggtcggggcttccaataccccattccgacttacaacattacttccgattttgactgggaaagcgataacgcgcggctgctttttgagatgacttcccgttacgggactccgtactttcagaatttcgtcaattccgaccttaacccttccgacgtgcgttccatgtgctgccgccttcaactggacaaacgggaactcagaaagcgcggcggcggcctctttggctccgacgagcttaccggttccatcggggttgttaccatcaaccttccccgaatcggctacttggccaaagacgaggaagatttttaccgccgcatcgagcggcttatggtactggcaaaggacagcctcaggatcaaacgaaagatcgtcagtcgtcttctggagggcggtctctttccatataccaggcggtaccttaaaaacctggataatcactttagtaccattgggctggtcggaatgaacgaatgtctgttaaatttccttggcagggaattcaacatagccaccgagaggggccgctcctttgcccttaatgtcctgggctttatgcggaacaagctcgcggactttcaggaggaaacaggggaactcttcaaccttgaagccacccccgccgaatctacctcttacaggcttgccaggcacgacaaaaagaaatacccgcgcattatcagcgccggaaaagcagagccttactatactaactcaacccagctccctgtaatggaaaccgacgacatctttgaagccctggatctgcaggaaaagctccagaccgcctataccggcggcaccgtttttcattgcttcctcggcgaagctattgaagactggcgggtttgcagggatcttgtcagaacaatagccggcaagtaccggattccttattttaccatttcgcctaccttttcggtgtgccccgtccacgggtatctgaagggcgagcatttttcctgccagaagtgcagggaagaaaaagaaaacgaactccgcgagaaaatcgcggtgttggaagaagagcgggaagcagttttggcgtcgctttag

SEQ ID NO: 39146 - protein, 369 aa, Unknown
  Obtained from environmental sample
  misc_feature (1)..(369): Xaa is any amino acid
MNRVNRIFIELMLEGDAEGRGFQYPIPTYNITSDFDWESDNARLLFEMTSRYGTPYFQNFVNSDLNPSDVRSMCCRLQLDKRELRKRGGGLFGSDELTGSIGVVTINLPRIGYLAKDEEDFYRRIERLMVLAKDSLRIKRKIVSRLLEGGLFPYTRRYLKNLDNHFSTIGLVGMNECLLNFLGREFNIATERGRSFALNVLGFMRNKLADFQEETGELFNLEATPAESTSYRLARHDKKKYPRIISAGKAEPYYTNSTQLPVMETDDIFEALDLQEKLQTAYTGGTVFHCFLGEAIEDWRVCRDLVRTIAGKYRIPYFTISPTFSVCPVHGYLKGEHFSCQKCREEKENELREKIAVLEEEREAVLASL

SEQ ID NO: 39147 - DNA, 1395 bp, Unknown
  Obtained from environmental sample
  misc_feature (1)..(1395): n is a, c, g, or t
atgcaggttcaaatgcttatcgttatggccctgcaattggttatcaaagcccccatcatggcggtatgggccatcacaaaaatcctgggcaaaggctatgaatggtcgatggccaccggcgttggcatcatgatcttgttagtgatggttacgatactcatgatattcgtaatgccaaaattcaaaaagatgcagactctgatcgataacgtcacccgcgttaccagagaaaatttgaccggcctgcgtgttgtgcgggcgtacaacgccgaagattatcaggaaaataaatttgaggcggccaacaaggaacttacaggtacccaactgtttacaaaccgtgctttggccttaatgatgccggttatgcagttaatgatgggcggactgtcgctcgcgatttactggataggcgcgtatcttatcaatgaggcgggcgcaatggacaaattgaccatattctcgaatatggttgtgttttcaaattatgccgtgcaagtcattatgtcgtttatgatgcttgtaatgattttcattatgctgccccgcgccagcgtttcggcaaaacgtatcaatgaagtgctggatacaaaaccgcaaatattggacggcggcgaaatcggcggccagccaaacatttcaggcgagatcgaattcaggtccgtcagcttcaggtatccggacgcggcgaaacctgtcattgaagatataagttttacggcgaaacgtggtcaaaccgtcgcttttatcggctctaccggcagtggaaaatcaacgctgatcaaccttatcccacgtttttatgatgcaaccgaaggcgaagtgttgattgacggcgtaaatgtaaaggattacaaactggaatcgcttttgaataaaatcggatatgtcccccaaaaggctgttttatttaaaggcacggtggaatccaacgtggcctatggcgataacggcaaagaggtatacgatatcggcgatgtgaagaaagccgttcaaatcgcccaagccgcggattttgttgaaaaaatggacggtatatacgacgcgtcaatatcgcaaggcggagccaatatttcaggcggccagaagcaacggcttgccattgcccgcgctgtgtgccgcaagccggaaatctacatcttcgacgattcgttttcggctcttgactataaaaccgaccgcgcgttgcgcagtgaactgaaaagagagactgcgggagtaacaaacctgatcgtcgcgcagaggattggcacaatcatggacgcggatcagatcatcgtgcttgatgaaggcaaaattgtcggcaaaggaacccacaaggaattgctccgtgactgcgccgtatataaagaaatagccatgtcccagttaagcgaggaggaattggcatcatga

SEQ ID NO: 39148 - protein, 464 aa, Unknown
  Obtained from environmental sample
  DOMAIN (244)...(431): ABC transporter
  misc_feature (1)..(464): Xaa is any amino acid
MQVQMLIVMALQLVIKAPIMAVWAITKILGKGYEWSMATGVGIMILLVMVTILMIFVMPKFKKMQTLIDNVTRVTRENLTGLRVVRAYNAEDYQENKFEAANKELTGTQLFTNRALALMMPVMQLMMGGLSLAIYWIGAYLINEAGAMDKLTIFSNMVVFSNYAVQVIMSFMMLVMIFIMLPRASVSAKRINEVLDTKPQILDGGEIGGQPNISGEIEFRSVSFRYPDAAKPVIEDISFTAKRGQTVAFIGSTGSGKSTLINLIPRFYDATEGEVLIDGVNVKDYKLESLLNKIGYVPQKAVLFKGTVESNVAYGDNGKEVYDIGDVKKAVQIAQAADFVEKMDGIYDASISQGGANISGGQKQRLAIARAVCRKPEIYIFDDSFSALDYKTDRALRSELKRETAGVTNLIVAQRIGTIMDADQIIVLDEGKIVGKGTHKELLRDCAVYKEIAMSQLSEEELAS

SEQ ID NO: 39149 - DNA, 375 bp, Unknown
  Obtained from environmental sample
  misc_feature (1)..(375): n is a, c, g, or t
atgaaagctgttgaactggaaaaagcctatgatccgaaaggatttgaaaagagaatttacgcgctctggaaaaaagccggagcctttaaaccggaaaacgctaccggtggaaaaaatgttgaagataaatacgtcattgtaattcctccgccgaatgtcacgggcgttcttcacgccggacacgggcttaacaacagtttacaggacattattgtccgcttccaccgcatgacaggcgttcccgctctttgggttccgggaactgatcacgcgggaatagcgactcnaaacgtggtggaacgcaagttaaaagaaaagggaaaaagccgccgtgagcttggacgcgaaaattttcttgagaaacatggaaagtaa

SEQ ID NO: 39150 - protein, 124 aa, Unknown
  Obtained from environmental sample
  misc_feature (1)..(124): Xaa is any amino acid
MKAVELEKAYDPKGFEKRIYALWKKAGAFKPENATGGKNVEDKYVIVIPPPNVTGVLHAGHGLNNSLQDIIVRFHRMTGVPALWVPGTDHAGIATXNVVERKLKEKGKSRRELGRENFLEKHGK

SEQ ID NO: 39151 - DNA, 555 bp, Unknown
  Obtained from environmental sample
  misc_feature (1)..(555): n is a, c, g, or t
gtgtatacctcatcgcctttgaacggattatcggtcggcgaccacgataccgagccaatggtaaaattaccattatcttctacagttgcggttgtacttggcgctgcgcctttaaccggagcggtaacaactatggcggttgtttttataacagtattcccgccactgggattattaccaccaccgggattattaccaccaccgggagtattcccgccaccgggagtattaccaccaccgggagttgtcccgccgccgggagtcgacccaccgccagaggtggtagtagatatatccccaacctcattacaccccgccagcgcaaaaaccaacattaccgctaaaatcgcaatacctaaacctttaaccgctattttcataaaaacaccccttataggtaaaatcctttataaagctgtatataaaaaacgtccgtttttactaacgctgtttataggttttttgtatgatttttggggaaaaatcttttatttgtgttttatgaatttttgctttttatatataaattttgtatatttacttgataaaaaatga

SEQ ID NO: 39152 - protein, 184 aa, Unknown
  Obtained from environmental sample
  misc_feature (1)..(184): Xaa is any amino acid
MYTSSPLNGLSVGDHDTEPMVKLPLSSTVAVVLGAAPLTGAVTTMAVVFITVFPPLGLLPPPGLLPPPGVFPPPGVLPPPGVVPPPGVDPPPEVVVDISPTSLHPASAKTNITAKIAIPKPLTAIFIKTPLIGKILYKAVYKKRPFLLTLFIGFLYDFWGKIFYLCFMNFCFLYINFVYLLDKK

SEQ ID NO: 39153 - DNA, 456 bp, Unknown
  Obtained from environmental sample
  misc_feature (1)..(456): n is a, c, g, or t
atggtaactgtattacaacgggtttccaacgcgagcgtctccgtagacggcaaagtcgtcggttctattgacaaggggatattgatattagtcggcgttcacaaagacgacggcgagcccgacgctgactttctggcagccaagtgcgccggcctgcgtatcttccccgacgacaccgggaagatgaacctctccgtcaaagagataaacggttcggcgctggtcatatcgcagttcacgctgctgggcgactgctccaaaggccgcagaccgaacttcaccgcagccgcgccgccggagaaggggcggctgctgtacgcacgcttcgtcgagaaactgaaagaacatctaccaaaggtggagaccggcatcttcggggcggacatgaaggtcagtctgctgaacgacgggccggtgacggtcgtgatcgacagctgttctaaggcaacagcatga

SEQ ID NO: 39154 - protein, 151 aa, Unknown
  Obtained from environmental sample
  DOMAIN (28)...(145): D-Tyr-tRNA(Tyr) deacylase
  misc_feature (1)..(151): Xaa is any amino acid
MVTVLQRVSNASVSVDGKVVGSIDKGILILVGVHKDDGEPDADFLAAKCAGLRIFPDDTGKMNLSVKEINGSALVISQFTLLGDCSKGRRPNFTAAAPPEKGRLLYARFVEKLKEHLPKVETGIFGADMKVSLLNDGPVTVVIDSCSKATA

SEQ ID NO: 39155 - DNA, 831 bp, Unknown
  Obtained from environmental sample
  misc_feature (1)..(831): n is a, c, g, or t
gtgcactatctggacccacaaagccaggaaataagaattgaaacggtacgcgaggccctgtccagcattggtcagagtatttcggttcaaaatctggggcagcctcgtgatcgccattttatgatccgccttcaggataagggaattgaaaaggaaacttctgccgaaggcggaccgacggcagaagcccccggcgaaaggatcaccagggttctggaaaattatttcggaaccggcgaagtagtagtactccgttcagattatgtcggctcgcgtttttccaaaaacctcaccgatcaggctgggattttactggcctttaccctgctgctgatattgatttacgcgtccatccggtttaaaccgcaatacgccattggcgctgtactcggcattatgcatgactgccttgttataatatcatttgtggtctggaccagaatggaatttaacaccaccaccatcgccgccattctcacgatactcggttattcgatcaataacaccattgttattttcgacaggatgagggaaaaccgacgtctttaccccgatgaagtttttgtaaccgtacttaaccgttccttaacggaaacgctgagcagaacaattataacaacattaacaacaatgctggcggttctttcactgttcatctttacaacaggctccatgaaggactttgccctggccctgcttgtgggccttgtctcaggcgtttacacgacaactttcatcgccccaggctttgtgtatctctgggataaagagaagacaaaacgggcgaagaagaaaattgctgcgccgcaagccaagggcgcgcttgcctag

SEQ ID NO: 39156 - protein, 276 aa, Unknown
  Obtained from environmental sample
  DOMAIN (71)...(257): Protein export membrane protein
  misc_feature (1)..(276): Xaa is any amino acid
MHYLDPQSQEIRIETVREALSSIGQSISVQNLGQPRDRHFMIRLQDKGIEKETSAEGGPTAEAPGERITRVLENYFGTGEVVVLRSDYVGSRFSKNLTDQAGILLAFTLLLILIYASIRFKPQYAIGAVLGIMHDCLVIISFVVWTRMEFNTTTIAAILTILGYSINNTIVIFDRMRENRRLYPDEVFVTVLNRSLTETLSRTIITTLTTMLAVLSLFIFTTGSMKDFALALLVGLVSGVYTTTFIAPGFVYLWDKEKTKRAKKKIAAPQAKGALA

SEQ ID NO: 39157 - DNA, 312 bp, Unknown
  Obtained from environmental sample
  misc_feature (1)..(312): n is a, c, g, or t
gtggattgcattttggacggcaatgagttttatatctacgaaagtgatgaaaaaaatgcgaggtttgtggaaaccagaaaagtagttaagtattgcaatggtcctcaatgcgaaaacaaagaggagagatggaattctgttatacacgctatttccgactgcgaagcggtgcttgcggttagaattggcccaacgccggaaaagcgcttaaaagaaaacggcattggagcgattacgacttatgaaagagtagaaacagccgttttgcaagcggcaaaagaaaaacggaggaacactcatggtacaacctaa

SEQ ID NO: 39158 - protein, 103 aa, Unknown
  Obtained from environmental sample
  DOMAIN (1)...(93): Dinitrogenase iron-molybdenum cofactor
  misc_feature (1)..(103): Xaa is any amino acid
MDCILDGNEFYIYESDEKNARFVETRKVVKYCNGPQCENKEERWNSVIHAISDCEAVLAVRIGPTPEKRLKENGIGAITTYERVETAVLQAAKEKRRNTHGTT

SEQ ID NO: 39159 - DNA, 309 bp, Unknown
  Obtained from environmental sample
  misc_feature (1)..(309): n is a, c, g, or t
atggtacaacctaagtatcacatctttgtctgcggaagctcccgcatcaatggaacgcaaatgggcacttgctttcaaaagaaagcggttggcttggtgcagaagttcatgcaggaaattgaggagagagacatatcgtctgactgcttggtgaccaataccggatgttttggcatctgcgataaaggcccaattgcggttgtatatcccgaaggcgtatggtacggcaaccttgacgaggcaaaaattgaggaaatttgtgaaaagcatttggaaggcggagttccggtagaggaatacaaaatttaa

SEQ ID NO: 39160 - protein, 102 aa, Unknown
  Obtained from environmental sample
  misc_feature (1)..(102): Xaa is any amino acid
MVQPKYHIFVCGSSRINGTQMGTCFQKKAVGLVQKFMQEIEERDISSDCLVTNTGCFGICDKGPIAVVYPEGVWYGNLDEAKIEEICEKHLEGGVPVEEYKI

SEQ ID NO: 39161 - DNA, 696 bp, Unknown
  Obtained from environmental sample
  misc_feature (1)..(696): n is a, c, g, or t
ttgaaatggaggttgatgttattgagctttcagagaaaatgcacgagttgctgtctccgttgcctgaatatccggcctacattttgcaccccgaaaaacacgcatacaagggctagacgatgcactatgcggcgattattgcaaacattcaagcatttaaaaagcaattttgaattttgcccggagaacagctttcactgcgcaaccgctttggcggcagaatgggtgataagcggtgcaggaaaaaatatagtgagttctcttagtggcattggcggctatgcagcgaccgaagagctgattatgattttgaaaataaacggacttcgcaaaccgaacaaaacctacaattttcttcccgaaatgacaaaattatattccaaaataacaacaaaaaagttaccgaaaaacaagcccattataggcagtaaaatatttgaagtggaatctggagttcacgttgacggaattttaaaaaatcctgcaagctatgagccgtttccaccggaaagcgtggggcagaagcggagaattgtgctgggaaaacacagtggcacagcctcaatgcgcgcaaagctcgcagaactaaaaataaaatatgtagagaaagatattgtgtatattcttgaacaggttaaaatgaaagctctgcaaaaaaaaggcgaattgaacagccgagaatttggaaaatcgtaa

SEQ ID NO: 39162 - protein, 231 aa, Unknown
  Obtained from environmental sample
  misc_feature (1)..(231): Xaa is any amino acid
MKWRLMLLSFQRKCTSCCLRCLNIRPTFCTPKNTHTRARRCTMRRLLQTFKHLKSNFEFCPENSFHCATALAAEWVISGAGKNIVSSLSGIGGYAATEELIMILKINGLRKPNKTYNFLPEMTKLYSKITTKKLPKNKPIIGSKIFEVESGVHVDGILKNPASYEPFPPESVGQKRRIVLGKHSGTASMRAKLAELKIKYVEKDIVYILEQVKMKALQKKGELNSREFGKS

SEQ ID NO: 39163 - DNA, 705 bp, Unknown
  Obtained from environmental sample
  misc_feature (1)..(705): n is a, c, g, or t
gtgcgggacatcagaagctacaaccgccggatcagggaacgaagccttgccgtgtcgcacatcccgtacattgtcgtgatcatcgacgaattcgccgaccttatggccaccaccggcaaggaactggagtccaccgtggcccgccttgccgccatgagccgcgccgtgggaattcacctggtactggccacgcagcggccttccattgacgtaattaccggccttatcaaggcgaacatccccagccggatcgcctttatggtcgccagcaaaatggacagccggattatcatcgacatggtgggagccgaaaaactcctgggcaaaggggacatgctgtattcgggcgcggttgacccgttccccatcaggatgcagggagcctatatttccgaggaagaagtggagcaggtggtcgagtatgttaaaacgctgggcgagcctgagtacattgacgatgaaatgttctacgacgaggatgacgatgacgcggggcagtccctttttgccgaaggaaacgatcccctgtacgacaaggcgctggaaatagtgttacagcagggcaaggccagcgccagctacatccagcgccgccttaaaatcggctacaaccgcgccgcccgccttgtggaagaaatggaacaacgcggcgtggtgggcccgccccagggctcgcgcccacgggaactgctccgggccggataa

SEQ ID NO: 39164 - protein, 234 aa, Unknown
  Obtained from environmental sample
  misc_feature (1)..(234): Xaa is any amino acid
MRDIRSYNRRIRERSLAVSHIPYIVVIIDEFADLMATTGKELESTVARLAAMSRAVGIHLVLATQRPSIDVITGLIKANIPSRIAFMVASKMDSRIIIDMVGAEKLLGKGDMLYSGAVDPFPIRMQGAYISEEEVEQVVEYVKTLGEPEYIDDEMFYDEDDDDAGQSLFAEGNDPLYDKALEIVLQQGKASASYIQRRLKIGYNRAARLVEEMEQRGVVGPPQGSRPRELLRAG

SEQ ID NO: 39165 - DNA, 330 bp, Unknown
  Obtained from environmental sample
  misc_feature (1)..(330): n is a, c, g, or t
gtggaactcgcgctcatgcagggctatgacctgatcgtcgccaccggcggcaccggcctcggcccgcgcgatcgctcgccggaagccgccgtgtccgtcatggaacgccgcctgcccggctttgaacaggccatgatggcggcaagcctgcaaaaaacgcccacggcggccatttcccgcgccgtggccggcacactgggacaaagcctgctcatctgcctgccgggcagccgcaaagccgtcgcggaaaacctcgccgccgtccttccggccctggaacatgccctcgacaaacttcagggcgacggcagggattgcggagcgttctga

SEQ ID NO: 39166 - protein, 109 aa, Unknown
  Obtained from environmental sample
  DOMAIN (2)...(94): Probable molybdopterin binding domain
  misc_feature (1)..(109): Xaa is any amino acid
MELALMQGYDLIVATGGTGLGPRDRSPEAAVSVMERRLPGFEQAMMAASLQKTPTAAISRAVAGTLGQSLLICLPGSRKAVAENLAAVLPALEHALDKLQGDGRDCGAF

SEQ ID NO: 39167 - DNA, 798 bp, Unknown
  Obtained from environmental sample
  misc_feature (1)..(798): n is a, c, g, or t
atgaacacagatcaggtaaaacaaaaacttttgcggattgaggatgccccgctggagttttcccttgttttttcggggaaaaaaagcagcaaggtaaacggcctgtacaaacccgacagccgtgagattatcatccataaccgcaattttgatcaggacacggcgggggaaaatctgctgctgtacacggcgatccacgaatacgcccaccatctccacgtctgctcgcagggcggcaaactttcaccccgcgcgcacacgtcggaattttgggcaattttccatgcgcttctggaaaaagccgagtcaaaaaaaatctaccgcgatgttttcgccgacgcgccggaacttacggagcttaccgaaaccatccgtaaaaaatacctccaggaaaacggcagcctggttaaggaaatgggcaaacatctgctgaaagcgcatgagctctgcaccgcgataggcgtgcgttttgaggactatgttgaccgcgtgctgcgaataccccgcaccgcggcaaacatggcgattaaaatgttcaattacgatctaaatccgcaaacgggcgccgataacatgcgtttcctcgccggtattcgtgacgccggtgagcggaaagccgccgagaccgccctgctcaaaaataaaagcccagatacggtaaaaatggcgattcgccaaaaagcaaaagacgaagaccctgtgcttcagcttgaacgtgagaagaaccgccttgaacgcactattgagacgctctccaaacggcttgaggaagtgaagaaggagcttgggcaaaaataa

SEQ ID NO: 39168 - protein, 265 aa, Unknown
  Obtained from environmental sample
  misc_feature (1)..(265): Xaa is any amino acid
MNTDQVKQKLLRIEDAPLEFSLVFSGKKSSKVNGLYKPDSREIIIHNRNFDQDTAGENLLLYTAIHEYAHHLHVCSQGGKLSPRAHTSEFWAIFHALLEKAESKKIYRDVFADAPELTELTETIRKKYLQENGSLVKEMGKHLLKAHELCTAIGVRFEDYVDRVLRIPRTAANMAIKMFNYDLNPQTGADNMRFLAGIRDAGERKAAETALLKNKSPDTVKMAIRQKAKDEDPVLQLEREKNRLERTIETLSKRLEEVKKELGQK

SEQ ID NO: 39169 - DNA, 1020 bp, Unknown
  Obtained from environmental sample
  misc_feature (1)..(1020): n is a, c, g, or t
ttgtatttcgcgcagaagatgagcctggatctgggtggcgcgaagatctaccttaaacgggaagatttgaaccataccggctcacataagatcaacaacgtgctgggccagaccctcctcgcgaaaaaaatgggcaagaccagaattattgccgaaaccggagcgggtcagcacggcgtggccgcggcaactgcggcggccctgctgggaatggaatgcgaaatcttcatgggaaaagaggacacggaacgccaggccctaaacgtgtaccgcatggaactgttaggcgctactgtccatcctgtcacatcgggaacccaaacgctgaaagacgcggttaatgaaaccatgcgggaatggacaagccgcgttcatgacacccactacgtacttggctccgtaatggggccgcatccctttccggttatggtgcgggattttcaaagcgtaatcagcagggaagcgcgtgaacagatactggaaaaggaaggccgacttccctcggttgttctggcctgcgtcggcggcggaagcaacgcgatgggcatttttcaccattttattccatcaccggaagtacggctgatcggctgcgaagcggcgggccttggggtggacacggaacagcacgccgctacaatcgcgaaaggctcggtggggatttttcacggtatgaaatcctatttctgccagaactccgagggccagattgcccctgtgtattcgatttcagctggcctggattatccgggcatagggccggaacacgcctggcttaacgacagcaaacgcgcgacttacgtgccggttaccgacgaggaagcggtagacgcgtttgagtaccttgcacgtaccgaggggatcatctgcgcggtggaaagcgcccacgcgatagcccatgccagaaaaatcgcaggcagctttggaaaaaacgaaaatatcgtcatctgcctttccggcaggggagacaaggacgttgcggcaatcgcgcgataccgggggaaaaagatacatgagtaa

SEQ ID NO: 39170 - protein, 339 aa, Unknown
  Obtained from environmental sample
  DOMAIN (1)...(321): Pyridoxal-phosphate dependent enzyme
  misc_feature (1)..(339): Xaa is any amino acid
MYFAQKMSLDLGGAKIYLKREDLNHTGSHKINNVLGQTLLAKKMGKTRIIAETGAGQHGVAAATAAALLGMECEIFMGKEDTERQALNVYRMELLGATVHPVTSGTQTLKDAVNETMREWTSRVHDTHYVLGSVMGPHPFPVMVRDFQSVISREAREQILEKEGRLPSVVLACVGGGSNAMGIFHHFIPSPEVRLIGCEAAGLGVDTEQHAATIAKGSVGIFHGMKSYFCQNSEGQIAPVYSISAGLDYPGIGPEHAWLNDSKRATYVPVTDEEAVDAFEYLARTEGIICAVESAHAIAHARKIAGSFGKNENIVICLSGRGDKDVAAIARYRGKKIHE

SEQ ID NO: 39171 - DNA, 1125 bp, Unknown
  Obtained from environmental sample
  misc_feature (1)..(1125): n is a, c, g, or t
ttggccgtatgcttagcctgggctttgaaaaggttcttttgctctacactccggccaattcccggaccagcgatattctggataccatggtatatcgtaccggacttgcggggggtatgccgaattattcttacgccactgccatcgggcttttcagcagcgtcattggccttatattggttacttccgccaattttgcaagcaaaaagctcaccggagagtcggtctattaggaacagcatgaaaaagacgatagcctatacgggaatgcggccccgtttttctctctttgatctttttgtatatgggggaatgattttctccatgcttgtctgcataataccattcctgtttatgtttgccctttctctctcggatgtgcgggcgattcttaacaaccaggtgggtctttggcccaatggttttaacacggcggcgtatagaaccatattcaagtatccgaattttttcatggcttacaggtacaccttcttttatacgagctgcggcacgatcatagctctgatttctactattctttttgcctatcccctgtcaaagccttttttgaggggtaaaaattttttcctgaaaatggtgatcttttccatgtttttttcaggcgggcttatccctacttaccttttaattgtaaatttgcgcctcgcgaataccccgcttgcgatgctgttgccgtttgccatcagcccattcaacctgatcatccttataagtttctttaagggaattccccaggaaattgaggaagcctccctgatagacgggctgggctattacggcatccttttccgcatggttctgcctctttccacggcggccatggctactataggcctgtactacgcggtgttcttctggaacgactggtttaacgcgctcatatacctcaagagcagccagtatccagttatgctttttttgcgtaacattgtaaacggtacgatgatggttggcgaaggggccggttccgccgaggggaacagcctgggcatcgctatcaaagcggccgttattatggtttctaccctgcccattataattctttatcctatgctccagcgcttctttatagccgggctcacagtaggaagcgtgaaagggtaa

SEQ ID NO: 39172 - protein, 374 aa, Unknown
  Obtained from environmental sample
  misc_feature (1)..(374): Xaa is any amino acid
MAVCLAWALKRFFCSTLRPIPGPAIFWIPWYIVPDLRGVCRIILTPLPSGFSAASLALYWLLPPILQAKSSPESRSIRNSMKKTIAYTGMRPRFSLFDLFVYGGMIFSMLVCIIPFLFMFALSLSDVRAILNNQVGLWPNGFNTAAYRTIFKYPNFFMAYRYTFFYTSCGTIIALISTILFAYPLSKPFLRGKNFFLKMVIFSMFFSGGLIPTYLLIVNLRLANTPLAMLLPFAISPFNLIILISFFKGIPQEIEEASLIDGLGYYGILFRMVLPLSTAAMATIGLYYAVFFWNDWFNALIYLKSSQYPVMLFLRNIVNGTMMVGEGAGSAEGNSLGIAIKAAVIMVSTLPIIILYPMLQRFFIAGLTVGSVKG

SEQ ID NO: 39173 - DNA, 894 bp, Unknown
  Obtained from environmental sample
  misc_feature (1)..(894): n is a, c, g, or t
atgaatatcttagaacttgtcggcaacacgcctgttattgaattaaaaaaaatattcaatatggcaaacggagtttctctgtttgccaaggcggagtattttaatccaagcggctcagttaaagaccgcgccgcaaaagctatgatactgtccggtattaactcaggacagcttacaaaagataaaattattttagactccacaagcggcaataccggcatcgcttacgccatgtttggcgcggcgcttggttaccgtgtaaaattgtttatgccggcaaacgcgagcgcggaacgcaaaaagctcatccgggcatacggcgcggaaatcgttgaaacggatccgatggagggttcggacggcgcgtacagggcggtactcgaaaaagcgcggcgcgaaccggataggtatttctttccgaaccaatacgataattttgagaatgtgcgggcgcattatgaaagcacgggggttgaattatacgcgcaatgcaagccgacgcattttgtggccggaacgggcacatcgggaacctttatgggcgtctccaaacggctcaaggattacgatccgtccatacagattgccctgatgcagcctgactcccccttccacggtctggaaggaatgaaacacatgggcgcaaccataaagccaaaaatatttgatgagagtattgccgatatgcgcatcgaagtcaaaaccgaagacgcctacaaaacagcgcggaagctcgccgccacggagggtctgtttgtaggcataagctccggcgcaaatgtctatgccgcgctggaatgggcaaagacactgcccgggggatcgcgcatcgccactatcctctgcgataacggctgccgatatatgacggaaccgctctggagggatgtgtag

SEQ ID NO: 39174 - protein, 297 aa, Unknown
  Obtained from environmental sample
  DOMAIN (3)...(284): Pyridoxal-phosphate dependent enzyme
  misc_feature (1)..(297): Xaa is any amino acid
MNILELVGNTPVIELKKIFNMANGVSLFAKAEYFNPSGSVKDRAAKAMILSGINSGQLTKDKIILDSTSGNTGIAYAMFGAALGYRVKLFMPANASAERKKLIRAYGAEIVETDPMEGSDGAYRAVLEKARREPDRYFFPNQYDNFENVRAHYESTGVELYAQCKPTHFVAGTGTSGTFMGVSKRLKDYDPSIQIALMQPDSPFHGLEGMKHMGATIKPKIFDESIADMRIEVKTEDAYKTARKLAATEGLFVGISSGANVYAALEWAKTLPGGSRIATILCDNGCRYMTEPLWRDV

SEQ ID NO: 39175 - DNA, 660 bp, Unknown
  Obtained from environmental sample
  misc_feature (1)..(660): n is a, c, g, or t
gtgatctacatagtagaagacgacagctccataagggagctcgtagcggccaccctcgaagccgccgggcacgacgttaaggcgttcgactgcgggggcgccatgttcgcgcaccccgacttcgccaaggccgacttgtacctgctcgacattatgctgcccgacatgaacggccacaagataatggagaagctcaaaaaatcgaccgacgcccccgtgatcttcctgaccgccaaaggcgaagagatagacaaagcgaccggcctgcaattgggcgcggacgactacgtgaccaaaccattcggcgtgcttgagcttttggcgcgggtcaaagcggttatgcgccgctacgaaaagacccacccgcaaacggtcatgtctttcgagaacctgattatagacgccgagagcaaaatagtgtcggccttcggcaaaccggtaaagctgacatacaaagagttcgagctgctgctctaccttgcccaaaacagaaacaaagtactgtcgagagaccaaatcctatcctccgtatggggcttcgatttcgacggaatcacaacaagaaccgtggacatccacataaagaccctgcgccaaaaattaggcgacaacgcggataaaccgttatttatagaaacaggcgcggggttacgggtataa

SEQ ID NO: 39176 - protein, 219 aa, Unknown
  Obtained from environmental sample
  DOMAIN (144)...(219): Transcriptional regulatory protein, C terminal
  misc_feature (1)..(219): Xaa is any amino acid
MIYIVEDDSSIRELVAATLEAAGHDVKAFDCGGAMFAHPDFAKADLYLLDIMLPDMNGHKIMEKLKKSTDAPVIFLTAKGEEIDKATGLQLGADDYVTKPFGVLELLARVKAVMRRYEKTHPQTVMSFENLIIDAESKIVSAFGKPVKLTYKEFELLLYLAQNRNKVLSRDQILSSVWGFDFDGITTRTVDIHIKTLRQKLGDNADKPLFIETGAGLRV

SEQ ID NO: 39177 - DNA, 654 bp, Unknown
  Obtained from environmental sample
  misc_feature (1)..(654): n is a, c, g, or t
atgcgcaataggttcgatcaggagttaaagaagctgcacgacgacttggtgcagatgggtactttcatagagaagacgatggacaaggccatgtcggcgtttaggacgaacgactacgccttggcgcgcgaggtctacgacaacgacgacatcgccgacgaattggaggtgaaggtggagcggcgtagcctgcgcatcctcctctcgcagcagcccgtggcgagggatctgcgcacgatctccacggctctgaagatgatcaccgacatggagcgcatctgcgaccaggcgaagagcatctcggagatagtgctgcgctttgagggcaaggagttcaaaaaaaccgacgatatcttgaaaatgagcgaaaaatgtgttataatggtaaataagagcatagacgccttcattaacgacagtttggaggcggccaaagagattgagacgttggacgacgagatcgacgcgctcttcaaacgcatccacgacaacatggccgtgatggtcacgcaggacccgagcagcgtggagcaggcgatagacgtcgtgatgatagcgaagtatctggagaggataggcgaccacgcggtcaacatatccgagtgggtggtgttcaatattactggggagcataagcataggcagttaatttaa

SEQ ID NO: 39178 - protein, 217 aa, Unknown
  Obtained from environmental sample
  DOMAIN (118)...(203): PhoU family
  misc_feature (1)..(217): Xaa is any amino acid
MRNRFDQELKKLHDDLVQMGTFIEKTMDKAMSAFRTNDYALAREVYDNDDIADELEVKVERRSLRILLSQQPVARDLRTISTALKMITDMERICDQAKSISEIVLRFEGKEFKKTDDILKMSEKCVIMVNKSIDAFINDSLEAAKEIETLDDEIDALFKRIHDNMAVMVTQDPSSVEQAIDVVMIAKYLERIGDHAVNISEWVVFNITGEHKHRQLI

SEQ ID NO: 39179 - DNA, 1320 bp, Unknown
  Obtained from environmental sample
  misc_feature (1)..(1320): n is a, c, g, or t
atgacggcaatgcgctggattggctttgtggccggccgctatgtttcaaggggccgaaggaattctcccacaccggtattttccgtactgggaatcgcgacgggggttcttgccctgacggttattatcgccgtgatgaacggttttcagcttggctttatcgaaagcattttagagatgtcttcctgccatgtgaggattgaaggcttaaagccggatgccggaattttaagcaagctgcgctctgttccggaagttctttcggtacttccatttgaagagataaatgtcctgcttcggggcaagagttccagcctcaggggcgcgttgatccgaggcgtgcctcccgacgctttatcccttgatcccggcctggcctcgaaacttggaatggaaaaaggctcttttgaccttggcgatccttcaggcatagtgcttggaagcgagctggcgcgccaccttttggtggattcaggcgatgagataagccttctttcgataaccggaggcataagggaagaagaatcgaaccgcggttacaaggttacaggcattnttagttccgggttttacgaatacgaccttggttgggcttttatcaacattgatgccgcggccgccttgacgggagaatccgcgcagacagtgatagggataaagctgaaaaaccgctggcaggacaaaatagcgattgaaaagataaagaaagttgtcgcgcttcaaggtttcggcgattcccctgtttcggttaggtcatggcgcgattacaaccgatctttttttggtgccctcagaactgaaaagctcatgatgtttattcttgtggggctaatttttatcgtggtcggactcaatatttttcaggcgcaaaggcgtgttgttttggaacgccgcgaagaaatcgggttgttacgcgcgcttggctcttcaagcacacaggtgcggctggtttttgtctgggatggtttcattatcgggcttgccggagccatactgggcctgatcccggggcttctcattgcgtataacattcaggttttcttctcgctgcttgaaggagtggtgaacttttgcatcaatatttttaattctgttttaggtttcattggcggatatgcctggcagggtgagttcgccgtattttccacgcagattttttacctcaaagagattccttccagggtaattccacgcgaagtggtgttgattttcttttttggttttttctcggcccttttggcggcatggttcgcttcgggaaaagtttccgcgaccaagccggcggaggtttgcgctatctcgtccgctcggccaatctga

SEQ ID NO: 39180 - protein, 439 aa, Unknown
  Obtained from environmental sample
  DOMAIN (214)...(427): Predicted permease
  misc_feature (1)..(439): Xaa is any amino acid
MTAMRWIGFVAGRYVSRGRRNSPTPVFSVLGIATGVLALTVIIAVMNGFQLGFIESILEMSSCHVRIEGLKPDAGILSKLRSVPEVLSVLPFEEINVLLRGKSSSLRGALIRGVPPDALSLDPGLASKLGMEKGSFDLGDPSGIVLGSELARHLLVDSGDEISLLSITGGIREEESNRGYKVTGIXSSGFYEYDLGWAFINIDAAAALTGESAQTVIGIKLKNRWQDKIAIEKIKKVVALQGFGDSPVSVRSWRDYNRSFFGALRTEKLMMFILVGLIFIVVGLNIFQAQRRVVLERREEIGLLRALGSSSTQVRLVFVWDGFIIGLAGAILGLIPGLLIAYNIQVFFSLLEGVVNFCINIFNSVLGFIGGYAWQGEFAVFSTQIFYLKEIPSRVIPREVVLIFFFGFFSALLAAWFASGKVSATKPAEVCAISSARPI

SEQ ID NO: 39181 - DNA, 1545 bp, Unknown
  Obtained from environmental sample
  misc_feature (1)..(1545): n is a, c, g, or t
atggatgggcgcgttcacacccagagttataaaaccggaattgccgacgggccggcccatgaaatcacgatggataagcttccctaccaggctgacccaaatcgccagggtaccgtagtccgctggaaggcggacgcttctatttttgagacgacgacccacaatttcgacgctttaagcaaccgcctgcgggaactggccttccttaacaagggtcttaaaatcacgattcgggacgagaggctttctacccccaaagtccatgaatttaagtttgaaggcggggtaaaaagctttgtagagtacctgaacgaaaacaaaaccgtgctgtacaaggagccaatttttattgagggcgtccgggacgacggtctgggcggcagtgtcgagattgagtgcgccatccagtacaacgacggttttaacgagataatgtactcctttgtgaacgacatcaacacccgcgaaggcggcacgcaccttatgggttttaagtccgcccttacccgtactctcaacgagttccttaaaaagtccaaacacgctaaaaagcttgacgaaagcctttccggagatgacgtacgcgaaggcctaaccgcagtgctttcggttaaagtgggcgagcctcagttcgaaggacaaactaagggcaagctgggcaatccggaagtaaaaggtgttgtggaagcgatgataaacgagcagttggagctttttctggatcagcatcctgacattatcgccagtatcctggaaaaatccgtgttagctgctaaagcccgtatcgcggcgcgccaggcgcgggatgctacaaggcgcaagaacgcgatggattccgccgggcttcccgggaaacttgccgattgttcggaaaaagacccggcgaaatgcgagctttttatcgtagagggagattccgccggcggctcggcgaagggaggccgcgaccgcagaacgcaggcgattcttccgctgtggggaaaaatgctcaatgtggaaaaacagcgcatagaaaaagttatcacaaacgataaattacagccgattattgccagcataggcgcgggctgcggcaacgattttgacgtttccaaaatacgctatcataaaattatcatcatggcggacgccgacgtggacggttcgcatatccgcacattgcttttaaccttcttctaccgttacatgacgcctcttatcgaacaggggcacgtttatcttgccatgccgcctctttacaaggtcagctacgataaaaaatctttttacgcctatgacgacgcggaaaaagaccgcatactttcggagtccggcaaagacgcggaaaaggtttccgttcagcgctacaagggcctgggagaaatgaaccccgaccaattatgcgacaccacgatggatcccggcaagcgcaacataattcaggtgcacctggacgataccgtcgaggcggagcgcattttcactacgctgatgggagaggtggtccagccccgccgcgagtttattgaggacaacgcgctgttagttagtaaccttgatgtgtga

SEQ ID NO: 39182 - protein, 514 aa, Unknown
  Obtained from environmental sample
  DOMAIN (297)...(408): Toprim domain
  misc_feature (1)..(514): Xaa is any amino acid
MDGRVHTQSYKTGIADGPAHEITMDKLPYQADPNRQGTVVRWKADASIFETTTHNFDALSNRLRELAFLNKGLKITIRDERLSTPKVHEFKFEGGVKSFVEYLNENKTVLYKEPIFIEGVRDDGLGGSVEIECAIQYNDGFNEIMYSFVNDINTREGGTHLMGFKSALTRTLNEFLKKSKHAKKLDESLSGDDVREGLTAVLSVKVGEPQFEGQTKGKLGNPEVKGVVEAMINEQLELFLDQHPDIIASILEKSVLAAKARIAARQARDATRRKNAMDSAGLPGKLADCSEKDPAKCELFIVEGDSAGGSAKGGRDRRTQAILPLWGKMLNVEKQRIEKVITNDKLQPIIASIGAGCGNDFDVSKIRYHKIIIMADADVDGSHIRTLLLTFFYRYMTPLIEQGHVYLAMPPLYKVSYDKKSFYAYDDAEKDRILSESGKDAEKVSVQRYKGLGEMNPDQLCDTTMDPGKRNIIQVHLDDTVEAERIFTTLMGEVVQPRREFIEDNALLVSNLDV

SEQ ID NO: 39183 - DNA, 570 bp, Unknown
  Obtained from environmental sample
  misc_feature (1)..(570): n is a, c, g, or t
ttggcgcatttgggggtagtgctcgaaaacacaactttccggcgtttaccgcactcccgttttcaaacatttctgttatttatgcaaccgattcacttggctatcggcatagcggaaggtattataaccgccgcgatattatgctttgtctataagatgcgtccggaaatcatggaaagcgtacggaacaaaacattgatccgtagcggcgttccaatgggaagaatacttattgtacttgcggtcgcaacggcgtttacgggcggcgctctatctctatttgcttcatcctacccagacggtcttgaatgggcgatagaaaaaactattggaaatacggagcttaaagcggtaaatccggtgattgagaaagtttcgcaagtccggggcgcggtcgccataatgccggattatgatttcaaaggcgccggagagaatggttccaaaatttggacggcggtagcgggtattgccggcggggcgctgacatttttactcgccggagccgccgcgtttgcgatatccataattaaaaaaagacgaaaggcggcttcgctcagccatcaataa

SEQ ID NO: 39184 - protein, 189 aa, Unknown
  Obtained from environmental sample
  misc_feature (1)..(189): Xaa is any amino acid
MAHLGVVLENTTFRRLPHSRFQTFLLFMQPIHLAIGIAEGIITAAILCFVYKMRPEIMESVRNKTLIRSGVPMGRILIVLAVATAFTGGALSLFASSYPDGLEWAIEKTIGNTELKAVNPVIEKVSQVRGAVAIMPDYDFKGAGENGSKIWTAVAGIAGGALTFLLAGAAAFAISIIKKRRKAASLSHQ

SEQ ID NO: 39185 - DNA, 741 bp, Unknown
  Obtained from environmental sample
  misc_feature (1)..(741): n is a, c, g, or t
gtgatgggaaacagatttttccgtaaaactggcgcgggcgaactggtaaaaaaactcgttgttaaaatggtaatggaacgctcccttatccaagaaggcgaccgtgtccttatcgctgtctcaggcggcaaggattcaagcgtacttgcatgggcgctttcttctgtccgccccgcgcttaaatttaactatgaacttgccgccctgcacatctccacagacttttgctattgctgtaaaaaaaccgctctttccaaaagactggaagaatgggaaatcccctataacgatcttttggtgccggtcataggcagactcaaagaaggaaggaaaatgaactgctactggtgttccacgcaaaggcggacggaattgttaaagtatgcggtagaaaatggttttaataaaatagcgttaggtcatcatctggacgacattgtcgaaactttttttatgaacatgtgcgccaaaggaacgttacttgcaatgccggtattgcttaattacagaaaatacccggtaagccttatccgtccgcttgcccttttggaagaaaaacaggtaattgcctgcgccgcaaagcaaaacattttaaaaaacgcctgcacctgcccctatggacaaaattcaaagcgccgcgacattcgaagccgcatcgctgagtttacatccggcaaagattcaggcgccatcaagcggcgcattttacaggcattaggcggcggagagatagattattga

SEQ ID NO: 39186 - protein, 246 aa, Unknown
  Obtained from environmental sample
  DOMAIN (35)...(238): PP-loop family
  misc_feature (1)..(246): Xaa is any amino acid
MMGNRFFRKTGAGELVKKLVVKMVMERSLIQEGDRVLIAVSGGKDSSVLAWALSSVRPALKFNYELAALHISTDFCYCCKKTALSKRLEEWEIPYNDLLVPVIGRLKEGRKMNCYWCSTQRRTELLKYAVENGFNKIALGHHLDDIVETFFMNMCAKGTLLAMPVLLNYRKYPVSLIRPLALLEEKQVIACAAKQNILKNACTCPYGQNSKRRDIRSRIAEFTSGKDSGAIKRRILQALGGGEIDY

SEQ ID NO: 39187 - DNA, 363 bp, Unknown
  Obtained from environmental sample
  misc_feature (1)..(363): n is a, c, g, or t
atgggatcagattcggcacgagccgaagaagacgtcgaagaagagcggcggctggcgtatgtcgcaatcacccgcgcgaaaagaaactgcatcatctcgtattccgattaccgggtgctgttcggcgaaccgtattgcgaaagaagccggtttatcgatgaaatcgatccgcagtttttgtattttccgcacgtccgcccaaggcaaaatttttcgggcggcaaatcccgcgtcctgaacgcgggcatggtcggaaaattcatacaaaccgaatacggcggcggcgtaatcatcgaagacaaaggcgaccactatatcgtcgcggtcaagggcggaataaagaaagtgatatgtgaaatgtga

SEQ ID NO: 39188 - protein, 120 aa, Unknown
  Obtained from environmental sample
  misc_feature (1)..(120): Xaa is any amino acid
MGSDSARAEEDVEEERRLAYVAITRAKRNCIISYSDYRVLFGEPYCERSRFIDEIDPQFLYFPHVRPRQNFSGGKSRVLNAGMVGKFIQTEYGGGVIIEDKGDHYIVAVKGGIKKVICEM

SEQ ID NO: 39189 - DNA, 570 bp, Unknown
  Obtained from environmental sample
  misc_feature (1)..(570): n is a, c, g, or t
gtgaaccagagtgatggcaggtctatatacagagtccaccacgagagccatatcgagagggcgaagaaccgaatcaaaatcgcgctccgcgaaagccgccgcctgcgccccgacgcggacaacgacttcaggataatggacgtgaccgagctcctcgacaccatccggagcgtgggaatctatctgtcgctactcatgccgagcataccgtccatatcgcttttggtcggctcgatcgggattatgaacatgatgctggtcagcgtcgccgaacgcacgcgcgagattgggataaggaaggcgattggcgcgaaggaacgacacatagtgacccagtttttatcggaatcgattttgatttcttttatcggcagcatgatcgggctggttgtcggcattacattggcgcaggtgattggacgatttgtgcttgagttcaatgtgccgctgtcgatatgggcgccggtgatgtcggtggtggtggcgattgttgtcgggattgcgtcgggcgtcatgcctgcgcttaaggccgcgcggatgaatcccttggacgctttgcggcacgagtaa

SEQ ID NO: 39190 - protein, 189 aa, Unknown
  Obtained from environmental sample
  DOMAIN (5)...(182): Predicted permease
  misc_feature (1)..(189): Xaa is any amino acid
MNQSDGRSIYRVHHESHIERAKNRIKIALRESRRLRPDADNDFRIMDVTELLDTIRSVGIYLSLLMPSIPSISLLVGSIGIMNMMLVSVAERTREIGIRKAIGAKERHIVTQFLSESILISFIGSMIGLVVGITLAQVIGRFVLEFNVPLSIWAPVMSVVVAIVVGIASGVMPALKAARMNPLDALRHE

SEQ ID NO: 39191 - DNA, 837 bp, Unknown
  Obtained from environmental sample
  misc_feature (1)..(837): n is a, c, g, or t
atgaataaatatgaaacgcgcggcgtacgcaatacctttcggctagcactacgggagttaggttatttcctcaaaggagcggcgttgaacattttttcgcctgagtttataaccgtgcttattcctttactagcattgtgggaattattgccgagatttggcgtactgccgcgcacattggtgccgccactaagcgatgtggctgtaacattctgggaaatgctcaccatgcaaaaatttttgctggatgtgggtaatagtatgatgaaattttttcttgggcttgggatagccattttcaccgccattccaatcgggattttgatgggctggaatatccccatcagaaagcgaactttgccgctgttccaactgttatcccctgtgccgccacctgcttgggttcctctcaccataatactatttggcatcgggttgcctatgcaaacttttctggtattcatcggggctttttatccaatactgttcaacacatatcaagctgttaaagataccgagccgcgttacctgtcaagcgcacggatatttggggcaagcgagcttacgcttatcctacgcatatatatttggcacgcacttggggcaattataatgagcgttaaaaccggcgtggctatgggactggtgatgctggtgatagccgagatgtacggtggtagaactggtgtaggctatgtgcttaaccaagcaaaggattattttcagatttcaaagatggtggtgtgcatggtaacgctgggcacaataggctggttcttaatagaggtgcttaaatttgttgagctaaaactcgctgtctggaaggttggaagatga

SEQ ID NO: 39192 - protein, 278 aa, Unknown
  Obtained from environmental sample
  DOMAIN (84)...(273): Binding-protein-dependent transport system inner membrane component
  misc_feature (1)..(278): Xaa is any amino acid
MNKYETRGVRNTFRLALRELGYFLKGAALNIFSPEFITVLIPLLALWELLPRFGVLPRTLVPPLSDVAVTFWEMLTMQKFLLDVGNSMMKFFLGLGIAIFTAIPIGILMGWNIPIRKRTLPLFQLLSPVPPPAWVPLTIILFGIGLPMQTFLVFIGAFYPILFNTYQAVKDTEPRYLSSARIFGASELTLILRIYIWHALGAIIMSVKTGVAMGLVMLVIAEMYGGRTGVGYVLNQAKDYFQISKMVVCMVTLGTIGWFLIEVLKFVELKLAVWKVGR

SEQ ID NO: 39193 - DNA, 732 bp, Unknown
  Obtained from environmental sample
  misc_feature (1)..(732): n is a, c, g, or t
atgaatttcgccaaaatttcccggctgtttgctacaaataaaaccatccttgaagcggaaaatatcaggaatatgcttttagccctgactgatgatattcgcgtaatcctgattacacttgcagaaaagctgtacttgctgagaatgcctgattctatccctgaggaaaagcgaaaaggctttgctcaggaatgtcttgatatctacgccccattggcaaaccgcctgggcatttccaggattaaggacgagctggaagacctatcccttaaatatctcaaccgcgaggtatatcagcagataaaggatattgtctctgcaaagcgtacggaacgggaaaaatttctttccgaagccagggaaacgctcatcatggaagctgaaaaagccggaataaaaatcaccgtgtcaagccgggcaaaacacttttattcgatatacatgaagatgcgtaaacgcaacaagagcgcggaagaaatttttgatctttttggcattcggatcatatgtgaaaccgttgaacaatgctataacctattgggaattgttcacaatttgtggaagccgggctcaggtcgtttcagggattacattgcaaacccaaaatcaaatggctataaaagcctgcacaccactgtaattgttgatgaatggcttttggaaatccaggatacgcaccaaagaaatgcattatttggcggaaaacggaatcgcgagccattggctgtataa

SEQ ID NO: 39194 - protein, 243 aa, Unknown
  Obtained from environmental sample
  DOMAIN (138)...(238): Region found in RelA / SpoT proteins
  misc_feature (1)..(243): Xaa is any amino acid
MNFAKISRLFATNKTILEAENIRNMLLALTDDIRVILITLAEKLYLLRMPDSIPEEKRKGFAQECLDIYAPLANRLGISRIKDELEDLSLKYLNREVYQQIKDIVSAKRTEREKFLSEARETLIMEAEKAGIKITVSSRAKHFYSIYMKMRKRNKSAEEIFDLFGIRIICETVEQCYNLLGIVHNLWKPGSGRFRDYIANPKSNGYKSLHTTVIVDEWLLEIQDTHQRNALFGGKRNREPLAV

SEQ ID NO: 39195 - DNA, 813 bp, Unknown
  Obtained from environmental sample
  misc_feature (1)..(813): n is a, c, g, or t
gtgtggatggatgttgcggtcagcgacaccgggatgggtatacacaaggatgacataaaaaacctgttcctcgattattaccaagtcgccgtcaatgccaaccgccacattgaaggtacgggattgggcttatccattaccaaaagacttgtagaaatgatggatgggataatcggcgtagagagcgagtacggtaagggctcaaagttcagttttcgcgtaaggcagggccttgttgacgataaggttctcggagctgatgtctcggataaactccgtaacttctgttattccgatgaaaagaaaattgtcggtaaaaaattggtaagggtcaatttgagttacgccagggtactggtagtagacgatatggacaccaatctggacgtggcggcgggtattttaggcaattacaagatgcaggttgactgtttaagtaacggccctgccgcgattgaacgaatacgcagcgggactccggtctacaaagcaatattcatggaccacatgatgccagggatggatggcatagaaacggcggacaggattcgtgcgttaggtacggaatacgcgaagaagataccgataatcgcccttacggccaacgccatacacggaaccgacaagatgttctatgaacacgattttcaggcatttataaccaaacccattgatgtaatggaaatggatgccgttctcagaaaatgggtacgcgacgataaacatgaagaagtgccggttaccgaggagtcttccgagaccgacaaaaaaattgaaaacatggtaatagagataacggggggtggatactaa

SEQ ID NO: 39196 - protein, 270 aa, Unknown
  Obtained from environmental sample
  DOMAIN (2)...(77): Histidine kinase-, DNA gyrase B-, and HSP90-like ATPase
  misc_feature (1)..(270): Xaa is any amino acid
MWMDVAVSDTGMGIHKDDIKNLFLDYYQVAVNANRHIEGTGLGLSITKRLVEMMDGIIGVESEYGKGSKFSFRVRQGLVDDKVLGADVSDKLRNFCYSDEKKIVGKKLVRVNLSYARVLVVDDMDTNLDVAAGILGNYKMQVDCLSNGPAAIERIRSGTPVYKAIFMDHMMPGMDGIETADRIRALGTEYAKKIPIIALTANAIHGTDKMFYEHDFQAFITKPIDVMEMDAVLRKWVRDDKHEEVPVTEESSETDKKIENMVIEITGGGY

SEQ ID NO: 39197 - DNA, 909 bp, Unknown
  Obtained from environmental sample
  misc_feature (1)..(909): n is a, c, g, or t
ttgaccatgggcagaaatgtgctttcggggcactataatgtagccactgtggatagtgccgagcgtctttttaaaatgttggaaaaaaccgttccagatatgattctattggatgttgaaatgccggagatgaatggctacgatgccataaaaataataaagagcaaaaaagaaactcaaaatataccgattatttttttaacagcgaaaagcgatagcgatagcgagcttgagggtttatctttaggtgctatagattacatagtaaagcccttttcaccgcctcttttgctaaaacgcatagaaacgcatttgcttgtggaatcgcaaagaaaagaacttttgaattacaacaaaaacctccaaaatttggtggaaacaaaaacccaaaccgttttggaacttcaaaatgcaattttgagggcaatggcagagcttgtggaaaaccgcgatgacattaccggcaagcacgtggaaagaacacagatttatttgggtttattgattgatgccatgcaaaagcacggtttgcacacagaagaaacgcgcgattggaatatagatttggtgctgaagtcttcgcaattgcacgatgttggcaaaattgcggtgaaagacgagattctcaaaaaacctagcaaactcacagatgatgaatttaccgagataaaaaaacatccattttgcggcgaagagatcattgaaaaaataaaacaaaatacaactgagcacgaatttttggaacacgctaaaatttttgctgccactcatcatgagaaatgggatgggaacggttacccaaatgggttaaagggtaccaaaattccgcttcaaggcaggcttatggcaatagccgatgtttacgatgctctggttccgacagacctcgtgccaatctgtacttgttaa

SEQ ID NO: 39198 - protein, 302 aa, Unknown
  Obtained from environmental sample
  DOMAIN (154)...(291): HD domain
  misc_feature (1)..(302): Xaa is any amino acid
MTMGRNVLSGHYNVATVDSAERLFKMLEKTVPDMILLDVEMPEMNGYDAIKIIKSKKETQNIPIIFLTAKSDSDSELEGLSLGAIDYIVKPFSPPLLLKRIETHLLVESQRKELLNYNKNLQNLVETKTQTVLELQNAILRAMAELVENRDDITGKHVERTQIYLGLLIDAMQKHGLHTEETRDWNIDLVLKSSQLHDVGKIAVKDEILKKPSKLTDDEFTEIKKHPFCGEEIIEKIKQNTTEHEFLEHAKIFAATHHEKWDGNGYPNGLKGTKIPLQGRLMAIADVYDALVPTDLVPICTC

SEQ ID NO: 39199 - DNA, 777 bp, Unknown
  Obtained from environmental sample
  misc_feature (1)..(777): n is a, c, g, or t
atggctacgggttatgaagaagcaaaaaaaatggcagacgccgcgaaaaaaaccggcaaactgctgacaatcggctatcagtaccggtgcatgcccgcgcccttgtatcttaaaaaagcatgcgagcgcggagaccttggcgagatttattttgcgaaggcgcacgctatcaggcgcagggctgtcccgacatggggcgtttttcttaatgaaaaagaacagggaggagggccgcttatcgacatcggaacccacgctcttgatatgactttatggatgatgaacaactaccgccccaaatccgttaccggaagcgtttataaaaaactcaatgacaatcccgactgcggaaacatcttcggcccctgggatcccaaagagtacacggtggaagattccgcttttgggttcataacaatggaaaacggcgctaccataattctggaatcaagctgggccttaaatacgcttgacgtgggggagggcatttgcaccctttgcggcacaaaagcgggcgcggacatgaaggacggccttcgcatcaattcagatgaccttggaaagtttatagtaaataagcctgacctttccgtaggcggcgtgcagtattataagggagcttcaatggaaccgagggatatagagtgccgtaactggtacgacgccgttttgcacggcgcggaattaagggtgaaacccgaacaggctctggtagttacccaaatacttgagggcatttatgaatcggcgcgtaccgggaaacaggtaaatttttaa

SEQ ID NO: 39200 - protein, 258 aa, Unknown
  Obtained from environmental sample
  DOMAIN (38)...(149): Oxidoreductase family, C-terminal alpha/beta domain
  misc_feature (1)..(258): Xaa is any amino acid
MATGYEEAKKMADAAKKTGKLLTIGYQYRCMPAPLYLKKACERGDLGEIYFAKAHAIRRRAVPTWGVFLNEKEQGGGPLIDIGTHALDMTLWMMNNYRPKSVTGSVYKKLNDNPDCGNIFGPWDPKEYTVEDSAFGFITMENGATIILESSWALNTLDVGEGICTLCGTKAGADMKDGLRINSDDLGKFIVNKPDLSVGGVQYYKGASMEPRDIECRNWYDAVLHGAELRVKPEQALVVTQILEGIYESARTGKQVNF

SEQ ID NO: 39201 - DNA, 759 bp, Unknown
  Obtained from environmental sample
  misc_feature (1)..(759): n is a, c, g, or t
gtgctgaatgactgtatggctccgccggcgagttatccgctgcagttcatagaactgaccttacagagtattgccgacgcggcctgcgagccttacagtataccggtcgtttttgacgatgagccgggggcgccgtttacagaagtgtcttttgagccgacggacaggatactcgattttcttgcgaagctcgctaagcagcgcaaactgctttttacaaacacgctcaagggagagcttcggtttttcagtccgcaaaaggaatccatttttgtgtcgtttgcggaagggcggtacccgcttctttcaataaagccaaagtttaacgcgcagaatttttacagccatattgttggcgtcgcgaaaacgagcgaggagaatctgccgctcgtgtgggtttttgaaaacaagtatctgataaacaaggggatcatccggcatcataccacggtgattgaagacgttgaatccatcagcgatcttgaaaacgcggttatcgcgtatgcgggcaggatgcttgccgactgtgtgagcttcagtcttgtgtgtgcaaaccatgtcaacgaaaataatgaggtattcaaaaagggcatgagcgtttcggtgcttgccccgtcggcaatgatagcgaaagaaacggtttttatcgcgcgggaagtggaactcttgtgtacaaccgagggaaaaacagcggtactgacgcttgttttgccgggggcgtatacaggggaaattccggaggtgtttccatgggaatga

SEQ ID NO: 39202 - protein, 252 aa, Unknown
  Obtained from environmental sample
  misc_feature (1)..(252): Xaa is any amino acid
MLNDCMAPPASYPLQFIELTLQSIADAACEPYSIPVVFDDEPGAPFTEVSFEPTDRILDFLAKLAKQRKLLFTNTLKGELRFFSPQKESIFVSFAEGRYPLLSIKPKFNAQNFYSHIVGVAKTSEENLPLVWVFENKYLINKGIIRHHTTVIEDVESISDLENAVIAYAGRMLADCVSFSLVCANHVNENNEVFKKGMSVSVLAPSAMIAKETVFIAREVELLCTTEGKTAVLTLVLPGAYTGEIPEVFPWE

SEQ ID NO: 39203 - DNA, 1122 bp, Unknown
  Obtained from environmental sample
  misc_feature (1)..(1122): n is a, c, g, or t
gtgatagatcatgtaacccctgcgaaggattcgcagacagcgctgcagggaaaaaccttgcgggactggacgaggcggcacaatataaaggatttttttgacatcggcagaaacggcgtttgtcacgccattttccctgaaaagggatttgtccgcccgggctttacgattatcatgggcgacagccacacctgtacccacggagcgttcggcgcttttgcggcaggggtgggaactaccgatcttgaggtgggtatattgaagggcgtttgcgccttccgtaaacccgaaactttgcgtgtcaatttgcttggagaactgcctaagggcgtttcgccgaaagacgtaatccttgctgtcatcgccaaaatcagcgtttcgggcgcatcgggaaaagttatggaactgcatggtcctgtaatatcttccatgagcatggaaggcagaatgacaatctgcaatatggcgatagaggcaggggcgacctgcggcgtatgtatgcccgatatgacaactgtaaattatttgtggcagtttatcggtcccgaaggcgataaatcatattcaagcaaagaagaagcgttaaaagatttttcaaaatggataagtgacgacgatgctgaatattcgggcgttgtcgatattgactgctcaaaactggaaccgcttgcgactgtcggctacaaacccgacgaagtaaaaactgtgcgtgaacttgccggaacaaaaatcgatcaggtgtatatcggctcttgcaccaacggcagaatagaagacttgcgcgccgccccccatgtgttaaaaggaaaaaaaaattgcaactctgtgcgtacaatcgtcgctcccgccctacggacatttacgctcagctctcaagaggggcttattcaaattttccttgaagcaggctgttgtgtaacaaacgccacttgcggagcgtgtcttggaatgtccaacggcgtacttgccgaaggtgaagtttgcgcttccaccacgaaccgcaatttttacggacgcatgggcaagggcggcatggttcatcttgtcagtcccgctgtcgccgcggcttccgccgttgcgggagcgattgccgcgcctagcagtattggagggcagtcatga

SEQ ID NO: 39204 - protein, 373 aa, Unknown
  Obtained from environmental sample
  DOMAIN (1)...(361): Aconitase family (aconitate hydratase)
  misc_feature (1)..(373): Xaa is any amino acid
MIDHVTPAKDSQTALQGKTLRDWTRRHNIKDFFDIGRNGVCHAIFPEKGFVRPGFTIIMGDSHTCTHGAFGAFAAGVGTTDLEVGILKGVCAFRKPETLRVNLLGELPKGVSPKDVILAVIAKISVSGASGKVMELHGPVISSMSMEGRMTICNMAIEAGATCGVCMPDMTTVNYLWQFIGPEGDKSYSSKEEALKDFSKWISDDDAEYSGVVDIDCSKLEPLATVGYKPDEVKTVRELAGTKIDQVYIGSCTNGRIEDLRAAPHVLKGKKNCNSVRTIVAPALRTFTLSSQEGLIQIFLEAGCCVTNATCGACLGMSNGVLAEGEVCASTTNRNFYGRMGKGGMVHLVSPAVAAASAVAGAIAAPSSIGGQS

SEQ ID NO: 39205 - DNA, 525 bp, Unknown
  Obtained from environmental sample
  misc_feature (1)..(525): n is a, c, g, or t
atgaaaatgtttggcggagaagttttatttcttgatagaggcgatattaacaccgatgaaattattccggcgaaatatttaaccgaggacacaagggtagcgttaaagtctcatcttttggaagacttaaaaataaaaggctttgatcccgttaaagacattgcgggaaagggagcggtgctgacgagggcgaacttcggatgcggatcgtcccgtgaacacgctccgtgggcgcttgaagtaaacggtatcaacattgttatagcggaaagttttgcccgtatcttcaggcagaatatgtacaactgcggcatgatcgcctgcgaagttccgccaacggctttggaagaactgtttaaggaattcgcaaacgaaaaaacaacattgacggttgatacagacaagggcagtttgaatttcaaagcgggcggaaaagagaaaacagtttctttcaatcttaaaggttttgaaaaagctttggtggaagccggcggctgggtagagtacgccgcanagcattactaa

SEQ ID NO: 39206 - protein, 174 aa, Unknown
  Obtained from environmental sample
  DOMAIN (1)...(113): Aconitase C-terminal domain
  misc_feature (1)..(174): Xaa is any amino acid
MKMFGGEVLFLDRGDINTDEIIPAKYLTEDTRVALKSHLLEDLKIKGFDPVKDIAGKGAVLTRANFGCGSSREHAPWALEVNGINIVIAESFARIFRQNMYNCGMIACEVPPTALEELFKEFANEKTTLTVDTDKGSLNFKAGGKEKTVSFNLKGFEKALVEAGGWVEYAAXHY

SEQ ID NO: 39207 - DNA, 516 bp, Unknown
  Obtained from environmental sample
  misc_feature (1)..(516): n is a, c, g, or t
atgaaccccagaatcggtattataaaccatgccatccggctatttgcgggatccggaatagactttatggctcaaccgaatttgtttagttctgtttatgtctggtcgggcatttggcagcatttcggatggaacagtattatttaccttgccgcgctctcaggcatttcaccagaactccacgagtctgccatgattgacggagcaagccgtttcaaacggataatctacatagatattcccggaattctacctacaatgattattttgcttataatgaatttcgggtcaatcatgactgttggctttgaaaaaatattccttatgcaaaataatttgaatttaacagcttcgcaagttatttccacatatgtatatacagtgggcctgcgtacaatgcctcccgaattctcatacggttcggcaatagatctattcaattcaataattaatttaattttgattgttacagtaaataagctggcgcaaaagttcagcgagacaagcctctggtaa

SEQ ID NO: 39208 - protein, 171 aa, Unknown
  Obtained from environmental sample
  misc_feature (1)..(171): Xaa is any amino acid
MNPRIGIINHAIRLFAGSGIDFMAQPNLFSSVYVWSGIWQHFGWNSIIYLAALSGISPELHESAMIDGASRFKRIIYIDIPGILPTMIILLIMNFGSIMTVGFEKIFLMQNNLNLTASQVISTYVYTVGLRTMPPEFSYGSAIDLFNSIINLILIVTVNKLAQKFSETSLW

SEQ ID NO: 39209 - DNA, 399 bp, Unknown
  Obtained from environmental sample
  misc_feature (1)..(399): n is a, c, g, or t
atgaataaagcgaggaaaatgttaaaaaagaactggcagttatacgtccttttttctattcctttggcgtggttcataattttcagatattggcccatggttggcattcagatcgcctttaaagatttcagaatgggcgacacgattttaagcgccagatggataggtcttgcgaacttcagaaggttcttcagatattattatttccggcagttaatctggaataccctttcaattacaatctatcagctcttagcgggatttcccattcccattattttcgcccttgcccttaatacaacctataggacagggatgaaaaaaactgttcagtatattacctatatgccttacttcatctctacggtggttatggtcgggctcatgatgcagctatga

SEQ ID NO: 39210 - protein, 132 aa, Unknown
  Obtained from environmental sample
  misc_feature (1)..(132): Xaa is any amino acid
MNKARKMLKKNWQLYVLFSIPLAWFIIFRYWPMVGIQIAFKDFRMGDTILSARWIGLANFRRFFRYYYFRQLIWNTLSITIYQLLAGFPIPIIFALALNTTYRTGMKKTVQYITYMPYFISTVVMVGLMMQL

SEQ ID NO: 39211 - DNA, 732 bp, Unknown
  Obtained from environmental sample
  misc_feature (1)..(732): n is a, c, g, or t
gtgcttggtatagcgaagggaatgttaaggtgcgggttttccgggccagggaacggcttgccggtctgctgcgcggaatcctgcccggtgaaggagaggagagtcagaaagatggcgcgattatgtcctgatcgtcaactgctttcggtctattttgacggggagatgccttctccctggaaagaaaaaatggagtcccatattgccggttgtcctcagtgcgcccggcgtctggaggcataccagcgcatttcccacgcgcctgccgaggatgttttcgccggggaggcggaagcagtcaaagaacgggtttggcgcaaactggaacatcgtaccggcatggccgccggttcaaccgcatggccgacgactatacggggtggggcagtatggcggcggtatatttccgttccgcttcccgcggcggcggcggcgattattctgtttgttgccctgactctggtaattgccctgaagataacaggagcaacagcaaactccggcatgaccctcgccgccgagaccgagtttgacgcaccggatgttattcccgtttcggacatggaagatgtgatgcagtatttaagcagccgtgacaacggcgaaataatcatcctccgcctgccggaaagccgcaattttgttaactatggcgagcctgccattatcaaggccgctgattatacccgtcaggcaacgggccggaatatgccgggctggagaaaaccgtaa

SEQ ID NO: 39212 - protein, 243 aa, Unknown
  Obtained from environmental sample
  misc_feature (1)..(243): Xaa is any amino acid
MLGIAKGMLRCGFSGPGNGLPVCCAESCPVKERRVRKMARLCPDRQLLSVYFDGEMPSPWKEKMESHIAGCPQCARRLEAYQRISHAPAEDVFAGEAEAVKERVWRKLEHRTGMAAGSTAWPTTIRGGAVWRRYISVPLPAAAAAIILFVALTLVIALKITGATANSGMTLAAETEFDAPDVIPVSDMEDVMQYLSSRDNGEIIILRLPESRNFVNYGEPAIIKAADYTRQATGRNMPGWRKP

SEQ ID NO: 39213 - DNA, 399 bp, Unknown
  Obtained from environmental sample
  misc_feature (1)..(399): n is a, c, g, or t
atgaaactgaaatatatagcttttgcgcttctagtggcgctggcggtttcctgtatttccacggggccaattgagataccagatgatcttacgacagcggagttgatacagcgcggccaggaagcttctgacaggtacaattacaacgtttcaattcaatattatgaagcagtcattgaacgtttcccctacgacatcgacagcgttatcgcggcgggatacgagattgggttcattcattacaaacaaaaagattacgtacaggcaaaaaaagaattaaatcaggtcttggcccattacaatatctccgaccaggatctgcttcctgccaagtacaaaatattgtccaacatagtcctgggaaagatagaagagatagaaaacagcagaaaaagataa

SEQ ID NO: 39214 - protein, 132 aa, Unknown
  Obtained from environmental sample
  SIGNAL (1)...(20)
  misc_feature (1)..(132): Xaa is any amino acid
MKLKYIAFALLVALAVSCISTGPIEIPDDLTTAELIQRGQEASDRYNYNVSIQYYEAVIERFPYDIDSVIAAGYEIGFIHYKQKDYVQAKKELNQVLAHYNISDQDLLPAKYKILSNIVLGKIEEIENSRKR

SEQ ID NO: 39215 - DNA, 327 bp, Unknown
  Obtained from environmental sample
  misc_feature (1)..(327): n is a, c, g, or t
atggttgctggcattattggcgcggcaggctatgccggagccgagttggtaaggcttttgaaggggcataagaaggtagacgccctctgcctgggatcggtaagccttgaaggtggcaggatagagaacgtctatcccaattttcttgggaaggtctcctgccctctggtcaagcccgaagaggttgtaaaggcatcggacgtggttttcgcggccctgccccacggagtcggcgaggctttcgcgaaagcctgccttgaaaagaaggtgtcctttatagacctttccgcagacttccgctttgacgaggacgaagaaaccctttag

SEQ ID NO: 39216 - protein, 108 aa, Unknown
  Obtained from environmental sample
  DOMAIN (2)...(108): Semialdehyde dehydrogenase, NAD binding domain
  misc_feature (1)..(108): Xaa is any amino acid
MVAGIIGAAGYAGAELVRLLKGHKKVDALCLGSVSLEGGRIENVYPNFLGKVSCPLVKPEEVVKASDVVFAALPHGVGEAFAKACLEKKVSFIDLSADFRFDEDEETL

SEQ ID NO: 39217 - DNA, 606 bp, Unknown
  Obtained from environmental sample
  misc_feature (1)..(606): n is a, c, g, or t
ttggggcttgtcatatccaaacgtatcgttgagcttatgggcggcaggatttgggtcgaatctgaactcggcaaaggcgcgcggtttattttcaccataaaagcgatatgcggcaatacaagcccgcattcactgccgtcaacaatcattgattgcgtaaacgaacatttgggcgcggaaaacgccgctgaaagccagggggacgacgcggagtttcgtggtaaaacgctcctgcttgtcgaagatatagagatcaaccgtgaaatatttttagcgttgttggaaaataccggccttataatcgactgcgcggaaaacggtaaagaagctctggagatggtagaagcggcgtctgaaaaatacgacatgatattcatggacatgcaaatgcccaaaatggatggccttgaagcgacgcggcgcatacgcgcactgccgcttgcacgtcagcggggaagattgccaatcatagcgatgaccgcaaacgtttttaaggatgacattgaagcgtgtctcgcggcgggcatggacgatcatctcagcaaaccgcttgaaatgggcaaggtacttgaaaaactgcgcaaatataaacgaaaatcagattaa

SEQ ID NO: 39218 - protein, 201 aa, Unknown
  Obtained from environmental sample
  DOMAIN (75)...(194): Response regulator receiver domain
  misc_feature (1)..(201): Xaa is any amino acid
MGLVISKRIVELMGGRIWVESELGKGARFIFTIKAICGNTSPHSLPSTIIDCVNEHLGAENAAESQGDDAEFRGKTLLLVEDIEINREIFLALLENTGLIIDCAENGKEALEMVEAASEKYDMIFMDMQMPKMDGLEATRRIRALPLARQRGRLPIIAMTANVFKDDIEACLAAGMDDHLSKPLEMGKVLEKLRKYKRKSD

SEQ ID NO: 39219 - DNA, 798 bp, Unknown
  Obtained from environmental sample
  misc_feature (1)..(798): n is a, c, g, or t
atgtatgatcaggaactggcaaaaaccatggccggggccgggggtatcgggcttgccgccatgatgtacgagcagctttcgcgcaatctgagttccgccagcaaagacaccgccgccggcatgagcgggcggcccgcaggcttcgcggcggatctcgctcctgcgccgcttatgccgcctgccgcccaggcccgggaaaagccgacgccggccgtcgccgaagcgcccgtccggcagcaaaagccctccgcgcttgccggcttgtattccgaggccgggcaacccgacgcgccggccgccccaccgccgatctcgcccggcgctctggcggcgcaagccaggatgcaaagcaacgcacaaccggccgtcacgaccgtgcctgatgaaccgcagggcgcacgcccgataggtgtcccaacggacgggcacgcggaaaaaagctatatcagcaccttgggcaagccggtgcataagcccgcctccggcaaacgctccgtgctgccccgcgccgcatccggcaaccgtgtgcctgcgggccggcccgtcaaccgcaacctgccgttcatgcaacagtcgactcaacaggcgcaggcgcaggcgcaaacccaaatccagaacgccaacgcgatgccgccggctccggcgcccaccatccccggcccggcaagcacgggccgaaacagtcccggcgtggacgccctgaacgccttcgccgcccagcagaaaacagccccgcttgcgcccggcgcaagcctgccgggcgtctccgccccggacaaatccaagaccggaggataa

SEQ ID NO: 39220 - protein, 265 aa, Unknown
  Obtained from environmental sample
  misc_feature (1)..(265): Xaa is any amino acid
MYDQELAKTMAGAGGIGLAAMMYEQLSRNLSSASKDTAAGMSGRPAGFAADLAPAPLMPPAAQAREKPTPAVAEAPVRQQKPSALAGLYSEAGQPDAPAAPPPISPGALAAQARMQSNAQPAVTTVPDEPQGARPIGVPTDGHAEKSYISTLGKPVHKPASGKRSVLPRAASGNRVPAGRPVNRNLPFMQQSTQQAQAQAQTQIQNANAMPPAPAPTIPGPASTGRNSPGVDALNAFAAQQKTAPLAPGASLPGVSAPDKSKTGG

SEQ ID NO: 39221 - DNA, 378 bp, Unknown
  Obtained from environmental sample
  misc_feature (1)..(378): n is a, c, g, or t
ttgttcgccgacggattccgctggtttggtggcaaggtacgccttaatttccttaaagccgaattgcttccatatccagaggctgaaccgcagaacctcgcggatttcgtcttccatctgctccggcgtgcagaatatgtgagcgtcgtcctgggtaaaaccgcgaaccctcaaaaggccgtgcaggacgccggagcgctcgtagcggtacaccgtgccaagctcggcccagcgcaggggaagatcgcggtaagagcgccccttgttcttgtagatcattatgtggaaggggcagttcatcggctttatgatgtagtcctggttgtcaatctgcatcgggctgtacatgttgcccttgtaaaaacccaggtggcctga

SEQ ID NO: 39222 - protein, 125 aa, Unknown
  Obtained from environmental sample
  misc_feature (1)..(125): Xaa is any amino acid
MFADGFRWFGGKVRLNFLKAELLPYPEAEPQNLADFVFHLLRRAEYVSVVLGKTANPQKAVQDAGALVAVHRAKLGPAQGKIAVRAPLVLVDHYVEGAVHRLYDVVLVVNLHRAVHVALVKTQVA

SEQ ID NO: 39223 - DNA, 891 bp, Unknown
  Obtained from environmental sample
  misc_feature (1)..(891): n is a, c, g, or t
atgctgttaatcgaaaaagaactgcgcaaaaccataataggccaggatgaggcgatcaagcgcatcgcttccgctatcaggcgatcgagggcgggagtttcctctccgagacgtccgttaggctcatttattttcctgggacccacaggagtgggaaaaacataccttgccaaaaaactcgcgcaatatttgttttcgaacgaggacgcccttgtaagaattgacatgtccgattatatggaaaagcacaacgcgtcccgtcttgtcggcgccccccccggttacataggttatgaagagggcggaatgttaactgaaaaaataaggcgcaacccctaccgcgtggttttgtttgacgaaatagaaaaagcgcattacgacgtatttaatattttgttacaagtgcttgaagagggcgaacttagggacagccttggacacacgatcagtttccgcaatacaataatcattatgacgagtaacgccggggcgcgcgaaatttccaaagacagccgccttgggttttccaacgggccgtctaaccttaccgccacggaaattgaaacgcangcaatgtccgaaatgaagcgcattttcagcccggaatttatcaacagggtagacgagattgtagtatttaacccgctggagcaaaaacaaattaacgctatttttgacatagaaatagaggagctttcccgcccgccttacagagcaaaactattcgttaaaggtgtccggggctgcaaagcgcgttcttgtcgagaaaggatgggatcaaaaattcggcggcaggcatntgcgccgcacaattcaaaaagaactggaatccccgctttcagaccttatcctagaagactgctgggaagagggcgcggtttttaccgttga

SEQ ID NO: 39224 - protein, 296 aa, Unknown
  Obtained from environmental sample
  DOMAIN (4)...(260): Torsin
  misc_feature (1)..(296): Xaa is any amino acid
MLLIEKELRKTIIGQDEAIKRIASAIRRSRAGVSSPRRPLGSFIFLGPTGVGKTYLAKKLAQYLFSNEDALVRIDMSDYMEKHNASRLVGAPPGYIGYEEGGMLTEKIRRNPYRVVLFDEIEKAHYDVFNILLQVLEEGELRDSLGHTISFRNTIIIMTSNAGAREISKDSRLGFSNGPSNLTATEIETXAMSEMKRIFSPEFINRVDEIVVFNPLEQKQINAIFDIEIEELSRPPYRAKLFVKGVRGCKARSCRERMGSKIRRQAXAPHNSKRTGIPAFRPYPRRLLGRGRGFYR

SEQ ID NO: 39225 - DNA, 582 bp, Unknown
  Obtained from environmental sample
  misc_feature (1)..(582): n is a, c, g, or t
gtgacgacaggcccgtttgggatgatatttccccatgcccggccccttccggcaagtgaagaatgggtacgcgaggccgttgagaaaaccggcgccgttgtttcaggcgggctggtcaacctcccccgccacccttcccagctgtacgaaatgctttttgaggggataatactctgggcaatcatctggtttttcagaaaccgcaaaccttttaagggtttccttatcggcctgtactttttgggttacggcgttttccgtttctttatcgaatatttccgggaaccggattcgaatctcggctaccgtattgaatttgtcaaaagcaatctgcccaaggattacctggcctatatccaccccccgtttagtttttcaaccgggcagatactctgtttcataatgatcgttttcggcattgtatggatcatcgtctgttcgcgcctccccaaccgcgagccggtgcgcgtttatgaagaaggcgcagaaggcggcgagggcccaaaaatcgtcaaatcggaagcggaaaaagcaagcgagcgcaaccaacggcgcaaactgcgaaaaaaaatgaggaagtag

SEQ ID NO: 39226 - protein, 193 aa, Unknown
  Obtained from environmental sample
  DOMAIN (1)...(149): Prolipoprotein diacylglyceryl transferase
  misc_feature (1)..(193): Xaa is any amino acid
MTTGPFGMIFPHARPLPASEEWVREAVEKTGAVVSGGLVNLPRHPSQLYEMLFEGIILWAIIWFFRNRKPFKGFLIGLYFLGYGVFRFFIEYFREPDSNLGYRIEFVKSNLPKDYLAYIHPPFSFSTGQILCFIMIVFGIVWIIVCSRLPNREPVRVYEEGAEGGEGPKIVKSEAEKASERNQRRKLRKKMRK

SEQ ID NO: 39227 - DNA, 480 bp, Unknown
  Obtained from environmental sample
  misc_feature (1)..(480): n is a, c, g, or t
atgctccacaccgcaaaattggtacgcgaatattaccctgaatacaaagatcataaaattgtaattatatctccatgtatcgccaaacggcgtgaatttgatgaaactaatattggagattacaacgtaacaatgttagctttaaaaaattattttcaggagcataatatcgatctttcttcttttccggaaatagaatatctgggacctcacgcggaacgcgcggtaggattctccactccgggagggttaatggataccgctgagcgttttgttccgggtatcaggagaaaaactcataaaaccgagggcgttcacactatctatccgtatttacgggaaatatcaaaactgttgggaaacaaagatgttgaatttccgttattgatagactgcctgaactgtgaaaaaggctgtaacggaggtcccggaacgggaaacagcgatgtggcagtccctttactgaaacccgattcgtaa

SEQ ID NO: 39228 - protein, 159 aa, Unknown
  Obtained from environmental sample
  misc_feature (1)..(159): Xaa is any amino acid
MLHTAKLVREYYPEYKDHKIVIISPCIAKRREFDETNIGDYNVTMLALKNYFQEHNIDLSSFPEIEYLGPHAERAVGFSTPGGLMDTAERFVPGIRRKTHKTEGVHTIYPYLREISKLLGNKDVEFPLLIDCLNCEKGCNGGPGTGNSDVAVPLLKPDS

SEQ ID NO: 39229 - DNA, 888 bp, Unknown
  Obtained from environmental sample
  misc_feature (1)..(888): n is a, c, g, or t
atggaatacaattcgctgaatttcagtattgccggatcggacaatattcagcggagccttaaccgcacggcggaactggaaataaccatgaacaaaagcgatttcagaaacggcgaggaaatcgaattgatgatcaaagcgccgtacgcaggagcggggcttattacaattgagcgcgataaagtttacgcctaccgctggttcaggagcggcggggaaacatccatgcagaccatcaccgttccggctgatctggaggggaacgcgtatataaatgtccagtatttaagatcgcaggattcgcctgaaatatttatgtctcctctgagctatggggcggtttctttctccatcagccgcgagaatcgtaccaaccagatcacgctggacattccgggcgaggcaaaaccgggcgaagattttgtgataaaatattccaccgcccgcagcgggaagataattgtttacgcggtggacgagggtattcttcaactggcgtcttatcagacgcccgatccgctggcgttctttttcagaaaacgggcgcttgaagtgcggactgcgcaaatactcgacatggtgctgcccccctattctgttgttcaaaacctcgcggcaatgggcggtggcggcggttatgacgagcttgcgcgtaacctcaatccctttaaacggaagcagaatgctccggtggcgtattggtcggggattattgactcagggccggaaacaaaagaactgcgttaccgagtgccggattatttcaacgggacattaagggtaatggccgttgccgtaagcgacagtgcagtcggagcgggcgaagaccggtctttggttcgcagtacttttattatttctcctaacgcaccgatgtggtcgcgataa

SEQ ID NO: 39230 - protein, 295 aa, Unknown
  Obtained from environmental sample
  DOMAIN (22)...(168): Alpha-2-macroglobulin family N-terminal region
  misc_feature (1)..(295): Xaa is any amino acid
MEYNSLNFSIAGSDNIQRSLNRTAELEITMNKSDFRNGEEIELMIKAPYAGAGLITIERDKVYAYRWFRSGGETSMQTITVPADLEGNAYINVQYLRSQDSPEIFMSPLSYGAVSFSISRENRTNQITLDIPGEAKPGEDFVIKYSTARSGKIIVYAVDEGILQLASYQTPDPLAFFFRKRALEVRTAQILDMVLPPYSVVQNLAAMGGGGGYDELARNLNPFKRKQNAPVAYWSGIIDSGPETKELRYRVPDYFNGTLRVMAVAVSDSAVGAGEDRSLVRSTFIISPNAPMWSR

SEQ ID NO: 39231 - DNA, 852 bp, Unknown
  Obtained from environmental sample
  misc_feature (1)..(852): n is a, c, g, or t
atgatttacagaaaaatggcgcttttttgtattttgccgctgctgcttcaggcctgcgaaagcatgggcccaaaaagcagaattgagaaaccccagtccacccaatactattactcttatacgatacttcttacccccgaccatcccgacagtcccaagctggaaatagcgttgtccctgttccagatgaagtacccggccacgcagacgacgtttgtcaaccaggtgctgtattcaggcaccagcccggacgcttataaggacaaggtggtcaagcagcagagggaaaactaccgcaaatcattgtcgtatctggcggatcttgacagcgagcagcttaaaatctacgacctggaaggcgttgaaatagaggatttggaatcttcaaactggcgttatacggaaaacttcgcccccataagccccagaagcagggggataatcattgaacgcacaaaggaaacatacaccggcggcgcccacggaatgaagaccacacagtattatgtgatcgatttggaagcgcaaaaagttttaaaagtcgacgattttttcaaggattatcagggagaccagatacgggacattatttatgacgaacttagaaatttcagcggcctgaaaaaaaaccagcctctttccgaagggatatatttaaatgacgaaccggaactgactttcaatttctttgttaacgaggaagggctcggcctgcattgggatccctatgaaatcgccccctattccgagggcgcgatacagataatgctgccctggaaaaaaatccgccccctgctgctgaacagcggcatggagctgctttcaaagttcaatatttaccttttggtgtag

SEQ ID NO: 39232 - protein, 283 aa, Unknown
  Obtained from environmental sample
  SIGNAL (1)...(18)
  misc_feature (1)..(283): Xaa is any amino acid
MIYRKMALFCILPLLLQACESMGPKSRIEKPQSTQYYYSYTILLTPDHPDSPKLEIALSLFQMKYPATQTTFVNQVLYSGTSPDAYKDKVVKQQRENYRKSLSYLADLDSEQLKIYDLEGVEIEDLESSNWRYTENFAPISPRSRGIIIERTKETYTGGAHGMKTTQYYVIDLEAQKVLKVDDFFKDYQGDQIRDIIYDELRNFSGLKKNQPLSEGIYLNDEPELTFNFFVNEEGLGLHWDPYEIAPYSEGAIQIMLPWKKIRPLLLNSGMELLSKFNIYLLV

SEQ ID NO: 39233 - DNA, 309 bp, Unknown
  Obtained from environmental sample
  misc_feature (1)..(309): n is a, c, g, or t
atgaacctgaaagacccggaaacaagtatccacatcggctcctattaccttcattaccttatcggacaaatgggaaatccaatgctggcccttcttgcatataatgggggtatgggcagggtacggcgctggctggctgcggacaggcagcgggcaggcggcgctcttccctatgatctttttcttgaaagcatagaaatcagcgaaaccagggattacgggcgcctggttttgtccgccgcctctgtctacggctatctttattacgggacaagcatggaaaaaactgcggcggatatttaccggtaa

SEQ ID NO: 39234 - protein, 102 aa, Unknown
  Obtained from environmental sample
  misc_feature (1)..(102): Xaa is any amino acid
MNLKDPETSIHIGSYYLHYLIGQMGNPMLALLAYNGGMGRVRRWLAADRQRAGGALPYDLFLESIEISETRDYGRLVLSAASVYGYLYYGTSMEKTAADIYR

SEQ ID NO: 39235 - DNA, 1122 bp, Unknown
  Obtained from environmental sample
  misc_feature (1)..(1122): n is a, c, g, or t
atgcttgctgtgtaccgttcccttggcggcaaatctgaatctattggaccgaatacctggcggctaagcacaggaaatattggttcttcggaaattccggcggagcatgccgtgaaaatacgggcatccatccttttcgccggcccgctcctggctagaaccggcagggcggtgctgcctccccccggcggagatgtaatcggccgccgccgcctggacacccacttccttgcccttaccgagcttggagcgcaagtggaagtcaaggatacttttgtgtttagcagccctggccttaagggggcggatatttttttggacgaggcgtccgtaacggctacggaaaacgccgtcatggcggcggcgctggcgaatggcgaaaccatcctgaccaacgccgcaagcgagcctcatgtgcaggatctctgccgtatgctctgcgccatgggagctcgcattgagggaataggctccaacatcctcacaataaatggagcggaaaaacttcacggctgcgagtttacgataggggccgactttatggaagtgggttcctttatcggccttgcggccgccacaggcggggaactctacatcgaaggcacaaggccttccgatctcagacccgcaaaaacggcattcggcaaactggggatagtgtgggaacatgaaggcaatacccttcacgtgcctgccggtcaggccctcgaagttaactgcgacctcggggggatgatcccanagatagacgacgccccatggcccgggtttccacccgacttgaccagcatagttaccgttgtcgcgacacaggtaaagggaactgttttgatccacgaaaagatgtttgaatcgcgaatgttttttgtggacaaacttatcggcatgggcgcacacattgtgctatgcgatcctcaccgggctgtagtgtccggccccacccgcctgacaggttcggaactccaaagcccggatgtacgcgccggtatggccatggtgatagccgcaatggccgccgaaggcaaaagcaagatagacaacgtgtaccaaatagagcgtggctatgagaatatcgtggcaaggctctcgtctcttggcggtaaaataagcgcgatcccttga

SEQ ID NO: 39236 - protein, 373 aa, Unknown
  Obtained from environmental sample
  DOMAIN (1)...(362): EPSP synthase (3-phosphoshikimate 1-carboxyvinyltransferase)
  misc_feature (1)..(373): Xaa is any amino acid
MLAVYRSLGGKSESIGPNTWRLSTGNIGSSEIPAEHAVKIRASILFAGPLLARTGRAVLPPPGGDVIGRRRLDTHFLALTELGAQVEVKDTFVFSSPGLKGADIFLDEASVTATENAVMAAALANGETILTNAASEPHVQDLCRMLCAMGARIEGIGSNILTINGAEKLHGCEFTIGADFMEVGSFIGLAAATGGELYIEGTRPSDLRPAKTAFGKLGIVWEHEGNTLHVPAGQALEVNCDLGGMIPXIDDAPWPGFPPDLTSIVTVVATQVKGTVLIHEKMFESRMFFVDKLIGMGAHIVLCDPHRAVVSGPTRLTGSELQSPDVRAGMAMVIAAMAAEGKSKIDNVYQIERGYENIVARLSSLGGKISAIP

SEQ ID NO: 39237 - DNA, 1230 bp, Unknown
  Obtained from environmental sample
  misc_feature (1)..(1230): n is a, c, g, or t
atggaacacgaaatacaaattgaacatctgcttgaattaaaaacagatgaagtaaaattgcgcgaattggcggaattggaggcggaggatgcatcccgcgccaagggcgaattccattcccacatgagccatgaaatacttttttcgttaaatgccgttataggcatgataaacgttgcgaacgatgaaaaggatattgaagcgataaaactttatcttggaaaagcggacaacgcggcgaagcacgtattgggtgttattaacgatattcttgatatgtctaaaattgagacgaacaaacttgagctttcatacagtgaatttgattttgcaaaaatgatgacaagcattgttgatgtaataagtatccgcgctcaggaaaaacatatacaggttgtagttaatatgaatccgaatattcctacattcgtaatcagcgatgaattacggctgtcgcaggttattacaaatctaatgactaatgcgataaaattcacgcctgaaaacggcgatatcagattgagcgcggaaaagcaggatgaaagtgatggtgaaattaccgtaagaatcgaagtcgttgactccggcatagggatttcgccggagcagcaaaaaaagcttttcacgtcctacagtcaggccgacagcagtattacaaaaaacttcggcggcacaggcctagggctggccatttccaaacggattgttgaactaatgcagggaacaatatggattgagtcggaactgaacaaaggcgcgaaattcatattcacaataaaactgaaaaggggtacggagaaccttgctaaggctacgcccacaagttcaaaggcgaccgattttgatttcaatggatataccatattggtcgcggaagatatggcgttcaacagggaaatcctggcaaagtatctggaaaaaaccggcgtttccattgatttcgccgaaaacggcaaaatcgctgtttccatgttttcggagcgccctgaccgctacaatctgattttcaccgacgttcacatgccggaaatggatggagttgaagcgacacaggcgatacgggcgcttgaattgaagcgggcaaaggatatacctatcatcgcgatgaccgcggacgcttttaaggaagacatcgaaaaatgcctctctgcaggcatgaacgatcacatcgcgaaaccggttattcctaaacatctatacgcgacgctaaaaaagtacctgagttcatga

SEQ ID NO: 39238 - protein, 409 aa, Unknown
  Obtained from environmental sample
  DOMAIN (34)...(99): His Kinase A (phosphoacceptor) domain
  misc_feature (1)..(409): Xaa is any amino acid
MEHEIQIEHLLELKTDEVKLRELAELEAEDASRAKGEFHSHMSHEILFSLNAVIGMINVANDEKDIEAIKLYLGKADNAAKHVLGVINDILDMSKIETNKLELSYSEFDFAKMMTSIVDVISIRAQEKHIQVVVNMNPNIPTFVISDELRLSQVITNLMTNAIKFTPENGDIRLSAEKQDESDGEITVRIEVVDSGIGISPEQQKKLFTSYSQADSSITKNFGGTGLGLAISKRIVELMQGTIWIESELNKGAKFIFTIKLKRGTENLAKATPTSSKATDFDFNGYTILVAEDMAFNREILAKYLEKTGVSIDFAENGKIAVSMFSERPDRYNLIFTDVHMPEMDGVEATQAIRALELKRAKDIPIIAMTADAFKEDIEKCLSAGMNDHIAKPVIPKHLYATLKKYLSS

SEQ ID NO: 39239 - DNA, 906 bp, Unknown
  Obtained from environmental sample
  misc_feature (1)..(906): n is a, c, g, or t
atgccgtcccagtacgaggagcgggaactggcccttgctgacggcgtggaaatcaaagaacttttaggccctgaaacctggactaacgggattcttacatgcgaagtgatgcgcctcggcgattatgattcgtcaggcaggcggggcattgagggaaccggaaaaaaagagtcgctgcattttgatacggtaatcggcgcggtgggcgcaagggttgacaccgaggcatttgcgcgtaacaagattaaacttaacgcgaagggctttgccgaagtcagcgcctgttgtgaaagctccgtcccgaatgtttacattgccggtgactgcaaatcaggagccgcgaccgtggtcatggccattgccgacgccaaggccgctgccgctgacattctgcaaaaacttaaactggaagccgatttttcaacaaagccctcatgctccgttgtcgctgacatttccgatctttattataagaagggggtgatcagcgaattaaaaccggacaacaccgacgcctgccgctgtctttcgtgtaacagtctctgcgaaatttgcgttgatgtatgcccgaacagggccaatgtgatggtggaattggagcctgaaagcggcttgggaacacatcaagtcctgcatatcgaccgtatgtgcaacgaatgcgggaactgcgccactttctgcccccacgcgggcaagccgtataaggacaaaatcacggttttttgctgtgaagaggattttgccgaaagcgggaacgcgggctttcttaaaaccggcgctgatgttttcaagatccgtctggaaggcaagtccgcgctgacttaccgcaggggcgaagacacgatcccgaaacaatggatcgcgctgattgaggtggtcatgtcaaagtatgctcggccgatctga

SEQ ID NO: 39240 - protein, 301 aa, Unknown
  Obtained from environmental sample
  misc_feature (1)..(301): Xaa is any amino acid
MPSQYEERELALADGVEIKELLGPETWTNGILTCEVMRLGDYDSSGRRGIEGTGKKESLHFDTVIGAVGARVDTEAFARNKIKLNAKGFAEVSACCESSVPNVYIAGDCKSGAATVVMAIADAKAAAADILQKLKLEADFSTKPSCSVVADISDLYYKKGVISELKPDNTDACRCLSCNSLCEICVDVCPNRANVMVELEPESGLGTHQVLHIDRMCNECGNCATFCPHAGKPYKDKITVFCCEEDFAESGNAGFLKTGADVFKIRLEGKSALTYRRGEDTIPKQWIALIEVVMSKYARPI

SEQ ID NO: 39241 - DNA, 561 bp, Unknown
  Obtained from environmental sample
  misc_feature (1)..(561): n is a, c, g, or t
atgtttgcgtgtaacggaatactttttaatcatgaaagcccgattcgcggggaaacttttgttacccgcaaaatcacccgcgccgtcgcccgcataaaattaggattacaggataaactttttatgggtaatattgacgccaagcgcgactggggatatgccggcgattatgttgagttaatgtggcttatgcttcaacaggaaaaacccgatgactttgttatggcaaccggcgttacaactactgtacgcgattttatcacaatggcgtttttagaagtcggtatagtactgcaatgggaaggcaaagacgttcatgaaaaaggcattgataaagacagcggcaaagtccttgtagaaatagaccctcgttatttccgtcccgcggaagtggaaattttaataggagacccgtcaaaggcttacgaaaaactaggctggaaaccaaaagttcagcttcctgaattgataaaaatgatggtctataatgattttaagttagctgaaaaagaaatacatcttaaagagggcggttacgagataaaaaattattatgaataa

SEQ ID NO: 39242 - protein, 186 aa, Unknown
  Obtained from environmental sample
  misc_feature (1)..(186): Xaa is any amino acid
MFACNGILFNHESPIRGETFVTRKITRAVARIKLGLQDKLFMGNIDAKRDWGYAGDYVELMWLMLQQEKPDDFVMATGVTTTVRDFITMAFLEVGIVLQWEGKDVHEKGIDKDSGKVLVEIDPRYFRPAEVEILIGDPSKAYEKLGWKPKVQLPELIKMMVYNDFKLAEKEIHLKEGGYEIKNYYE

SEQ ID NO: 39243 - DNA, 822 bp, Unknown
  Obtained from environmental sample
  misc_feature (1)..(822): n is a, c, g, or t
atgtatctgtctataataaccatcaataaaaacaacgccgaaggtcttgaaaaaacaattcaaagcgttatttctcaaacaaataaaggctttgagtatatagttatagacggcgcctcaactgacggaagcgttgaaataattaaaaaatacagttccggtataaattattggattagcgaatctgatacaggcatttataacgctatgaataaaggcatccgaaaagcacagggagagtactgccttttcttaaatagcggcgattatctggtttcatcaacaacactgcaggaagtatttaatgaaataaataatattcccccggccgatattttttatagtaatatgattaccacaaacggcgctgttgtaaaataccctgcccccttaacaattaattatttcttaaatggtactatcagtcatcaaaattctttcataaagcgttcattatttacggaacacggtctttataacgaggaactgtacattgcttctgattgggaatattttttaaaagaatattggatatataaaagtaaattttcacatataaatacaggtatttcagtatttgatacaaacggaatcggctctcaatattctccgaaacgtcttaatgaaaatttaactatatttaaaaatgtttttcaggaattatcaaaacccattatcgaaaattatatttatcatagaacgatatattataatatagtaaaagactacggcgaaacanaattattaagttttttactaagattatacagattttttatttctaaaccaacaagattacttctctttttaaaaaaaacataa

SEQ ID NO: 39244 - protein, 273 aa, Unknown
  Obtained from environmental sample
  DOMAIN (4)...(153): Glycosyl transferase family 2
  misc_feature (1)..(273): Xaa is any amino acid
MYLSIITINKNNAEGLEKTIQSVISQTNKGFEYIVIDGASTDGSVEIIKKYSSGINYWISESDTGIYNAMNKGIRKAQGEYCLFLNSGDYLVSSTTLQEVFNEINNIPPADIFYSNMITTNGAVVKYPAPLTINYFLNGTISHQNSFIKRSLFTEHGLYNEELYIASDWEYFLKEYWIYKSKFSHINTGISVFDTNGIGSQYSPKRLNENLTIFKNVFQELSKPIIENYIYHRTIYYNIVKDYGETXLLSFLLRLYRFFISKPTRLLLFLKKT

SEQ ID NO: 39245 - DNA, 678 bp, Unknown
  Obtained from environmental sample
  misc_feature (1)..(678): n is a, c, g, or t
atgcatttgcccctaaccagatacggcttgccacaggttgcggtttatccccttcttgttcttttggcgatagcgctttgctttttctttattaaggatgcgcgtgttttaataccaatcgaaatcgttctttttcttgtatttttatggatgctttcttttttccgcgatcccacaaggacaattaacgccgacgaaacggttcttctttcgccggcggacggcacaatcaccgacattgcggttgtcgatgacagcgttcttggaaaaggcgctttaagggtagggatgtttttaagcattttttacgtccatataaaccgcgttccctgttccgtgcgtatagaaaacgtttcttacaaaaagggccagtttaaaaacgcattctctgccgaagccggtaagattaacgaatcaaatgatgttttaatggttcgcctggcggaaccaaaagacaggcttttggtaaggcagataagcggcgctattgcaaggcatatagtctgcgaagctgcggaggggaaagagtacaaacagggcgaacaattcggaatgataaagttcggctccaggactgagctttacattgccgccggaagcggctgcgaagcggccgttaaaattggcgacaaggttcaggccggaatatctccgcttgccaggtataggaataattga

SEQ ID NO: 39246 - protein, 225 aa, Unknown
  Obtained from environmental sample
  DOMAIN (47)...(220): Phosphatidylserine decarboxylase
  misc_feature (1)..(225): Xaa is any amino acid
MHLPLTRYGLPQVAVYPLLVLLAIALCFFFIKDARVLIPIEIVLFLVFLWMLSFFRDPTRTINADETVLLSPADGTITDIAVVDDSVLGKGALRVGMFLSIFYVHINRVPCSVRIENVSYKKGQFKNAFSAEAGKINESNDVLMVRLAEPKDRLLVRQISGAIARHIVCEAAEGKEYKQGEQFGMIKFGSRTELYIAAGSGCEAAVKIGDKVQAGISPLARYRNN

SEQ ID NO: 39247 - DNA, 1305 bp, Unknown
  Obtained from environmental sample
  misc_feature (1)..(1305): n is a, c, g, or t
ttggagaaaaaagggcatgaaggaatggaactttttcaaaaaaagaaatttccggattcaagacggaaatgcagaagggctgaccaagtttttaaaaggacaccttacggacaattcaagggcgatcttcgcaacctcataggagctgaaaaaatcattaaatttcccaaggatatggattatctggaagacaaggattgttcaactatacgcaaacggataaggagggcgttaaaaaatatccatatacatcctgaggaaatactggctttttccgagaaatttcttcaggcttcaaaaaagatcagaaaatacgtcaaagaacaggaacgccttcaaaagcacttgaaagtagtttcccttaaggaactgcgcactttggggcgttatcttacaatcaaagacgagcgcgagagggtggaagcggaactggggcttccttcggatgaaataaaagaaaagataaaacttgttcaggttacccagaaaaaattacggactcttgaagccgaatttgaggaaactaccgataacatcaacgaaatggcgggtgaaatacagcgcggccgcgtaatgatgaagaatgcgaaagacaggcttataaaggcaaacttaaggcttgtagtttccatcgcgaaaaagtacacaaacagggggcttcatttctttgaccttgtccaggaaggaaacataggccttataaaggctgtagaaaaatttgaatatcaaaagggatttaagttttcgacctacgccacatggtggataagacaggccataacccgctccatttcggatcaggcgcgcactatccgcgttcccgttcatatgattgagcagatcaacaaggtggtaagggaatcgcggcagcttatgcaggtattgggacgggagccgaccgacgaggaaatcgccgaccgccttggctggactgcccagcgggtgaaatcggttaaaaacgttgcaagggagccgattagccttgaaaccccaataggcgaagaagacgactccctgctgggggacttcatcgaggacaaggatgtggagaatccctccaaccagacccagttcaagatgcttcaggaagagataataaccatactcaagaccctgccggctagggaacaggacgtgcttaaaatgcgcttcggcttggatgacggctactccctgaccctggaagaggtcgggctttacttcaatgttacccgcgaaaggatccgccaaatcgaagcaaaagccctccgccgcctcaggcatcccaaacgcagccgccgtttaaaggactatcttgaccattag

SEQ ID NO: 39248 - protein, 434 aa, Unknown
  Obtained from environmental sample
  DOMAIN (368)...(421): Sigma-70, region 4
  misc_feature (1)..(434): Xaa is any amino acid
MEKKGHEGMELFQKKKFPDSRRKCRRADQVFKRTPYGQFKGDLRNLIGAEKIIKFPKDMDYLEDKDCSTIRKRIRRALKNIHIHPEEILAFSEKFLQASKKIRKYVKEQERLQKHLKVVSLKELRTLGRYLTIKDERERVEAELGLPSDEIKEKIKLVQVTQKKLRTLEAEFEETTDNINEMAGEIQRGRVMMKNAKDRLIKANLRLVVSIAKKYTNRGLHFFDLVQEGNIGLIKAVEKFEYQKGFKFSTYATWWIRQAITRSISDQARTIRVPVHMIEQINKVVRESRQLMQVLGREPTDEEIADRLGWTAQRVKSVKNVAREPISLETPIGEEDDSLLGDFIEDKDVENPSNQTQFKMLQEEIITILKTLPAREQDVLKMRFGLDDGYSLTLEEVGLYFNVTRERIRQIEAKALRRLRHPKRSRRLKDYLDH

SEQ ID NO: 39249 - DNA, 651 bp, Unknown
  Obtained from environmental sample
  misc_feature (1)..(651): n is a, c, g, or t
atgcctgaggcggcggagggcttttgcttcgatttggcggatcctttcgcgggtaacattgaagtaaagcccgacctcttccagggtcagggagtagccgtcatccaagccgaagcgcattttaagcacgtcctgttccctagccggcagggtcttgagtatggttattatctcttcctgaagcatcttgaactgggtctggttggagggattctccacatccttgtcctcgatgaagtcccccagcagggagtcgtcttcttcgcctattggggtttcaaggctaatcggctcccttgcaacgtttttaaccgatttcacccgctgggcagtccagccaaggcggtcggcgatttcctcgtcggtcggctcccgtcccaatacctgcataagctgccgcgattcccttaccaccttgttgatctgctcaatcatatgaacgggaacgcggatagtgcgcgcctgatccgaaatggagcgggttatggcctgtcttatccaccatgtggcgtaggtcgaaaacttaaatcccttttgatattcaaatttttctacagcctttataaggcctatgtttccttcctggacaaggtcaaagaaatgaagccccctgtttgtgtactttttcgcgatggaaactacaagccttaa

SEQ ID NO: 39250 - protein, 216 aa, Unknown
  Obtained from environmental sample
  misc_feature (1)..(216): Xaa is any amino acid
MPEAAEGFCFDLADPFAGNIEVKPDLFQGQGVAVIQAEAHFKHVLFPSRQGLEYGYYLFLKHLELGLVGGILHILVLDEVPQQGVVFFAYWGFKANRLPCNVFNRFHPLGSPAKAVGDFLVGRLPSQYLHKLPRFPYHLVDLLNHMNGNADSARLIRNGAGYGLSYPPCGVGRKLKSLLIFKFFYSLYKAYVSFLDKVKEMKPPVCVLFRDGNYKP

SEQ ID NO: 39251 - DNA, 696 bp, Unknown
  Obtained from environmental sample
  misc_feature (1)..(696): n is a, c, g, or t
ttgcgcgagccgtcgacatacaatgtcattatagagtcaatagcttgcggggcgtcgcggctaaacgaaatcgcgacaaagtccgggcttgagggcaacaagtgcgccaagtacctcaattcgttgataatgctggggttagcggccaaagagtacccgtttggcgaaatgggaggcaggcggagtatttataggcttgaggacctaatgtttcgattttggtatcgttttgtcttcccgaacacgagcgcggtggcggcggggctcggcgaccaagtctatgacaacgatgtcaagggtcagtataatgtgtacatggggttggtatttgaagaaatctgcaagcagtggctgattacgcaagcgaggaaaggcaaattgccgtttttcgtaagcaacatcggccgctggtggggcacgaacccgacggcgcgtacgcaggaggagattgacatcatggcggcgcgtgaaagcgacgcgttgctcgccgagtgcaaatggaaaaacgcggctgtcgatacggatgttctgcgcgacctaattcgcaaaagcgagatgtttggctataacaacgtccacctatatatcttcgctaaaagcgcgttcacaaacgggttgcgcgtagcggcggacaagcacgggcatacaaagctgcttatcttgcaagagatgatagaaagcgcggcgcaaccgtag

SEQ ID NO: 39252 - protein, 231 aa, Unknown
  Obtained from environmental sample
  DOMAIN (74)...(174): Archaea bacterial proteins of unknown function
  misc_feature (1)..(231): Xaa is any amino acid
MREPSTYNVIIESIACGASRLNEIATKSGLEGNKCAKYLNSLIMLGLAAKEYPFGEMGGRRSIYRLEDLMFRFWYRFVFPNTSAVAAGLGDQVYDNDVKGQYNVYMGLVFEEICKQWLITQARKGKLPFFVSNIGRWWGTNPTARTQEEIDIMAARESDALLAECKWKNAAVDTDVLRDLIRKSEMFGYNNVHLYIFAKSAFTNGLRVAADKHGHTKLLILQEMIESAAQP

SEQ ID NO: 39253 - DNA, 735 bp, Unknown
  Obtained from environmental sample
  misc_feature (1)..(735): n is a, c, g, or t
gtgctgatgaccagctttgaagggggagaaccgctgctgcgccccgacatcgaggaactgctcgcctacgcccgccgccgctgcaacttctatctccttttcaccacaagcgccaaagacctgctttcatacccgatagaccgctactcgcaatacatagacttcctgcacgtatcaatcgacgagggacacgacaatctagccctcttcgactccctacgcgaactctctaaactaccgctcggcctctccgtgcaaacagtggtcacccccgacacggtgaacgcgctggacaataaagtgcgcctctgccacgaaaacaacgccaacatcgtaatcatccccgccgccgtaatggacaacgccaaaaactgcttccccgacatggaccgcttagaacgcaaagtccgctacctgcgcaaactctaccccaacacaatccacacccccgccggcttcttcgacgcctaccgccaaggaaaatgctcaagcgcctcagtaatcattgccccggacggccgcctatactacccctgccacatcctcggcaaaaaaggccccgacctacgatttacagatttatcggactggctgacatcaaaagaagccgccgatatgcgtgggttgatgcggcactgcgaaagaaattgcggatggtaccaatactacgccatagactcatacacgtccgtatcgtcggtgatcgacgctttgcggcctgttgtgtttaactaa

SEQ ID NO: 39254 - protein, 244 aa, Unknown
  Obtained from environmental sample
  misc_feature (1)..(244): Xaa is any amino acid
MLMTSFEGGEPLLRPDIEELLAYARRRCNFYLLFTTSAKDLLSYPIDRYSQYIDFLHVSIDEGHDNLALFDSLRELSKLPLGLSVQTVVTPDTVNALDNKVRLCHENNANIVIIPAAVMDNAKNCFPDMDRLERKVRYLRKLYPNTIHTPAGFFDAYRQGKCSSASVIIAPDGRLYYPCHILGKKGPDLRFTDLSDWLTSKEAADMRGLMRHCERNCGWYQYYAIDSYTSVSSVIDALRPVVFN

SEQ ID NO: 39255 - DNA, 702 bp, Unknown
  Obtained from environmental sample
  misc_feature (1)..(702): n is a, c, g, or t
atggatgcactccgctaccttaaccgctggtataaagacggcattgttaacccggacgctcctgttcttttggaacctccaaaacaactgcccttctttaccggcatcggctggccttcggcggcttccatttggcagaccaataacggcgtagcgaagtatgatcttgaaaaagcctttgggccttcctattccaccgactcgattcagggttccatgaactcaatcagcgctaattccaaatccaagaccgaagctctcaaactcctggaactggtaaacaccgatcgtaaaatgcgggacatgctagcctatggaatcgaaggggtaaatttctcctatgtcaaacccaccgttgtaaaactccttaccgcggaccaatggaacctcgcccgctaccagcagggaaccttctttacaatgtccgacacggaaggaagcgaagggcagtgggatgaagtacgccagcaaaacgagcaagctactcaatctgtactgaacggattcatatttgacaacagggccgtaatgaacgaggttgcgaactgcaaagccgtctgggaaaaatataataaagaactcctcaccggcgcttccgatccggatgtggctgttcccgcaatgatacgcgatcttaacgcggcaggtttccagagtgttattgctgaagcccagcggcaggtagacgctttcaggcgctag

SEQ ID NO: 39256 - protein, 233 aa, Unknown
  Obtained from environmental sample
  misc_feature (1)..(233): Xaa is any amino acid
MDALRYLNRWYKDGIVNPDAPVLLEPPKQLPFFTGIGWPSAASIWQTNNGVAKYDLEKAFGPSYSTDSIQGSMNSISANSKSKTEALKLLELVNTDRKMRDMLAYGIEGVNFSYVKPTVVKLLTADQWNLARYQQGTFFTMSDTEGSEGQWDEVRQQNEQATQSVLNGFIFDNRAVMNEVANCKAVWEKYNKELLTGASDPDVAVPAMIRDLNAAGFQSVIAEAQRQVDAFRR

SEQ ID NO: 39257 - DNA, 477 bp, Unknown
  Obtained from environmental sample
  misc_feature (1)..(477): n is a, c, g, or t
atgaggcactgcatgaacctttccaaattagagcctgttcacactaataattgcatcggcaaccatcgcaaaatagatgaacccagcaaagacaacgtccagcttgtcatatctggtgaaaatcttgcggaaccgcttcaggcgcaggaaaaagcgctcaatctcgttccgtttcttgtagcgctctttgtcgtactcccaaggctccctgcggctcctctttggcggaacgaccggcacgaaccccatgccagcggccttcccccgcattttgtcgccctcgtgggccctgtccatcaaaatgaaaagccgctccggcagccgctcgaagcagccgagcagcagcccgccctccggcgcgtcgtgcctgttcccgccagacagcgaaaaagctacagccgcgcggtcagacgcggcgaccacatgaatcttgtggtgagccctccgcgcgatctcccgatgctcggccgattctga

SEQ ID NO: 39258 - protein, 158 aa, Unknown
  Obtained from environmental sample
  misc_feature (1)..(158): Xaa is any amino acid
MRHCMNLSKLEPVHTNNCIGNHRKIDEPSKDNVQLVISGENLAEPLQAQEKALNLVPFLVALFVVLPRLPAAPLWRNDRHEPHASGLPPHFVALVGPVHQNEKPLRQPLEAAEQQPALRRVVPVPARQRKSYSRAVRRGDHMNLVVSPPRDLPMLGRF

SEQ ID NO: 39259 - DNA, 396 bp, Unknown
  Obtained from environmental sample
  misc_feature (1)..(396): n is a, c, g, or t
gtggtcgccgcgtctgaccgcgcggctgtagctttttcgctgtctggcgggaacaggcacgacgcgccggagggcgggctgctgctcggctgcttcgagcggctgccggagcggcttttcattttgatggacagggcccacgagggcgacaaaatgcgggggaaggccgctggcatggggttcgtgccggtcgttccgccaaagaggagccgcagggagccttgggagtacgacaaagagcgctacaagaaacggaacgagattgagcgctttttcctgcgcctgaagcggttccgcaagattttcaccagatatgacaagctggacgttgtctttgctgggttcatctattttgcgatggttgccgatgcaattattagtgtgaacaggctctaa

SEQ ID NO: 39260 - protein, 131 aa, Unknown
  Obtained from environmental sample
  misc_feature (1)..(131): Xaa is any amino acid
MVAASDRAAVAFSLSGGNRHDAPEGGLLLGCFERLPERLFILMDRAHEGDKMRGKAAGMGFVPVVPPKRSRREPWEYDKERYKKRNEIERFFLRLKRFRKIFTRYDKLDVVFAGFIYFAMVADAIISVNRL

SEQ ID NO: 39261 - DNA, 900 bp, Unknown
  Obtained from environmental sample
  misc_feature (1)..(900): n is a, c, g, or t
gtgaaaagaaatttatcagcaagagaaaaacgctcctcctatttgcttctggccggacctgcggtgattatctacctgtttgtaatggccttcccgactgttttttccgtgattttaagtttgaccaattattcgggaggcaaaattttcggcggcccgaacgcaggttttgccggccttaagagttacgaggcgattttctcagacaaatatttttacatgtcgcttgtcaacaatttatggatagtgcttatatctattctgggacagataccccttggattctttctggcatacatactttcgcgcgggcttatcaagggaaaagatttttttcagaccatgatatacctgcccaatgtgatttcttccgttatcatcggcatcctgttcaacaaattcttgttaacgtccaacagtgtctctctggaaatccagcgcttttttaattccgcggcggaattcgtacccggaaaaaacgccatgctgcctgtgcttctggtgatgctctggatgtataccggaacctacgtgatcatctttctcgcgaatctgcacaagatcgacatttcaattattgaagcttcaaaaatcgacggcgcaagcgagatgcagacattacgctacatcattctgcccgcgctgtccggcgtgattgttaccaccgcgatcctggcgatttcaggctcgcttaaatcttttgatcttgtctttgtaatgacccagggaggacccgcacacagaaccagcgtcctcgccctgtatatgtacgagaaggcgttcaggggagcgccgaattatccggtggcaaacgccatttcgacggtgatggttattatcagctttgtattgatctgcgtcaccagaatcgctgaaaagcgctattcggcgggaaggtag

SEQ ID NO: 39262 - protein, 299 aa, Unknown
  Obtained from environmental sample
  DOMAIN (72)...(297): Binding-protein-dependent transport system inner membrane component
  misc_feature (1)..(299): Xaa is any amino acid
MKRNLSAREKRSSYLLLAGPAVIIYLFVMAFPTVFSVILSLTNYSGGKIFGGPNAGFAGLKSYEAIFSDKYFYMSLVNNLWIVLISILGQIPLGFFLAYILSRGLIKGKDFFQTMIYLPNVISSVIIGILFNKFLLTSNSVSLEIQRFFNSAAEFVPGKNAMLPVLLVMLWMYTGTYVIIFLANLHKIDISIIEASKIDGASEMQTLRYIILPALSGVIVTTAILAISGSLKSFDLVFVMTQGGPAHRTSVLALYMYEKAFRGAPNYPVANAISTVMVIISFVLICVTRIAEKRYSAGR

SEQ ID NO: 39263 - DNA, 567 bp, Unknown
  Obtained from environmental sample
  misc_feature (1)..(567): n is a, c, g, or t
atgaattttgaaatggttatggctttatccgaagcattggatgccagagacaaatataccgctggtcattcacgccgagttatggaatattccttgggcattgcaagtcatttgaaattgccagaaaaagatattcacgggcttaaaatgtctgccttgctgcacgatattgggaaaatagggatatccgatatagttcttcataaagaatctaaattgtcggataaagaatttgccgtgattaagaaacatccagaaataggggcaaatattcttagagcagtaggaacctttaaagatttggttcccgtagtttatcatcatcatgaaaggtttgatggcaagggttaccctaagggcatttatggcgagcaaattcctctgtatgcgcgaatcatagcagtagcggatagttttgatgcaatgacatcaaccagaccgtacagaaaagcgcttcgcattgaaagtgctttgctggaaatagagttgaatgggggaaagcaatttgacccttcaatttccaatgttttcatcgatcattttgtggaatatttgatgaagcattga

SEQ ID NO: 39264 - protein, 188 aa, Unknown
  Obtained from environmental sample
  DOMAIN (20)...(142): HD domain
  misc_feature (1)..(188): Xaa is any amino acid
MNFEMVMALSEALDARDKYTAGHSRRVMEYSLGIASHLKLPEKDIHGLKMSALLHDIGKIGISDIVLHKESKLSDKEFAVIKKHPEIGANILRAVGTFKDLVPVVYHHHERFDGKGYPKGIYGEQIPLYARIIAVADSFDAMTSTRPYRKALRIESALLEIELNGGKQFDPSISNVFIDHFVEYLMKH

SEQ ID NO: 39265 - DNA, 690 bp, Unknown
  Obtained from environmental sample
  misc_feature (1)..(690): n is a, c, g, or t
atggatcttcaggcgttaaacaccgaatttgacaccgtacggcagtcggtaaaaatgaccgtcggaaggcagggcaaccatttcccaattctgacaagcgaatatttccgctgtggccccaacgacgtcgcttttcgggaaaacgtcataactatgctggccaggattgaaagcatagacaaggaagtgttctgccgtacttataaaaacaagcttaaccgcatagtcccctatgtggtgctgctcccgtgttacggcgataccggggtatgctgggagccttttaacaaacacaacagggcgacaagccgcgggcgtatttttatccccatgtatcccaaaaatttttatatagcggttctaagcgcggtcgccgacttgcgctggcaggtcgccaaagagaaggcgtcattttactggatggaagagggccttaccggcaactactaccaatggttcgtcgcgcagaagctgaaaggggatgtaaaggattatttcatacaggattacattctctggatgacaaaagaagccgaaggcatacaaaaacttgataaagaaattcgcgggacattctggcggcacatgccgttcgcgcagccggtcaaagaaaaacttaaaacccgcagtttggtttaccaggagcttattcagcgcgatctaacccgccaaatgtttgatggatattga

SEQ ID NO: 39266 - protein, 229 aa, Unknown
  Obtained from environmental sample
  misc_feature (1)..(229): Xaa is any amino acid
MDLQALNTEFDTVRQSVKMTVGRQGNHFPILTSEYFRCGPNDVAFRENVITMLARIESIDKEVFCRTYKNKLNRIVPYVVLLPCYGDTGVCWEPFNKHNRATSRGRIFIPMYPKNFYIAVLSAVADLRWQVAKEKASFYWMEEGLTGNYYQWFVAQKLKGDVKDYFIQDYILWMTKEAEGIQKLDKEIRGTFWRHMPFAQPVKEKLKTRSLVYQELIQRDLTRQMFDGY

SEQ ID NO: 39267 - DNA, 609 bp, Unknown
  Obtained from environmental sample
  misc_feature (1)..(609): n is a, c, g, or t
atgtcaatggctaaactgtgtgaatccgcaatagaagagatggcaatcaccgaactccataaactcggttatacctacatatccggcgttgatctcgctcccgacgctctgagtcccgaacgcaataactatggggatattctgcttatgggaaggttacaggcggctctttccaaattgaatcctgctatctacgccgatgtcattcaaggagcggctcaaaaattgtccagaatagcaacatcgaacctgcttgccgataacgaagaattccaccgtatgcttgttgacggcattcctgtggaatatcgcaaagacagcgatattaaaggcgattatttgcgtgtagtggattttgataacccgttgaacaacgatttccttgtggtcaatcaatatacgattgttcaaaacaataacaacaagcgccctgatgtgctgttattcgtcaatggtatacctttggtgattttcgaattgtataaccctgccgacgaaaacgctacttgctacatggtgtttgaccatttgtggcttataacttggcgaaacctgtgctttttccttttaaaaaaatttttgtttgtttcctatggttttgtaaactaa

SEQ ID NO: 39268 - protein, 202 aa, Unknown
  Obtained from environmental sample
  DOMAIN (5)...(182): Type I restriction enzyme R protein N terminus (HSDR_N)
  misc_feature (1)..(202): Xaa is any amino acid
MSMAKLCESAIEEMAITELHKLGYTYISGVDLAPDALSPERNNYGDILLMGRLQAALSKLNPAIYADVIQGAAQKLSRIATSNLLADNEEFHRMLVDGIPVEYRKDSDIKGDYLRVVDFDNPLNNDFLVVNQYTIVQNNNNKRPDVLLFVNGIPLVIFELYNPADENATCYMVFDHLWLITWRNLCFFLLKKFLFVSYGFVN

SEQ ID NO: 39269 - DNA, 354 bp, Unknown
  Obtained from environmental sample
  misc_feature (1)..(354): n is a, c, g, or t
atgacagtcggtcgtgttgcaatagctcagtgcgatatgacaacaaatgaagcaatagcacacttcaaatataaaaacgactatgaagctgaatatttgtactgctatttgaaatcattcgattattactcacttggtagtacatcgtccatagcaacggcggtgaactcgaagataataaaagctatgccgtttattatgccaaatgaagaaatattgaaaaaattccacgttttaacaaatccgttattcgtaaaaatcgaagcaaacacaaaacaaatcctcacactgcaaaaactccgtgacacgcttttaccaaagctaatcaatggtgaagtacgggtgaaacaatag

SEQ ID NO: 39270 - protein, 117 aa, Unknown
  Obtained from environmental sample
  misc_feature (1)..(117): Xaa is any amino acid
MTVGRVAIAQCDMTTNEAIAHFKYKNDYEAEYLYCYLKSFDYYSLGSTSSIATAVNSKIIKAMPFIMPNEEILKKFHVLTNPLFVKIEANTKQILTLQKLRDTLLPKLINGEVRVKQ

SEQ ID NO: 39271 - DNA, 861 bp, Unknown
  Obtained from environmental sample
  misc_feature (1)..(861): n is a, c, g, or t
ttggataaattgctgccgtatcaaaaggccgactttgcggagttgttcacgataatggacggcctgcctgttacgataagattgatagacccgccgttgcatgaattcctgccgcataccgaatcggaaatgaaggaattggcgaagcatataggcgtttcgttcgaatttgtaaagtcgcgtacggacgcgttgcacgaggcgaatcctatgttggggcatcgcggttgccgtttggcgataacgtatcccgagattgcggagatgcagacgcgggcgatactgggcgctgcgctggaatgcaagaagaagggcgtaaaagtccatcccgaaatagaagttcctttggtcggaagcaaaaaggaagtcgatattgtaaagacggtcatagacgacaccgccgcggcgctgtttaaggaagcgggcgacaaggttgagtacaaggtcggctcgatgatagaactgccgagggcggcgcttttggcgaacgagatagcggaaagctgcgaattcttctcgttcggaacgaacgacttgacgcagacgacgctgggtatgagccgcgacgatactggcgcgatactggacgaataccgcgcgaaaggcgtgtacgtcgcggatccgttcgcctcgatcgaccagcttggagttgggattttgatagaggacgcgacgaagaaagcccgcgcggtcaaaggcgcgaagataaaggtctttgtgtgcggcgagcacggcggcgatccggaaagcgtaaagttcttccataggataggccttgacggtacgtcatgcagcccgtttagggtgccgatcgcacgccttgcggcggcccaagcggcggtaaagaacccaaggaaataa

SEQ ID NO: 39272 - protein, 286 aa, Unknown
  Obtained from environmental sample
  DOMAIN (1)...(281): PEP-utilising enzyme, TIM barrel domain
  misc_feature (1)..(286): Xaa is any amino acid
MDKLLPYQKADFAELFTIMDGLPVTIRLIDPPLHEFLPHTESEMKELAKHIGVSFEFVKSRTDALHEANPMLGHRGCRLAITYPEIAEMQTRAILGAALECKKKGVKVHPEIEVPLVGSKKEVDIVKTVIDDTAAALFKEAGDKVEYKVGSMIELPRAALLANEIAESCEFFSFGTNDLTQTTLGMSRDDTGAILDEYRAKGVYVADPFASIDQLGVGILIEDATKKARAVKGAKIKVFVCGEHGGDPESVKFFHRIGLDGTSCSPFRVPIARLAAAQAAVKNPRK

SEQ ID NO: 39273 - DNA, 1203 bp, Unknown
  Obtained from environmental sample
  misc_feature (1)..(1203): n is a, c, g, or t
atggcgagtccgatgaactccgcgcttgatactcggaaattctgcttggcaaaggcggcggcgaaactgaaaagcaaatttacctgttttaaggacaacggggagcgcgatgtcgcccttcggtttgacttgacagtccctttcgcgcgttttacggcaatgcacagcgcggaacttactttccccttcaaacgttaccacataggaaaagtttggcggggcgaaaacacacaacgcgggcgctaccgcgaatttatgcagtgcgattttgacataataggaagcgacagccccgcggcggattttgaaattattctcctaatccattccgccatgaaaaacctcggcgttgacgttaccattcatgtaaaccaccgcggccttttcaaccgctttttgtcccacatcggacaaagcgaaaaatcagtcgaggttctccgcgcggtagataaacttggcaaggtgggggaggacgaaactcttaaaagcctgacagagcttgcaggcgaagcaaacgcgaataaaattattgaatttataaacgcgaaaggcggtttccggcaagtgcttgatcgtctaacggaattgtccggcggcatctgccccgaagccgaacggctggcttccctccgtcaatttatggcggattccctgggcggcggctctaaagccgatgaaccctcaaccgaactttttatccttaacccctcaattacccgcggccttgattactacacgggagtggtttttgaaaccttcctgaacgatttgcccgacataggctccgtctgttccggcggccgttacgacaacctcgccggcctgtactccaaagacaaaaactcaatcagcggcgtaggcgcgtccatcggtcttgaccgccttctttccgcccttgaaagcctcaacaaactgcccgccgcaaataactgccgcgccgccatagcctgcgtagacgctgaaaaatcgggacagtatcaggcgcttgcggtaaaactgcggcaaaagggactgccctgcgaagtatttacggagcagattgaccttgttaagcaatacatattcgcggaaaagaagggactgtcttttgtgataataccgggcgaaaacccttttgacgacactcttaccctgcgcgaccttgccggacggcgaaatatcgaaatgtcagtagaagaagccgtttctaggattttatcgtaa

SEQ ID NO: 39274 - protein, 400 aa, Unknown
  Obtained from environmental sample
  DOMAIN (312)...(400): Anticodon binding domain
  misc_feature (1)..(400): Xaa is any amino acid
MASPMNSALDTRKFCLAKAAAKLKSKFTCFKDNGERDVALRFDLTVPFARFTAMHSAELTFPFKRYHIGKVWRGENTQRGRYREFMQCDFDIIGSDSPAADFEIILLIHSAMKNLGVDVTIHVNHRGLFNRFLSHIGQSEKSVEVLRAVDKLGKVGEDETLKSLTELAGEANANKIIEFINAKGGFRQVLDRLTELSGGICPEAERLASLRQFMADSLGGGSKADEPSTELFILNPSITRGLDYYTGVVFETFLNDLPDIGSVCSGGRYDNLAGLYSKDKNSISGVGASIGLDRLLSALESLNKLPAANNCRAAIACVDAEKSGQYQALAVKLRQKGLPCEVFTEQIDLVKQYIFAEKKGLSFVIIPGENPFDDTLTLRDLAGRRNIEMSVEEAVSRILS

SEQ ID NO: 39275 - DNA, 1287 bp, Unknown
  Obtained from environmental sample
  misc_feature (1)..(1287): n is a, c, g, or t
ttgatggccgagcgctttgattttcccatctccggccactggatatggggcggcggctggcttgctgatcttggtttccatgactttgcgggttctaccgcggtacatatggtcggcggcgtagcgtctatggtcggcgcggcaattgtcggtccgcgtattggcaaatattccaaaacgggcgaagctcgcgctattccgggacacagcttaacgcttggcgctctcggcgttttcatactctggttctgctggtttggttttaacggcggttctactgtcgccatgactagccaggatgatatcgtgtctgccagcagtattttcgttacaacaaaccttgcggcggcaaccgcggcggtctttaccatgttcattacatggatacgctacaaaaaacctgacgtgtccatgacgcttaacggcgctcttgccggccttgtggcaatcaccgcgggatgcgatgcggtatcgccgttcggcgcgttctgtatcggggccatatcggcatttgtaatcgtgttcggaattgaatttgtagacaaagtattgaagattgacgatcctgtcggagcaatcggagtacacggtctttgcggagcggcaggaacaatccttaccggtatattcgcgcttgatggcggactggcgtacggcggcggatgggctatggttggcgtccagactctcggcgttgtatcggtagcggcatgggtagcggtaacaatgtccatcgtctttacgattatcaagaaaacgataggactgcgtgtttcacatgccgaggaaattgccggtctggatattacggaacacaacattgaaagcagctatgccgactttatggtatctacatcccttgaggccgataaggatgccgtggttccagccaatgtgtcagtccccgttgtaaacaactcaaagcccggctcgaagatgacgaagatatcggtcattaccaatcagaacaagctcaccctgcttcacgccgccctcgacaagattggcattaccggcctgaccgtcaccaatgttttgggccacggaatgcagaagggccatgtggaatattaccgcggcgctcctgtaaatatcaggctgctgcccaaggttcaggttgacatggtcgtaagcaagataccgacgcaaactgtaattgatgccattaaaaaggtattgtatacaggaaaagtgggcgacggcaagatatttgtttacgatgttgaaaatgtcgttaaagtccgcaccggcgagcaaggctacgacgctctgcaggataacgagtag

SEQ ID NO: 39276 - protein, 428 aa, Unknown
  Obtained from environmental sample
  DOMAIN (316)...(417): Nitrogen regulatory protein P-II
  misc_feature (1)..(428): Xaa is any amino acid
MMAERFDFPISGHWIWGGGWLADLGFHDFAGSTAVHMVGGVASMVGAAIVGPRIGKYSKTGEARAIPGHSLTLGALGVFILWFCWFGFNGGSTVAMTSQDDIVSASSIFVTTNLAAATAAVFTMFITWIRYKKPDVSMTLNGALAGLVAITAGCDAVSPFGAFCIGAISAFVIVFGIEFVDKVLKIDDPVGAIGVHGLCGAAGTILTGIFALDGGLAYGGGWAMVGVQTLGVVSVAAWVAVTMSIVFTIIKKTIGLRVSHAEEIAGLDITEHNIESSYADFMVSTSLEADKDAVVPANVSVPVVNNSKPGSKMTKISVITNQNKLTLLHAALDKIGITGLTVTNVLGHGMQKGHVEYYRGAPVNIRLLPKVQVDMVVSKIPTQTVIDAIKKVLYTGKVGDGKIFVYDVENVVKVRTGEQGYDALQDNE

SEQ ID NO: 39277 - DNA, 315 bp, Unknown
  Obtained from environmental sample
  misc_feature (1)..(315): n is a, c, g, or t
gtgaataaaaaccgcaagagtctttccaatgtttcagtggaagaacaggaaatggaaaaagtaaaaccccgccgttttacaatggtgacattccgggctttcaggcccctggatccaaaaatcctgaaaaaactattcaggctttgcgcggacgggggaacattagccgcatacaaagggcggcggagcaaagtcgaagcggaaatggcggagcttgaacagcagatgccaaatcaaaccatacgatgggaactcatcccctgccccgtccccttcttagatgaagaaagacacgtactaataattaggaattag

SEQ ID NO: 39278 - protein, 104 aa, Unknown
  Obtained from environmental sample
  misc_feature (1)..(104): Xaa is any amino acid
MNKNRKSLSNVSVEEQEMEKVKPRRFTMVTFRAFRPLDPKILKKLFRLCADGGTLAAYKGRRSKVEAEMAELEQQMPNQTIRWELIPCPVPFLDEERHVLIIRN

SEQ ID NO: 39279 - DNA, 342 bp, Unknown
  Obtained from environmental sample
  misc_feature (1)..(342): n is a, c, g, or t
atgcgctacacggcctgcgtgttggccgccttcgtcgtctatcacctgctgcacctgaccgtgggctggggcgcgattgaccatgccttcaagcatggcgacgcatacggcaactttgtccgtggcttccaaaactggccagtgagcgctttctacatcgtcgccaatctttgtcttggcctccacatctggcacggtgtctggagcttcagccaaacactgggctggtcgcacccgcgctatgacgccctgcggcggcgcatcgcaagcatctggagcctagtggtggtctgcgtcaatgtttcttacccgctggcggttttgtccggctatttgatgtga

SEQ ID NO: 39280 - protein, 113 aa, Unknown
  Obtained from environmental sample
  misc_feature (1)..(113): Xaa is any amino acid
MRYTACVLAAFVVYHLLHLTVGWGAIDHAFKHGDAYGNFVRGFQNWPVSAFYIVANLCLGLHIWHGVWSFSQTLGWSHPRYDALRRRIASIWSLVVVCVNVSYPLAVLSGYLM

SEQ ID NO: 39281 - DNA, 408 bp, Unknown
  Obtained from environmental sample
  misc_feature (1)..(408): n is a, c, g, or t
gtgttacacataatatacaatttttttaccgccacgcggtggcttttttattatattataataggaggacgcgccaacatgaacccaaatgtcaaaacagaactcgacaaaatagtaaatacgctggccgaaacagggatcgtaacaaaaatcatcctgttcggctcatacgctaagggcgaagaaactccgaacagcgatattgatctgtgcgtcctcacgccgatagacgataaacgccctattgaacttatgtccggcttcagaaaaaaactacggggtgtcaagactatgccgttagacttattggcttttaatcaagatgaattctattcttatgttgattgcccggcctcgtttcaacatgaaatcgcgatgaatggggtattactgtatgaacacaaatga

SEQ ID NO: 39282 - protein, 135 aa, Unknown
  Obtained from environmental sample
  DOMAIN (31)...(131): Nucleotidyltransferase domain
  misc_feature (1)..(135): Xaa is any amino acid
MLHIIYNFFTATRWLFYYIIIGGRANMNPNVKTELDKIVNTLAETGIVTKIILFGSYAKGEETPNSDIDLCVLTPIDDKRPIELMSGFRKKLRGVKTMPLDLLAFNQDEFYSYVDCPASFQHEIAMNGVLLYEHK

SEQ ID NO: 39283 - DNA, 414 bp, Unknown
  Obtained from environmental sample
  misc_feature (1)..(414): n is a, c, g, or t
atggggtattactgtatgaacacaaatgaacttgttgtcagtgaatggatttcggcggcattagaggattttggtagcgcaaccgtgttggctaaagtaccgtattacgcgccggcgtgctaccattgccaacaagctgtcgaaaaaattctgaaagcctatattattgcgaaagaaaatatattaataaaaacacatgaccttgacgatcttattaatatgtgtgaaaaacacgctatagagttcgttgaactcaaagatgcttgcgaagatttaacactatatactaccatacgatatccgccttttgggaatttgactgagaacgatactaaacatgcgctaaatgatgctcaggccgtactggagttcacaaaatctaaattggcggaacttgggttttgtgcgacgtga

SEQ ID NO: 39284 - protein, 137 aa, Unknown
  Obtained from environmental sample
  DOMAIN (13)...(128): HEPN domain
  misc_feature (1)..(137): Xaa is any amino acid
MGYYCMNTNELVVSEWISAALEDFGSATVLAKVPYYAPACYHCQQAVEKILKAYIIAKENILIKTHDLDDLINMCEKHAIEFVELKDACEDLTLYTTIRYPPFGNLTENDTKHALNDAQAVLEFTKSKLAELGFCAT

SEQ ID NO: 39285 - DNA, 795 bp, Unknown
  Obtained from environmental sample
  misc_feature (1)..(795): n is a, c, g, or t
ttgggtttaaaattttgcgagcattggtatgaatggctcgccataatggtaggcatatatattgcaattttctttatcccagaaattctggcggcaatgttcccagacacgctttcaaaattctgcataagggcgtataaaattctcaaatatctttttttgccaagcgcaaaaatttctctttttttgcaaagaggcttgctgaaaattttgggctatgatagcaggctctcctttttgccgcagtccatgcgcggtgctataaacaacgaagattcttcttctgctttggaagaagaagaaaaacaaatgataagaaatatctttgtttttgcagacactccagtgagagagataatgactccccgcgttgaaatgcatgccgtagatgttcaaacgccgctccaagacgtgataaaacttttgaacagcgaaaggcacagccgattgcctgtgtattccggttccatagacaatataataggcattctctcaaatagggaatttttgcaatggtacacggaaagaccgcacgaaacattcgatttggaaaaactcgttaggcctgcgttgtttgtacccgctgggaaaaaaatagatgctcttttgcatgaactgagggagagcaacaatcatttagtcatagtggtggacgaatatggcggtaccgctgggcttgccacaatggaagatattctggaagaaatagtcggggaaataaaagacgaagatgattcggaagaaggctctggttttgttaagcttcagtctgggcagtacatgctggacccttga

SEQ ID NO: 39286 - protein, 264 aa, Unknown
  Obtained from environmental sample
  DOMAIN (120)...(237): CBS domain pair
  misc_feature (1)..(264): Xaa is any amino acid
MGLKFCEHWYEWLAIMVGIYIAIFFIPEILAAMFPDTLSKFCIRAYKILKYLFLPSAKISLFLQRGLLKILGYDSRLSFLPQSMRGAINNEDSSSALEEEEKQMIRNIFVFADTPVREIMTPRVEMHAVDVQTPLQDVIKLLNSERHSRLPVYSGSIDNIIGILSNREFLQWYTERPHETFDLEKLVRPALFVPAGKKIDALLHELRESNNHLVIVVDEYGGTAGLATMEDILEEIVGEIKDEDDSEEGSGFVKLQSGQYMLDP

SEQ ID NO: 39287 - DNA, 651 bp, Unknown
  Obtained from environmental sample
  misc_feature (1)..(651): n is a, c, g, or t
atggcgggattctcttttcaccttaacagacttaacaacccgtccgcgttggttgcgggaaaaactctccttctgccgtcctgccccggaatctttattccgtcggttttacagaccgacctggaaaaaatagcgggggcggcaaggaaaaacgcgcaaggttcggttgaactgaaaataagaattggggaaaaacaggatacttttttattctttcccggcgcggatttttccgccacggaaagggcgttctttcttaattcgggtttcaggtttccgttacggcagtaccgcgttaccagccgctacggtatcagggaagaccctataaccggcaatatttcgatgcatcaggggatagaccttgccgcgccggaaggaacggaggtttttgccgtggcggacggagtcgtaacagcgacaggggatgaccctgtgtacggaaattatattattatcagccacaataataactggaaaagcctttacgggcatttatcgtcagttgatacggtcttgcgatccgatgtaaaatcaggtaaccttataggaagagtagggtctacaggtcaatcaacaggaccgcatcttcattttgaattgcggcaggacggaaaagcatttgatccggcaggaaggctccgtccctga

SEQ ID NO: 39288 - protein, 216 aa, Unknown
  Obtained from environmental sample
  DOMAIN (115)...(210): Peptidase family M23
  misc_feature (1)..(216): Xaa is any amino acid
MAGFSFHLNRLNNPSALVAGKTLLLPSCPGIFIPSVLQTDLEKIAGAARKNAQGSVELKIRIGEKQDTFLFFPGADFSATERAFFLNSGFRFPLRQYRVTSRYGIREDPITGNISMHQGIDLAAPEGTEVFAVADGVVTATGDDPVYGNYIIISHNNNWKSLYGHLSSVDTVLRSDVKSGNLIGRVGSTGQSTGPHLHFELRQDGKAFDPAGRLRP

SEQ ID NO: 39289 - DNA, 846 bp, Unknown
  Obtained from environmental sample
  misc_feature (1)..(846): n is a, c, g, or t
atggaaaaccccaccggccttgatcttgtgggagcggcaaaactggttgaaccttatgccggagagttgctctttacctgcgtggaacgcgaaggaaccatgaccggcatcaaccttgagccggtgaaaaaattgcgcgaagttgtcaactgccagattaccgtagccggcggcgtttcaaccttatctgaaattgaagaaatcgccaccatcggctgtgacgtacagctaggcatggccctatacaccggaaaaataaaccttgcggacgccttcattacatcactgaactggaagaaaggagaggccctactccctattatagttcaatctacagatggacaaatactgatgaccggctttaccgataaagaagcgttaaacgaaacttttaagcgcgggaatgtctgtttccacagcagaacccggaacaaactctggatgaaaggtgaaaattcaggcaatgtgttaaaacttatccgattgcggacagactgcgacagggacgcccttcttgcaatagcggaaccggcgggcccggtctgtcacacgggcgcatggtcgtgttttgcgactaacagagactatacaatgcaattcttgcagaatataatccgggagcgttttcgtaatcccgcgccgggatcgtatacagccacccttgacgatgagcttgtgcgcgaaaaaataatggaagaagcgaaagaactctgcgaggcgaaagcccatgacgaaattgtctgggaagccgctgatttgctctactttgcgacggtgttaatgacaaaatccggcgtcaccattgatgaaattcttgacgagcttgaccggaggcataagaaatga

SEQ ID NO: 39290 - protein, 281 aa, Unknown
  Obtained from environmental sample
  DOMAIN (198)...(280): Phosphoribosyl-ATP pyrophosphohydrolase
  misc_feature (1)..(281): Xaa is any amino acid
MENPTGLDLVGAAKLVEPYAGELLFTCVEREGTMTGINLEPVKKLREVVNCQITVAGGVSTLSEIEEIATIGCDVQLGMALYTGKINLADAFITSLNWKKGEALLPIIVQSTDGQILMTGFTDKEALNETFKRGNVCFHSRTRNKLWMKGENSGNVLKLIRLRTDCDRDALLAIAEPAGPVCHTGAWSCFATNRDYTMQFLQNIIRERFRNPAPGSYTATLDDELVREKIMEEAKELCEAKAHDEIVWEAADLLYFATVLMTKSGVTIDEILDELDRRHKK

SEQ ID NO: 39291 - DNA, 1374 bp, Unknown
  Obtained from environmental sample
  misc_feature (1)..(1374): n is a, c, g, or t
atggccgccgcaggacttgcccccgttccgccaaatctgctggtcatgggggaactggaactttccggcaggatacgtccggtgcggggcgttctggcggcaatggccgcaggcagggaagaaggcatcagcgaatttattgttccggcggaaaacggcagggaagcggctatactccctgatatgcgctttacggcggcttccaccctgaaagaagcggttgacgcgctgtttatccgcgaagaaaccggtgcgctgccgttgatttcgcccccgccatttaatgcgccggatacggcggaaaccgcaggcgactttgccgatgtgcgcgggcaaactgtctataagcgggcgttggaaatcgccgccgccggaggtcacaatatgctggtctttggcccgccgggcgcgggaaaaaccatgcttgcccggcggctgtcttccataatggcgccgcttagtcccgatgaagcggttgaagttacacgactgcacagcctggcggggccgttcaaaaccggaacagcggacggcggctatatcgaccgtctcatcaccaatccgccattccgcgccccgcatcactcggcaagcgccgaaggaattttgggcggcggcagaactccccgccccggagaaattactcttgcccattttggagtattgtttcttgatgaagcgccggaatttaaaattaatgtgttacaagccctgcgcgaaccgctggaagaccgggtaatcagcatttcccgcgccgaggggccggtacaccttccggcggaattccagttgatactggcgactaacgcctgcccctgcggaaggctggggatcaggcataatgataatggaacggaaagcgaaatgcagacctgtttatgttcgccggaagaaatttcccggtactggcgcaaattcggcggcgccctccttgaccgtatcgagattcgcgccgctgttattcccccaagtgttaacgaaatcggcaaaccaggcggcggcgcctacagaggcgccaatggcggtggcgccaacggagttggcgacgaacgcagcgcggacattgccatacgggtaagggcagctgttgaaatccagcagatgagatataaaggcatggggatacgccgtaacgcgctgattcccgccggaaaaatcgaaaccttttgcggcctggagcagcaggcgcgggacgcgttccataaggcccttgcgcggctggggctttcaggacgcgcgtatcacggcattttgcgggtagcgcggacaatagccgacctggagggcaaggaaacaatcggcgcggaacatattctggaagcggtacaacaccgccgttatggggaagacccctacgagattattactatttag

SEQ ID NO: 39292 - protein, 457 aa, Unknown
  Obtained from environmental sample
  DOMAIN (109)...(272): Sigma-54 interaction domain
  misc_feature (1)..(457): Xaa is any amino acid
MAAAGLAPVPPNLLVMGELELSGRIRPVRGVLAAMAAGREEGISEFIVPAENGREAAILPDMRFTAASTLKEAVDALFIREETGALPLISPPPFNAPDTAETAGDFADVRGQTVYKRALEIAAAGGHNMLVFGPPGAGKTMLARRLSSIMAPLSPDEAVEVTRLHSLAGPFKTGTADGGYIDRLITNPPFRAPHHSASAEGILGGGRTPRPGEITLAHFGVLFLDEAPEFKINVLQALREPLEDRVISISRAEGPVHLPAEFQLILATNACPCGRLGIRHNDNGTESEMQTCLCSPEEISRYWRKFGGALLDRIEIRAAVIPPSVNEIGKPGGGAYRGANGGGANGVGDERSADIAIRVRAAVEIQQMRYKGMGIRRNALIPAGKIETFCGLEQQARDAFHKALARLGLSGRAYHGILRVARTIADLEGKETIGAEHILEAVQHRRYGEDPYEIITI

SEQ ID NO: 39293 - DNA, 825 bp, Unknown
  Obtained from environmental sample
  misc_feature (1)..(825): n is a, c, g, or t
ttgaaaaaagactgggtcctgtttgtagcgtcgcggtatatattcaagggacgaagcaactcgcctgttttggcggttctcggaatcgctacaggtgtgcttgccctgattgttataattgctgtaatgaacgggttccagcttggttttatcgagagtattctggaaatttcttcatatcatttgcgcttagaaaattttccgcatgaaaaaacagacgagcttcaggaacttatgcttgcaattccatcggtggaaacggcggtcccgtttaaggaatttcaggctcttgcaagaggaaggaggtggcagcaggcggtaattgtaaggggacttcagtacaatacaatggaaattgacaaaaaaatgaaagacaaactggaatttgaagaaggtttttttaatatttccgataacaaatccattctattgggaaccgagcttgcccgcaggcttgggcttgggatcggagatgaggttatcgttttttcaatttcaggtattttatcggcggaagaaggctccgctgttgattcatttgaagtcaaaggaattttcataacaggttattatgaatatgactgtagttgggcgattataaatatagacagcccgtcttttttggcaaacgaaagcgatttaaaaataggaataaagctttataaccgttttcatgacggatttgtaatggaacaggcagacagaaaaatttcctccgcaggcggatttgaaaatataaggataacaagctggagggattataaccgggcgtttttcggggcgttaagaacggaaaaactttttatgtttattcttgtangataa

SEQ ID NO: 39294 - protein, 274 aa, Unknown
  Obtained from environmental sample
  misc_feature (1)..(274): Xaa is any amino acid
MKKDWVLFVASRYIFKGRSNSPVLAVLGIATGVLALIVIIAVMNGFQLGFIESILEISSYHLRLENFPHEKTDELQELMLAIPSVETAVPFKEFQALARGRRWQQAVIVRGLQYNTMEIDKKMKDKLEFEEGFFNISDNKSILLGTELARRLGLGIGDEVIVFSISGILSAEEGSAVDSFEVKGIFITGYYEYDCSWAIINIDSPSFLANESDLKIGIKLYNRFHDGFVMEQADRKISSAGGFENIRITSWRDYNRAFFGALRTEKLFMFILVX

SEQ ID NO: 39295 - DNA, 981 bp, Unknown
  Obtained from environmental sample
  misc_feature (1)..(981): n is a, c, g, or t
atgcttagggtcgagcatctcaaaaagcatttcggcaaccagatcgttttggacgacatcaacatcggcgtcgacaagggcgaggtgttgtgcatcatcggtcagtcggggagcggcaagaccgtcctcttccgtcacataatcggcctattgttccccgacggcggccgcataacgctcgatggtcaggtgatctcctcgcccacgaccaaacccgccgacttcgacagggtgcgcaaacgcttcggcatactatttcagggcgcggcgctcttcgactcaatggatgtgggggagaatttggcgtttccgctgagggagcataccaaattgacagaacgggaaatatcggaactgatcggagaatcgcttgagatggtgggccttatggagcagtttaagtccaagatgcctgcggaactctccggcggtatgcgaagccgcgtgggactggcgcgggccattgtgatgaagccggagattatgctctacgacgagccgacaagcgcgctcgaccccattatgaccgacaaaatcaacaaactcattctctctatgcgcgacaagttgaagatgacctccatagttatcacgcacgatataggttccgcctacgagatcgccgacaagatcgcgatgatccgcgagggcaagatcatattcaacggcacgcccggggagatccgccagtcccgcaatccatatgtgcaggagttcatacgcggcgagcgtaagtcgcactacgcgttggataacgaagaggattacgcgaatcaggtggatatcaataagctaaaacaacgcgccacgcgccccggcccaaagacgcatacgcagtccgtgccgcatgttgataagccgggtgtgaatcagggcgggatagctgataggaagttccaaatgccgacgacgtacccgcaaactcagcctcagcaaaatgtcaatacgaatagattcgttcctccggggagacggcagtaa

SEQ ID NO: 39296 - protein, 326 aa, Unknown
  Obtained from environmental sample
  DOMAIN (27)...(217): ABC transporter
  misc_feature (1)..(326): Xaa is any amino acid
MLRVEHLKKHFGNQIVLDDINIGVDKGEVLCIIGQSGSGKTVLFRHIIGLLFPDGGRITLDGQVISSPTTKPADFDRVRKRFGILFQGAALFDSMDVGENLAFPLREHTKLTEREISELIGESLEMVGLMEQFKSKMPAELSGGMRSRVGLARAIVMKPEIMLYDEPTSALDPIMTDKINKLILSMRDKLKMTSIVITHDIGSAYEIADKIAMIREGKIIFNGTPGEIRQSRNPYVQEFIRGERKSHYALDNEEDYANQVDINKLKQRATRPGPKTHTQSVPHVDKPGVNQGGIADRKFQMPTTYPQTQPQQNVNTNRFVPPGRRQ

SEQ ID NO: 39297 - DNA, 1137 bp, Unknown
  Obtained from environmental sample
  misc_feature (1)..(1137): n is a, c, g, or t
atgggaggccggggctgccgccgggcggacactatagaagaattccatgaagcggcggcggatgccctccgtttttcgcggtcgggcagggtcattgtcgaggcctttatggacgggccggaattttcggtggacgccattgtgtaccacggagaaatcacgatctgcggccttgccgaccggcacatttttttcccgccctactttatcgagatgggccataccatgcccaccgttatcgcgccggaacaacaggcggcgctgctggaaactttttgcgccggggttcacgccctgggtctggcgggtgaacacagcatcggcgcggcaaagggcgacattaaattaacctcccagggccccatgatcggtgaaattgccgcccggctttccggcggttatatgtcgggttggacttatccctacgcgtcgggggtagagccaatccgcgccgcgattcttgccgccatgggtcgcaaaccggataaccttgtcccgttgaaaacctggaccagcgccgagcgggcctttatttccatacccggcacggttaagtccataagcggaacagaaaccgcccgcggtatgccccatatacgcgatttatttttccgcaccgccgcgggcgataaagtgggctttccccagaacaatgtctccaaatgcggcaatgtcatcagcgccgcgcctgaccgcctgaccgccgtcaaagccgccgaaaacgccgtccgctcaatcctgatacgccttaacccggacaacgcggaaaccgccgcttttcttgccgccgccggtgaagctttcccgccggacgcttttcagctttcagcggaactgcggaccgctctggaaaaactccccgaaagcaagaaacaggaaacaggaaatcctactattatcccctttcccgcattcatcaattccggcttgcgggactatgttggccgtaccgttgtggaaagcctccaggcggtacgggaacttaccggcctttctctgccggaaatctccacagaaacccttaaatcttccgataatataggtagctttttgggaagatcattctgggtggcatttgtccggggcggctaccagggggctgtatactatattgatcaatggagaggggaacattga

SEQ ID NO: 39298 - protein, 378 aa, Unknown
  Obtained from environmental sample
  misc_feature (1)..(378): Xaa is any amino acid
MGGRGCRRADTIEEFHEAAADALRFSRSGRVIVEAFMDGPEFSVDAIVYHGEITICGLADRHIFFPPYFIEMGHTMPTVIAPEQQAALLETFCAGVHALGLAGEHSIGAAKGDIKLTSQGPMIGEIAARLSGGYMSGWTYPYASGVEPIRAAILAAMGRKPDNLVPLKTWTSAERAFISIPGTVKSISGTETARGMPHIRDLFFRTAAGDKVGFPQNNVSKCGNVISAAPDRLTAVKAAENAVRSILIRLNPDNAETAAFLAAAGEAFPPDAFQLSAELRTALEKLPESKKQETGNPTIIPFPAFINSGLRDYVGRTVVESLQAVRELTGLSLPEISTETLKSSDNIGSFLGRSFWVAFVRGGYQGAVYYIDQWRGEH

SEQ ID NO: 39299 - DNA, 489 bp, Unknown
  Obtained from environmental sample
  misc_feature (1)..(489): n is a, c, g, or t
ttgccgacggccagagaggccaccagctttgcggcggtgcatgtttcgcccgaacttgacgaaacgatagacgtggacataccagagaaagacctacggatagacgtattccgcgccagcggcgcaggcggccagcacgtcaaccgcacggaatcggctgtgcgctttacgcacctgcccacaggcatagtggtaagctgccaaaacgagcgcagccagatacagaaccgcgccacggcgctgaaggtgctaaaggccaggctgtatgaactggaacagcgcaagttgcaagaaaagatcaacagcgcgtcaggcgacaaggccgacgtggcgtggggcagccagataaggagctacgtcttgcagccataccagatggtgaaagaccatcgcactctgtttgagaccagccagacacaaaaggtgctggacggagacctggacggattcatacgcacacagctgctttccaaaagcatgaaaagctag

SEQ ID NO: 39300 - protein, 162 aa, Unknown
  Obtained from environmental sample
  DOMAIN (18)...(131): Peptidyl-tRNA hydrolase domain
  misc_feature (1)..(162): Xaa is any amino acid
MPTAREATSFAAVHVSPELDETIDVDIPEKDLRIDVFRASGAGGQHVNRTESAVRFTHLPTGIVVSCQNERSQIQNRATALKVLKARLYELEQRKLQEKINSASGDKADVAWGSQIRSYVLQPYQMVKDHRTLFETSQTQKVLDGDLDGFIRTQLLSKSMKS

SEQ ID NO: 39301 - DNA, 609 bp, Unknown
  Obtained from environmental sample
  misc_feature (1)..(609): n is a, c, g, or t
atgaagtgcgtcctccccgccatcgagcaggtggccgcaaagggctatgttgaccgggagcgcataggcatccaaggccatagctggggcgggtaccagatcacctacatgatcacgcagaccaacatctttagggccgtggaagcgggagcctcagtgagcaacatgataagcgcctatggaggcatccgctatggcgcaggtatcagccgccaattccagtacgagcgtacacaaagccgcattgggggcacgccttggaccaagcccatgcagttcatcgaaaatagtcccatcttctttgccgaaaacgtccatacgccgtacctgacgatgcacaacgaccaagacgacgctgtgccctacacccaggcaatagagtttttcacggccctgcgccgcttgggcaaagatgcctaccttttcaattacaacggtcagctgcacgggctgagtgacagggacatgctaaaacacttcactgtccacatgtgcgagtttttcgaccactacctgctcggcgcgcccaagccagactggatggccaatcccaccccgtacttggagagaggcaagcgggacgtgtcagaactgttcaaagccaagtaa

SEQ ID NO: 39302 - protein, 202 aa, Unknown
  Obtained from environmental sample
  DOMAIN (3)...(175): Prolyl oligopeptidase family
  misc_feature (1)..(202): Xaa is any amino acid
MKCVLPAIEQVAAKGYVDRERIGIQGHSWGGYQITYMITQTNIFRAVEAGASVSNMISAYGGIRYGAGISRQFQYERTQSRIGGTPWTKPMQFIENSPIFFAENVHTPYLTMHNDQDDAVPYTQAIEFFTALRRLGKDAYLFNYNGQLHGLSDRDMLKHFTVHMCEFFDHYLLGAPKPDWMANPTPYLERGKRDVSELFKAK

SEQ ID NO: 39303 - DNA, 1635 bp, Unknown
  Obtained from environmental sample
  misc_feature (1)..(1635): n is a, c, g, or t
gtgcctcatgataaaatagtggaaaaagcccttgaagtgcgcggctgtaaaataaaaatagttaatgtaccgattcccgtcgcttacggcccggcgtttgaaggggagagaatccgcaaagaggatacccaagttgaatttgggggcaacaaaacccttgcttttgaatttgttacaagcgtggaatacgactcgattaacgacggtgagattaaaattatcggccctgacattgacgttgtggaaccgggcggcaaactgccactcggcatttgggtggaagccgcgggcagaaagatgcagcctgactttgaaccgatacttgaaagacagattcaccacatgattaatggcgcggagggaatctggcacatggggcagagggacatcgtgtggacccgtgtttccaaaacgggttatgaaaaaggcatccgtcttaaacactacggggaaattctccacgccaaattattggcggattatccggcgatagtggataaagtgcgcgtaacgctagttacggatcaagcggaggtggaaaagaggcttgccattgcgcggaaagtgtacgatgaccgcaaccgcagactggaagccatgaccgatgaatcggtggatactttttattcctgtctgctttgccagagttttgcccccaatcacgtctgcgttatcacccctgaaaggcttggcctgtgcggagcgtacaattggctggacggcaaagcggcttatgaaattgatgaaacgggccccaaccagccgcttaaaaaaggcgagtgtcttgatcccgtaaagggaatctggtccggggtaagcgattatgttttcacgaacagccataaaacggtagaaacattctgcgcttattcaatcatggacagaccgatgacaagctgcggttgttttgaagctatctgcgcttatgtgcctgagtgcaacggcgtaatggttgtgaaccgcgagtttttgggcgacactcccattgggatgacattttccacattggcaggttctgtcggcggaggtcagcagactcccggtttcttcggctgcggaaaagtatttcttacaagcagaaagttcctctacgcggaaggcggttatgccagaatcgtgtggatgacaaaagagttaaaagatcttttgcgtaacgatttgctaaaacgttttgatgagcaaaaactgccgggttttatcgatcaaattgccgatgaaactgtcgctgtgaccgccgaagatgtgcggaagttcatggaaaaagttaaacaccctgcgcttaaaatggaagacatgtcccattttgctcagagcgaacaggcaggggaagccgccgcgaagactgacattgttaaaaaagacgcgccatcaggcgaatccgcttctgcgaaaacggaagaagcggggggtattccggcgaacatagacattgccgctatcacagagaagataaaagccgacgtaacaaaggaagttattaccggcataatcgacatattaagcgagcgttttttaggcaaggctccgtctgcggcaagttcggaagttaaaacagaatcagctaacatagtaaaaaaacctagaatatcagcctctgatcgaatttccaaaattaaaagttttatcttccggtag

SEQ ID NO: 39304 - protein, 544 aa, Unknown
  Obtained from environmental sample
  DOMAIN (22)...(433): CO dehydrogenase/acetyl-CoA synthase complex beta subunit
  misc_feature (1)..(544): Xaa is any amino acid
MPHDKIVEKALEVRGCKIKIVNVPIPVAYGPAFEGERIRKEDTQVEFGGNKTLAFEFVTSVEYDSINDGEIKIIGPDIDVVEPGGKLPLGIWVEAAGRKMQPDFEPILERQIHHMINGAEGIWHMGQRDIVWTRVSKTGYEKGIRLKHYGEILHAKLLADYPAIVDKVRVTLVTDQAEVEKRLAIARKVYDDRNRRLEAMTDESVDTFYSCLLCQSFAPNHVCVITPERLGLCGAYNWLDGKAAYEIDETGPNQPLKKGECLDPVKGIWSGVSDYVFTNSHKTVETFCAYSIMDRPMTSCGCFEAICAYVPECNGVMVVNREFLGDTPIGMTFSTLAGSVGGGQQTPGFFGCGKVFLTSRKFLYAEGGYARIVWMTKELKDLLRNDLLKRFDEQKLPGFIDQIADETVAVTAEDVRKFMEKVKHPALKMEDMSHFAQSEQAGEAAAKTDIVKKDAPSGESASAKTEEAGGIPANIDIAAITEKIKADVTKEVITGIIDILSERFLGKAPSAASSEVKTESANIVKKPRISASDRISKIKSFIFR

SEQ ID NO: 39305 - DNA, 879 bp, Unknown
  Obtained from environmental sample
  misc_feature (1)..(879): n is a, c, g, or t
atgatcagatggccgagtcgccacaagacacgccgaatatggcttgcttcaggtaaagggcagataatggaattcggtcttcgcagagcgcagggaccggacggggcgatttccgcttcccgcgcggcgtacattggcggcgctcatggaacaagcaacacgctggcgggaaaaatttacggtattcccgtaatgggaacaatggctcattcatggataatgtcattcgataacgaagaagacgcctttgacgcctacgccgcgctgtaccccgacagatcaatttttttaatcgacacttatgacacattaaagagcgggatcattaacgcgataaaatcgggaaaaaaacttaccgccaaaggaaaaaatttcggagtgcgtcttgattcgggcgacattcagtatctttcaacggaagtaaggcggcagcttgacggcgcgggacttaaaaacgcttttattaccgtctccaatgatcttgatgaaaatataattgaaacgcttgtgaaggacggcgcgcccgtgaatagctggggagtgggaacccgtcttgtaacaggcgcatacgcttccgcctttaccggagtgtacaaacttgccgctctccgcggaaaagaaggcactacgcccgttatgaaattttcagataacccggaaaagacgacaaatccgggcataaaacaagtttggcgtataagagataaaaagggatcagcgatagcggacgtgttgagcatagacgaagatgacgatgaaataaagaacggacagacttattcattttggcatccttccgcggattaccgccattttgtacacactgtcgaaggaagcgcaacggcgatgttgaaaaaacgcatagaaaacggcgtttaa

SEQ ID NO: 39306 - protein, 292 aa, Unknown
  Obtained from environmental sample
  DOMAIN (20)...(235): Nicotinate phosphoribosyltransferase (NAPRTase) family
  misc_feature (1)..(292): Xaa is any amino acid
MIRWPSRHKTRRIWLASGKGQIMEFGLRRAQGPDGAISASRAAYIGGAHGTSNTLAGKIYGIPVMGTMAHSWIMSFDNEEDAFDAYAALYPDRSIFLIDTYDTLKSGIINAIKSGKKLTAKGKNFGVRLDSGDIQYLSTEVRRQLDGAGLKNAFITVSNDLDENIIETLVKDGAPVNSWGVGTRLVTGAYASAFTGVYKLAALRGKEGTTPVMKFSDNPEKTTNPGIKQVWRIRDKKGSAIADVLSIDEDDDEIKNGQTYSFWHPSADYRHFVHTVEGSATAMLKKRIENGV

SEQ ID NO: 39307 - DNA, 1020 bp, Unknown
  Obtained from environmental sample
  misc_feature (1)..(1020): n is a, c, g, or t
atgggatcgactagaaacctaaaaattttaccacggagttatgctgttcggcgaagccgaacagcttcggagaaacacagaggaaaaagaagatatttcataataactccgtgccactctgtgaactctgtggtttttattcttattttcctgttttctttctcttttctgtatgcggcggagaattcgttgagcttgagctccgagattgcccggctggaaaagataggcgcaagctccggctcttctcaggaaaggcacaacgcatttttgacccttgccaggctttatcagctttcggggaacaacgaagcggcgctaaaggcatgggaaaacgcgcttaagatcaacagcggcgacgggcgctcgcttttggaaagagggcggctcttaatttcccagggtgaatacgaaaaagcctttgagtctttgacggtcatatttacaggaaactacgcgaaggatcttctgctcgaagcccgcttcctgattgcccaactcgaagcgtttcgttccggcaatttagggccactctccgcccttgtcaatgacgccgatttctccgagtatcacaggttaatttactataccctctggaaaatcgagcaaagcccggcatggaaagctcttctaaccaaagactttcccctaagtccggaagcaaaaataaccaccggtaaggcgctttccgcccagactccgctatggatacttttccccggcagggaagctcttgctttaaccgcgccagcaacgacagcgccagcggctacgccgacgcaagcaccaacagtaagcggcacaacggttttgcaaaccggtttttttagccgtgaagaaaacgcacgcgccctctccgaaaaaataaacaaagccggttttcaaagcgttgttcaaatcaagcaacagaacggcggcagttattgggcagtctatgtcccctacggctctgacatgaacgctatgatcaaaaagctcaaagacgccgggttcgagtcattccctgtgacgattaattag

SEQ ID NO: 39308 - protein, 339 aa, Unknown
  Obtained from environmental sample
  DOMAIN (87)...(120): Tetratricopeptide repeat
  misc_feature (1)..(339): Xaa is any amino acid
MGSTRNLKILPRSYAVRRSRTASEKHRGKRRYFIITPCHSVNSVVFILIFLFSFSFLYAAENSLSLSSEIARLEKIGASSGSSQERHNAFLTLARLYQLSGNNEAALKAWENALKINSGDGRSLLERGRLLISQGEYEKAFESLTVIFTGNYAKDLLLEARFLIAQLEAFRSGNLGPLSALVNDADFSEYHRLIYYTLWKIEQSPAWKALLTKDFPLSPEAKITTGKALSAQTPLWILFPGREALALTAPATTAPAATPTQAPTVSGTTVLQTGFFSREENARALSEKINKAGFQSVVQIKQQNGGSYWAVYVPYGSDMNAMIKKLKDAGFESFPVTIN

SEQ ID NO: 39309 - DNA, 924 bp, Unknown
  Obtained from environmental sample
  misc_feature (1)..(924): n is a, c, g, or t
ttgatgccggcgggggcgggggcgcagagcgtcgcttttgaaaagctcaaggcgaaactattaaaagagggattgtttgacgaatcacgcaagcggcctattccccgctctgtttccacgctcggcgttgttaccagcaagaacggcgcggcgctgtgggacattgtgcgcgtagccgctaaacgagcgccgcaaacgaacatcgtcgtcgccgacacgccggttcagggcgatacggcggcggagaagatcgctaagtcgatccgtatgatgaacgacttcggcgggatcgacgtgatgatcgtggggcgcggcggcgggtcggcggaagatctttgcgccttcaacgaggaggccgtggcgcgggcgatctacgattctaaaataccggtcatatcggcggtcgggcacgagatcgattttaccatagcggacttcgcggcggatgtgagggcgcccacaccgtcggcggcggcggagatggcgctgcctgacaccgcggagggcagacgctactttgagcagtgcgcggcgcggtttgccgtggggatcaataggtattttgcggcgataaacgatagggtcggcgatattaagtcgtctaaagcgctgacgcggcccttacgcatgttggcggaggcggagcagtcgttggacgaggccggaggccgcgtttgccaatcgataaaattgattattatgacaagcggcgtgcggttgaggagcgccgcggggcggttgaactcgcttagcccgttggcggtgctggggcgcgggtactgcgtcgttgttaatgatggcagcggggcggcggtgaggagtgttgacggggtcgaggttggggatagggttagtattcgggtggcggacgggacggtgggggcggaagtggtttcgacttcgctcaaccgccggcagcaatga

SEQ ID NO: 39310 - protein, 307 aa, Unknown
  Obtained from environmental sample
  DOMAIN (97)...(252): Exonuclease VII, large subunit
  misc_feature (1)..(307): Xaa is any amino acid
MMPAGAGAQSVAFEKLKAKLLKEGLFDESRKRPIPRSVSTLGVVTSKNGAALWDIVRVAAKRAPQTNIVVADTPVQGDTAAEKIAKSIRMMNDFGGIDVMIVGRGGGSAEDLCAFNEEAVARAIYDSKIPVISAVGHEIDFTIADFAADVRAPTPSAAAEMALPDTAEGRRYFEQCAARFAVGINRYFAAINDRVGDIKSSKALTRPLRMLAEAEQSLDEAGGRVCQSIKLIIMTSGVRLRSAAGRLNSLSPLAVLGRGYCVVVNDGSGAAVRSVDGVEVGDRVSIRVADGTVGAEVVSTSLNRRQQ

SEQ ID NO: 39311 - DNA, 1317 bp, Unknown
  Obtained from environmental sample
  misc_feature (1)..(1317): n is a, c, g, or t
gtggagatgtcgataacgaccgcatatgaaatcaataaactcatggcacggtacggcgtaaaattcggtatctacaaaaacggagaattcattgaacaactctttccctacgacgccataccgcggattatttcgcacaaagagtttgagcttttggacaaggggcttgtccagagggtaaacgcgcttaactgctttttgaaggacatctactcaggcgcgaaaattatcgccgacaaggttgtgccggaagaatttgtctatatatccaaaggatacctgccggagtgcgcgggtataaccccgcctgaaggcgtgtacagccacatctcgggaatcgatcttgttcaggcgaaggacggagcgtggtacatactggaagataacctgcgcataccgtcaggcgcgtcctatccgctgattgccagggagcttagccgcattgccgatcccgacgcttattcaaataacgatgtcaccgacaaccgcaactattcggatatgctgcatgagactatggactttgttaaccgcggcggattgaacgtgattcttacgccgggcagatacaacgccgcgtactttgaacattcatatcttgccgaacgaacaggcgcgatacttgtcaaagcttcggaactggtcgttgacggcgcggttctgtacatgaaagattacctcggcgttaaagcgagggtcggcgcggtgtaccgccgcatatcagacgaataccttgaccccatgacttttctgtcggagtccctcatcggcgtaccgcatattatggacgcctaccgcgcggggaatgtcgcgataatcaacgcgccgggcaacggcgtcgcggacgacaagggcatttattattttgtgccagaaatggtaaaatactacctgggcgaagagccgattctgcagaacgcgccgacctacctgccctactacgaggacgacctcaagttcacgcttgagaacatcagacgtcttgtcataaaggatgtgtcggaggcgggcggctacggcgtggtgttcggccgcgagctgtcggaagagaaattagccgaaatcaaggacctcatcgtaaaagagccgaggcggttcatatcgcaggaggtcatcgactttatcgatcttgatatcatggaagaagacggcagtactatcccccgaaaggcggatctgagggcgttcgtgctgacaggcagaactacgcgcgtgtgggcaagcgggctgacgcgcttcgcgcgcgtcgaggggtcgtttattgtcaattcttcgcaaggaggagggtttaaagacacatgggtactatctcggtag

SEQ ID NO: 39312 - protein, 438 aa, Unknown
  Obtained from environmental sample
  DOMAIN (293)...(437): Domain of unknown function (DUF407)
  misc_feature (1)..(438): Xaa is any amino acid
MEMSITTAYEINKLMARYGVKFGIYKNGEFIEQLFPYDAIPRIISHKEFELLDKGLVQRVNALNCFLKDIYSGAKIIADKVVPEEFVYISKGYLPECAGITPPEGVYSHISGIDLVQAKDGAWYILEDNLRIPSGASYPLIARELSRIADPDAYSNNDVTDNRNYSDMLHETMDFVNRGGLNVILTPGRYNAAYFEHSYLAERTGAILVKASELVVDGAVLYMKDYLGVKARVGAVYRRISDEYLDPMTFLSESLIGVPHIMDAYRAGNVAIINAPGNGVADDKGIYYFVPEMVKYYLGEEPILQNAPTYLPYYEDDLKFTLENIRRLVIKDVSEAGGYGVVFGRELSEEKLAEIKDLIVKEPRRFISQEVIDFIDLDIMEEDGSTIPRKADLRAFVLTGRTTRVWASGLTRFARVEGSFIVNSSQGGGFKDTWVLSR

SEQ ID NO: 39313 - DNA, 450 bp, Unknown
  Obtained from environmental sample
  misc_feature (1)..(450): n is a, c, g, or t
atggcgcaagagaagcttattctgaccgagagccagttggccgctttggaacgagcgaaagaagaaaaagaagcgcacggggagatagaaacggaacatccggggtatttgggagcccaggatacttattatgtggggaacattaaaggcgttgggcatatataccagcagactttcatcgacacttatagcaaagtggcattttgcaaattgtacgaccgaaagaacgcgcttgttgcggctgacatgctcaatgacatggtcgttccattttttgatacccatggaataccgcttttacgcattctgaccgaccgattgaaaatattgaacacaccaggactaaagcgaagtcgccccaaacgaacggtatttgcgaacggtttaataaaatctgtaaagacaaattttattcaattgcgtttcggaaaaagatttatcggagcataa

SEQ ID NO: 39314 - protein, 149 aa, Unknown
  Obtained from environmental sample
  misc_feature (1)..(149): Xaa is any amino acid
MAQEKLILTESQLAALERAKEEKEAHGEIETEHPGYLGAQDTYYVGNIKGVGHIYQQTFIDTYSKVAFCKLYDRKNALVAADMLNDMVVPFFDTHGIPLLRILTDRLKILNTPGLKRSRPKRTVFANGLIKSVKTNFIQLRFGKRFIGA

SEQ ID NO: 39315 - DNA, 840 bp, Unknown
  Obtained from environmental sample
  misc_feature (1)..(840): n is a, c, g, or t
atgggactgaaggattttttatttggcaaaaaagcaccgcaaagcgacgatacggatgagcaggcggcggccgttcccaacagcaaccgccatccctggggcgactttacgcttctgcaaagccttaccccggaacgcctggcgcagatcctaaacgacgtaaggcgcggggaatgcccggctgaatatctggaacttgcgcaggacattgagctaaaggacctccactacagatccgtgctttccacgcgcaaggacacgataaccgggcttgacgtcaaagtcattccggcgagcgacgacaagcgggacatggagcttgccgaggccgtggagcgcgacatcgtgaaaaacagctccgcaaagctgtacgcgctaatccgggacatgctggacgcgcttgccaaggggttctctgtttccgaaataatctgggacaccgacaatgcgcattggaagccgaagcagtacaaattccgcgatccccgctggtttcagtacgacagggaaaccgggaagacgcttatgctccgctcccccatggggaacgagctggaacccctcaagccgtttcattttatagtgcacgagccgcacctaataagcgggaaccaaatcgctgcggggcttgcgcttccggctttgtattactggatgctcaagagttacaacgtaacgagctgggctgcgttcattgaccgctacggctacccgatccgcatcggcaagtacggaaagaaattcaccgaggaggaccggataacgctcaagcgcgcggtcgcctccataggccaggatttcggcgcaatcattcccgaaagcgcccagctgaaattgtga

SEQ ID NO: 39316 - protein, 279 aa, Unknown
  Obtained from environmental sample
  DOMAIN (1)...(279): Protein of unknown function (DUF935)
  misc_feature (1)..(279): Xaa is any amino acid
MGLKDFLFGKKAPQSDDTDEQAAAVPNSNRHPWGDFTLLQSLTPERLAQILNDVRRGECPAEYLELAQDIELKDLHYRSVLSTRKDTITGLDVKVIPASDDKRDMELAEAVERDIVKNSSAKLYALIRDMLDALAKGFSVSEIIWDTDNAHWKPKQYKFRDPRWFQYDRETGKTLMLRSPMGNELEPLKPFHFIVHEPHLISGNQIAAGLALPALYYWMLKSYNVTSWAAFIDRYGYPIRIGKYGKKFTEEDRITLKRAVASIGQDFGAIIPESAQLKL

SEQ ID NO: 39317 - DNA, 453 bp, Unknown
  Obtained from environmental sample
  misc_feature (1)..(453): n is a, c, g, or t
atgttagagaatttgaattgcaatgttgcgggtagcgagtgctatgaaaaagaggaaagctactgcaaaaaatatggccgcctttacacttgggaagtggcaaagaaagcctgttctggagactggcatttgccaaccgatgatgaatgggaggcattggtgacagcggttggcggtgcctcaacagccggaaccaaactgaaagcgactagcgattggaacgaaggtggcaacggcacggacgagtttggcttttccgcccttccgggcggttacggcagttccggtggctatttcctcgatgtcggcgactacggcagctggtggagttcttccactgagagcagtagctactacgcttacatcatacgcatgcactactacttcgagaacgtgagcctcagcatcagcgataagggcagcttgcttagtatccgttgtttgcaagactaa

SEQ ID NO: 39318 - protein, 150 aa, Unknown
  Obtained from environmental sample
  misc_feature (1)..(150): Xaa is any amino acid
MLENLNCNVAGSECYEKEESYCKKYGRLYTWEVAKKACSGDWHLPTDDEWEALVTAVGGASTAGTKLKATSDWNEGGNGTDEFGFSALPGGYGSSGGYFLDVGDYGSWWSSSTESSSYYAYIIRMHYYFENVSLSISDKGSLLSIRCLQD

SEQ ID NO: 39319 - DNA, 924 bp, Unknown
  Obtained from environmental sample
  misc_feature (1)..(924): n is a, c, g, or t
gtgcaaaagctcttcgcccagcgtaccgaagaaacaggtcaacaaatcacgggagacgcccttgaatatgtgtggaaccaatcacagggacagccgtggattgtcaattcgctgtttagacgcgctaccatgcgcgtattgcgggaagacgattacagcgacgtaacgttggaatacgtagaatcggcccgtgaacagatgacccttgcccgtgaaacgcatcttgattctcttgccgtaaggcttagggacgcaaagatcaaaaaaatcattgaaccgataatagtaggcgaaatcaatccggatttgggtcgtgaaaatccggatgttcaatacgtgatggatatggggcttattaaatgggatacgcaaaatggtcttactatagcaaatcccatatacacggagataattacccgcaatctgaattcagggtatcacgatataatgcccccgccctccgcgtggaaatggcaaagtgcgaacgggtcgcttgatatggattcgctgcttaaagaatttcagcgtttctggcggcgccactccgagatatgggaccaaaaagccgactacacagaggcttttccgcacctattgctcatggcctttatgcaacgaatactgaacggcggaggaaagatggaacgtgaagccgccgccggcaggggccggatggacctgctcgtcgaatacaaaggggtcaaattcatcatcgaaatcaaactcatccgttcttacgacacccccaaggaaatccacgatgagggcttgcaacaaatcgccatgtaccgcgacaaaaccgccccagacgccccggcctacctgatgatattcgaccgccgagaagctacaaaaacgctgccgtgggacgagcggatatcgtggaccgaggaagagggcggtataaccgtactggggtgttaa

SEQ ID NO: 39320 - protein, 307 aa, Unknown
  Obtained from environmental sample
  misc_feature (1)..(307): Xaa is any amino acid
MQKLFAQRTEETGQQITGDALEYVWNQSQGQPWIVNSLFRRATMRVLREDDYSDVTLEYVESAREQMTLARETHLDSLAVRLRDAKIKKIIEPIIVGEINPDLGRENPDVQYVMDMGLIKWDTQNGLTIANPIYTEIITRNLNSGYHDIMPPPSAWKWQSANGSLDMDSLLKEFQRFWRRHSEIWDQKADYTEAFPHLLLMAFMQRILNGGGKMEREAAAGRGRMDLLVEYKGVKFIIEIKLIRSYDTPKEIHDEGLQQIAMYRDKTAPDAPAYLMIFDRREATKTLPWDERISWTEEEGGITVLGC

SEQ ID NO: 39321 - DNA, 1119 bp, Unknown
  Obtained from environmental sample
  misc_feature (1)..(1119): n is a, c, g, or t
atggcgagagagtatgcggcgcttctccccatagccgccgcgcttatagtgaacatccgcatgcgcgtctccttggaacacgcggccaagactttcaacgccctatacgaactcggccacaacctctccgtagcgctgaaaccggaggagatattcaaggctatcctagacgtggtgccgaaggccgtccccgcttgttcgcggctgattatcgccctgcacgaccgcgagaggaattccataaggctgcagcacataggcggcgcggccggggaactcgccgaggggatggagttctcaacggccaccggcggcatatacgcctacgcgttcaacaagggcagtactgtaaatgtcggcgacgttcaggcaaagaggaactaccgcttcgtccccgaagaaccgcagaacccgaacgtccgctcgctcttaatcatcccggtcttcggcggcgaggagcgcagatgcgtcggcctcttctcagccgagagcgccaccccggagttcttcaagcccgatctcgaacaaatacttaataccatggtggagaacgcctccgtggctctcaccaggtctatgctgtacttgaagatggagaaacttgccacaaccgacggcctgacgggcctcaacaaccaccgcaccttccaagagatagcggcccgcgagttcgagcgggcgaagcgacacggacgtcccctctcgatgctgctcacagacatagaccacttcaaaaacttcaacgacacatacggccacccggtcggcgacttggtgctgcgcgagatcgccggttgcataaagagcgccgtacgtgcgaccgacttccccgcccggtacggcggcgaagagttcgccgtggtcctccccgaaacagccgaaccgggcgccatggccatagcggaacgcataaggcagacggtagaagccagagtaatacagagcggccaaaatatgctgcgcgtcacgataagcataggctgcgtaacctaccccacgcacggaaccacccagcaggagctcatagactgttctgataaggcgctctacgcgtcgaaaaagggcgggaggaacagggtgtcgctctataatccgagcatgactgtcagttcaaagtaa

SEQ ID NO: 39322 - protein, 372 aa, Unknown
  Obtained from environmental sample
  DOMAIN (47)...(189): GAF domain
  misc_feature (1)..(372): Xaa is any amino acid
MAREYAALLPIAAALIVNIRMRVSLEHAAKTFNALYELGHNLSVALKPEEIFKAILDVVPKAVPACSRLIIALHDRERNSIRLQHIGGAAGELAEGMEFSTATGGIYAYAFNKGSTVNVGDVQAKRNYRFVPEEPQNPNVRSLLIIPVFGGEERRCVGLFSAESATPEFFKPDLEQILNTMVENASVALTRSMLYLKMEKLATTDGLTGLNNHRTFQEIAAREFERAKRHGRPLSMLLTDIDHFKNFNDTYGHPVGDLVLREIAGCIKSAVRATDFPARYGGEEFAVVLPETAEPGAMAIAERIRQTVEARVIQSGQNMLRVTISIGCVTYPTHGTTQQELIDCSDKALYASKKGGRNRVSLYNPSMTVSSK

SEQ ID NO: 39323 - DNA, 690 bp, Unknown
  Obtained from environmental sample
  misc_feature (1)..(690): n is a, c, g, or t
atgaaggtgggaatagatttcggcacgtcgacatcggaaatagcttatgttgatgataatggcaaaattatcattgcccccaatcatttgggagaaatgataacgtcctcggtcgtatatattgccgaagacggcagccctgttgtcgggcttgaggccaaagaaaaggcgcttcttgaacccgaaaacactttttttgaggtaaaacggctctttggtcaaaatgcggagcttcaggcgcggaacagggtttattcacctgtcgatgccgcggcaatgattatacgttatttgactgactgcgctcaaaaacactcaggccaaacggttgattccgccgtgattaccgttccagcttattttaccgattcacagcgcaaggatgttatggccgcgggaaaggcggccgggcttgaagttgagcgtattatcaatgagccgacggcggccagtctggactacggaatagagcacatgcgcgaatgtaaatatatgctggtgtatgatcttggcggaggaacccttgacgtcacagtacttgaactttttgagggcgtagtggaggtaaaatcaagctgtggaaacaacactttgggcggaaaagatttcgaccaggcgatcatggatcatataacaggcgtgataaaaaacgtgataagactgatgtttcaagcgacgcgcgcgcgatga

SEQ ID NO: 39324 - protein, 229 aa, Unknown
  Obtained from environmental sample
  DOMAIN (2)...(228): Hsp70 protein
  misc_feature (1)..(229): Xaa is any amino acid
MKVGIDFGTSTSEIAYVDDNGKIIIAPNHLGEMITSSVVYIAEDGSPVVGLEAKEKALLEPENTFFEVKRLFGQNAELQARNRVYSPVDAAAMIIRYLTDCAQKHSGQTVDSAVITVPAYFTDSQRKDVMAAGKAAGLEVERIINEPTAASLDYGIEHMRECKYMLVYDLGGGTLDVTVLELFEGVVEVKSSCGNNTLGGKDFDQAIMDHITGVIKNVIRLMFQATRAR

SEQ ID NO: 39325 - DNA, 1005 bp, Unknown
  Obtained from environmental sample
  misc_feature (1)..(1005): n is a, c, g, or t
atgatcgccttcacaaaaacgctgagcagctactttgaaaagaaaagagctaatacactttttgctgttctgcgcaattattacaccgaaaacagtccctatcttattattgataccgccagaggaagaaaaataaacgaaacatcaaggcaaattctacatggattcatcatcaatacctttattccgtttttgcaaaaaaacaaaattaggcgatttggcaatataaagcctgtcgtaatgcgcaactttcaaaactacctgctaatcgaaaaaaaaatgcttccgcaatcaattaaccggcagatgggcgggatcaaggcaatattcagccatttatttatggcgggcataataaagcacaatatagtaagggacatatcgcctttgaagcctgccaatagcaggatcagagggtgctattcggttgatgagctaaagggaatattcaaagatacatggaaagataaaaaatcctatttgctgtgttcgattatttattcaactggaatcagaaacagcgaattacagaacctaaaagtcaaagaccttattgtcagggaaaacgtggattttcttaacattgtaaaaagcaagacctcaagcggtatacgaactataccgcttcatcccaaagtacgaaaaacacttgaggaatggatagatgagaacaagctttcgggcgaagattatctttttgtaagaaactgcaataagcggatatttaaaaacgctaagaaagcaggtatatttatgggttcgcttttggggaaagggcaaaacgaactggaaaatgaaaatatcactttttattcaggacgccatttttacaaaaccatgctgaacctctacaatatgggagatgttgaggaaatattcatgggccataaggtcagtaaaaatgtcagcgagcgttataatcataaagacaagagaggagaaaaagaactccttgcggcagcaaaaaaggcaatagaaatagtcgataattcgctgtttcaatga

SEQ ID NO: 39326 - protein, 334 aa, Unknown
  Obtained from environmental sample
  DOMAIN (129)...(316): Phage integrase family
  misc_feature (1)..(334): Xaa is any amino acid
MIAFTKTLSSYFEKKRANTLFAVLRNYYTENSPYLIIDTARGRKINETSRQILHGFIINTFIPFLQKNKIRRFGNIKPVVMRNFQNYLLIEKKMLPQSINRQMGGIKAIFSHLFMAGIIKHNIVRDISPLKPANSRIRGCYSVDELKGIFKDTWKDKKSYLLCSIIYSTGIRNSELQNLKVKDLIVRENVDFLNIVKSKTSSGIRTIPLHPKVRKTLEEWIDENKLSGEDYLFVRNCNKRIFKNAKKAGIFMGSLLGKGQNELENENITFYSGRHFYKTMLNLYNMGDVEEIFMGHKVSKNVSERYNHKDKRGEKELLAAAKKAIEIVDNSLFQ

SEQ ID NO: 39327 - DNA, 444 bp, Unknown
  Obtained from environmental sample
  misc_feature (1)..(444): n is a, c, g, or t
atgattgcgagacgcattgagtcattcttgcggtacgcacgttcaaggataaccaagccaatttccctggacatttacggcgcaaacggctggtaccgtaccggagccagaaccggccaggaagtagaaatactttacaagtatgtggacgttatctgcccgatgtactacccaagccactttgagcagaccttccttgcgcagaacccgccggaagaacgcccatacaggatctactatttggggacaagaaggacacttatcattgccaggggacgggtaatagtccgcccgtgggcgcaggctttctaccttaacgtttcctatgaccggaagtactacaacagagactatgtacgcctgcaactggatggagtacgcgctgcgggcaagggcggacttacctattggaataacagcggtcgctatgaggatattccatag

SEQ ID NO: 39328 - protein, 147 aa, Unknown
  Obtained from environmental sample
  misc_feature (1)..(147): Xaa is any amino acid
MIARRIESFLRYARSRITKPISLDIYGANGWYRTGARTGQEVEILYKYVDVICPMYYPSHFEQTFLAQNPPEERPYRIYYLGTRRTLIIARGRVIVRPWAQAFYLNVSYDRKYYNRDYVRLQLDGVRAAGKGGLTYWNNSGRYEDIP

SEQ ID NO: 39329 - DNA, 903 bp, Unknown
  Obtained from environmental sample
  misc_feature (1)..(903): n is a, c, g, or t
atgaaaaaaataaaatcaaatgtggagatttttgcggcagcaaaactccaggctaaaatgcggagtattttagcaattatcgcgcttgtatcggtaatagggttttcttttatcgcttgcgacaacggcggcggcaatgaccccggcggtcaaacttccggcggcgaactccccggcggtactaccccaacagttaccaacgtaacagtaagtccggcaacgacaagtgttacaaaaggcgcgacaaaaacatttaccgcaatagttacggtaacaaacaatgccgcaaagaccgttacatggtctattgtccaaacaggtaaaaacgccggaactactattaacgcaaacggattattaactgtcgccgccgctgagactctttcgtcgcttaccgtaaaagcaacctcaacagtggatacgaacaaaagcggaacggcaacggtaacaataaccggcggcagtactccgcagcctcctgcaactccattacattcaaaatggccgttttatgtgggagcggcagtaccaggcagcgctcttagttcaagtaacggacagtatcctttacttgggcattttaatgtgctggttgcggaaaatgatatgaaacctgaatctgtaatgccaatccaatggcagaattggcagtcatccccggcttacaatgcttctcaatcttaccgttggacagaagccgataaattggttaattacgcgcaggcgaataacacaaaagtacgaggtcatgttcttttttggcatgagcagactcccgtagtcttttttaagacaggtaatttaacgagcgcttatgtttcaaaggaagtgttttataaccgtatggaacagcatgtaaaaagctgtttttcaaaaatacctcgtgccgatctgatcgtgtaa

SEQ ID NO: 39330 - protein, 300 aa, Unknown
  Obtained from environmental sample
  DOMAIN (64)...(149): Bacterial Ig-like domain (group 2)
  misc_feature (1)..(300): Xaa is any amino acid
MKKIKSNVEIFAAAKLQAKMRSILAIIALVSVIGFSFIACDNGGGNDPGGQTSGGELPGGTTPTVTNVTVSPATTSVTKGATKTFTAIVTVTNNAAKTVTWSIVQTGKNAGTTINANGLLTVAAAETLSSLTVKATSTVDTNKSGTATVTITGGSTPQPPATPLHSKWPFYVGAAVPGSALSSSNGQYPLLGHFNVLVAENDMKPESVMPIQWQNWQSSPAYNASQSYRWTEADKLVNYAQANNTKVRGHVLFWHEQTPVVFFKTGNLTSAYVSKEVFYNRMEQHVKSCFSKIPRADLIV

SEQ ID NO: 39331 - DNA, 858 bp, Unknown
  Obtained from environmental sample
  misc_feature (1)..(858): n is a, c, g, or t
ttggcttacgaagcggaaagcccgattaactggtgtccgtcctgcaagacggggcttgccaacgaagaagtaaaagacggtctttgcgagcgctgcggcgaaaaagtaacgcgcaaaagaatacgtcagtggattctgaaaataaccgcctacgccgagcgcttgcttgcggacttggatttattggactggcctgaacctgtaaaacttatgcagcgcaactggattggacgcagtgagggcgcaaacgtaacattcaaagttgataaatcgacattaaaaaacaatgaggacttatcttttgaaatttacacaacacgccccgacactcttttcggagtaacctacatggttctctctcccgaacatccgctggtggacaaacttacaacgcctgaacaaaagcaggcggtcgcatcttacattgaagccgccgcaagaaagagcgatcttgaacgcaccgatctcgcaaaagaaaagacgggcgtgttcagcggagcgtatgcgattaatcccgttaacgatcaaaaaattcctatttggatagcggactatgttcttatttcttacggaacaggcgcaatcatggcggttccggctcatgatgaacgcgactgggagtttgcggtaacgtataaactgcctattgttgaggttgtttcgagagagaaaaatttaaccggtaatggcgcaatggatacaaacgagggaatagggaatggggagttgggagtagggagcagagatgataataaaaacattcaaagatttgacggcttggcaggaggcgatgaatctagtggagatggtttatctggaaacaaaaacattcccgaaagaagaaatgtacggttttga

SEQ ID NO: 39332 - protein, 285 aa, Unknown
  Obtained from environmental sample
  misc_feature (1)..(285): Xaa is any amino acid
MAYEAESPINWCPSCKTGLANEEVKDGLCERCGEKVTRKRIRQWILKITAYAERLLADLDLLDWPEPVKLMQRNWIGRSEGANVTFKVDKSTLKNNEDLSFEIYTTRPDTLFGVTYMVLSPEHPLVDKLTTPEQKQAVASYIEAAARKSDLERTDLAKEKTGVFSGAYAINPVNDQKIPIWIADYVLISYGTGAIMAVPAHDERDWEFAVTYKLPIVEVVSREKNLTGNGAMDTNEGIGNGELGVGSRDDNKNIQRFDGLAGGDESSGDGLSGNKNIPERRNVRF

SEQ ID NO: 39333 - DNA, 564 bp, Unknown
  Obtained from environmental sample
  misc_feature (1)..(564): n is a, c, g, or t
ttgatcaaccaggacatgccgcgtaaagaaaaggtaaattatcatcagttaagggatgaattggaaaaaaagataaggtttttagccagtttaatgaaaggaccggcttaccaaaaactggcgcagatgactgaagaacagattatcggctatcttgaaaaaaatatcaacgaagtacagaattatcacaaaattctgggcgcgcttgatgatttctttaaagcaaaggttacgccggaaaacagggataaaataaaaggtataaaaccggaactgacgacgttaaaaaattcttatgtaaaagccaatcagatgcgctatgaatacagcgcccaaaaagaagaagaagaacagttaagacgacttggcgtccatatggaagccgccgcggccgcgacagcgtctccggcagccggagcccctgcagccagtcccgctcccgcagccgggaagacacccgcagcaggtaaacctccggccgccggaaaatctcccgccgccgggaaacctcccgcagggggaaaacctccggcaggaggaaaagtttcaacagcaaaaacttga

SEQ ID NO: 39334 - protein, 187 aa, Unknown
  Obtained from environmental sample
  misc_feature (1)..(187): Xaa is any amino acid
MINQDMPRKEKVNYHQLRDELEKKIRFLASLMKGPAYQKLAQMTEEQIIGYLEKNINEVQNYHKILGALDDFFKAKVTPENRDKIKGIKPELTTLKNSYVKANQMRYEYSAQKEEEEQLRRLGVHMEAAAAATASPAAGAPAASPAPAAGKTPAAGKPPAAGKSPAAGKPPAGGKPPAGGKVSTAKT

SEQ ID NO: 39335 - DNA, 408 bp, Unknown
  Obtained from environmental sample
  misc_feature (1)..(408): n is a, c, g, or t
gtgtctttggccgatgattcgaggcttgaggtagacgcgcttggcggcgctcctggcgtgttgagcgcgcgatacggcggcgagggggcgaaccacgctgaaaataatgagaaattgttgaacgccctacgagacatcccggagaataaacgcgccgctcgttttaaatgcgtgttggttttgaagacgggaatagatacgtatctatcggcagagggtgtttgtgaaggtcgtataattaatgaaactgtcggtagcaatggttttgggtacgacccgctgttcgtccccagcggttttgacaggacaatggcgcaactcaattcgggggagaaaaacggtatcagtcatagaggtgcggcactgaggagtctatatggtatgatgagtaacggtgggattgggtaa

SEQ ID NO: 39336 - protein, 135 aa, Unknown
  Obtained from environmental sample
  DOMAIN (1)...(129): Ham1 family
  misc_feature (1)..(135): Xaa is any amino acid
MSLADDSRLEVDALGGAPGVLSARYGGEGANHAENNEKLLNALRDIPENKRAARFKCVLVLKTGIDTYLSAEGVCEGRIINETVGSNGFGYDPLFVPSGFDRTMAQLNSGEKNGISHRGAALRSLYGMMSNGGIG

SEQ ID NO: 39337 - DNA, 450 bp, Unknown
  Obtained from environmental sample
  misc_feature (1)..(450): n is a, c, g, or t
atggcaatcccattgacaatcgaaaacatcgcagggggcggcgtgatagaacgctaccaccaggcgctacaggcggtcctagacaacatcttggaccccaacgcgccggcgacagcgacccggcaaatcgtcttcacgacgaagatcaagcccaaggaagacagggaggtcggcgacgtcgagatcatcatccagcccaagacgccgccggccaaggcaatcgtcacccgcttgatgttcgacaagacggcggacggcaaggcggtcgccgccgaaatgacggtcggcgaggggcgccacgcccagcccctgcccggtatgcaaccggccggccgactcgccagcgtgacccttcccaaaatctctcccctgaaaccagaaaggacggtaccnatgatggaaactagcctgtatcacgcaatccgccatgacgcgccgcccaagagatga

SEQ ID NO: 39338 - protein, 149 aa, Unknown
  Obtained from environmental sample
  misc_feature (1)..(149): Xaa is any amino acid
MAIPLTIENIAGGGVIERYHQALQAVLDNILDPNAPATATRQIVFTTKIKPKEDREVGDVEIIIQPKTPPAKAIVTRLMFDKTADGKAVAAEMTVGEGRHAQPLPGMQPAGRLASVTLPKISPLKPERTVPMMETSLYHAIRHDAPPKR

SEQ ID NO: 39339 - DNA, 783 bp, Unknown
  Obtained from environmental sample
  misc_feature (1)..(783): n is a, c, g, or t
gtgttcgactgcctcagcgatttattgaagagctggcgttcggacatgatggtgggtaatttttttcgcataacgtgtccttttctgttccagttggacactctggcgtattttgcccttatccgggggacgcatacctacgatacaatatcgagaatacgcgagaccacccagcttttaatggacatatatattgttgacaataaaatctacattcacccgctcaaggtatgggaacggtattctcccaccatgttctttccgcatttgatagacggagacggggcgatctcgattacctccagcgccgacaccgcgactttattctcgcaggtcagcggcagcgggcagcccagcgattactggaatataaccctggatcacgcccgcaccctgcttaacgggggggataaagagtcgcaggaagaaatgaaaaagaaccttatcagcgtggtaatcggcaaagagctgcgcataacccaactcgcgcataaatatttcacgctcagggacgttctggacatcgcgcggcgggagatagggacgggttttgtcggcggaaaaagcgtcgggatgctcctggcgagaaagatactggagactgacgcgcaggacgcgatgcgcggccattgggaaccgcatgattcctactatctgggctcggatattttctatacgtacatagtgcaaaacggcntggtgggatctgcggatgaggcagaaaacaaccgaggggtattttacccttgccaaagaactgcagaaaagatgcgcccgccataa

SEQ ID NO: 39340 - protein, 260 aa, Unknown
  Obtained from environmental sample
  misc_feature (1)..(260): Xaa is any amino acid
MFDCLSDLLKSWRSDMMVGNFFRITCPFLFQLDTLAYFALIRGTHTYDTISRIRETTQLLMDIYIVDNKIYIHPLKVWERYSPTMFFPHLIDGDGAISITSSADTATLFSQVSGSGQPSDYWNITLDHARTLLNGGDKESQEEMKKNLISVVIGKELRITQLAHKYFTLRDVLDIARREIGTGFVGGKSVGMLLARKILETDAQDAMRGHWEPHDSYYLGSDIFYTYIVQNGXVGSADEAENNRGVFYPCQRTAEKMRPP

SEQ ID NO: 39341 - DNA, 300 bp, Unknown
  Obtained from environmental sample
  misc_feature (1)..(300): n is a, c, g, or t
atgtcgctagacaggagagtaagcaccgggatgcccggtctggatcaggcaatcgatatgctgcgcctgggagataacgttgtctggcaggtaaattccattgaggattacctccaggtcgtgcgtccgtatatcaagcaggcaaaaaaggacgggcgcaggcttgtttatttccggttcggggatcatgaacccataatgaaagatgacgagccgtccgttctgtataaactggatacctccgaaggtttgagctntttgccgcgaaaatacataactttattgacaaggagggcctga

SEQ ID NO: 39342 - protein, 99 aa, Unknown
  Obtained from environmental sample
  misc_feature (1)..(99): Xaa is any amino acid
MSLDRRVSTGMPGLDQAIDMLRLGDNVVWQVNSIEDYLQVVRPYIKQAKKDGRRLVYFRFGDHEPIMKDDEPSVLYKLDTSEGLSXLPRKYITLLTRRA

SEQ ID NO: 39343 - DNA, 684 bp, Unknown
  Obtained from environmental sample
  misc_feature (1)..(684): n is a, c, g, or t
atgaccgaaaaaattaagatgtcccccccgactgacgccgacattgccgaagcgaaggcgtactcaatcgtcaacgcggtgaccgctgtttcatcgcgttctgttgtaaaaattttccctgacaaactacaggtaaaaaaacgcgtggcgttgatggattacggcgcgaagcggggaatagcgcgggcgctggcggcgcgaggctgtgaggtatggtcttttccgcatgacgcaagcgcacaggagattctaaaaatgaaaccggacgggatcatgctgaccaacggccctggggatcccgcggaaccggccaataacggaattatcgaaacgcttcgtgatttacaaaagagcaatgtgattgtctttggcatttgtttgggacatcaactgcttgcgctggcaaacggttatacgacgaagaagctcaagtttgggcaccggggggccaatcagccggtcaaggatatgtcaacggggcgtgtgtatatcaccagccagaatcacggctacgccgttgtgacggataatggctcattcgtgaacgtaaacgacggaacctgcgaaggcatggattacgggaattcgttttcggtacagttccaccccgaggcctgcggcggcccgcttgatatgtcttttttgtttgaccgttttatggaaaggatggaaaaatgtcgctag

SEQ ID NO: 39344 - protein, 227 aa, Unknown
  Obtained from environmental sample
  DOMAIN (49)...(204): Peptidase C26
  misc_feature (1)..(227): Xaa is any amino acid
MTEKIKMSPPTDADIAEAKAYSIVNAVTAVSSRSVVKIFPDKLQVKKRVALMDYGAKRGIARALAARGCEVWSFPHDASAQEILKMKPDGIMLTNGPGDPAEPANNGIIETLRDLQKSNVIVFGICLGHQLLALANGYTTKKLKFGHRGANQPVKDMSTGRVYITSQNHGYAVVTDNGSFVNVNDGTCEGMDYGNSFSVQFHPEACGGPLDMSFLFDRFMERMEKCR

SEQ ID NO: 39345 - DNA, 459 bp, Unknown
  Obtained from environmental sample
  misc_feature (1)..(459): n is a, c, g, or t
atgatcagattggccgagccgatgggaatggtggaatcataccttgattccgaagaggccatgatccgcgcaggcggctttgatgttctggggcaccccgatctggtaaagcttcacaacaaggacaataagcttttcaatccccaaagcgccttctacttaaaaaaaatcgccactttggcagagctgctggccaggctcggcgttccttccgagcttaacacaggcggcctgaacaggaacagaataagcgaatgttacccatccggtgattttctaaaaaaattacgggaactaaatgtccccatagtcataaacgccgatgcccacaaagcgaaagatcttgacggccactacgaagacgcccgtaaaaccatgcttgaggcggggtacactgagacggtactttttgaagggcggaaagaaggtaaagcgctctggaaaagcgaaaaactataa

SEQ ID NO: 39346 - protein, 152 aa, Unknown
  Obtained from environmental sample
  misc_feature (1)..(152): Xaa is any amino acid
MIRLAEPMGMVESYLDSEEAMIRAGGFDVLGHPDLVKLHNKDNKLFNPQSAFYLKKIATLAELLARLGVPSELNTGGLNRNRISECYPSGDFLKKLRELNVPIVINADAHKAKDLDGHYEDARKTMLEAGYTETVLFEGRKEGKALWKSEKL

SEQ ID NO: 39347 - DNA, 1314 bp, Unknown
  Obtained from environmental sample
  misc_feature (1)..(1314): n is a, c, g, or t
ttgggaatggggagtggaagaagtaactcgtttttattatttgttttatttgtttttgccgggctgggctccggctgggcacaggccgatacggaacgtcctctgcgtaacataccgcaggattctacaccccccgatctttatctgcggcactccacctactccgcgaaaatcaccccttctttgattacgcctgctgtccttaagcagcctttatttcttctttatatcacccagtatacaaatccggccggcattgcttatatgaacgccgttatggacagggcaagcctgtatcttccgtttatcagggaagaagtaaaaaaaagaaatctgccgcctgaattggcgtatctgcctgtaatcgaatctaattttgatataacggcaaaaagcaaatccggcgcggtaggtctttggcaatttatgctgaacagtatttctccttttaacataaaggtaaacgacatcgttgatgaaaggcgcgattttcaaaaatcaacaaggggagcgcttcaaaaacttgaggacaattacagaactctaggaaattgggaacttgcgctggcggcttacaactccggactgggagcaatgaacaagataattcaaaaaacaaagctccgcgattactgggaattatgcagacgaaaagatataaagcaggaaacggttgattatgtgccgaaattccttgcggcggcctatattatgtccaatccacgccgcttcggaatagattgctggcagaaaacccatgaatggacatccataccccttaaacggcaggtttcgctggaaacgcttgccgccgaatcaggcgcggacagggaattacttttgcgtctgaacgccgaattgctccaggggataaccccagcggacaggaatttccgtcttaaaatacccacatcccatcttgaacagataaacgctgttctggaacggaaagagcttaaccttgtccgctataattaccataccgtgcgccacggcgatactttgtggtcaatgtccagatactacggcgcgtctgtcgacttgatcgaacagcacaatccgggcatttcaagccgttatttaaaaataggggaaacggtcataattccgtcatttaaagatatagctccgccatcactgccagccgcaaaagtccgttttgacgggcagtatacggttaaaaaaggcgacactctctggtccattgctgtcaggtatggcgttgccccccaggatttggcgcaagccaataatatgacgcttaatcagattttacgcgaaggatttaccaataaagtaccgatactaagataa

SEQ ID NO: 39348 - protein, 437 aa, Unknown
  Obtained from environmental sample
  SIGNAL (1)...(27)
  DOMAIN (100)...(215): Transglycosylase SLT domain
  misc_feature (1)..(437): Xaa is any amino acid
MGMGSGRSNSFLLFVLFVFAGLGSGWAQADTERPLRNIPQDSTPPDLYLRHSTYSAKITPSLITPAVLKQPLFLLYITQYTNPAGIAYMNAVMDRASLYLPFIREEVKKRNLPPELAYLPVIESNFDITAKSKSGAVGLWQFMLNSISPFNIKVNDIVDERRDFQKSTRGALQKLEDNYRTLGNWELALAAYNSGLGAMNKIIQKTKLRDYWELCRRKDIKQETVDYVPKFLAAAYIMSNPRRFGIDCWQKTHEWTSIPLKRQVSLETLAAESGADRELLLRLNAELLQGITPADRNFRLKIPTSHLEQINAVLERKELNLVRYNYHTVRHGDTLWSMSRYYGASVDLIEQHNPGISSRYLKIGETVIIPSFKDIAPPSLPAAKVRFDGQYTVKKGDTLWSIAVRYGVAPQDLAQANNMTLNQILREGFTNKVPILR

SEQ ID NO: 39349 - DNA, 621 bp, Unknown
  Obtained from environmental sample
  misc_feature (1)..(621): n is a, c, g, or t
atggtcgtgcgattgatagagcacgtcgaagctgtgaaggaggagattatcgagggtatgcaagtggaggaagcggaacaagaggaagagaacgaaaacgacgagcacatctggacctcgcccaggaacgccatcgccctggtcagagcgattgcggacgctctgtgcgcggctgatccgtcgaacgccgacgaatataagtcaagagcggcctcgtacatcagcgagatcaaagcgttggacgaagaattcaaagctctcgtcgcgtccgcgaagagaaagaaaattgtgttcggcgacaggttcccattccgctatttcgtggatgaatttgggctggaatatcgcgccgccttccccggatgtcacacggaatcggacatcagcgtggccacaatggcttatttggtgaaaactgtggagaacgagagtatccccgtcatatacacattggaacttggcagcggaaacattgcccgcgccatagccgaacagaccggcacggaggttctgacgctgcattcctgccacaacgttaccaggtcggatttcgtatccggcgccacttacgtcagcctcatgaggcaaaacctggaaaacctgcgaaagggcttgtattga

SEQ ID NO: 39350 - protein, 206 aa, Unknown
  Obtained from environmental sample
  DOMAIN (1)...(206): Periplasmic solute binding protein family
  misc_feature (1)..(206): Xaa is any amino acid
MVVRLIEHVEAVKEEIIEGMQVEEAEQEEENENDEHIWTSPRNAIALVRAIADALCAADPSNADEYKSRAASYISEIKALDEEFKALVASAKRKKIVFGDRFPFRYFVDEFGLEYRAAFPGCHTESDISVATMAYLVKTVENESIPVIYTLELGSGNIARAIAEQTGTEVLTLHSCHNVTRSDFVSGATYVSLMRQNLENLRKGLY

SEQ ID NO: 39351 - DNA, 516 bp, Unknown
  Obtained from environmental sample
  misc_feature (1)..(516): n is a, c, g, or t
ttggcaatcggcgtgatcgtcatatccgtgacgaccggtatgaacgccgacgtttgtaactacatgttcggttctattcttgccatgagcaggagcgacgtgtacctgagtatcgccgtcgccgtgtttgtgctgattctttacgtattgtcctataaccgcatcttcgctgtgacctttgacgaaaatttcgcgcgggccacaggcatcaaggcgagccgttacaacacgttgatcgccttcttgaccgccatggtcatagtggtgggaatgcgcatgatgggcgctatgctgatctccagcctcataatttttcccgcgctaaccgcgatgcgcgtgttttcgagcttcaagcgcgtggttatctgctcggcgattctttccgtagcgtgctttttcgtcggcatgaccctgtcgttcgcgttctccacgccggccggggcaagcatcgtgatcgtaaatctggcggcattttgccttttctggtccgccgagaaatcaggtttgaaggcgtag

SEQ ID NO: 39352 - protein, 171 aa, Unknown
  Obtained from environmental sample
  DOMAIN (1)...(164): ABC 3 transport family
  misc_feature (1)..(171): Xaa is any amino acid
MAIGVIVISVTTGMNADVCNYMFGSILAMSRSDVYLSIAVAVFVLILYVLSYNRIFAVTFDENFARATGIKASRYNTLIAFLTAMVIVVGMRMMGAMLISSLIIFPALTAMRVFSSFKRVVICSAILSVACFFVGMTLSFAFSTPAGASIVIVNLAAFCLFWSAEKSGLKA

SEQ ID NO: 39353 - DNA, 876 bp, Unknown
  Obtained from environmental sample
  misc_feature (1)..(876): n is a, c, g, or t
gtgacaaaagtaaggaggcatgatctgggtaaccgccgattagttgttggtcatacaggtattacctggatggatcctgttgcggaagccggtataaagtgtattgccgggctggggtatcacaatatcgaagtttttgcgtgggtgcttaaagcgtttcacgataaaggccgggcggatatatgcaagcagtacaatatccccctgatttcgagttattactccgttgatattgcggatccttccaaaaaggaagatgaaattgcgaagctcagtgaatggaccgacattattactgccatgggcggtaaattcgcgaccttcggcggcaacgcggttccccgcagatcttttaacttcaacgaaaataaaaagtacatcgtggaatttgtgaatgaagcggcaaagatccttgaaggtaagggaatgaagctgaatttccatccccacaccggtacgccgatagaaacagaagcggaaattcgcacttttatggacgctgttgacaccaggtacgtgggttttgcccctgatatcggacagatccaaaagggcggcgccgatccgttaaagatcaccaaagattatatttccataatcaaactcgttcacttcaaggattattgcggcaaagtgaaatttgacgcggaaggcaaggagatcgatcagtcagggtttgcgtgttactgccctttggggcagggcgtggttgatctcaaaggcattctggatgtgcttgaggattataaggccttcgatggtccaatcatggtagaactcgacgggacttcgcaaatgccgatgaccgctgaaaaggccgtggctattaataaagagttcatggagaaacttgggtacagttttgtaaaaaggtaa

SEQ ID NO: 39354 - protein, 291 aa, Unknown
  Obtained from environmental sample
  DOMAIN (32)...(237): Xylose isomerase-like TIM barrel
  misc_feature (1)..(291): Xaa is any amino acid
MTKVRRHDLGNRRLVVGHTGITWMDPVAEAGIKCIAGLGYHNIEVFAWVLKAFHDKGRADICKQYNIPLISSYYSVDIADPSKKEDEIAKLSEWTDIITAMGGKFATFGGNAVPRRSFNFNENKKYIVEFVNEAAKILEGKGMKLNFHPHTGTPIETEAEIRTFMDAVDTRYVGFAPDIGQIQKGGADPLKITKDYISIIKLVHFKDYCGKVKFDAEGKEIDQSGFACYCPLGQGVVDLKGILDVLEDYKAFDGPIMVELDGTSQMPMTAEKAVAINKEFMEKLGYSFVKR

SEQ ID NO: 39355 - DNA, 480 bp, Unknown
  Obtained from environmental sample
  misc_feature (1)..(480): n is a, c, g, or t
atgatttggatcgaggcgacgatgctgaaactgccacttacccatgcgcttacctttgacgatgtgcttttggttccaggttccagcgaggttcaccccaaccatgttgatgtaagcacgcacctcaccaaggacatacggttgggtatcccgctggtcagtgccgcaatggacacggtgacagaggccaacctagccatctcgcttgcccagcagggcggcatagggatcatccacaagaacatggccatagagcgacaagtcgaggaagttgacagggtgaagcgctctgaatcagggatgataaccaaccccatcacgatcaggcctgacgtggcgatacgcgaggccgacgcgctcatggccaagttcaggatttctggggtacccgtggtcgaaaacggcaagctggtggggatcctaacaaccgcgacctccggttcgaaaacgacatggacatcctcgtgcgggagcgcatga

SEQ ID NO: 39356 - protein, 159 aa, Unknown
  Obtained from environmental sample
  DOMAIN (45)...(146): CBS domain pair
  misc_feature (1)..(159): Xaa is any amino acid
MIWIEATMLKLPLTHALTFDDVLLVPGSSEVHPNHVDVSTHLTKDIRLGIPLVSAAMDTVTEANLAISLAQQGGIGIIHKNMAIERQVEEVDRVKRSESGMITNPITIRPDVAIREADALMAKFRISGVPVVENGKLVGILTTATSGSKTTWTSSCGSA

SEQ ID NO: 39357 - DNA, 315 bp, Unknown
  Obtained from environmental sample
  misc_feature (1)..(315): n is a, c, g, or t
ttgccgttttcgaccacgggtaccccagaaatcctgaacttggccatgagcgcgtcggcctcgcgtatcgccacgtcaggcctgatcgtgatggggttggttatcatccctgattcagagcgcttcaccctgtcaacttcctcgacttgtcgctctatggccatgttcttgtggatgatccctatgccgccctgctgggcaagcgagatggctaggttggcctctgtcaccgtgtccattgcggcactgaccagcgggatacccaaccgtatgtccttggtgaggtgcgtgcttacatcaacatggttggggtga

SEQ ID NO: 39358 - protein, 104 aa, Unknown
  Obtained from environmental sample
  misc_feature (1)..(104): Xaa is any amino acid
MPFSTTGTPEILNLAMSASASRIATSGLIVMGLVIIPDSERFTLSTSSTCRSMAMFLWMIPMPPCWASEMARLASVTVSIAALTSGIPNRMSLVRCVLTSTWLG

SEQ ID NO: 39359 - DNA, 324 bp, Unknown
  Obtained from environmental sample
  misc_feature (1)..(324): n is a, c, g, or t
atgaacgacgcctgcattgtcatcacaacctgccccagcgaagccatggccctcaacatggccgccgcactggttgaccagaagttggccgcgtgcgtcagtatcagacctgggataaagagttactactactttgatggcactgaacacatggacgaagagttcgaattggttatcaagactagggccgggatgttcgacagggtgtccagccgaataaaggagctgcacacgtacaacgtgcccgaaatcatgatgttcaagctggacggcgcatcggagtcgtttcaaaagtggatagagaacaccatagagctgcggtag

SEQ ID NO: 39360 - protein, 107 aa, Unknown
  Obtained from environmental sample
  DOMAIN (4)...(105): CutA1 divalent ion tolerance protein
  misc_feature (1)..(107): Xaa is any amino acid
MNDACIVITTCPSEAMALNMAAALVDQKLAACVSIRPGIKSYYYFDGTEHMDEEFELVIKTRAGMFDRVSSRIKELHTYNVPEIMMFKLDGASESFQKWIENTIELR

SEQ ID NO: 39361 - DNA, 303 bp, Unknown
  Obtained from environmental sample
  misc_feature (1)..(303): n is a, c, g, or t
atgggctccattggggcaatgaaggccggcagtagggatcgctacttccaaaccagcaacgaggacgtaaaactggtgcccgaaggcatagagggccaggtgccttacaaaggcaagctgggcgagcttgtcacccaactgctgggcggcctccgctccggcatggggctggttggcggaaaagacatacgcgaatttcaggaaaaggccaacttcgtgcagatcagcaacgcaggcctaagggaaagccacgcccacgacgtgatgatcacaaaggaagcgcccaactacactatggagtga

SEQ ID NO: 39362 - protein, 100 aa, Unknown
  Obtained from environmental sample
  DOMAIN (1)...(86): IMP dehydrogenase / GMP reductase domain
  misc_feature (1)..(100): Xaa is any amino acid
MGSIGAMKAGSRDRYFQTSNEDVKLVPEGIEGQVPYKGKLGELVTQLLGGLRSGMGLVGGKDIREFQEKANFVQISNAGLRESHAHDVMITKEAPNYTME

SEQ ID NO: 39363 - DNA, 813 bp, Unknown
  Obtained from environmental sample
  misc_feature (1)..(813): n is a, c, g, or t
ttggatgattgccgagaggcggagagcggcacggcggcgcaggccggggagcgggggcttgaggtggaggaattgtctaagactaatgccgatatagctgtgtttccgcagctggggcattcaagttccgtttattctgtagcgtttagtcccaacggcacacagatgctttccggttcctatgataaaaccataaaactgtgggatgtggcaagcgggcgtgagatcagaaccttttcggggcatgccagttatgttttgtccgtagcgttcagccccgatgggaagcaggttctttccggttcaggggatttttctaacagtaataataacgttgataacacggtaaaactgtggaacgtggcaagcgggcgggaactcagaaccttttcggggcataccggtcaggttaggtccgtagcgttcagccccgacggtaagcaggtgctttccggttcaggggataaaacggtaaaactgtgggatgcggcaagcgggcgggaactcagaaccttttcggggcatgagatggaggttatatccgtagcgttcagccccgacggtaagcagatgctttccggttcaagggataaaacggtaaaactgtgggacgcggcaagcgggcgtgagatcagaacctttttggggcatacatactatgttcaatccgtagcgttcagccccgacggaaaacagattctttccggttccaatgatacaacagtaaaactgtgggacgcggtaagcgggcgggaaatcagaaccttttcggggcataccggttacagttttgtccatagcgttcagccctga

SEQ ID NO: 39364 - protein, 270 aa, Unknown
  Obtained from environmental sample
  DOMAIN (74)...(111): WD domain, G-beta repeat
  misc_feature (1)..(270): Xaa is any amino acid
MDDCREAESGTAAQAGERGLEVEELSKTNADIAVFPQLGHSSSVYSVAFSPNGTQMLSGSYDKTIKLWDVASGREIRTFSGHASYVLSVAFSPDGKQVLSGSGDFSNSNNNVDNTVKLWNVASGRELRTFSGHTGQVRSVAFSPDGKQVLSGSGDKTVKLWDAASGRELRTFSGHEMEVISVAFSPDGKQMLSGSRDKTVKLWDAASGREIRTFLGHTYYVQSVAFSPDGKQILSGSNDTTVKLWDAVSGREIRTFSGHTGYSFVHSVQP

SEQ ID NO: 39365 - DNA, 888 bp, Unknown
  Obtained from environmental sample
  misc_feature (1)..(888): n is a, c, g, or t
ttgtccatagcgttcagccctgacggcacgcaagttctttccggttctggtgataaaacggtaaaactgtgggacacggcaagcggacgggggctcagaactttttcggggcataatagttatgttttctccgtagcgttcagccctgacggtaagcagattctttcaggttccgttgatggtacagtccgcctcttggacatctccaccggcaaagaaatcgcccaattcatcagttttattgatggcgaatggatatgccttaccccggacggctactacaacgcatcgcctaacggcgacaaatacctcaatgtccgagtggggaacaacgtctacggcatagaccagtacagtgccactttctataggccgcagatcgtggaagcacggctgcagggcagacccgatccggttcgtgtcaccccgccaatacaggatgccgtttcaccgcccgtggtaattatacgcagcccggaaaacggggcggggctgtcatctaaccaggttgaactctccgtctccgtggttgatcagaaacagccgattaaaaatatcaaagtgctggttaacggcaggcttgtcggaagcgatgaaatgaagaacataagcggaagccggggggtgtcagtcgtcaataccggtattgtcattactggcaacgaaaaccgcgtggatttccgcttccctattacacttaacgcggggacaaaccgcatagaagtcctcgcttccaatccctattcggaaggtagggagtacattgaggtaaattacagtcagacagtaacgcggcaggacatactccccaatttgtggatactttctataggcgttaacaagtatgacgcccacccgcagttgccgaaccttattacgcgttcatga

SEQ ID NO: 39366 - protein, 295 aa, Unknown
  Obtained from environmental sample
  DOMAIN (30)...(67): WD domain, G-beta repeat
  misc_feature (1)..(295): Xaa is any amino acid
MSIAFSPDGTQVLSGSGDKTVKLWDTASGRGLRTFSGHNSYVFSVAFSPDGKQILSGSVDGTVRLLDISTGKEIAQFISFIDGEWICLTPDGYYNASPNGDKYLNVRVGNNVYGIDQYSATFYRPQIVEARLQGRPDPVRVTPPIQDAVSPPVVIIRSPENGAGLSSNQVELSVSVVDQKQPIKNIKVLVNGRLVGSDEMKNISGSRGVSVVNTGIVITGNENRVDFRFPITLNAGTNRIEVLASNPYSEGREYIEVNYSQTVTRQDILPNLWILSIGVNKYDAHPQLPNLITRS

SEQ ID NO: 39367 - DNA, 468 bp, Unknown
  Obtained from environmental sample
  misc_feature (1)..(468): n is a, c, g, or t
ttgatcgaaaaagaagaactgctaactctgattcctcacaaagggaaaatgatgctcctgaacagagtcattgactatgatattaaacatagtatccgctcggaatataatatcaccaagagttgtcttttttacgatcctgttttagacggcgtgccttcgtgggcaggtttcgagtttatggctcagacgatttccgttcttacgggaatcagaaaaagggaaaagggagaaaaacccactatcgggtttattttaagcatcccgtccatgcgaatggaaattcccgtgtttaagaacggcgatttattggacattagagcgaaagaaactgattgtacggatatgatttatacttttgaaggagcgatttttttgagagacaaaaaagttatggaaggaagtttaatggtgatggaagtcagcgatgaaaagtttaaaagtttgactgcggagcggattaaatga

SEQ ID NO: 39368 - protein, 155 aa, Unknown
  Obtained from environmental sample
  DOMAIN (11)...(135): FabA-like domain
  misc_feature (1)..(155): Xaa is any amino acid
MIEKEELLTLIPHKGKMMLLNRVIDYDIKHSIRSEYNITKSCLFYDPVLDGVPSWAGFEFMAQTISVLTGIRKREKGEKPTIGFILSIPSMRMEIPVFKNGDLLDIRAKETDCTDMIYTFEGAIFLRDKKVMEGSLMVMEVSDEKFKSLTAERIK

SEQ ID NO: 39369 - DNA, 1455 bp, Unknown
  Obtained from environmental sample
  misc_feature (1)..(1455): n is a, c, g, or t
atggaaaccgaaacctcgatatttgagaaatactttgaaacagccgaacgcgtcgacacgataaaatgcgtgggcaggatctgtaaagtccagggcctccttgtggaaagcagggggccgcaggctattatcggcgagatatgcaaaattcaagtccccaaaggcaaaggaacggttttcgccgaggttgtcggtctaagaaacgaaatcgtacaattgatggttttcgaggaaaccgacgggctggaagtgggcaacctcgtaatcgcccagggcggccgccttgaagtccccgtgtcgacgaaacttttggggcgcgttctgaacgccctgggaaaacctattgatgacaaaggcgatattgattcccctgtaatgtatcccgcgctcgcgagccctcccgaccccctcaaacgcaggcggatcacagagcgcatagttacgggcgtgcgggccatcgacggccttttggccgtaggcaaaggccagcggcttggcatattcgccggttcaggcgtgggaaaatcgaccctgctgggtatgattgcgcgtaacaccagcgccgatgtaaacgtggtcgcgctgataggcgaacggggccgcgaggtaaatgattttatagaaaacgatctcggtcctgaggggctcgcgcgcagcgtggttgtagttaccccctcaaactcgccgccgctggcgaggcttcgcggggcctatgtggctacggccatcgccgaatttttccgcgatcagggccgtgacgtgatgctgctctttgactcggtgacccgctttgccagggcccaaaggganataggcctggcttccggcgaacctccggcgacaaggggctatacgccttccatgttcgattccatgcccaagctattggaacgcagcggtacctcggaaaagggaagcatcaccggcttttatactatactggttgacggcgacgaccttgacgaacctgtctcggacactgtgcggggaattcttgacggccacattgtgctttcaagggatcttgcccagagctaccattatccggctattgatgtactggccagcatttcccgtcttgccgccaaggtctcgggaagcgaaaccaaaaaagccgttgggatagtccgtcgccttatggccacttatgctggtgccgaagacctgatcaatgtgggagcctataagctgggtacaaacccaatgattgacgaagcgattgccaaacgggaagctttggaagaattcctgattcaggcggtggaagaaaaatcgccgatagacgaaaccttgaaagcattgggggaaatcgccggagtggaaattcccgcctctgaaatggaaacatacgtttcaaaaatgatcttccggactgaggaagatgatgattactttgaaggtactgtttttgaaccggcgttatccgatattgaaattccggttgaaattcaatga

SEQ ID NO: 39370 - protein, 484 aa, Unknown
  Obtained from environmental sample
  DOMAIN (27)...(92): ATP synthase alpha/beta family, beta-barrel domain
  misc_feature (1)..(484): Xaa is any amino acid
METETSIFEKYFETAERVDTIKCVGRICKVQGLLVESRGPQAIIGEICKIQVPKGKGTVFAEVVGLRNEIVQLMVFEETDGLEVGNLVIAQGGRLEVPVSTKLLGRVLNALGKPIDDKGDIDSPVMYPALASPPDPLKRRRITERIVTGVRAIDGLLAVGKGQRLGIFAGSGVGKSTLLGMIARNTSADVNVVALIGERGREVNDFIENDLGPEGLARSVVVVTPSNSPPLARLRGAYVATAIAEFFRDQGRDVMLLFDSVTRFARAQRXIGLASGEPPATRGYTPSMFDSMPKLLERSGTSEKGSITGFYTILVDGDDLDEPVSDTVRGILDGHIVLSRDLAQSYHYPAIDVLASISRLAAKVSGSETKKAVGIVRRLMATYAGAEDLINVGAYKLGTNPMIDEAIAKREALEEFLIQAVEEKSPIDETLKALGEIAGVEIPASEMETYVSKMIFRTEEDDDYFEGTVFEPALSDIEIPVEIQ

SEQ ID NO: 39371 - DNA, 408 bp, Unknown
  Obtained from environmental sample
  misc_feature (1)..(408): n is a, c, g, or t
gtgttacgcgcaatcatacccagcagggtcgattttcccacgcctgaaccggcgaatatgccaagccgctggcctttgcctacggccaaaaggccgtcgatggcccgcacgcccgtaactatgcgctctgtgatccgcctgcgtttgagggggtcgggagggctcgcgagcgcgggatacattacaggggaatcaatatcgcctttgtcatcaataggttttcccagggcgttcagaacgcgccccaaaagtttcgtcgacacggggacttcaaggcggccgccctgggcgattacgaggttgcccacttccagcccgtcggtttcctcgaaaaccatcaattgtacgatttcgtttcttagaccgacaacctcggcgaaaaccgttcctttgcctttggggacttga

SEQ ID NO: 39372 - protein, 135 aa, Unknown
  Obtained from environmental sample
  misc_feature (1)..(135): Xaa is any amino acid
MLRAIIPSRVDFPTPEPANMPSRWPLPTAKRPSMARTPVTMRSVIRLRLRGSGGLASAGYITGESISPLSSIGFPRAFRTRPKSFVDTGTSRRPPWAITRLPTSSPSVSSKTINCTISFLRPTTSAKTVPLPLGT

SEQ ID NO: 39373 - DNA, 1398 bp, Unknown
  Obtained from environmental sample
  misc_feature (1)..(1398): n is a, c, g, or t
atgggcgtgccgtttatcgtagcaaacgacgctcactatctaaacgcggacgacgcgctgagccacgagatgctgctttgcatacagactcagaccacgatggacgatcccaagcgcatgaggttcggcaacggccaaatatacttcaagtcgcccgaagagatggcgaagctctttcccgaagtgcccgaagcgatgacgaatacgcttgaaatagcggagcgttgcgatgtggatatagaagttgacccgcaattgcccactgtggaggttcccgatgggtttaaagagccggcggactacctctcgcatttggcgaggaacggccttcgggagcggtacgctgaggtgacgccggagcttgagaataggcttgaatacgagttgggcgtcataaacaaaatgaaatttgccggctattttctcatagtccaagatttcgtgcgcaaagccaaggagacgggcgtgatggtcgggtgccgcggatcggcggcggggagcttggtcgtctacgccatcggcataacggacgtcgatcctataaagtttgacctcatattcgagcgcttcctgaatccggagcgcatatcaatgcccgacgccgacatagacatcgccgaccgcgacaggtataagttgattgactacgtggttgagaagtacaagcgggaagcagtttgccaaatcataaattttagtaccatgaaagccaaaatggttgttaaggatgtggcgcgggtaaatgggttttccgtgggtgagatgaacaaactttcggcgctgataacggaaaactctctcgcggagtcattcgggcttgttgacaaagagggaaaaccgaggaaagacataccgcccattcagatgataatcgacaaaaatgatttggagaggtatcaaacccgcccaacctcgcttacgagcgttgtcatgggcgacagcgcctacaagaacgtcttccgccacgccgcggtccttgagggtctcgcccgccagccgggtatgcacgccggcggcgttattattgccccgggcgaggttgtaaactgggcgccgctcttcaaacagtcaaactccgaccaaataatgacgcaattcgacatgaaatacgtcgaaaagatcgggcttgtcaagatggactttttaggcctgcgtaccctcaccgtccttcaagacgcgcagcggctcgtcaaaaaataccacggcatagagattgacttatggaaattgcctgacggcgacaaaaaggcgctggggcttttcggcagcggcgagaccaccggcatattccagtttgaatcgaacgggatgagagactacctgcgcaaactaaaaccgagtggcatagaagacctgatagctatggtcgccctatataggcccggggcctatggataa

SEQ ID NO: 39374 - protein, 465 aa, Unknown
  Obtained from environmental sample
  DOMAIN (47)...(465): Bacterial DNA polymerase III alpha subunit
  misc_feature (1)..(465): Xaa is any amino acid
MGVPFIVANDAHYLNADDALSHEMLLCIQTQTTMDDPKRMRFGNGQIYFKSPEEMAKLFPEVPEAMTNTLEIAERCDVDIEVDPQLPTVEVPDGFKEPADYLSHLARNGLRERYAEVTPELENRLEYELGVINKMKFAGYFLIVQDFVRKAKETGVMVGCRGSAAGSLVVYAIGITDVDPIKFDLIFERFLNPERISMPDADIDIADRDRYKLIDYVVEKYKREAVCQIINFSTMKAKMVVKDVARVNGFSVGEMNKLSALITENSLAESFGLVDKEGKPRKDIPPIQMIIDKNDLERYQTRPTSLTSVVMGDSAYKNVFRHAAVLEGLARQPGMHAGGVIIAPGEVVNWAPLFKQSNSDQIMTQFDMKYVEKIGLVKMDFLGLRTLTVLQDAQRLVKKYHGIEIDLWKLPDGDKKALGLFGSGETTGIFQFESNGMRDYLRKLKPSGIEDLIAMVALYRPGAYG

SEQ ID NO: 39375 - DNA, 501 bp, Unknown
  Obtained from environmental sample
  misc_feature (1)..(501): n is a, c, g, or t
ttggcaaaagtaatattaatatgtggtaaaatatgttctggaaaaacaacatatgcaaaaaatttaatgaaaaaaaataaggccgtattattatctgttgatgaaattacattagcactttttggtcaacatcttggtgataaacacgatgaaattgctgaaaaaacagaaaaatatttgtataaaaaatctgtagaaataatatctttaggtattaatgtgattcttgattggggtttttggaaaaagagtcaaagaaaatatgccacagaatattttgataatttagggatagaaattgaatggcattatattgaagttgataataaaatttgggaagaatatgtacaaaaaaggaataatgatattgaaaatagtaaagaaaataattattatatagatgaaaatatcgcaaagaaattttggaatatatttgaagagccacaaaaggatgagattaatatatggtatacaaataatgagaaaaatcaattaacttaa

SEQ ID NO: 39376 - protein, 166 aa, Unknown
  Obtained from environmental sample
  misc_feature (1)..(166): Xaa is any amino acid
MAKVILICGKICSGKTTYAKNLMKKNKAVLLSVDEITLALFGQHLGDKHDEIAEKTEKYLYKKSVEIISLGINVILDWGFWKKSQRKYATEYFDNLGIEIEWHYIEVDNKIWEEYVQKRNNDIENSKENNYYIDENIAKKFWNIFEEPQKDEINIWYTNNEKNQLT

SEQ ID NO: 39377 - DNA, 798 bp, Unknown
  Obtained from environmental sample
  misc_feature (1)..(798): n is a, c, g, or t
atgaaaggtttaggctccgcggaacaggctcaatatatggacgcaattttcggaaaacaacaatatgcgaaagcaagcgcccttataatgtccggctcggacgcattacgcgaatattccgcgcagttaaaagacgccggaggcgctaccgagcaaatggcgggcgttatgcgcggctcattgcaaaacaggattgaaatattaaagtcaagccttactgaattaggctttaagatagttgacgcctttgcggaaaagggcggcgcggcgatagaaaaaataacaaacgcgattaacaattttgacataacgccgataataggagccgcgcaagccgcggcaaacgccatagccggatttgcgagcgttttgttaggcgctgtaaaactagcgtggaaattccgcgctataataattgcaatagccgcgccgttacttgcatatcaggcggcgctcatcgcaataacaatagcatacagcgcatatcacaaaatacaaacagccgtaaaactcgcgacgtttttatttacgcttgtaacaaaagggcagaccgtagcccttgccggattaaccgccggaaccgtagcgcatggaatagcgacaaaggcaatggctgtagcaaacggaatagcgaccgcggctcaatgggcgcttaatgtggcaatggcggcaaacccgatagggcttatagttattgccattgccgcggcaatagccgcggttatcgcgcttaccgtaataatcgtaaagaactgggataaaataaaaagaattctaataaggttatggcagttataa

SEQ ID NO: 39378 - protein, 265 aa, Unknown
  Obtained from environmental sample
  misc_feature (1)..(265): Xaa is any amino acid
MKGLGSAEQAQYMDAIFGKQQYAKASALIMSGSDALREYSAQLKDAGGATEQMAGVMRGSLQNRIEILKSSLTELGFKIVDAFAEKGGAAIEKITNAINNFDITPIIGAAQAAANAIAGFASVLLGAVKLAWKFRAIIIAIAAPLLAYQAALIAITIAYSAYHKIQTAVKLATFLFTLVTKGQTVALAGLTAGTVAHGIATKAMAVANGIATAAQWALNVAMAANPIGLIVIAIAAAIAAVIALTVIIVKNWDKIKRILIRLWQL

SEQ ID NO: 39379 - DNA, 693 bp, Unknown
  Obtained from environmental sample
  misc_feature (1)..(693): n is a, c, g, or t
ttgaaggacgcggccatcatgctggaaggcgagggagcatggtcgctgactttgatttttttacagatgtggaacatccagccgggcaataatgaaagttatgagtcattctacccgtggaagcaaagcccctgcgatataaagtctgacgggtttgtgcagccatacgccgacagccccattgacaaggaaaatgtcggcgaacacgtatatatccagatcatcaacaaggcgaaaaaatatgtgtatatcaacactccctatctggtgttggacgacggccttctttccgcccttacgcttgccgcgaaaagcggcgtggatgtgaggatcatcacccctcaccgctgggacaaatggtttgtggcgatagtctcgcgttcatatttccatcagttaatttccgccggtgtaaaggtctatgaatacagttccggttttaaccacggcaagacctttgtctgcgacgacgccattgccacggttggcaccacaaaccttgacttccgcagcttgtatctgcacttcgagaccggcgttcttatttatcgcggcgaaagtgttcagtcggtaaaggaagactttctgcgtacccttccctcctcgcaggagataacactgcgggaatgtacccacaacgctttctatctgatagtagcggacgtgctgaggattttcgcgccgctgatgtag

SEQ ID NO: 39380 - protein, 230 aa, Unknown
  Obtained from environmental sample
  DOMAIN (144)...(171): Phospholipase D Active site motif
  misc_feature (1)..(230): Xaa is any amino acid
MKDAAIMLEGEGAWSLTLIFLQMWNIQPGNNESYESFYPWKQSPCDIKSDGFVQPYADSPIDKENVGEHVYIQIINKAKKYVYINTPYLVLDDGLLSALTLAAKSGVDVRIITPHRWDKWFVAIVSRSYFHQLISAGVKVYEYSSGFNHGKTFVCDDAIATVGTTNLDFRSLYLHFETGVLIYRGESVQSVKEDFLRTLPSSQEITLRECTHNAFYLIVADVLRIFAPLM

SEQ ID NO: 39381 - DNA, 1035 bp, Unknown
  Obtained from environmental sample
  misc_feature (1)..(1035): n is a, c, g, or t
ttgaatgcgaccgtctttcgatacagcgtaattgtgacgggaacggcggcgaacggatcgttgtggataagcggcgggggcaggaagaccctctacctgaacggcgcgaacattaataacccgagcgggccggccatcaacattcagagcggcaaacgggtggacgttcatctcgtgggcagttgcgataagcgcaacatcctgaaaggggcgggccgcgaaaccgtcggcgatggggaggacaaagagcagttcaaaggcgcgttcttctccgaagggtcgctcgtcttcggaggcaccgggtcgcttgaggtgcgttccacggagaggcacgccatagtctccgacgggttcgttgagatggagagcgggagcatcatcatctacgaatcgaaaaacgacggtatacacgctaacgagcgtattgctataaagggcgggaagctgcaaatcaaatgcgagggcgacgccattcagaacgagagaaagaccgccggaaaagaggcggttccgtgtcctataaccctctccggcggcgatattaagattcgtaccaccggcacgaaggggcacggcatattgagcgacagcaacgacgtagttatcaccggcgacgcgacgaaaatcgacataaccctcataggcaacggttccaaggggatcaggtcgcgcggcaacgtgacgatagacggcgggacgatagacctttgggcgcacgggtcgcgtgagtcgctcacggaagacacaagctccgcggcgggaatcaagacggacggcgacgtcgtgattaaaagaggcgtgctgaccatcaagagcaacaaggccaatgaaaacggcaaggggctgaatatagacggcgacctcaaggtaagcggcggcaccaccaagatcgcctcagacggcgacggtgtaaaggtgagggggtcgatcaacatgagcgacggcacccctggagaccaaaatcggccaaacaagcaggacattagaccgccggccgggaaagatccaaacccgtaccgggcggggaacttttga

SEQ ID NO: 39382 - protein, 344 aa, Unknown
  Obtained from environmental sample
  misc_feature (1)..(344): Xaa is any amino acid
MNATVFRYSVIVTGTAANGSLWISGGGRKTLYLNGANINNPSGPAINIQSGKRVDVHLVGSCDKRNILKGAGRETVGDGEDKEQFKGAFFSEGSLVFGGTGSLEVRSTERHAIVSDGFVEMESGSIIIYESKNDGIHANERIAIKGGKLQIKCEGDAIQNERKTAGKEAVPCPITLSGGDIKIRTTGTKGHGILSDSNDVVITGDATKIDITLIGNGSKGIRSRGNVTIDGGTIDLWAHGSRESLTEDTSSAAGIKTDGDVVIKRGVLTIKSNKANENGKGLNIDGDLKVSGGTTKIASDGDGVKVRGSINMSDGTPGDQNRPNKQDIRPPAGKDPNPYRAGNF

SEQ ID NO: 39383 - DNA, 570 bp, Unknown
  Obtained from environmental sample
  misc_feature (1)..(570): n is a, c, g, or t
gtggagccgactataagcggcctccacatggacggcaaactatggtattcatcgcttgtttcgtgccaggcggccctgggagcctggataacaaaacagcctgtccgcctgatactgaccagggatgaagatttttctttctcgccaaaacgattcggaacagaaattagtttgtcatgcgcattcagtgaaaaaggggagatctccggcctggatataaaagccgtcgttaacgtcggcgctcacgcggttaacacagatgaaattcttgagtttgttaaccttggaagcgcaggggtttataaaattaaaaacatcaggttctcaggctcagcaataaaaaccaacatacctccgcaggggccatttgcgggcctggggcttgcgcagggccttttcgcgcttgaaagccatatttcatatattgcggacagcatcgggcaggatcctgcccaatggcggaagcagaattttcacgccctggggcaaagcggtacatcaaataaaggaacagcggcaaaaggggcggcgaataaaggatacatcattaggaaaccagctaatagataa

SEQ ID NO: 39384 - protein, 189 aa, Unknown
  Obtained from environmental sample
  misc_feature (1)..(189): Xaa is any amino acid
MEPTISGLHMDGKLWYSSLVSCQAALGAWITKQPVRLILTRDEDFSFSPKRFGTEISLSCAFSEKGEISGLDIKAVVNVGAHAVNTDEILEFVNLGSAGVYKIKNIRFSGSAIKTNIPPQGPFAGLGLAQGLFALESHISYIADSIGQDPAQWRKQNFHALGQSGTSNKGTAAKGAANKGYIIRKPANR

SEQ ID NO: 39385 - DNA, 1119 bp, Unknown
  Obtained from environmental sample
  misc_feature (1)..(1119): n is a, c, g, or t
ttgcataatagtagtcactttatggaaaagaaaactcctctctataactggcacgaatcaaacggcggaaagattgtcccttttgggggctaccttcttcccgttcagtttgaaacaggagtcattaccgaacactgcactgtgcgggaaaaggcgggtctctttgacgtttcacacatgggtgaatttatcatttccggagccggagcccttaacgccattcagagacttttaaccaacgactttaccaacatgaccataggcagggtccgttataccaccatgtgtaacgaaaacggaggcatccttgatgaccttgtggtctacaaaatggacgaacagcgctatatgcttgtggttaacgcctcgaaccgtgaaaaagacgccgcgtggattcggaaaaacctcaataacgggggaaataacgcctcatttgaagacctctccgattcttatggccagatagcccttcaggggccggcttccgtagccatattggcttctctttccgaaaccattccacagaagtattacacttttatcgaaaagggaaaagcagccggcattgactgcatagtttcccggacaggatacaccggcgaaaccggtttcgagctgtattgtaaaagcgaagataccgaaagcctctggaaagcgattatggaagctggcaaggcgcaaggccttattccctgcgggcttggcgccagggacaccctgcgccttgaggcggcaatgccgctttacggccacgaaatggatgaaaacgtcaatccttttgaggcgggcctttcttttgccgtaaaaatggacaaggcagattttataggaaaagccgccctggagcccttatcgctcaaggaaaacctgaaaaggctccgcacaggccttagagttacaggcaagggcataataagggaacaatgccctatttatttccaggacagcagtatcggcataacaacttccggaacctttggccctcatcttaagcaggcaatagccatggcaatgcttaaaacggaatatactcttcccggaacaaaagtcgaggcggatgtcaggggaaggatgatagaggcggaaacctgcgcccttccgttctataaaaaacagtga

SEQ ID NO: 39386 - protein, 372 aa, Unknown
  Obtained from environmental sample
  DOMAIN (54)...(371): Glycine cleavage T-protein (aminomethyl transferase)
  misc_feature (1)..(372): Xaa is any amino acid
MHNSSHFMEKKTPLYNWHESNGGKIVPFGGYLLPVQFETGVITEHCTVREKAGLFDVSHMGEFIISGAGALNAIQRLLTNDFTNMTIGRVRYTTMCNENGGILDDLVVYKMDEQRYMLVVNASNREKDAAWIRKNLNNGGNNASFEDLSDSYGQIALQGPASVAILASLSETIPQKYYTFIEKGKAAGIDCIVSRTGYTGETGFELYCKSEDTESLWKAIMEAGKAQGLIPCGLGARDTLRLEAAMPLYGHEMDENVNPFEAGLSFAVKMDKADFIGKAALEPLSLKENLKRLRTGLRVTGKGIIREQCPIYFQDSSIGITTSGTFGPHLKQAIAMAMLKTEYTLPGTKVEADVRGRMIEAETCALPFYKKQ

SEQ ID NO: 39387 - DNA, 747 bp, Unknown
  Obtained from environmental sample
  misc_feature (1)..(747): n is a, c, g, or t
gtggaagggaaagttctgggcggagaacttgccgaagaactggtgaccggtcttgaggacaggggcgtgctttcccgctgtgaggcggtgctttccggctatttgggagatgccgccgtagcgcgggcgatcagcggcgcggtacaaaaagtgcgttccgccgcgcccaaagccctgtattgctgtgatccggtcatgggcgacgtgggcaggggtttttacgttaaaccggacattcccgatatgtttaaaaatgaactggttccccttgcggacattattactcccaatcaatttgagcttgaagccttgaccggacttcagaccgataccatcgacaatgcgcgccgcgccgtggatatgatccacgcaaaggggccgcgcattgtgctggttaccagtttccgaggcggcgcaaacagcggcgcacagagcaagcagatagagatgcttgcgtcggacaaaaacgggatgtatgtgataagcacgccggagctgcctatagccgccggcatggcgggttccggcgatataaccgcttcagtgtttttgtcgcgctatctggaaaccggcgacattaaaaaaacgctggaactttgcaccgcgtcgattttcggcattattgaggcaagctggcaagcacatagcgtcggcgaagccaaaccgggacctatggaattgcgcataattcaggcgcaaaaagaacttgattctccgtcgcatttttttgaagcgcgtaagttgtaa

SEQ ID NO: 39388 - protein, 248 aa, Unknown
  Obtained from environmental sample
  DOMAIN (9)...(209): Phosphomethylpyrimidine kinase
  misc_feature (1)..(248): Xaa is any amino acid
MEGKVLGGELAEELVTGLEDRGVLSRCEAVLSGYLGDAAVARAISGAVQKVRSAAPKALYCCDPVMGDVGRGFYVKPDIPDMFKNELVPLADIITPNQFELEALTGLQTDTIDNARRAVDMIHAKGPRIVLVTSFRGGANSGAQSKQIEMLASDKNGMYVISTPELPIAAGMAGSGDITASVFLSRYLETGDIKKTLELCTASIFGIIEASWQAHSVGEAKPGPMELRIIQAQKELDSPSHFFEARKL

SEQ ID NO: 39389 - DNA, 603 bp, Unknown
  Obtained from environmental sample
  misc_feature (1)..(603): n is a, c, g, or t
atggacaagagttggcagggcttttcgtcaaccggatattcccgatattttcaaaacgagctgattcccctggccgacatcatcacgccaaaccagtttgagcttgaggccctgaccggcattgaaactcaggatattgataatgcccgccgcgcaatcgacatgatccatgaaaaggggccgggcattgtgctggtgacaagctaccatgacgaaaaaacgggcggggcgggcgatgaaaaaagaataagtatgctggcgtcggacaaaagcggggtctattcgataagcacgccggaactacccattggcgccggcatggcgggatcgggcgatattaccgcgtcggtgttcctgtcccgctaccttgaaaccggcgatgtaaaaaaaacccttgaattatgtaccgcgtctatatatggaatcatcgaagcaagctggcaagcccaaaatggcaaggttttctctcaatcgggagataacttttctctcgattcagaaaaaactgataaaaccggatcgggactgatggaattaaggatagtacaggctcaaaaagagcttgattcgcctactcattcttttgaggcgcgcaggctttga

SEQ ID NO: 39390 - protein, 200 aa, Unknown
  Obtained from environmental sample
  misc_feature (1)..(200): Xaa is any amino acid
MDKSWQGFSSTGYSRYFQNELIPLADIITPNQFELEALTGIETQDIDNARRAIDMIHEKGPGIVLVTSYHDEKTGGAGDEKRISMLASDKSGVYSISTPELPIGAGMAGSGDITASVFLSRYLETGDVKKTLELCTASIYGIIEASWQAQNGKVFSQSGDNFSLDSEKTDKTGSGLMELRIVQAQKELDSPTHSFEARRL

SEQ ID NO: 39391 - DNA, 768 bp, Unknown
  Obtained from environmental sample
  misc_feature (1)..(768): n is a, c, g, or t
ttgtcgctggcccttgagacgtggggcggcgtgatgaccaagctcatagagcgcaacacgaccattcccacgaagaagagcaacgtcttctccacggcgtccgacaatcaagacgccgtaacgatcatggtctatcaaggcgagcgtgaaatggccgcccacaaccggctcttgggcaagttcgaccttgtgggcatcccccacgcccctcgcggcatcccccagatagaggtctcgtttgacatagacgccaacggcatcctgaacgtgagcgccaaagacctgggcaccggcaaacagcagcagataaggatagagtcctccagcggcctatccgacaccgatatccagcgcatggtcaaggaagcggaggccaacgccgccgccgacaaagaggaaaaagagcacatagaggtaaagaacaacgccgaccaagcgatataccacacggaaaagacgctgtccgagataggcgacaaagtctcccccgacgataaggccgccgttcaaaaagccctggacgaccttaaagagaaagtcaaagggacagactacggcgctataaagagcggcttggaagccctaatgaaagcgagccacgcaatggccgaagcaatgtacaaacaagccaaccccgaagccgccggcccgcaacccggccccgcccccggcccgtccccgtcagaggaaccgcccaagaaagatagcagcggcggtgatgataaaaaatccggccccgtggatgcggactttgaagtcgtggattaa

SEQ ID NO: 39392 - protein, 255 aa, Unknown
  Obtained from environmental sample
  DOMAIN (1)...(208): Hsp70 protein
  misc_feature (1)..(255): Xaa is any amino acid
MSLALETWGGVMTKLIERNTTIPTKKSNVFSTASDNQDAVTIMVYQGEREMAAHNRLLGKFDLVGIPHAPRGIPQIEVSFDIDANGILNVSAKDLGTGKQQQIRIESSSGLSDTDIQRMVKEAEANAAADKEEKEHIEVKNNADQAIYHTEKTLSEIGDKVSPDDKAAVQKALDDLKEKVKGTDYGAIKSGLEALMKASHAMAEAMYKQANPEAAGPQPGPAPGPSPSEEPPKKDSSGGDDKKSGPVDADFEVVD

SEQ ID NO: 39393 - DNA, 345 bp, Unknown
  Obtained from environmental sample
  misc_feature (1)..(345): n is a, c, g, or t
ttgtcgcctatctcggacagcgtcttttccgtgtggtatatcgcttggtcggcgttgttctttacctctatgtgctctttttcctctttgtcggcggcggcgttggcctccgcttccttgaccatgcgctggatatcggtgtcggataggccgctggaggactctatccttatctgctgctgtttgccggtgcccaggtctttggcgctcacgttcaggatgccgttggcgtctatgtcaaacgagacctctatctgggggatgccgcgaggggcgtgggggatgcccacaaggtcgaacttgcccaagagccggttgtgggcggccatttcacgctcgccttga

SEQ ID NO: 39394 - protein, 114 aa, Unknown
  Obtained from environmental sample
  misc_feature (1)..(114): Xaa is any amino acid
MSPISDSVFSVWYIAWSALFFTSMCSFSSLSAAALASASLTMRWISVSDRPLEDSILICCCLPVPRSLALTFRMPLASMSNETSIWGMPRGAWGMPTRSNLPKSRLWAAISRSP

SEQ ID NO: 39395 - DNA, 513 bp, Unknown
  Obtained from environmental sample
  misc_feature (1)..(513): n is a, c, g, or t
gtgggggatgcccacaaggtcgaacttgcccaagagccggttgtgggcggccatttcacgctcgccttgatagaccatgatcgttacggcgtcttgattgtcggacgccgtggagaagacgttgctcttcttcgtgggaatggtcgtgttgcgctctatgagcttggtcatcacgccgccccacgtctcaagggccagcgacaacggggtgacgtcctagagcagcacgtctttgacgctctggtctccgccgagtatggcgccttggatggcggcgcctatggctaccacctcgtcggggttgacgcctttgttggggaccttgccgaagatcgcctccactttggcctgaacggcgggcatcctcgtggcgccgccgaccaatatcacctcgtcgatctcggaggcgctgagcttcgcgtcggccagcgctttcttgcagggctctaccgtccgctctataagtttcgacgccagctgctcaagcttggcgcgggtgatggtcaggtctaa

SEQ ID NO: 39396 - protein, 170 aa, Unknown
  Obtained from environmental sample
  misc_feature (1)..(170): Xaa is any amino acid
MGDAHKVELAQEPVVGGHFTLALIDHDRYGVLIVGRRGEDVALLRGNGRVALYELGHHAAPRLKGQRQRGDVLEQHVFDALVSAEYGALDGGAYGYHLVGVDAFVGDLAEDRLHFGLNGGHPRGAADQYHLVDLGGAELRVGQRFLAGLYRPLYKFRRQLLKLGAGDGQV

SEQ ID NO: 39397 - DNA, 924 bp, Unknown
  Obtained from environmental sample
  misc_feature (1)..(924): n is a, c, g, or t
gtgcagtccgaggagaagcgcgtgccttacagcgtggtcggcgcgccgagggatccggtaaaggtcaagatactcgaccacgactactcgcctcccgagatatcggcgatggtgctgcagtacctgaagaaggctgccgaggattacttgggcgagtcggtcaccgaggcggtgatcaccgttccggcttacttcaacgacgcgcagcgtcaggcgaccaaggatgccggcaggatcgcggggttggacgtcaagcgcatcatcaacgagcccacggcggcgtcgctcgcctacgggcttgacaagaagaagaacgagaagatcgccgtattcgaccttggtggcggtactttcgatatatccatactcgagatcggcgacagcgttttcgaggtcaagtccacaaacggcgacacccatctcggcggcgacgatttcgacgaggtgctcattgaccacatagccgatgagttcaaagtgacgaacgccatcgatttgcgtaacgaccgtatggctttgcagaggttgaaagaggcggcggagaaggccaaggtggagctttcgtccgcgatgcaggcgaacgtcaatctgccgttcatcaccgccgattcgagcggtcccaagcacttagacctgaccatcacccgcgccaagcttgagcagctggcgtcgaaacttatagagcggacggtagagccctgcaagaaagcgctggccgacgcgaagctcagcgcctccgagatcgacgaggtgatattggtcggcggcgccacgaggatgcccgccgttcaggccaaagtggaggcgatcttcggcaaggtccccaacaaaggcgtcaaccccgacgaggtggtagccataggcgccgccatccaaggcgccatactcggcggagaccagagcgtcaaagacgtgctgctctag

SEQ ID NO: 39398 - protein, 307 aa, Unknown
  Obtained from environmental sample
  DOMAIN (1)...(301): MreB/Mbl protein
  misc_feature (1)..(307): Xaa is any amino acid
MQSEEKRVPYSVVGAPRDPVKVKILDHDYSPPEISAMVLQYLKKAAEDYLGESVTEAVITVPAYFNDAQRQATKDAGRIAGLDVKRIINEPTAASLAYGLDKKKNEKIAVFDLGGGTFDISILEIGDSVFEVKSTNGDTHLGGDDFDEVLIDHIADEFKVTNAIDLRNDRMALQRLKEAAEKAKVELSSAMQANVNLPFITADSSGPKHLDLTITRAKLEQLASKLIERTVEPCKKALADAKLSASEIDEVILVGGATRMPAVQAKVEAIFGKVPNKGVNPDEVVAIGAAIQGAILGGDQSVKDVLL

SEQ ID NO: 39399 - DNA, 483 bp, Unknown
  Obtained from environmental sample
  misc_feature (1)..(483): n is a, c, g, or t
gtggcgccgccgaccaatatcacctcgtcgatctcggaggcgctgagcttcgcgtcggccagcgctttcttgcagggctctaccgtccgctctataagtttcgacgccagctgctcaagcttggcgcgggtgatggtcaggtctaagtgcttgggaccgctcgaatcggcggtgatgaacggcagattgacgttcgcctgcatcgcggacgaaagctccaccttggccttctccgccgcctctttcaacctctgcaaagccatacggtcgttacgcaaatcgatggcgttcgtcactttgaactcatcggctatgtggtcaatgagcacctcgtcgaaatcgtcgccgccgagatgggtgtcgccgtttgtggacttgacctcgaaaacgctgtcgccgatctcgagtatggatatatcgaaagtaccgccaccaaggtcgaatacggcgatcttctcgttcttcttcttgtcaagcccgtag

SEQ ID NO: 39400 - protein, 160 aa, Unknown
  Obtained from environmental sample
  SIGNAL (1)...(24)
  misc_feature (1)..(160): Xaa is any amino acid
MAPPTNITSSISEALSFASASAFLQGSTVRSISFDASCSSLARVMVRSKCLGPLESAVMNGRLTFACIADESSTLAFSAASFNLCKAIRSLRKSMAFVTLNSSAMWSMSTSSKSSPPRWVSPFVDLTSKTLSPISSMDISKVPPPRSNTAIFSFFFLSSP

SEQ ID NO: 39401 - DNA, 780 bp, Unknown
  Obtained from environmental sample
  misc_feature (1)..(780): n is a, c, g, or t
ttgcccgtgagtgtgccggcgataaaagcattgcatcttgccgcgcaacgggatatgaaaaacggctcttactacggcaagctgaaagatttttgttcctttggaggcaccatgttttttgaatcccttgcttttgccatcggcgctccccagggaggcgccggcggcccgaccgagatgttcgcgcagttcgttcccctgatactgatgatcgccgtgttctggtttttgctgatacggccgcagaagaaacgccagcaggaacacaagaccatgctggacaacctgcgtcgcggcgatacggttgtgaccacgggcggcttcatcggtcggatcgtggagattgacggcgacgtgttgaccttggacctgggggaaaccaaggcgcgcctggggcgcggcttcgtcagcggcctgttgacgcaaaggctttgcagacgtcgaaggaaaaggacaggaagggtaaagccgaatccagggaagacaaggcgcagaagaacgcggacagggcggaagccggcggcgaagcgtccgaggcacgtaaagaggaaaaagagtgaattccatgccttggcgcatatgcgtcgcgcttgcggtgttcgcgctttccctggtctatgccctgccgagtgtgcccggcatcggcgagtcgcttctcggacgcgtcctgcccgacaaaaagatcaatctcgggctggatttgaagggcggcattcaaaacacgctcggcgtggaggtgagcaaggccatcgcgaacagtctggcccagaccggccatga

SEQ ID NO: 39402 - protein, 259 aa, Unknown
  Obtained from environmental sample
  DOMAIN (59)...(140): Preprotein translocase subunit
  misc_feature (1)..(259): Xaa is any amino acid
MPVSVPAIKALHLAAQRDMKNGSYYGKLKDFCSFGGTMFFESLAFAIGAPQGGAGGPTEMFAQFVPLILMIAVFWFLLIRPQKKRQQEHKTMLDNLRRGDTVVTTGGFIGRIVEIDGDVLTLDLGETKARLGRGFVSGLLTQRLCRRRRKRTGRVKPNPGKTRRRRTRTGRKPAAKRPRHVKRKKSEFHALAHMRRACGVRAFPGLCPAECARHRRVASRTRPARQKDQSRAGFEGRHSKHARRGGEQGHREQSGPDRP

SEQ ID NO: 39403 - DNA, 981 bp, Unknown
  Obtained from environmental sample
  misc_feature (1)..(981): n is a, c, g, or t
atggaaacgggcagcctttttttatcgctcaattttgaaggtgaaattcccagccggatcaccttggtaccgccggacagaacaatcaaaggccgcgacgggcgcgaatggaaaaacccgaaccccaagcaggttgcgcttaattccatcgcccgcctttccttgctgcctatcgatgaaaaccactcgacggatctggccgcccccaaaggcggctcttctccggctttcggctggatgaaaaacctctgcgccgatgcgtcaggcgctatatgcgccgatgtcgagtggaccgagcgcgggagagaggctcttgccaaaaaagaataccggttcatatccccggtgtttctgttcaacgaaaaaagcgaaatcaactgcatcctccgcgccgcgcttacaaattcgcctaacttggatcttcctgccctgaattcagagcaagtgaaaaacaatattttggaggtctctatgaatagagaattactcgcggccttgggcctgcccgaaaccgcgaccgaagccgaggcgcttgccgcagcaaaatcgctgaacgcgtcaaaagcatccgcatcggcgcagacggacacgtcaagggtcgacctgacggcctacgcgcctcgcgccgatctgaacgctatggaagaacgcgcggttgccgcggaaaaacagcttgccgatctgaacgcggcgcagcttaaaaaggacgcggaagcggcggttgacgaggcggttaaaaaccgcaaaatcgcgcccgcgagcagggagcagtatcttgcactgtgcgcgacaagggcggagcttgaaaaaatcaaaaatattttatcaaccagtcccgcgataattgcggaaccgcaggcttcggcggccgtggctccccagtcgggaagcgtatcgcttaacgccgatcaaacacagcttgccaaatctttgggctatacgcctgaagaattcgcaaaaatcatggaggaatcaaaatga

SEQ ID NO: 39404 - protein, 326 aa, Unknown
  Obtained from environmental sample
  misc_feature (1)..(326): Xaa is any amino acid
METGSLFLSLNFEGEIPSRITLVPPDRTIKGRDGREWKNPNPKQVALNSIARLSLLPIDENHSTDLAAPKGGSSPAFGWMKNLCADASGAICADVEWTERGREALAKKEYRFISPVFLFNEKSEINCILRAALTNSPNLDLPALNSEQVKNNILEVSMNRELLAALGLPETATEAEALAAAKSLNASKASASAQTDTSRVDLTAYAPRADLNAMEERAVAAEKQLADLNAAQLKKDAEAAVDEAVKNRKIAPASREQYLALCATRAELEKIKNILSTSPAIIAEPQASAAVAPQSGSVSLNADQTQLAKSLGYTPEEFAKIMEESK

SEQ ID NO: 39405 - DNA, 1482 bp, Unknown
  Obtained from environmental sample
  misc_feature (1)..(1482): n is a, c, g, or t
ttgtttttttggcatgattgcgagcgccggcgactagcctttgactggcagcatgagttccaggagatcatggcaaatggcggctttgacgtggtagtaggcaacccgccgtacgtgtttgcaagggaaaaaatatctgccattgataaagactattattcaaagcattacaagtcggcgcagtaccaagtcaacacatatttgctatttatagaaaaatcattccaattgatgaaagaggccactggcaggtgcagcttgatagtgccaaacgcttggctgatggtcagctcggccgccaatctgagaaaattcttgctggacaacgcggccattcacagcataacaaatttgttgggtgagtcctttgaaaacgtctctgtagaaacaattattttggacgcacaaaaaagtaaggcatcaagcaatcaccaaatccaagtgctattcaacgatgatggcaataattttattttatctcattctaagatgcaacatgagttttccgcagattcggggaatggatttaagctatttgtaaaaaatgacgatgaatctgttttagcgaaaatcagcgatggttcagttccacttggagatatatatgaagtaagatctggcttaaaggcatatgaagccggtaaggggaaacccatgcaaacttctgatgatgtaaataaaaggatttatgatttcacaagcaaaattggcaataatatgcataaatatttagatggcaaagacattggaaggtactggcatcgatggggtggcatattcctgaaatatggtgagaatttggctgcgccgagatctctgaaaattttttctagccctgtaattattatcagagaaataattggaaagtaccctagaagcattttaggttcatactcagacggccatgaaattttattatttaatatgagcaatattgccatacttagcaaagatgcaaactatgacctcaaatatttattgggaattttgaacagcagtttgatgtcctattattttatgcactccacacccaaagccaatcgaaagctatttccaaaaataatactgctggatttgaaaaaatttccaattaaaattgctgataaagacacgcaagtgccgatcattctggccgttgataacatgcttgacttggtggggcgatttatgcagcactccgattctttcctagacttggcaaagacagacttgggtatcgccaaattaggccaagccatgaacgcttggcatacgcttgacaaagatacatttatggccgcgctggaaaatgacgctgacccccaaaaacttagcctagacaaaaaatcagaatggctggcgcattttgaacgcgaaaaggccaaggccgacgcaatcaaagcccaaatcaggaaactggatgcaaaaatcaaccagatggtctatgacctttatggccttgaccaagccgacatcgcaatcgttgagtcagatggtcaataa

SEQ ID NO: 39406 - protein, 493 aa, Unknown
  Obtained from environmental sample
  misc_feature (1)..(493): Xaa is any amino acid
MFFWHDCERRRLAFDWQHEFQEIMANGGFDVVVGNPPYVFAREKISAIDKDYYSKHYKSAQYQVNTYLLFIEKSFQLMKEATGRCSLIVPNAWLMVSSAANLRKFLLDNAAIHSITNLLGESFENVSVETIILDAQKSKASSNHQIQVLFNDDGNNFILSHSKMQHEFSADSGNGFKLFVKNDDESVLAKISDGSVPLGDIYEVRSGLKAYEAGKGKPMQTSDDVNKRIYDFTSKIGNNMHKYLDGKDIGRYWHRWGGIFLKYGENLAAPRSLKIFSSPVIIIREIIGKYPRSILGSYSDGHEILLFNMSNIAILSKDANYDLKYLLGILNSSLMSYYFMHSTPKANRKLFPKIILLDLKKFPIKIADKDTQVPIILAVDNMLDLVGRFMQHSDSFLDLAKTDLGIAKLGQAMNAWHTLDKDTFMAALENDADPQKLSLDKKSEWLAHFEREKAKADAIKAQIRKLDAKINQMVYDLYGLDQADIAIVESDGQ

SEQ ID NO: 39407 - DNA, 705 bp, Unknown
  Obtained from environmental sample
  misc_feature (1)..(705): n is a, c, g, or t
gtgttatgctgcgcggtagattcctattctccggatataaaacacaagaccatgatgatgatgcgttctcctgaagacggacgctatttccctctcacttacatcaacggcggaggactgacaatacgctggtttcgggataactttaccgggaaaccgccgctctcctacaaagaactggagaaagaagccgcaactcttccgccgggaagcgaagggctaacctttattccgcatttcgctggaagggtttttccgtcaaatccgaatctgaaaggaagttttaccggccttgatcttaaacacgggccggcgcatctgttccgcgcaattatggaaggaatcagttgtgagtacgcatactacctttcagtactcagggatctgtaccccaacagtaattttgaacgtatgacagcaatcggaggcggggcgtcctctgaactttttgtgcggataaaggccgatgtgctgggcattgaagcaatacggactgatgtgggagatacggcgcttgtgggaagcgcggctattgccggttacggagccggcgttctggatgattataggactgcgattcgtaaaacaatccgcaacaaacccgcgatactgtttgacgccgggtatcatgaaaagtataaacctgttgtaaaaaaatatatggcggccatagaagccatgaacaatttatataaagaggaataa

SEQ ID NO: 39408 - protein, 234 aa, Unknown
  Obtained from environmental sample
  DOMAIN (1)...(214): FGGY family of carbohydrate kinases, C-terminal domain
  misc_feature (1)..(234): Xaa is any amino acid
MLCCAVDSYSPDIKHKTMMMMRSPEDGRYFPLTYINGGGLTIRWFRDNFTGKPPLSYKELEKEAATLPPGSEGLTFIPHFAGRVFPSNPNLKGSFTGLDLKHGPAHLFRAIMEGISCEYAYYLSVLRDLYPNSNFERMTAIGGGASSELFVRIKADVLGIEAIRTDVGDTALVGSAAIAGYGAGVLDDYRTAIRKTIRNKPAILFDAGYHEKYKPVVKKYMAAIEAMNNLYKEE

SEQ ID NO: 39409 - DNA, 393 bp, Unknown
  Obtained from environmental sample
  misc_feature (1)..(393): n is a, c, g, or t
atgatttatatgctggataccgatacagtaagcaatatagtaaggaaacaccctccggttataaaaaaacttattagtcatgagaatgacgaaatttgcataagcgccgttaccaacgccgaattgttttatggattggaaaaaaagaattcacaaaaactttttaatgaagtgcgttctgttataggaaaatgtacaataattgattttgacgcctctcaatcggaaatttacgggagaattcgcgttgaacttgaaaaatcaggcacgccgcttggagatatggacttgctcatagcctctgccgcaatgtcgacaggggcaatattggtttcacataacaaaaaacatttttccaaaataaaaggattaaagattgaagactggtgttag

SEQ ID NO: 39410 - protein, 130 aa, Unknown
  Obtained from environmental sample
  DOMAIN (3)...(129): PIN domain
  misc_feature (1)..(130): Xaa is any amino acid
MIYMLDTDTVSNIVRKHPPVIKKLISHENDEICISAVTNAELFYGLEKKNSQKLFNEVRSVIGKCTIIDFDASQSEIYGRIRVELEKSGTPLGDMDLLIASAAMSTGAILVSHNKKHFSKIKGLKIEDWC

SEQ ID NO: 39411 - DNA, 780 bp, Unknown
  Obtained from environmental sample
  misc_feature (1)..(780): n is a, c, g, or t
ttggacattgtaaatctcgcaacaatcnncgcatgggataaaggggcaagcggtctttacgccactcttgatattttaaattcaatagaagaatttacggttatcggggcgcggaaagagggaccaagcgcgcgcattataacaaaaaataatatactttttggatttttatcctatacatacgggcttaacggcaatacgctccccaaagacaatccaaaccttgtctctttgataaacagaaaaaaaatagaagaagaagtcgtttctcttcgcccgttatgcgactttctaatagtttccatgcattggggcgacgaatacatgctgcagccgaataaagagcaaattgatcttgccgcatttcttgccaacttaaatgtagaccttatcataggacatcacccgcatgttttacagcgagtagaaaccataaaacgccccgacgagaaagaaacaatttgctactattcgcttggaaattttatctctcatcagagggaaagggaaagaatcatcggcgctcttttagcgttaacttttgtaaaacaatctacgggagagctttccattatcaattacggaataatacccgtaataacacattacgacagagctttttcaaacacaaaaatatatccgctttattcatacactgacgaattattaaacaagcacggtctgaaaaattttgaaggcgggctttcttttgatttttttaatggagtaacggatagattgaacgcgcaaatttttaagggcgaaccttttacgaaataa

SEQ ID NO: 39412 - protein, 259 aa, Unknown
  Obtained from environmental sample
  misc_feature (1)..(259): Xaa is any amino acid
MDIVNLATIXAWDKGASGLYATLDILNSIEEFTVIGARKEGPSARIITKNNILFGFLSYTYGLNGNTLPKDNPNLVSLINRKKIEEEVVSLRPLCDFLIVSMHWGDEYMLQPNKEQIDLAAFLANLNVDLIIGHHPHVLQRVETIKRPDEKETICYYSLGNFISHQRERERIIGALLALTFVKQSTGELSIINYGIIPVITHYDRAFSNTKIYPLYSYTDELLNKHGLKNFEGGLSFDFFNGVTDRLNAQIFKGEPFTK

SEQ ID NO: 39413 - DNA, 786 bp, Unknown
  Obtained from environmental sample
  misc_feature (1)..(786): n is a, c, g, or t
gtgattaaaaaagaaattattgagattgttcaagataaattacgaaaaattgaaaaggaacattcggttaaaatcttgtatgctattgagtctggctcaagagcatggggattcgagtctattgacagtgactacgatataaggttcatttatgcccataaaaggaactggtacttaaacatacttccaaaacgtgatgttatagattatccaattattgatgaatttgatttttccggttgggatataaggaaaacactgtttttgctaaacaaatccaatcccgtattatttgaatggcttaaatcacctatcatttattataaagatgaacacttctggagcattatggaagtattatcaaaaccttatttttctccaatatcatcggtttatcactatttgcatatggcaaatggaaactatcgtcagtatttaaaaaccgatgaagtaaagataaaaaagtatttctatgtattaaggccaattttggcttgtatgtggatagaaaatcacaaagaaccgccgccaatggaatttgataaattactaacccagataaaagataagaaattattggatataatcaatgggttattaatgaaaaaaaaatcgggtgcagaattaggaatagaaccaaaaattccagaactaaatgttttcatagaagaaacattaaaatactttgaaaataccgtaaactcatttgatccaagaaaaaagccaaatcaacaattattggaagaaggatttattaaaattgttgaatattgcgatgagttatga

SEQ ID NO: 39414 - protein, 261 aa, Unknown
  Obtained from environmental sample
  misc_feature (1)..(261): Xaa is any amino acid
MIKKEIIEIVQDKLRKIEKEHSVKILYAIESGSRAWGFESIDSDYDIRFIYAHKRNWYLNILPKRDVIDYPIIDEFDFSGWDIRKTLFLLNKSNPVLFEWLKSPIIYYKDEHFWSIMEVLSKPYFSPISSVYHYLHMANGNYRQYLKTDEVKIKKYFYVLRPILACMWIENHKEPPPMEFDKLLTQIKDKKLLDIINGLLMKKKSGAELGIEPKIPELNVFIEETLKYFENTVNSFDPRKKPNQQLLEEGFIKIVEYCDEL

SEQ ID NO: 39415 - DNA, 1038 bp, Unknown
  Obtained from environmental sample
  misc_feature (1)..(1038): n is a, c, g, or t
gtggagcctgcaatcattcccaagagcatagcgagccccagcttgctggcaactatcttcacgcaaaagtttgagatgcatcttccctattacaggcaggagaaacaatttgaacggataggggtagcaataagccgtcaagatatgagcaactggcagcagcaggcgtatgaaaaacttaagccgttatccgccttgctcgaagaaacggtaaaaagcggccctgtaatgcagatggatgagagtgaggtgcaggtaataggggaagaggaacgaagcgatcttcagaaaagctatatgtggcttgcccgtggcggccctgtaggcaaaaaagtaattttgtataagtaccgtccgactcgcgccgcatataacgtcatggaattcctccaagggtacagaggctatctgcaaacggacggatacatagggtatgatagcgcggctaaagacctgcccggaataatacaggtgggatgttttgcacatgcaaggcggaagttttttgaggctgccaaaataagctgtaaaggccgctctgccgaagaagacataaaatatatccgcaggctctaccagcttgaggatacgctacggagcaaatggaaagacgaccttgaaaaattccatgaagaacgaaaaaaagaagcggctcccatactagctgaatttgagcagtggctttcaaaacgggtggatgaagtgccgcctaaggtactgttgggagaagcgatacactatacccttaaccaatgggacaaattgataaagtacattgaaagcccctatttgactcccgacaacaatgcctgcgaaaacgcaatacggccttttgtcatcgggaggaaaaactggctgttctgtcagagcgtagacggggccaaaagttcatgcggtatgtttacccttatagagactgcaaagcagaatggccttgttccgtttaaatatctgatggctgtttttgagaaagccccgtttgccttaactcctgaagactgggaaaaactgcttccctggaacattttcaccgcttaa

SEQ ID NO: 39416 - protein, 345 aa, Unknown
  Obtained from environmental sample
  DOMAIN (4)...(154): Transposase IS66 family
  misc_feature (1)..(345): Xaa is any amino acid
MEPAIIPKSIASPSLLATIFTQKFEMHLPYYRQEKQFERIGVAISRQDMSNWQQQAYEKLKPLSALLEETVKSGPVMQMDESEVQVIGEEERSDLQKSYMWLARGGPVGKKVILYKYRPTRAAYNVMEFLQGYRGYLQTDGYIGYDSAAKDLPGIIQVGCFAHARRKFFEAAKISCKGRSAEEDIKYIRRLYQLEDTLRSKWKDDLEKFHEERKKEAAPILAEFEQWLSKRVDEVPPKVLLGEAIHYTLNQWDKLIKYIESPYLTPDNNACENAIRPFVIGRKNWLFCQSVDGAKSSCGMFTLIETAKQNGLVPFKYLMAVFEKAPFALTPEDWEKLLPWNIFTA

SEQ ID NO: 39417 - DNA, 390 bp, Unknown
  Obtained from environmental sample
  misc_feature (1)..(390): n is a, c, g, or t
ttgcgctttaatcgctttgtatccaaagaaactggatatgaaattgttgagaaaataatagaaacgtctaaaaatgaaaagacaaaaatatttatgcatgcagtaaatttatttgaagtatattatcatatttataaattatatgatgaagtttcagcattaaattttttagcagaaattaaagatacaccaattcaattgaatactgaaataactgaagacataataattactgccgtaaagtttaaaaatcaatacagattatcacttgctgatgcaataggattggcagaaacaatcatttttaatggatcatttgtaacagcagatcaccatgaattagatataattgaaaaaaatgaaaatattaaattcacatgggctcgataa

SEQ ID NO: 39418 - protein, 129 aa, Unknown
  Obtained from environmental sample
  misc_feature (1)..(129): Xaa is any amino acid
MRFNRFVSKETGYEIVEKIIETSKNEKTKIFMHAVNLFEVYYHIYKLYDEVSALNFLAEIKDTPIQLNTEITEDIIITAVKFKNQYRLSLADAIGLAETIIFNGSFVTADHHELDIIEKNENIKFTWAR

SEQ ID NO: 39419 - DNA, 477 bp, Unknown
  Obtained from environmental sample
  misc_feature (1)..(477): n is a, c, g, or t
atgtctaacttgggaaaaaataaaggaaaaattgtaagctcttacgagggcaggcaaaaccacattccgtctttaaaaaccccagaaattgaaaactgggagtttatgtaccctaattctgcaacagatttgcgaattgaggttccggaattcacctgcgtttgccccaaaaccggattgccggattttgcaacactgattatagaataccgccccacaaaatattgccttgaacttaaaagtttcaaggaatacctgctatttttccgcaatgtgggaatttttcacgagcacgtagcaaacaaggttttaaaagactgcgttaaagccgttgcgccaaaatggatgaaagttacaggcattttcaattccagaggtggaatacaaacgactgtggtggctaaacacnggggtataaattatgaaaaaaattctgtgcgttgttttgatgttctcaatggtttatgctcaagataa

SEQ ID NO: 39420 - protein, 158 aa, Unknown
  Obtained from environmental sample
  DOMAIN (42)...(138): GTP cyclohydrolase I
  misc_feature (1)..(158): Xaa is any amino acid
MSNLGKNKGKIVSSYEGRQNHIPSLKTPEIENWEFMYPNSATDLRIEVPEFTCVCPKTGLPDFATLIIEYRPTKYCLELKSFKEYLLFFRNVGIFHEHVANKVLKDCVKAVAPKWMKVTGIFNSRGGIQTTVVAKHXGINYEKNSVRCFDVLNGLCSR

SEQ ID NO: 39421 - DNA, 1263 bp, Unknown
  Obtained from environmental sample
  misc_feature (1)..(1263): n is a, c, g, or t
atgaattcagcccctcagcttcctaagggaacccgagatttttaccccgttgatatgagggtgcaaaatcatatcttttctgtttggcggagcgcggctttgaaatttggctacgaggaatacgaaggaccaacttttgagcatttagagctttacacgggtaaaagcggcgaagaaattgtctcgcagctatacaacttcacagacaaaggcggcagggaattggcgcttcgccccgaactcacccccacgcttgcaagaatggttataaaaaaaggcaacgaactcaaaaaacctttcaaatggttttcaatcccccgtttgtttcgctatgaacgctcccaaaaagggcggctcagggaattttttcaactgaatttggatataataggcacggagagcataagcgcagaagcggatttgatttccgctatagcgagtatgctctttgattttggcttaaacgaaaacgatttttatataggcatttccagccgccgcttgctcgccgcatttttggaagagctaaaagttgcagacccaaatttgatttacccgcttttggacaaacgcttgaaaatgcccgctgaggattttcgcaaagaattgttgaacacagggctaagtgaagagagcgcaaaaaaaatagacgagtttatgacttgcgcaagcatagaagatttaaaaaaatatcacaacggaactgctattgcggaattagaagaattatttgaacttctcaaagcggctggctttgaaaattgcatcaaactggatttatccgttgtgcgcgggcttgcctattatacaggtgttgtatttgaagtttttgacaaagcaaaaaatatgagggcaatagctggtgcgggccgttatgataatttaacagaaacctggggcggtcagcgaatttccggtgttggttttggaatgggcgatgttgtgcttgcagatntgctaagagaaaaaaatttgctcccgcaaagcaataccgatttaccggtctttatagcctcttttaaaagtgatatgaaaattcttttcaaaacagcaggggagttccgcaaagcgggcgttgcctgttcgcattccttgaatgcggttaaattcagcaagcaattggaaatggcaaatgcagctaacgcaaaatgcgttatctttgcagacggcgaaaaaacaaatggtgaatattttgagtataaaattctttcaacaggagaacaaggatgtctaacttgggaaaaaataaaggaaaaattgtaa

SEQ ID NO: 39422 - protein, 420 aa, Unknown
  Obtained from environmental sample
  DOMAIN (21)...(183): tRNA synthetase class II core domain (G, H, P, S and T)
  misc_feature (1)..(420): Xaa is any amino acid
MNSAPQLPKGTRDFYPVDMRVQNHIFSVWRSAALKFGYEEYEGPTFEHLELYTGKSGEEIVSQLYNFTDKGGRELALRPELTPTLARMVIKKGNELKKPFKWFSIPRLFRYERSQKGRLREFFQLNLDIIGTESISAEADLISAIASMLFDFGLNENDFYIGISSRRLLAAFLEELKVADPNLIYPLLDKRLKMPAEDFRKELLNTGLSEESAKKIDEFMTCASIEDLKKYHNGTAIAELEELFELLKAAGFENCIKLDLSVVRGLAYYTGVVFEVFDKAKNMRAIAGAGRYDNLTETWGGQRISGVGFGMGDVVLADXLREKNLLPQSNTDLPVFIASFKSDMKILFKTAGEFRKAGVACSHSLNAVKFSKQLEMANAANAKCVIFADGEKTNGEYFEYKILSTGEQGCLTWEKIKEKL

SEQ ID NO: 39423 - DNA, 612 bp, Unknown
  Obtained from environmental sample
  misc_feature (1)..(612): n is a, c, g, or t
atggtggagcagcgcgacatggtgacgggggcgcatatcgaccggacgcagaggtatctctccatactcgtaaatgagatgatgcgccgcggcgtttacgccgacgagatgtcgaagtgggatttggagctgcttttgccgtcggcgcagttgcacgacgtaggcaagatagtggtaagcgatgtgatcctcaacaaacccggaaaactgaccgacgaggagttcgcccttattaagcggcacagcgccgagggcgagcggatcatcgacgagatcatcgccaaatccggtgtgagcggatttatgatgcacgccaagaagttcgccggttaccaccacgagaaatgggacggcaccggttatccgcacgggctaaaaggtgaggagataccgcttgaggggcgcattatggccgtcgcggacgtatacgacgcgcttgtttccgagcgtccgtataagaagccgtttacccacgagcaggcggtggatattatcaagaaggacagcggcacgcactttgacccgaagattgtcgaggtgtttatgggtgtggcggacgacttctgggcggagagcatgacgtttgtgtcggcaagtgaaaaagcgaattga

SEQ ID NO: 39424 - protein, 203 aa, Unknown
  Obtained from environmental sample
  DOMAIN (9)...(146): HD domain
  misc_feature (1)..(203): Xaa is any amino acid
MVEQRDMVTGAHIDRTQRYLSILVNEMMRRGVYADEMSKWDLELLLPSAQLHDVGKIVVSDVILNKPGKLTDEEFALIKRHSAEGERIIDEIIAKSGVSGFMMHAKKFAGYHHEKWDGTGYPHGLKGEEIPLEGRIMAVADVYDALVSERPYKKPFTHEQAVDIIKKDSGTHFDPKIVEVFMGVADDFWAESMTFVSASEKAN

SEQ ID NO: 39425 - DNA, 402 bp, Unknown
  Obtained from environmental sample
  misc_feature (1)..(402): n is a, c, g, or t
atgttggattatgggcttgttttggaaggtggtggtttgaggggtttatacacttctggcgttatagatgcgtttttggaaaagggcatagaatttccgcttgtgataggggtttctgctggagctggctatggctgctctcttgtttcaaggcagcacggaagaaatttaaaaattttaagggaattcagaaaagaccctcgctatttgtcgtttggcagttatataaaaactggaaattattttggaatagatttcatatacgatgaaattcccaaatccattccctttcacaccgatgtttttctgtcatctccaacccgttttatcactgtctgctccaatgttgaaacgggcaaaccggaatattttgacaagaccaggacattttgcaagccctga

SEQ ID NO: 39426 - protein, 133 aa, Unknown
  Obtained from environmental sample
  DOMAIN (6)...(131): Patatin-like phospholipase
  misc_feature (1)..(133): Xaa is any amino acid
MLDYGLVLEGGGLRGLYTSGVIDAFLEKGIEFPLVIGVSAGAGYGCSLVSRQHGRNLKILREFRKDPRYLSFGSYIKTGNYFGIDFIYDEIPKSIPFHTDVFLSSPTRFITVCSNVETGKPEYFDKTRTFCKP

SEQ ID NO: 39427 - DNA, 486 bp, Unknown
  Obtained from environmental sample
  misc_feature (1)..(486): n is a, c, g, or t
ttgcaagccctgaaagcctcttctgcggttccttttatgtgcaggataattgagcatagaggcaaaaagcttttggatggcgggatagcagatgccattcctcttaaaaaagccgtggaactgggcttttcaaagaatgtggttgttcttacccacccagcaggctttcgcagaaaaaagagttttcacccatcttggtttttttaccgcaaatacccaaaattcattgaggctatgggttcttatgtggacagatataatgagagtttagaatttgcggagaaggaagcggaaaagggaaatgtaattttaatcaggccgagcaaggacttgaaggtcaagagaacggaaagcgatattccaaaaatagagcagctctacgaactgggaaaacgagatgcagagtcagcttgtgcttttatacagcctccagctccttatgcaccttctcccactccgagtacagatccaaaagctgccccttag

SEQ ID NO: 39428 - protein, 161 aa, Unknown
  Obtained from environmental sample
  misc_feature (1)..(161): Xaa is any amino acid
MQALKASSAVPFMCRIIEHRGKKLLDGGIADAIPLKKAVELGFSKNVVVLTHPAGFRRKKSFHPSWFFYRKYPKFIEAMGSYVDRYNESLEFAEKEAEKGNVILIRPSKDLKVKRTESDIPKIEQLYELGKRDAESACAFIQPPAPYAPSPTPSTDPKAAP

SEQ ID NO: 39429 - DNA, 504 bp, Unknown
  Obtained from environmental sample
  misc_feature (1)..(504): n is a, c, g, or t
ttgaacatggattccgtagatagcttaatcgaagcccctgacgagttcaaaggcgcagctattttggtaagccacgatgaggaaattatccacgcattcgcaaaacgtctggtaatctttgatggcggtaaagccaaaatttttgacggtacctatcaggacttcctagagagggtaggttgggcagcggagaaaacagaaaaatcgggtgaatccttgaatcgcagctctgacaaaaaggacaaaagggaacgcgccgagcaaattctccaaaggtcccgcgccattcgcccactggagcaaaagataaagcaaatagaaggcgatattcagcaaaaggaaaactttgtggctcaatgcgaaaaagatataataaccgccgcagaaaatggcgagggcttaaaaatcgctgaaatttccaaagaaatggagcttgctaaggggcagcttttggatctgtactcggagtgggagaaggtgcataaggagctggaggctgtataa

SEQ ID NO: 39430 - protein, 167 aa, Unknown
  Obtained from environmental sample
  misc_feature (1)..(167): Xaa is any amino acid
MNMDSVDSLIEAPDEFKGAAILVSHDEEIIHAFAKRLVIFDGGKAKIFDGTYQDFLERVGWAAEKTEKSGESLNRSSDKKDKRERAEQILQRSRAIRPLEQKIKQIEGDIQQKENFVAQCEKDIITAAENGEGLKIAEISKEMELAKGQLLDLYSEWEKVHKELEAV

SEQ ID NO: 39431 - DNA, 552 bp, Unknown
  Obtained from environmental sample
  misc_feature (1)..(552): n is a, c, g, or t
ttggcctgtggctgggcgaggggagggtacttcccgggggagagggagtacggtttttccgatgattcggataccgccggcggttctaagggcgcggcggctcctctggtcatggtaattggcgatgtttccgactcgggtgaggatgcccagcttcttgataaaatgcttgcctcaatcaatttgtccagggacagcaactgctttatcgcaaatattgttaaatatcgcccgcctgataaccgtgatccacagcctgacgaaatcgccgcctgcgccggttttattgaatctcagatacaatcccttaacccccgctttatactctgtgtcggaattttatctttgcaagctctgctgcatagctctgaaccgattgagaaactccggggaagattcatggattataagactaatggtatgacaataccgcttgcagcaacttatcatcccaacgaccttttgcgtaacaaggatctaaagcgcccctgttgggacgacctgaaattgcttcgcgccgcgcttggcgctgtggaaagcggggccaaatag

SEQ ID NO: 39432 - protein, 183 aa, Unknown
  Obtained from environmental sample
  DOMAIN (28)...(173): Uracil DNA glycosylase superfamily
  misc_feature (1)..(183): Xaa is any amino acid
MACGWARGGYFPGEREYGFSDDSDTAGGSKGAAAPLVMVIGDVSDSGEDAQLLDKMLASINLSRDSNCFIANIVKYRPPDNRDPQPDEIAACAGFIESQIQSLNPRFILCVGILSLQALLHSSEPIEKLRGRFMDYKTNGMTIPLAATYHPNDLLRNKDLKRPCWDDLKLLRAALGAVESGAK

SEQ ID NO: 39433 - DNA, 474 bp, Unknown
  Obtained from environmental sample
  misc_feature (1)..(474): n is a, c, g, or t
ttgggacgacctgaaattgcttcgcgccgcgcttggcgctgtggaaagcggggccaaatagtggctcaatggtttgacctggctttcgatattccagcggatcaggcatttacttaccgcgttgacgaaaaaaacgcggccgccgtggggaaacgggcgctggcgccgtttggcaaaaggggccgggacagccttggatacataatcgccgaacgggacgcgcctccgcggggaattgacgaatccgcgataaagccgatccgccgcgtggctgacgccgctcccgtattcgacctgcgcgacatagagcttgcccgttggatagccgcgtattatctttgcggcataggccaggccattgccgccatgatcccctcaggccgtcgcatggtatcgtttcttctctgggcgtttgacacgacgatcttgcgggaaccgccttggaactgtcggcggaacagaaagcggcgctga

SEQ ID NO: 39434 - protein, 157 aa, Unknown
  Obtained from environmental sample
  misc_feature (1)..(157): Xaa is any amino acid
MGRPEIASRRAWRCGKRGQIVAQWFDLAFDIPADQAFTYRVDEKNAAAVGKRALAPFGKRGRDSLGYIIAERDAPPRGIDESAIKPIRRVADAAPVFDLRDIELARWIAAYYLCGIGQAIAAMIPSGRRMVSFLLWAFDTTILREPPWNCRRNRKRR

SEQ ID NO: 39435 - DNA, 861 bp, Unknown
  Obtained from environmental sample
  misc_feature (1)..(861): n is a, c, g, or t
atgataaataaaccgaatgcgtctgccgatgattgggaaataaaaaatttccataatatgcaatttgttcaaaaattttataatatagatgaaatttccccttgttatccttatgaaaaaatgtatgaattgaatcagctatgcgatggtttntgcgccggatcagatcaaatatggaattatcatttgtcatttaatatggcgacatttcttaattttgcagatgaagataaaaagaaaataagttttgcttcgtcatttggtcatgcaaatgattatacaccacaggaaaaaaaagaagaagtaagaaagttattaagcagatttgacgctgtttctgttagggaacaaagcggagtaaagatatgcgaaagttatggaataaaagcagacgaagttttagatccggttttttgtatagaagaaaaattttataatgaattggcagaacaagcaaaatttaacaagaccggtccgtatttactgacatatattcttgattcaacgccggaaaaacgaaaagctattgaattttacagcgaaagattgggaataaaaacgatcaacattcttgatggtgtaacgcctaaatttacgcaaaataaagtaatattaaatttaccgaatattcttgaagatgtacatgcagaagatttgataaaggcaataatgaatgccgaatttgtgataactgacagttttagcggtacggcattttcgataatatataataaaccatttatttctttaactaattatgggcgaggagctgctcgttttaatgaattacttggtaaatttgatttgacgcatcggctcatacctgatccgcaagatatacccgaggacgaacagtattaa

SEQ ID NO: 39436 - protein, 286 aa, Unknown
  Obtained from environmental sample
  misc_feature (1)..(286): Xaa is any amino acid
MINKPNASADDWEIKNFHNMQFVQKFYNIDEISPCYPYEKMYELNQLCDGXCAGSDQIWNYHLSFNMATFLNFADEDKKKISFASSFGHANDYTPQEKKEEVRKLLSRFDAVSVREQSGVKICESYGIKADEVLDPVFCIEEKFYNELAEQAKFNKTGPYLLTYILDSTPEKRKAIEFYSERLGIKTINILDGVTPKFTQNKVILNLPNILEDVHAEDLIKAIMNAEFVITDSFSGTAFSIIYNKPFISLTNYGRGAARFNELLGKFDLTHRLIPDPQDIPEDEQY

SEQ ID NO: 39437 - DNA, 723 bp, Unknown
  Obtained from environmental sample
  misc_feature (1)..(723): n is a, c, g, or t
ttgtttggtattgatcctaaaacggcagaatttcaggataaatggatagaagttttaaaatttgaaaggttagatgaagatataccgcaggataaaatacttgaatttacgcaaacaagtacagaaaaaatcaaccggaattgtgatcatattttgacagcttctaaaaagatttataatatagcggcggcaaataacatagataaaaataaaatgcaagttttatatataggaaatgaaattgcaaaagaacagttaaagagtgcattatcatcgtatgatcctaaaggaagtttaaaaatagttttttttagcgataatatagataacgaagaaagcggttaccggttttttttggattctttggaatctttaagcagaatagatgcgtcgcaaatagatgttatgtttataataaatcaatacgaacatgaaaccatttacaaaaaacttaaaaacttccgttccataaaaataaaactaattaatgatagtaacgatataaaaaaattaatgaaaggatgccatttatgcgttgctcctgttatgtgggaagaaaacataacgcaaatagcaaccgaaataattgcctgcggtgtgccgattttatccagcagttttggcagcgtatcagagctttgcaaaagcgaattatttatttttgaaggcggaaatacggatgattttataaaaaaattgtttcattttatagaaaaaccctga

SEQ ID NO: 39438 - protein, 240 aa, Unknown
  Obtained from environmental sample
  DOMAIN (86)...(240): Glycosyl transferases group 1
  misc_feature (1)..(240): Xaa is any amino acid
MFGIDPKTAEFQDKWIEVLKFERLDEDIPQDKILEFTQTSTEKINRNCDHILTASKKIYNIAAANNIDKNKMQVLYIGNEIAKEQLKSALSSYDPKGSLKIVFFSDNIDNEESGYRFFLDSLESLSRIDASQIDVMFIINQYEHETIYKKLKNFRSIKIKLINDSNDIKKLMKGCHLCVAPVMWEENITQIATEIIACGVPILSSSFGSVSELCKSELFIFEGGNTDDFIKKLFHFIEKP

SEQ ID NO: 39439 - DNA, 318 bp, Unknown
  Obtained from environmental sample
  misc_feature (1)..(318): n is a, c, g, or t
gtggccgatccggagcaggtcagggacacgatcgcatcctatatcgggtatggcccggaacaagtcatcatccgcccggatcaccaccgctacaccttccgggaagtggagagcatgatcgcgaaccgcaaaacgatcatctgcacgcccaaggatgccgccaagctccgcctgttctactgcccggacacatggtatccgcagttggatctgcatttcggcccggccctgtggacgcagtcgaccttccccgaatggtggaacgcctggcggcaggcttggctgcacacgcacggcacaaatctgcgcaagacctaa

SEQ ID NO: 39440 - protein, 105 aa, Unknown
  Obtained from environmental sample
  misc_feature (1)..(105): Xaa is any amino acid
MADPEQVRDTIASYIGYGPEQVIIRPDHHRYTFREVESMIANRKTIICTPKDAAKLRLFYCPDTWYPQLDLHFGPALWTQSTFPEWWNAWRQAWLHTHGTNLRKT

SEQ ID NO: 39441 - DNA, 681 bp, Unknown
  Obtained from environmental sample
  misc_feature (1)..(681): n is a, c, g, or t
gtgccggccaagccttcagccggggccatcaagctcctgctggacgcggcacgcggcacgccccatgccttcctggtcaaccgcctggttntgcgatccatgatgcaggcccgctacgcgccggagcggggcgggcacttcggcctggcctcggcatgctactgccacttcacctcgcccatccggcgctatgcggatctcgtgacgcaccgcgccctgcgcctggccctgggccagagcgccggccccattccggcccggcacaagctgctggccgtcacggagcagtgcaacgcccgcgagcgcgccgctgtggaagccgaacgcgaaaccgcccggcgcatggcctgtttgatccttgccggccgcgagggcgaggtttttgacgggatcgtctcctctgtcacggaatttggcgtgttcgtcgaactggcggccatgcccgtggaaggcatggcgccgctgtccagcctgcacgacgaccggtacagctttgacccaaagcggcaggaactggccggatcgggccgcgggcggagcttccgcctgggccagaacgtgcgcgtgcgcctggtccgcgtggatcccgaccgtctgcgcatcgatcttgaactgctgcaaaccgggttccgctccggaaaaacggcgcgctcttctccccgccggcgctcaggccggtag

SEQ ID NO: 39442 - protein, 226 aa, Unknown
  Obtained from environmental sample
  DOMAIN (121)...(206): S1 RNA binding domain
  misc_feature (1)..(226): Xaa is any amino acid
MPAKPSAGAIKLLLDAARGTPHAFLVNRLVXRSMMQARYAPERGGHFGLASACYCHFTSPIRRYADLVTHRALRLALGQSAGPIPARHKLLAVTEQCNARERAAVEAERETARRMACLILAGREGEVFDGIVSSVTEFGVFVELAAMPVEGMAPLSSLHDDRYSFDPKRQELAGSGRGRSFRLGQNVRVRLVRVDPDRLRIDLELLQTGFRSGKTARSSPRRRSGR

SEQ ID NO: 39443 - DNA, 900 bp, Unknown
  Obtained from environmental sample
  misc_feature (1)..(900): n is a, c, g, or t
ttgccctgcataaggtcaagaacagaaacgcgaaaaaatgccgacaccctgagggtattgctacatcatctttattttttgtgcttttttacaaataaacgtgaggagcctgtgatctctgccaaccatgtttttcggacttacgacatcaggggcatcgttgatcaggacttcgacgccgcctgggtcgagcggctcgggcgggcctgcgcggcctatttcctggcccgggggcaaagctgcgccgtgctgggacatgactgccgtctctcgtcgcccgcattcctggaggcgttgcggcagggtctcagcgatgccggcgtggactgcgtgtgcatcggcatgacgcctacgcccgcgctgtatttcgccgtcaaggagctgaacaaaaccgccggggtcatgattaccgccagccacaatccgccccagtacaacggattcaaaatctggtccggcacaagcacgctctacggcgaagagattcaggaactccgccgcgtcttcgccgcggaagacttccctcagggcagaggtctcgtgagccatgtggacatcatgcccgcgtatgtggaagccatctgttcccggcttcatctcaaacgccccatgaaggtcgtggtggacggcggcaacggcgcgggcggaccggcctgcgcggcggcgctcacccggctgggggccgaggtgattcccctctattgcgaaccggacggacgcttccccaaccatcatcccgaccccaccatcgaggccaatatgcgggacctcatcgccgccgtacaggcggaaggcgcggaagtcggcttcggccttgacggcgacggcgatcgcctgggcgttgtggacgcgcgcggcgtttgcttgcgggcgacgaatccttgccgtctatgcgcatga

SEQ ID NO: 39444 - protein, 299 aa, Unknown
  Obtained from environmental sample
  DOMAIN (188)...(288): Phosphoglucomutase/phosphomannomutase, alpha/beta/alpha domain II
  misc_feature (1)..(299): Xaa is any amino acid
MPCIRSRTETRKNADTLRVLLHHLYFLCFFTNKREEPVISANHVFRTYDIRGIVDQDFDAAWVERLGRACAAYFLARGQSCAVLGHDCRLSSPAFLEALRQGLSDAGVDCVCIGMTPTPALYFAVKELNKTAGVMITASHNPPQYNGFKIWSGTSTLYGEEIQELRRVFAAEDFPQGRGLVSHVDIMPAYVEAICSRLHLKRPMKVVVDGGNGAGGPACAAALTRLGAEVIPLYCEPDGRFPNHHPDPTIEANMRDLIAAVQAEGAEVGFGLDGDGDRLGVVDARGVCLRATNPCRLCA

SEQ ID NO: 39445 - DNA, 675 bp, Unknown
  Obtained from environmental sample
  misc_feature (1)..(675): n is a, c, g, or t
atgatggttggggaagcgtccgtccggttcgcaatagaggggaatcacctcggcccccagccgggtgagcgccgccgcgcaggccggtccgcccgcgccgttgccgccgtccaccacgaccttcatggggcgtttgagatgaagccgggaacagatggcttccacatacgcgggcatgatgtccacatggctcacgagacctctgccctgagggaagtcttccgcggcgaagacgcggcggagttcctgaatctcttcgccgtagagcgtgcttgtgccggaccagattttgaatccgttgtactggggcggattgtggctggcggtaatcatgaccccggcggttttgttcagctccttgacggcgaaatacagcgcgggcgtaggcgtcatgccgatgcacacgcagtccacgccggcatcgctgagaccctgccgcaacgcctccaggaatgcgggcgacgagagacggcagtcatgtcccagcacggcgcagctttgcccccgggccaggaaataggccgcgcaggcccgcccgagccgctcgacccaggcggcgtcgaagtcctgatcaacgatgcccctgatgtcgtaagtccgaaaaacatggttggcagagatcacaggctcctcacgtttatttgtaaaaaagcacaaaaaataaagatgatgtag

SEQ ID NO: 39446 - protein, 224 aa, Unknown
  Obtained from environmental sample
  misc_feature (1)..(224): Xaa is any amino acid
MMVGEASVRFAIEGNHLGPQPGERRRAGRSARAVAAVHHDLHGAFEMKPGTDGFHIRGHDVHMAHETSALREVFRGEDAAEFLNLFAVERACAGPDFESVVLGRIVAGGNHDPGGFVQLLDGEIQRGRRRHADAHAVHAGIAETLPQRLQECGRRETAVMSQHGAALPPGQEIGRAGPPEPLDPGGVEVLINDAPDVVSPKNMVGRDHRLLTFICKKAQKIKMM

SEQ ID NO: 39447 - DNA, 681 bp, Unknown
  Obtained from environmental sample
  misc_feature (1)..(681): n is a, c, g, or t
ttgatagaaaaactgtcatggcgcatcgacccgtcgcccgccgatacgctctggcagaccgtcgacggcttcggcaacaacgcgctggccggacgcatcagcgcgccgcacggcaatttctgtttcgggatagagggggacgcgcaggtatccggcgaaccatacaccgagtcggacgaaccgccgcgctttttcctctatccgacagagttgacgcgcgctcatcgcgtgcttgttgatttctacgatgacagtaaccgtttcgcccctgtcaagacattggaccgtattcaatttttctcacacgccgtccacgcccgtctgcgctacaagcgcggcgcgacggagaattcaacttcggcggcgcaggcgtttgacatcggcgcgggcgtctgccaggactatgttcaaatactgcttaccctcctgcgccttgacaaaatcccctgccgctacgtcgccggccttgcctccgactacggcgaaacccacgcatgggccgaggcatggacaggagataaatactgcgccgttgacccaacccgcgacaaactcatagacgaaggctacatcgccctgtcaaggggccgcgacttcgccgacagttccattgagcggggagtgttcacaggcgcgtgcaggggaacgcagatggtgagcttgaatatggaaatttcatag

SEQ ID NO: 39448 - protein, 226 aa, Unknown
  Obtained from environmental sample
  DOMAIN (127)...(181): Transglutaminase-like superfamily
  misc_feature (1)..(226): Xaa is any amino acid
MIEKLSWRIDPSPADTLWQTVDGFGNNALAGRISAPHGNFCFGIEGDAQVSGEPYTESDEPPRFFLYPTELTRAHRVLVDFYDDSNRFAPVKTLDRIQFFSHAVHARLRYKRGATENSTSAAQAFDIGAGVCQDYVQILLTLLRLDKIPCRYVAGLASDYGETHAWAEAWTGDKYCAVDPTRDKLIDEGYIALSRGRDFADSSIERGVFTGACRGTQMVSLNMEIS

SEQ ID NO: 39449 - DNA, 588 bp, Unknown
  Obtained from environmental sample
  misc_feature (1)..(588): n is a, c, g, or t
ttggagcgtttatgcaaaagcgttcatcatcagggagtggtgatgatgatagaggagccggtaattgagccgctgaccaaagaagacctggatttatgggcgcaggaaggcaaaacgggcctggtgctccacgaggtgggaaacgatcataatttgggggccattgccagagccgcggctttttttgatgcccactttatcgtggtaaacgagcatgacagcgaggcgcggctgagtaccagcgcctaccggattgccgagggcggcatggaacatatcaccgtgcgaaagatcggcaataccgccgcgtttctgaaagacgcggcaaaagaaatcctggttatcggtacggatatccgggctcgtcggcgcatcagagacctttccggcatggtaaaagactggcagcattccaacgccaggcggcccggcattgccctggtgttgggtaacgaagaaaacggcctgccgcaaaatgtcaaagacaactgcacttacctgctgcgcgtcccgggaacaggcaatatcgaaagcctgaatgtatcccaggccgcggcgctttttctgagggaaatntacgatctatga

SEQ ID NO: 39450 - protein, 195 aa, Unknown
  Obtained from environmental sample
  DOMAIN (38)...(190): SpoU rRNA Methylase family
  misc_feature (1)..(195): Xaa is any amino acid
MERLCKSVHHQGVVMMIEEPVIEPLTKEDLDLWAQEGKTGLVLHEVGNDHNLGAIARAAAFFDAHFIVVNEHDSEARLSTSAYRIAEGGMEHITVRKIGNTAAFLKDAAKEILVIGTDIRARRRIRDLSGMVKDWQHSNARRPGIALVLGNEENGLPQNVKDNCTYLLRVPGTGNIESLNVSQAAALFLREXYDL

SEQ ID NO: 39451 - DNA, 1521 bp, Unknown
  Obtained from environmental sample
  misc_feature (1)..(1521): n is a, c, g, or t
ttggatattgatttcgcctgggatgagcgggacgagcttatccaggcggtaatcgaaaagtttgggagggactattgcgcccgcgttgcgaatcacaatatgtttcggtacaaatcggcgttgcgtgaaactgcaaaggcgtatggttttggagatgctgaaataacggcaatagaacggcagctttttcatacgggggataaatcaagcgttgacaatccattatggcaggagattttatctattgcgaaaaagattgaagggcttccccgcggcctgggtatgcactgcggtggtgtggttataacccctgagcccatatacaaatatgtccctatagaaaaatcagcggaaggctatcctcttatagcctgggaaaaggaaggagtagaggccgcagggtttgtcaaaattgacttacttggaaataggtctttggcggtaatccgggatgcgttaaaaaatcttgaagaacaaggaatacatatagaccgcaatatgtggcgtccaatagatgataagaaaacggttgaagccttggcccagggcgacagcatgggggttttctatattgaatcaccagccatgcggcagctacagaaaaagaccaataaaggggattttccacacgtagttattcattcctcgattataagaccggcggcaaacaggtttatatcagagtacgtccgccgtctaaaaggcggtgaatgggaaccgctccatcccctattagaaggcatacttggcgaaagttatggaatcctctgctatcaggaagatgtcagtaanagcgccgtggccctggcgggttttaacgaggcggatgccgacaggctgaggaagcttatcgcgaaaaaagcgggcggcgcgaaactggggatctatgaaaagcaattttttgagggctgccgcaaaaacggagtggaagaagatgtaattcaaaaagtatgggccatgatgctgagctttgacggttatagcttttgcaagccccacagcgcttcgtacgcgatggtgtcttttcagtcggcgtatctgcgggtgcatcaccccgcagagttcatggccgctgttttaagcaatcagggcggctattaccgcccgcacgcctatatagcggaaatccggcgtatgcggctttttacgcttgggccagatataaatctttcccgctggaagtattatggctccggcagagacgtggttatcggcctgatggcaataaaggggctgtccgcttccggtgcgaaagctgttttggaagagcgggggcggggcggggactttacttcgctggataatttttcaaggagggtaagccttaattgcgatgatattgttgccctctgccccgcaggggttttcgacagcatagcggacggccttccacggcatttgcaggccaggcgcttgttgagtgcggggagtagggaatttggagtagggaacggggaattatttgcggcggatgatacgcccgtttatggtgtagagaagccttctattgctccccaataa

SEQ ID NO: 39452 - protein, 506 aa, Unknown
  Obtained from environmental sample
  DOMAIN (1)...(308): Bacterial DNA polymerase III alpha subunit
  misc_feature (1)..(506): Xaa is any amino acid
MDIDFAWDERDELIQAVIEKFGRDYCARVANHNMFRYKSALRETAKAYGFGDAEITAIERQLFHTGDKSSVDNPLWQEILSIAKKIEGLPRGLGMHCGGVVITPEPIYKYVPIEKSAEGYPLIAWEKEGVEAAGFVKIDLLGNRSLAVIRDALKNLEEQGIHIDRNMWRPIDDKKTVEALAQGDSMGVFYIESPAMRQLQKKTNKGDFPHVVIHSSIIRPAANRFISEYVRRLKGGEWEPLHPLLEGILGESYGILCYQEDVSXSAVALAGFNEADADRLRKLIAKKAGGAKLGIYEKQFFEGCRKNGVEEDVIQKVWAMMLSFDGYSFCKPHSASYAMVSFQSAYLRVHHPAEFMAAVLSNQGGYYRPHAYIAEIRRMRLFTLGPDINLSRWKYYGSGRDVVIGLMAIKGLSASGAKAVLEERGRGGDFTSLDNFSRRVSLNCDDIVALCPAGVFDSIADGLPRHLQARRLLSAGSREFGVGNGELFAADDTPVYGVEKPSIAPQ

SEQ ID NO: 39453 - DNA, 981 bp, Unknown
  Obtained from environmental sample
  misc_feature (1)..(981): n is a, c, g, or t
atggatacgaagtatacccggcgtcttgaaaaaattgaagccgtactcgaccagtggctgcctgaagcgcccgattccgcctggctggaaaaagtgtttgccccgccctcttctaccgtcggcgctgtttccctcgagctggcggcgtccctgacacggccaggcagggatttgctaaagcgcggcgggaaacgctggcgccccctgcttatggtacttgccgccgaatgtgtcgcgggagaaagcggcggcgaggcggctctgccgctcacgccacttgtggagattccccacaacgccagcctcattcacgacgatatagaagacaattccgaagagcgaaggggaaagcccgctgtccacgtcaaatacggaacggatacggcgataaacacgggggcgttcatgtattttctgcccctggcctgcctttctgcatggaagggaaagccggagataaaaaaacaaatctggatggcatgggcaagccacatgagggcgcttcacctgggtcaggcaatggacatagcctggcaccgggattttaattccctgccgcgccttgacgaatacgaccgcatgtgtcggctaaaaaccggctgtcttgcaaggcttgcggtcattctcggagtatactcaggcgcggaggctgccgggaccgcgcctaaaaggattgcccgccttgcggatgcctttggtgaggcggcagagcagctgggagtcggcttccagattctcgacgacgtaaaaaacttaagctcagggattccgggtaaaaaacgcggggacgatattgtcgaggggaaaaagagcctccctgtcctgctttttcttcaccgttaccccgaaaaaagggaattcgcctctcgctgctttgccgcagcccatgcttcagggacagacgccccggaagtcaacgagttcatttacgtgcttgaaaaagccnggggttttaagcgaagggcaggaaaaagcccttga

SEQ ID NO: 39454 - protein, 326 aa, Unknown
  Obtained from environmental sample
  DOMAIN (51)...(317): Polyprenyl synthetase
  misc_feature (1)..(326): Xaa is any amino acid
MDTKYTRRLEKIEAVLDQWLPEAPDSAWLEKVFAPPSSTVGAVSLELAASLTRPGRDLLKRGGKRWRPLLMVLAAECVAGESGGEAALPLTPLVEIPHNASLIHDDIEDNSEERRGKPAVHVKYGTDTAINTGAFMYFLPLACLSAWKGKPEIKKQIWMAWASHMRALHLGQAMDIAWHRDFNSLPRLDEYDRMCRLKTGCLARLAVILGVYSGAEAAGTAPKRIARLADAFGEAAEQLGVGFQILDDVKNLSSGIPGKKRGDDIVEGKKSLPVLLFLHRYPEKREFASRCFAAAHASGTDAPEVNEFIYVLEKAXGFKRRAGKSP

SEQ ID NO: 39455 - DNA, 831 bp, Unknown
  Obtained from environmental sample
  misc_feature (1)..(831): n is a, c, g, or t
gtgaatgaaaatttacttgagtcatattataggcagataaaggcatttccacttttgtcttttgaagaagaattggaattgtcaaaacagatagaagaaggaaataccgcggctcttcacactcttgtcaattcaaacctgcgtttagtggtaaagatagccggaatgtataatattcccggcatttcaaaaatggatatgattcaagaggggaatattgggcttttaaacgcggcgaaaaaatatgatttccgtaagaacgtgcgtttttccacgtattcaagctggtggataaaacagtttatcagccgttacatttccagcaggcggtattttgtccgtttgccccaacgtaaagaagaaacattacggaggattcaaacaacatacagcgttctctgtcaaagtttgatgcatcagccgaaaaattccgagattgccaaagagcttggcatttcagttcgggttgttgattcttttgcgggtttcacggccgaatcgatgtcttttgatcagagcataagcgacgatgacgccatcagcgcggtagatattcacgaagattatacttacaaccccgagcgtgacctgatgaaaaaagcctcccgcgacagcgcgttgcgtattttaagcaaattaaaagataaagaaaaacacattctcagttaccgctatcagttgaacggttgcgagcgttgcacattaagggaaataggggataaacttgatctttctcccgaaactgtccgtcagatcgagcagaaggcgctcagaaaaataaagaaccacgcgaaagaattaagagattgcctatacgttgaggcaatttaa

SEQ ID NO: 39456 - protein, 276 aa, Unknown
  Obtained from environmental sample
  DOMAIN (3)...(39): Sigma-70 factor, region 1.2
  misc_feature (1)..(276): Xaa is any amino acid
MNENLLESYYRQIKAFPLLSFEEELELSKQIEEGNTAALHTLVNSNLRLVVKIAGMYNIPGISKMDMIQEGNIGLLNAAKKYDFRKNVRFSTYSSWWIKQFISRYISSRRYFVRLPQRKEETLRRIQTTYSVLCQSLMHQPKNSEIAKELGISVRVVDSFAGFTAESMSFDQSISDDDAISAVDIHEDYTYNPERDLMKKASRDSALRILSKLKDKEKHILSYRYQLNGCERCTLREIGDKLDLSPETVRQIEQKALRKIKNHAKELRDCLYVEAI

SEQ ID NO: 39457 - DNA, 642 bp, Unknown
  Obtained from environmental sample
  misc_feature (1)..(642): n is a, c, g, or t
ttgtataagtccggaatgatatttgtatccgaattgtcatggatcagctccgaaacaataatgaccgccatgtataaccgccggggaggcgcggaagttgtcgcgggtatggcggcaggttttacaatcgcgaatattttctttatgctttttggcgggatatggacagcttcgggagtccttgtcgggggcgcgctcggcgccggcaaacttgaggaagcccgcagccgcgccgcctggttaaaatccggcgccattgccgccggcgtcattatcgcgattgttggggcgggtttttccgctctgatagtccccgttgttttttccaacctcagcagtgccgcgcggtttaactgtatcggccttgtttacgtgattcttgcctatcttccgttatggggttttctcaatttgcaattcgccatatcccgcgccggcggcgacgccgcgacagggatgtacactgatctgtcggttaacaccctgttggttgtccccggcgcggtgctcctttcgtatttcacgtcattgccgcccgtgccaatgttcgccctgataaaactttcagacttcgccaaaatgttcattgcccgccatttcctgaagaaagagcgctgggtgaggaatctgaccaagaggtaa

SEQ ID NO: 39458 - protein, 213 aa, Unknown
  Obtained from environmental sample
  DOMAIN (5)...(170): MatE
  misc_feature (1)..(213): Xaa is any amino acid
MYKSGMIFVSELSWISSETIMTAMYNRRGGAEVVAGMAAGFTIANIFFMLFGGIWTASGVLVGGALGAGKLEEARSRAAWLKSGAIAAGVIIAIVGAGFSALIVPVVFSNLSSAARFNCIGLVYVILAYLPLWGFLNLQFAISRAGGDAATGMYTDLSVNTLLVVPGAVLLSYFTSLPPVPMFALIKLSDFAKMFIARHFLKKERWVRNLTKR

SEQ ID NO: 39459 - DNA, 1299 bp, Unknown
  Obtained from environmental sample
  misc_feature (1)..(1299): n is a, c, g, or t
atggtgaaaaaggccgacgcgcaaaatctccaatttctcacgaaattcggcgattcctactaccaagccgagaactacaagagggcggccgaggtttacgagaagatgcgcaaggtcaagggcgtgacgaccgtcgtgctgaaggagattctcaagccgcttgccgtctcctacgagaaggagaaccagccggccaaggccgcggacgcttacgcggcatacataggtctgccgggcgtggtggatcaagacgcctcctacaagcgcgcgtttcttatagagaagagcgatcaggatcaggctatcaaggcgtacaacgccaacgccaaggcgtttccgagggatccgcgcaacttcgtgcgcctcggcatgatttacgcgcagaagaaggacacctatccgcaggcggcggagaatctgaacgccgcgtcaaagctggtggaaaacgacgtcgatgtttggcagcagctcgcgcttgtgagcggaaaactcggcaagtccgatatggagcttgccgcctacaaaatgtacttcaagctgaagccgcaggacttcaccgtgacccgccgtatcggtgagctgctgtgcgagaagaagcaatactccgaagccattacaaacttggagatgttccttacgacaaatgataaagacgtgaaggcgctgatcctgctggccgacgcctacgaggccaccaaccgtccgcagaagacgacggaattattggccaaggcgaagaacttgaagggcgacgatccagatgttcgcgagcgcctctacaagatgtacaagagagagggcaaaaaggaagaggctttggcggatatcaaggagcttgtgaaaataaccaatgacaacaagtaccgcctgatgctctgcggcgatttgcttgaggccgggaaacttgacgaggctttggtcgtagccaacgcggtgaagaagagcgacccgaccaaccgcgacgggcttatggccttggccggaatccagagaatgcagaagaagtacagcgacgccatagagacttacaagctcgtcttgttcgccgacaacaactacgcccccgcctgcgccggacgcgccgaagcgcacttcctgcttgccgagtacgatagggcggagacgtactacaagaaggcgctgacgatagaccccaagatggcctcggcggaactcggcctctcgagagtctacaaggccacaaagcagaaagatttgcagatacagcacctgaatagggctaagttgcttgatccgaataacaaggcggttctggacgagattagattgctgaagtag

SEQ ID NO: 39460 - protein, 432 aa, Unknown
  Obtained from environmental sample
  DOMAIN (354)...(387): Tetratricopeptide repeat
  misc_feature (1)..(432): Xaa is any amino acid
MVKKADAQNLQFLTKFGDSYYQAENYKRAAEVYEKMRKVKGVTTVVLKEILKPLAVSYEKENQPAKAADAYAAYIGLPGVVDQDASYKRAFLIEKSDQDQAIKAYNANAKAFPRDPRNFVRLGMIYAQKKDTYPQAAENLNAASKLVENDVDVWQQLALVSGKLGKSDMELAAYKMYFKLKPQDFTVTRRIGELLCEKKQYSEAITNLEMFLTTNDKDVKALILLADAYEATNRPQKTTELLAKAKNLKGDDPDVRERLYKMYKREGKKEEALADIKELVKITNDNKYRLMLCGDLLEAGKLDEALVVANAVKKSDPTNRDGLMALAGIQRMQKKYSDAIETYKLVLFADNNYAPACAGRAEAHFLLAEYDRAETYYKKALTIDPKMASAELGLSRVYKATKQKDLQIQHLNRAKLLDPNNKAVLDEIRLLK

SEQ ID NO: 39461 - DNA, 303 bp, Unknown
  Obtained from environmental sample
  misc_feature (1)..(303): n is a, c, g, or t
atgacaaataatactaatttagttacatggtcacagacattttctgtaggggtaaggtcaattgataatcagcataaggagcttttagacttggtcaatgatatgtacaatcatgttgtcggcgatgaaaaagcggaaagagcttattttaaaaaagttattgataaagttgttgaatatgtaaaagtacactttgcgactgaggaaaagatactaaaagctatcaaattccggggctatgcagagcataaaagggcgcatgatgcctttatatttaaagtaattgaaaatataagggattag

SEQ ID NO: 39462 - protein, 100 aa, Unknown
  Obtained from environmental sample
  DOMAIN (17)...(75): Hemerythrin HHE cation binding domain
  misc_feature (1)..(100): Xaa is any amino acid
MTNNTNLVTWSQTFSVGVRSIDNQHKELLDLVNDMYNHVVGDEKAERAYFKKVIDKVVEYVKVHFATEEKILKAIKFRGYAEHKRAHDAFIFKVIENIRD

SEQ ID NO: 39463 - DNA, 513 bp, Unknown
  Obtained from environmental sample
  misc_feature (1)..(513): n is a, c, g, or t
gtggaaatgcagggaaaagtaaccgacggttttgccggtttcatgcaactgcgtaaatgtatgagaccccgcacgctttccacaaaacccggtcgtcatcaggggcttggacttgatacctacacgcaagttacaagccctctgcgccgttataccgatttactcgcccacattcaaataagaaattttctgcgtggcggcaaacccctttccgcagacgatgtttcggcgcggcttgggttcagcgaagccgcatccaccgcctctgttcacgcggaaagggcgagcgacaaccactggaaaatggtttatttgtccgataaaaaagactccgtttgggacgccgtagcccttgaaaacaaaggcagccgctgggcggtaattattcctcaacttgcgcttgaagcgcaggttcctctgcaaagagaagttacccctaacgacaatgttaaattggtactgaagtccgtaaacatatcaaagggcgaagccgtgtttgtacagcgcgggtag

SEQ ID NO: 39464 - protein, 170 aa, Unknown
  Obtained from environmental sample
  misc_feature (1)..(170): Xaa is any amino acid
MEMQGKVTDGFAGFMQLRKCMRPRTLSTKPGRHQGLGLDTYTQVTSPLRRYTDLLAHIQIRNFLRGGKPLSADDVSARLGFSEAASTASVHAERASDNHWKMVYLSDKKDSVWDAVALENKGSRWAVIIPQLALEAQVPLQREVTPNDNVKLVLKSVNISKGEAVFVQRG

SEQ ID NO: 39465 - DNA, 1590 bp, Unknown
  Obtained from environmental sample
  misc_feature (1)..(1590): n is a, c, g, or t
atgagttttggtaattttgaaataagtaccggtaaagcaatacccatgggcgcgactgtgatcaatgaaggggtcaattttgccgttttctcgcgtcatgccacactggtgacgcttattctttttcaatcccatttgccgaacagcccgtatatagaaattcccctgaacaaggcgggaagcaaaaccggggatgtttggcactgttttgtaaaagggattaaagcgggcgtatgctacctgtaccgggtagacggcccttatcagccggagcggggactgcgtttcaaccagcataaggcccttattgacccttatgccaaagccatcaccagccttgaaaaatgggagctaaataaatgcctaggctatgatccggcctctccgcagggcgatctttctttttccggcgagaataatctgcttaccattcctcgttgtattgtaatcgacgatgacgattttgactggcagggagatgcccctcttaactacccgttgcgttttagcgtattatacgaaacacatgttaaggggttaaccgcacatccggattcaggcgtacaacacccgggaacctatctgggcgtaatcgaaaagattccgtattttaaagatctgggagttacaagcctggaattcctccctatacaggaattcaacgagcatgaacacccacgaagaaatccccgtaccggcgaaatgttgaccaattattggggttattcaacagtcgcttttttcgcgccaaaagaatcctatgccaatgatcacagccccggagcccaggtaagggatttcaagctgatggtgcgggaactgcataaagcgggaatagaggtgattttagacatcgtatttaaccataccgccgaaggtaatgaacagggaccaactttttcttttcggggactggacaatcccatttactacatattgagcgataacaagcgctactatcaaaacttttccggctgcggcaatacggtcaattgtaatcatcccgttgtccgcagtttcattatgcactgtcttcattactgggttgttgaaatgcacgttgatggttttcgctttgacctggggtcaattttggggcgggaccagcagggccgcctgatggaatctccgccgatgctggaacgaattgccgaagaccccattttgagttccgccaagataatcgccgaggcatgggatgccggaggggcatatcaggtgggttggttccccggcggacgatgggcggaatggaatgaccgctaccgcgataatatccgcaaatactggcggggggatcccaaagaaatccggcaccttgctacacggctttcgggcagttcagacctctatcttcgtgacggacgcaagccattccattcaataaacttcatcaccagccacgatggttttacccttaaagacctggttacctacaatggaaagcacaacgaagacaatggtgaagaaaacatggacgggaatgacaacaactatagctacaattacggcgcggaaggtccgacattagacccgatactggaaggaatccgggaacatcagcttaagaatttctttaccacactgtga

SEQ ID NO: 39466 - protein, 529 aa, Unknown
  Obtained from environmental sample
  DOMAIN (181)...(518): Alpha amylase, catalytic domain
  misc_feature (1)..(529): Xaa is any amino acid
MSFGNFEISTGKAIPMGATVINEGVNFAVFSRHATLVTLILFQSHLPNSPYIEIPLNKAGSKTGDVWHCFVKGIKAGVCYLYRVDGPYQPERGLRFNQHKALIDPYAKAITSLEKWELNKCLGYDPASPQGDLSFSGENNLLTIPRCIVIDDDDFDWQGDAPLNYPLRFSVLYETHVKGLTAHPDSGVQHPGTYLGVIEKIPYFKDLGVTSLEFLPIQEFNEHEHPRRNPRTGEMLTNYWGYSTVAFFAPKESYANDHSPGAQVRDFKLMVRELHKAGIEVILDIVFNHTAEGNEQGPTFSFRGLDNPIYYILSDNKRYYQNFSGCGNTVNCNHPVVRSFIMHCLHYWVVEMHVDGFRFDLGSILGRDQQGRLMESPPMLERIAEDPILSSAKIIAEAWDAGGAYQVGWFPGGRWAEWNDRYRDNIRKYWRGDPKEIRHLATRLSGSSDLYLRDGRKPFHSINFITSHDGFTLKDLVTYNGKHNEDNGEENMDGNDNNYSYNYGAEGPTLDPILEGIREHQLKNFFTTL

SEQ ID NO: 39467 - DNA, 555 bp, Unknown
  Obtained from environmental sample
  misc_feature (1)..(555): n is a, c, g, or t
ttggccgaggtggacatttccgccaaggattttgaagctaacgctttcgaaggtttaggcgacattcgtgacaagttttacgcaacagataaaactaaaggaacggcgggaacgtatacgaggagtaacggcgaaagtttagtgtggacaagaggcggatcagccaccactgcgccagccgccgccggtactcccggacttgcgtttacgcttaaaagtgacggcaagagttacagcgtcagcaagggaacattaacagcaggatcatcttccagtctggttatacccgacacgtacaataatctgcccgtaacgactatcgccaattcagcgttcaacgaacttcctttaattcgcagtgtgaccataccagcgagcgtaatcgaaattggtttggtggcttttgccggttgcgctagccttaacagcgtaacctttgggggagcgaatactagatttgaatctcaagtattcgagggcgatttatctcaaaagtacaaagccggaggagcagggacgtacacgaaaaacggcacaacatggacgaaaaagtaa

SEQ ID NO: 39468 - protein, 184 aa, Unknown
  Obtained from environmental sample
  misc_feature (1)..(184): Xaa is any amino acid
MAEVDISAKDFEANAFEGLGDIRDKFYATDKTKGTAGTYTRSNGESLVWTRGGSATTAPAAAGTPGLAFTLKSDGKSYSVSKGTLTAGSSSSLVIPDTYNNLPVTTIANSAFNELPLIRSVTIPASVIEIGLVAFAGCASLNSVTFGGANTRFESQVFEGDLSQKYKAGGAGTYTKNGTTWTKK

SEQ ID NO: 39469 - DNA, 657 bp, Unknown
  Obtained from environmental sample
  misc_feature (1)..(657): n is a, c, g, or t
atggtgcttggtctgcttaaacccagcgccggggaaattttttatgaaggaaaaccgcgcgacatctcgacttacgccaaaaggcggaagtactggctgaatattcaggccatctttcaggatcccttttcgacctacaatatattcaacagggttgattcggtgcttctggactgcatcaggctccaggccgggcaggatggcttaaaaagtatttccaaagaagaaagatttgagaaaatgcgggaggcctgtcaatttgtaaacctgaaatttgaagagctttccaacaaatatccttttgagctttcaggcggccagatgcagcggcttatgattgcccgtatcttcatgcttaaaccaaaactgcttatagccgacgaaccgacttccatgattgacgcctgttcacgcgctactattctggaaatgcttttgaaattacgggaagaaataaacatgaccatcgtgtttattacccatgatatgggcctggcttactatatttccgatacgatttacatcatggaaaagggaatcattgtagaacgggggacagccgacgaagctatcctcaatccgaaatcggattataccaagcggcttttaagcgacgttccaaaaatataccagccttgggatttcagcgttaagtaa

SEQ ID NO: 39470 - protein, 218 aa, Unknown
  Obtained from environmental sample
  DOMAIN (1)...(179): ABC transporter
  misc_feature (1)..(218): Xaa is any amino acid
MVLGLLKPSAGEIFYEGKPRDISTYAKRRKYWLNIQAIFQDPFSTYNIFNRVDSVLLDCIRLQAGQDGLKSISKEERFEKMREACQFVNLKFEELSNKYPFELSGGQMQRLMIARIFMLKPKLLIADEPTSMIDACSRATILEMLLKLREEINMTIVFITHDMGLAYYISDTIYIMEKGIIVERGTADEAILNPKSDYTKRLLSDVPKIYQPWDFSVK

SEQ ID NO: 39471 - DNA, 684 bp, Unknown
  Obtained from environmental sample
  misc_feature (1)..(684): n is a, c, g, or t
ttgccgganaaggtatatgaaccagatacgtccgctggaaactattccgtgcgcgcatgtaagacagaaggacgtatcacttgccattttccaccacttttgaaccccaaggttcttatcgccgatgagccttcttcggcgctggatgtctcctcccaaaaaattgtgatcaagctcctgtacgacctgatggaaaaaggttttgttcgatcaatgatttttatcacccatgagctgcccctgctatacaatgttaccgatgacataatggtaatgtacgccggagaaatcgtggagcgcggaacagcgaaagaaatggtttttgatcctgtcatgccttattccaaggggttaatgaattcgatcatcgtgccggaagagggaaccaggggccatgttctaatggccattccgggtgcgccgccaaatttaaagctcaaacagtccggctgccgtttcgccgagcgttgccgtttcgcggatcctgagtgttccaaagagacaatcgccgaacagtacggcggtgcagaagggcggacttaccgttgtcgccataaactggaagaactctttcagatatacgaaaaggatctccccaatctgttggatcatgacaacatagaaagcgatggagcagacaaaaaaaagaaagaacgcaaaagacgacggagcaagcatgaatag

SEQ ID NO: 39472 - protein, 227 aa, Unknown
  Obtained from environmental sample
  DOMAIN (98)...(164): Oligopeptide/dipeptide transporter, C-terminal region
  misc_feature (1)..(227): Xaa is any amino acid
MPXKVYEPDTSAGNYSVRACKTEGRITCHFPPLLNPKVLIADEPSSALDVSSQKIVIKLLYDLMEKGFVRSMIFITHELPLLYNVTDDIMVMYAGEIVERGTAKEMVFDPVMPYSKGLMNSIIVPEEGTRGHVLMAIPGAPPNLKLKQSGCRFAERCRFADPECSKETIAEQYGGAEGRTYRCRHKLEELFQIYEKDLPNLLDHDNIESDGADKKKKERKRRRSKHE

SEQ ID NO: 39473 - DNA, 609 bp, Unknown
  Obtained from environmental sample
  misc_feature (1)..(609): n is a, c, g, or t
atgaaatttactgacggttactggcttatcagggaaggggtagaggcccattttgccgcaagtgctattgaagcggaacagcagggaaatgaactgacggtgtacgcgccggggaggcagatatgtcatagaacggatactcttggtataccgctctttacggtgcgttattccagccccatgcgtaatgttattaaggtgaagatttcccattttgagggaggagtagacagaggcccgcgatttcaattggaaagcaatcctgccgattcggcgtataaaagcgacatacgcataacagagaaagaggccgttctggaaagtggggatctttcggttgttattgagcagggtcagaactggaataatgtttttcgcggtggcggcaaggtattgaccaaaaacttaagcaaatccaccggatatatgattgacagcgaaaaagggccctttacaaaagaggagcttttactttcggttggggaacttgtgtacgggctgggcgagcgtttcgggccgcttgtaaaaacgggcagacagttgacatttggaacgccgacagcggcacggcaagcgaactggcgtataaaaatattcctttttacatga

SEQ ID NO: 39474 - protein, 202 aa, Unknown
  Obtained from environmental sample
  misc_feature (1)..(202): Xaa is any amino acid
MKFTDGYWLIREGVEAHFAASAIEAEQQGNELTVYAPGRQICHRTDTLGIPLFTVRYSSPMRNVIKVKISHFEGGVDRGPRFQLESNPADSAYKSDIRITEKEAVLESGDLSVVIEQGQNWNNVFRGGGKVLTKNLSKSTGYMIDSEKGPFTKEELLLSVGELVYGLGERFGPLVKTGRQLTFGTPTAARQANWRIKIFLFT

SEQ ID NO: 39475 - DNA, 507 bp, Unknown
  Obtained from environmental sample
  misc_feature (1)..(507): n is a, c, g, or t
atgcttgccagagtggagagcgcgttccgcatcatagaaatgcagaaagaaatcaagcagcagaaccgcgagctcaccatttatcgcgaaaaggtgcagggagaaatggaactggcgtctaggctccagatgagcctgttgccagatgtaggtaccataggcccttatcagtacacccatcgctatcagccagttggcgggataggtggggacatttacgccatcactcccctgccttttggcggcgctgctcttctagtagcggacgtgagcgggcacggagtgacggccgcccttatctcggccattgtcaagacgagcttcgattaccacatccgcacaaggggcgggccgctggcttgggcgcagagcatgaacagagacctaaagcgcaatacgatggacgagcagttcgcgacggcacttttggccaagttggacccagcggccggcaccctcacatacgtgtgcgccggacacgtgccgccgatttgcatctcccaatga

SEQ ID NO: 39476 - protein, 168 aa, Unknown
  Obtained from environmental sample
  misc_feature (1)..(168): Xaa is any amino acid
MLARVESAFRIIEMQKEIKQQNRELTIYREKVQGEMELASRLQMSLLPDVGTIGPYQYTHRYQPVGGIGGDIYAITPLPFGGAALLVADVSGHGVTAALISAIVKTSFDYHIRTRGGPLAWAQSMNRDLKRNTMDEQFATALLAKLDPAAGTLTYVCAGHVPPICISQ

SEQ ID NO: 39477 - DNA, 879 bp, Unknown
  Obtained from environmental sample
  misc_feature (1)..(879): n is a, c, g, or t
atgggggactactcaggctaccctcccctaatccacatgcttttggataatcccggcggaaccttttctttgcggctgctaaaccccaaaggcattcacgttatggccatctccaggcaaatttataacggctggcatattacgctcgcgactccgataagcgcatattacagcgatgtatattcaatggcgtttacgctttctgttttgggtatcctgtttatgggcgtcctgataataattctgatccggttgagcatttcaaaggcccgttcagacgagcaaaatttgggaaaatcagccttcctcgcgcgtatgagccatgagattcgtactccgatgaattccatactcggcatggccgagctaatccagcgaaagaaaatttccagcgaaattcaggaatatatcgaaataatcagccagtccggaaacaacctcctggcaattataaatgacattctggatttttcaaaaatagaatccggcaggcttcagatccaaaaccggaattatcaattggcctctgtaattaacgatatggtcaacataatgcgtcccagggtcgcggagaaatccctggatttccttgtaaatgttgaaagcgccataccgggacagctttacggagacgatacgaggctgcgccagattttgacaaaccttctttccaacgcggtaaagtatacccgtaaaggttatgtttctctggaaatagggatggaaaaaacaggtgaaaaagccattaaactgatattcgcggtcaaagacagcggtatcggaatcaagagcgaagacaaggataaactttttaacgaatttgccaggatggattcagtggcaaacattggcatagaaggaaccggtcttggtttgtaa

SEQ ID NO: 39478 - protein, 292 aa, Unknown
  Obtained from environmental sample
  DOMAIN (210)...(291): Histidine kinase-, DNA gyrase B-, and HSP90-like ATPase
  misc_feature (1)..(292): Xaa is any amino acid
MGDYSGYPPLIHMLLDNPGGTFSLRLLNPKGIHVMAISRQIYNGWHITLATPISAYYSDVYSMAFTLSVLGILFMGVLIIILIRLSISKARSDEQNLGKSAFLARMSHEIRTPMNSILGMAELIQRKKISSEIQEYIEIISQSGNNLLAIINDILDFSKIESGRLQIQNRNYQLASVINDMVNIMRPRVAEKSLDFLVNVESAIPGQLYGDDTRLRQILTNLLSNAVKYTRKGYVSLEIGMEKTGEKAIKLIFAVKDSGIGIKSEDKDKLFNEFARMDSVANIGIEGTGLGL

SEQ ID NO: 39479 - DNA, 969 bp, Unknown
  Obtained from environmental sample
  misc_feature (1)..(969): n is a, c, g, or t
atggcgaggtccgacatggcattaccacgcgctacgcctacacaaggttcttgtgtgggcacaaagctttcgacgggcgctcccgtcgcgaacgccagggtggagcttcttgaaggaaacaccgtggtcaggcaaggcactaccaacgcccaggggctggctgtttttgagttccgcgacggggagtttgtctcccgttttaccgatctgtcccccagctacggtgtaagcgactggtcaaaaggttttcgcattcgggttttacaggacggcggagctatggccgggggagatcaggcggaatttgtcccgaacaacagccacaatatatggcgcttcccggttgaatccgccgtaagcccgttcaatgcagaaagcgacagagcactggtttttatgtttaccgaccgcgggctctacaggccgggagagaccgtcactttccggggcatagacaggaacctttcaaggggaaagttcttcccttacgaaggcaattacagcattgaggtttcaaccggcggacgcaacgccccggtaattgcttcgcttggcgggaaaaccaccggaagcggcgggagccacggctcttttgccattcccgcaaaccttgacccaggccgttacgttatgcgctacaagcgccttgagggcggcggacaggaatactcgattacctttttggtcgccaacttcgagcggctccgtgttgaagcgtccttaaaattccccgatctcacgtattatcagggcgaanaaatatcgggccgtctttccgcctcttacctttcaggcggcggcctttcaggcgctccctatacatattactggagccgcgagcctgcgggcttcaatccgggaggcaactggcaatactggcgtttcggcccggaaacttacgacggccgttattttgccgcagacggtgagggacactggcccggacggcagcgccgacataacgcataa

SEQ ID NO: 39480 - protein, 322 aa, Unknown
  Obtained from environmental sample
  DOMAIN (4)...(300): Alpha-2-macroglobulin family N-terminal region
  misc_feature (1)..(322): Xaa is any amino acid
MARSDMALPRATPTQGSCVGTKLSTGAPVANARVELLEGNTVVRQGTTNAQGLAVFEFRDGEFVSRFTDLSPSYGVSDWSKGFRIRVLQDGGAMAGGDQAEFVPNNSHNIWRFPVESAVSPFNAESDRALVFMFTDRGLYRPGETVTFRGIDRNLSRGKFFPYEGNYSIEVSTGGRNAPVIASLGGKTTGSGGSHGSFAIPANLDPGRYVMRYKRLEGGGQEYSITFLVANFERLRVEASLKFPDLTYYQGEXISGRLSASYLSGGGLSGAPYTYYWSREPAGFNPGGNWQYWRFGPETYDGRYFAADGEGHWPGRQRRHNA

SEQ ID NO: 39481 - DNA, 402 bp, Unknown
  Obtained from environmental sample
  misc_feature (1)..(402): n is a, c, g, or t
gtggaggatgagaattacagttatagcgatcctgacagcgtaagtctcatagctgacagcgcggtctttgacggtttaaatcaaaacacgctggacaacaatatccgcgttattaagcgcgtcgcgcagatactcaacaaattcaggaattataaagtaacgattgaaggccacgcgaatccgactaccgcgcccggcccatcccgtgaacaggaggagccgtcactgaaggctctcagtgaaaagcgcgcgggatttattcttgagcagcttgtccgtaacagcgtcgcccgaaaccggctctcattcaccggcgcgggcggttccatgcccttagcttcctttgaggatcgttccggctggtggaaaaacaggcgcgtggactttattttgagtaagtag

SEQ ID NO: 39482 - protein, 133 aa, Unknown
  Obtained from environmental sample
  DOMAIN (22)...(125): OmpA family
  misc_feature (1)..(133): Xaa is any amino acid
MEDENYSYSDPDSVSLIADSAVFDGLNQNTLDNNIRVIKRVAQILNKFRNYKVTIEGHANPTTAPGPSREQEEPSLKALSEKRAGFILEQLVRNSVARNRLSFTGAGGSMPLASFEDRSGWWKNRRVDFILSK

SEQ ID NO: 39483 - DNA, 771 bp, Unknown
  Obtained from environmental sample
  misc_feature (1)..(771): n is a, c, g, or t
atgaaaatagcgattatcggttacggaaaaatgggaaagatggtcgagcaggcggcaatctcccagggccatacgattgcggctatcgtggatccgctggtgaaagaggcgggtttgtcagcacaccgtgaaataaccggagaccttggcggggcggatgccgcgattgaatttacccagcccggcaccgccctcgcgaatattaaagcgctggcgcaaaggaagattccctcggtcataggcactaccggctggcatgacaagctggacgaggcccggcaggcggtggaggccgccggagcgtcgcttatttgggcgacaaatttttcgcttggggtgaatattttttaccgtgtcgcgtggtatgccgcccaacttgttgattctttccccgaatatgacgtaggcggctttgagtcccatcacaataaaaagctggacagcccttcgggaacggcaaagacccttgtggaaggagcgcttgcccgggttgggcgaaaggacaaggccgtctgggaaacgctggatcgccgcccgcagccgaatgagctccatttccccagcctgcgtataggctcggtacccggcatacacagcctcttttttgattccccggctgacagcatcgaaattacccacaccgcccgcagccgcgagggtttcgcttccggggctgtccgcgcggcaagctggctggtaaaaggcaagaccggcatacgtaaaggctttttctccattgacgatatgctaaaagaggtgctggggagttaa

SEQ ID NO: 39484 - protein, 256 aa, Unknown
  Obtained from environmental sample
  DOMAIN (1)...(109): Dihydrodipicolinate reductase, N-terminus
  misc_feature (1)..(256): Xaa is any amino acid
MKIAIIGYGKMGKMVEQAAISQGHTIAAIVDPLVKEAGLSAHREITGDLGGADAAIEFTQPGTALANIKALAQRKIPSVIGTTGWHDKLDEARQAVEAAGASLIWATNFSLGVNIFYRVAWYAAQLVDSFPEYDVGGFESHHNKKLDSPSGTAKTLVEGALARVGRKDKAVWETLDRRPQPNELHFPSLRIGSVPGIHSLFFDSPADSIEITHTARSREGFASGAVRAASWLVKGKTGIRKGFFSIDDMLKEVLGS

SEQ ID NO: 39485 - DNA, 636 bp, Unknown
  Obtained from environmental sample
  misc_feature (1)..(636): n is a, c, g, or t
atgaacggagtgtatttagaaaaaactgagaataaaatagtaatggtagcaactgatggacgcaggcttgcattcgttgaaaaagacgcagataatatacagaattttcccggaatcatagtacatcctaaaattttaaatattgtaacaaagagagcgggagatgagggtcttattgccatttctgttaccgacaaaataatttttattcgtttaggttcatacagtttttcttcagttttacttgaaggacaattccctaattaccgtaaagttatacctgaagaacagcccaattctctttctgtgaatcgtatcgaaatgcttgacgcccttcggcgcgtatctttgcttgtggaacaaaagtcacaccgcatatatctggggcttaaaccgggagtaatggagatttattctgaagagggtgaaattggtgatgccaaggaagaaattccctgcaaatatgatggggaagaagtcgctctggctctgaattaccgctatatagaagagccgtttaagaccataaacagtgatgaaatttgtatacgtttttcgggaccaagcaaggcaataaccatagtgccggttcctaaaacagattttctgcacgttgtaatgccgatgcagtcatag

SEQ ID NO: 39486 - protein, 211 aa, Unknown
  Obtained from environmental sample
  DOMAIN (1)...(88): DNA polymerase III beta subunit, central domain
  misc_feature (1)..(211): Xaa is any amino acid
MNGVYLEKTENKIVMVATDGRRLAFVEKDADNIQNFPGIIVHPKILNIVTKRAGDEGLIAISVTDKIIFIRLGSYSFSSVLLEGQFPNYRKVIPEEQPNSLSVNRIEMLDALRRVSLLVEQKSHRIYLGLKPGVMEIYSEEGEIGDAKEEIPCKYDGEEVALALNYRYIEEPFKTINSDEICIRFSGPSKAITIVPVPKTDFLHVVMPMQS

SEQ ID NO: 39487 - DNA, 357 bp, Unknown
  Obtained from environmental sample
  misc_feature (1)..(357): n is a, c, g, or t
atggcagcggggaattcgttgtccggtccccatcgtgaccggtatatgtacgctctgggaggtgatgattttgccggtactgcttcaaccgggcagcgccgtcttttagccctgctgttacgggttgcccaggcccgccgcttttctgaaatgaccggcagaaaccccatactattgctggacgatgtactgctggaaatggacggcgaaaaacggcgccgttttattgcggcgctgccggactatgatcaagcgttttatacttttttgccggaagagccttttcagcactaccgcacggaagatacgctggtgtattatgtcaaagacgggcgaatggaggcggaagggcaatga

SEQ ID NO: 39488 - protein, 118 aa, Unknown
  Obtained from environmental sample
  misc_feature (1)..(118): Xaa is any amino acid
MAAGNSLSGPHRDRYMYALGGDDFAGTASTGQRRLLALLLRVAQARRFSEMTGRNPILLLDDVLLEMDGEKRRRFIAALPDYDQAFYTFLPEEPFQHYRTEDTLVYYVKDGRMEAEGQ

SEQ ID NO: 39489 - DNA, 561 bp, Unknown
  Obtained from environmental sample
  misc_feature (1)..(561): n is a, c, g, or t
ttgccggatcaagttgccggaagcgagtgtaattataaatatgaaaaagatacatatatacttaacggatttattgactgtgttctaaaagaaaatagagatggaattgataaatatgttattgtcgattttaagttaaaaaaattacccagccgaagcgattgcacggcggaagatgaaacgcctcttgcggactttcagcttccaatgtatataactttaatcgaaaaaaacgaacaattcgacgtatacaccgctctcttttacagcattatcgatcaaaaatccgaagtaataatcggaacaatctacaatgaaaacacaaataaaaccattcccgctaaagaagaagatcaaattgaccgaagtaaggaacgttataagaaaatttttgaagaattccaaaataagacggagcagtttacgaatgaaatatcatcaggcgattttactgtttttccgcagagtaacagtgagtgtaacgattgcagctatcagcgtatatgccgaactgtttatattatcggacgagaaaacaataattctttggggaagcattga

SEQ ID NO: 39490 - protein, 186 aa, Unknown
  Obtained from environmental sample
  misc_feature (1)..(186): Xaa is any amino acid
MPDQVAGSECNYKYEKDTYILNGFIDCVLKENRDGIDKYVIVDFKLKKLPSRSDCTAEDETPLADFQLPMYITLIEKNEQFDVYTALFYSIIDQKSEVIIGTIYNENTNKTIPAKEEDQIDRSKERYKKIFEEFQNKTEQFTNEISSGDFTVFPQSNSECNDCSYQRICRTVYIIGRENNNSLGKH

SEQ ID NO: 39491 - DNA, 1479 bp, Unknown
  Obtained from environmental sample
  misc_feature (1)..(1479): n is a, c, g, or t
atgtcagaaggtacagccattaataccggaattgttaatcctgttaacgatctgggggcgttgctgttgggggtggaaaaacccgcccgctattgcggcggcgaatacggacgccttgcccgcacagacgcccctctgcaaacccttatcgcctttcccgacctctatgaaataggaatgtccaaccaggctttgaggattatttacaacggcctcaaccgaatccccggcgtttcctgcgaccgggcctttgcccccgcgccggattttgaacaactgctccgcggccggggcttgccgctgtacggcctggacaccggaatcagtttaaaaaactttgacctcgtgctgtttaccctgggttacgaactggggatttccggcattcttgccatgcttgacgtttccggcattcccctgcgctcagaactgcgcggcgaatctgatccgctgctcatagcaggaggacccgccgtgtccaatcccctgccctacagcgcttttatcgacgctttctggataggcgaagcggaagcgggtttttttgatctggcgcaagaattattaacaataaaacaaaacggcgggagccgcgccgctttgtttgaacatataaaaagtcatccccatatatgggtgaaaggaaaagaacggactatccgcgccgtggataattcttgtttatcggatgcctccgatttcgcggtttaccccgtccccagcatgaagaccgtgcagcaccacggcatacttgaaatcatgcggggctgtcccaacggctgccgtttttgccacgcgggttactggtaccgcccgatgcggcaaaaaacacaggaagcccttgtccgcgaagccgaggcttttatcactcagggcggttatcgcgagataagcctttcctcgctttccagcggggactacgcgggcattggggaactcgtcgatactttgaaccagcgcttttccggcaggcacgtttcgtttcaactgccctctctgcgggtatcaaccttctccctttccctgctggaaaaaatttcccaaacgcgcaagagcggcctgacatttgccattgaaactccccgcgacttttggcagttggcaatcaacaaacaggtaacggaaaattcggtggtggagattctcagggaagcgaaacgaaacggctggcgcggggcaaaattttattttatgatcggcctgcctgttcccccgctgccggaaggggacgaggggggatattccgaagaaacggaaattgttaattttgttactactattgcccgcaagacagccatgcacttcaatgttaatgtgggaatatttgtacccaaaccccatacgccctaccagtgggcgcggcagattgacagcgagagcgccgccgcaaaacttgaatttatccgctcgcggcttaagcctctgggacacaaggtcagtatttccgaccccctggtgtcaatgctggagggcatttga

SEQ ID NO: 39492 - protein, 492 aa, Unknown
  Obtained from environmental sample
  DOMAIN (251)...(415): Radical SAM superfamily
  misc_feature (1)..(492): Xaa is any amino acid
MSEGTAINTGIVNPVNDLGALLLGVEKPARYCGGEYGRLARTDAPLQTLIAFPDLYEIGMSNQALRIIYNGLNRIPGVSCDRAFAPAPDFEQLLRGRGLPLYGLDTGISLKNFDLVLFTLGYELGISGILAMLDVSGIPLRSELRGESDPLLIAGGPAVSNPLPYSAFIDAFWIGEAEAGFFDLAQELLTIKQNGGSRAALFEHIKSHPHIWVKGKERTIRAVDNSCLSDASDFAVYPVPSMKTVQHHGILEIMRGCPNGCRFCHAGYWYRPMRQKTQEALVREAEAFITQGGYREISLSSLSSGDYAGIGELVDTLNQRFSGRHVSFQLPSLRVSTFSLSLLEKISQTRKSGLTFAIETPRDFWQLAINKQVTENSVVEILREAKRNGWRGAKFYFMIGLPVPPLPEGDEGGYSEETEIVNFVTTIARKTAMHFNVNVGIFVPKPHTPYQWARQIDSESAAAKLEFIRSRLKPLGHKVSISDPLVSMLEGI

SEQ ID NO: 39493 - DNA, 441 bp, Unknown
  Obtained from environmental sample
  misc_feature (1)..(441): n is a, c, g, or t
atgcttaccaatttccagaccgtgcgcaagtcaattaagcaaattgacaaaatagacgatatggaaaatcagggtattttcaaacagatgagcaaaaaagaagttttggataaaaaccgcgagcgttcaaaactcttgaccgtttttggcggtatcagagagatgagccagctacccggtgttatagttatcacggatttaaaccacgagcatattgcggtttctgaggcacgtcgtttgcgcattcccataattggaatttgcgacaccaatgttaatcccgaactagttcaatatcccattcccgcaaatgacgatgctctaagctctgtttcgctcattgtggattatttggcggcaaacacaactccaaggcaaaaccagcccgccgctaacaccaaagaaaagaccgcagaaaaagcggccgaggagaaagcataa

SEQ ID NO: 39494 - protein, 146 aa, Unknown
  Obtained from environmental sample
  DOMAIN (1)...(126): Ribosomal protein S2
  misc_feature (1)..(146): Xaa is any amino acid
MLTNFQTVRKSIKQIDKIDDMENQGIFKQMSKKEVLDKNRERSKLLTVFGGIREMSQLPGVIVITDLNHEHIAVSEARRLRIPIIGICDTNVNPELVQYPIPANDDALSSVSLIVDYLAANTTPRQNQPAANTKEKTAEKAAEEKA

SEQ ID NO: 39495 - DNA, 804 bp, Unknown
  Obtained from environmental sample
  misc_feature (1)..(804): n is a, c, g, or t
atggcagctataaccgcatctatggtaaataccctgcgcgaaaaaacaggcgtaggtatgatgaaatgcaaagaagccctcacagcttgcgatggcgaccttgaaaaagcagttgagtacctgcgcaagcaaggtgccgatgttgccttgaaacgcgcagacaaagacgcaaaagaaggttccgtatttgttggcagcaacgacacaaaagcctatgcctttgtgctaacctgcgaaacagattttgttgccaaaggcgatgattttataaaactaggtgctgatattgccgaagcccttaaagcgagcaaagcgagcacagtagaagaaacgctcagtttgccggttggctcaatcaccgttaaagaccgcatatccgaggttcttgcaaaaataggcgagaaaattgaaatcagcaaatttgcaatttttcccattggcgcaaacgaagttgttgcctattattctcacagcgatgctcacagcgttggtaaaataggcacagttgtaaagctcgcttttgaaggcagcccaaatggcggcaaagaggccgttcaagctgtggcaaaaaccatcgccttgcacgtaacgatgtctaacccagttgcattaaccgaaagcgaattgaagccggaactcattgaaaaagaaaagggaattgcgctggagcaggttaaaaacgaaggcaaaaccaaagctgaatttttagaccgtgcagtggaaggtcgcctcaaaaaatccctaaagcaactttgccttttggaacaggccttttacaccgacgacaaaaaagaccgtttctaa

SEQ ID NO: 39496 - protein, 267 aa, Unknown
  Obtained from environmental sample
  DOMAIN (4)...(44): UBA/TS-N domain
  misc_feature (1)..(267): Xaa is any amino acid
MAAITASMVNTLREKTGVGMMKCKEALTACDGDLEKAVEYLRKQGADVALKRADKDAKEGSVFVGSNDTKAYAFVLTCETDFVAKGDDFIKLGADIAEALKASKASTVEETLSLPVGSITVKDRISEVLAKIGEKIEISKFAIFPIGANEVVAYYSHSDAHSVGKIGTVVKLAFEGSPNGGKEAVQAVAKTIALHVTMSNPVALTESELKPELIEKEKGIALEQVKNEGKTKAEFLDRAVEGRLKKSLKQLCLLEQAFYTDDKKDRF

SEQ ID NO: 39497 - DNA, 381 bp, Unknown
  Obtained from environmental sample
  misc_feature (1)..(381): n is a, c, g, or t
atgacagaatcggccgaggatgctctgataaaacttttagcgggggccggcgaattacagatagaaacctcaggaggcgcgttaggcgatgccttaggcgatgccttgggcggaagacctgcgggctccatcggtattgcggggacgggctttgaaatttttgtgtttgtcgcagaagctgttgataccgccgcgctaaagaaaaaattatcaggcgaccttgagcgcgatcgtaagtatatagaaagcatccgcgcaaaacttgccaatgaacaatttgttaaaaacgcgccggcagagcttgtggaagaacagagaaacaaactggaagagtccgtaaggcgcaccgaaaaacttgcaggatatttaagggatttataa

SEQ ID NO: 39498 - protein, 126 aa, Unknown
  Obtained from environmental sample
  misc_feature (1)..(126): Xaa is any amino acid
MTESAEDALIKLLAGAGELQIETSGGALGDALGDALGGRPAGSIGIAGTGFEIFVFVAEAVDTAALKKKLSGDLERDRKYIESIRAKLANEQFVKNAPAELVEEQRNKLEESVRRTEKLAGYLRDL

SEQ ID NO: 39499 - DNA, 495 bp, Unknown
  Obtained from environmental sample
  misc_feature (1)..(495): n is a, c, g, or t
atgggcagggcgaccgccgttatcgcgggggaaaacccggacaaaaactacgtcgggcttgaaatccacaaaccgggcataggccgcctcctctgggaaatagagcggcgttccctttccaatgtcaggataatcgaacatgatgcgaccgaagtttttgaaaaaatgttcccggaaaattcgcttggcggggcgcatatttttttccccgacccctggccgaaaaaacgccatcacaagcgcaggcttatacagcggccttttacggattgtatcgcctcaaggttacagccgggggcatacgtctacatggtcagcgactggctggactacgctcattgggctttgtctgtgttaaccgatactaaaggcttggttaacgaatatgaaggctttagcccgccccaattatggcggcccctgacgagttttgaaaaaaaagggcttgacaagaaacatgaaataaaggaattgtttttcaggcggagcttatga

SEQ ID NO: 39500 - protein, 164 aa, Unknown
  Obtained from environmental sample
  DOMAIN (1)...(163): Putative methyltransferase
  misc_feature (1)..(164): Xaa is any amino acid
MGRATAVIAGENPDKNYVGLEIHKPGIGRLLWEIERRSLSNVRIIEHDATEVFEKMFPENSLGGAHIFFPDPWPKKRHHKRRLIQRPFTDCIASRLQPGAYVYMVSDWLDYAHWALSVLTDTKGLVNEYEGFSPPQLWRPLTSFEKKGLDKKHEIKELFFRRSL

SEQ ID NO: 39501 - DNA, 795 bp, Unknown
  Obtained from environmental sample
  misc_feature (1)..(795): n is a, c, g, or t
gtggtctacccggagctatctactatgctcctgacgaccataccggagagggccgcgctgatggccgagatgggggtggattacctgtttttggcgcgttttgacgaaaaattccgggagatggggcaggacgagttcgtcgaaaaggttctcgtccgcagacttagggcggcggcttgggtcatgggcgaggggcaccacgtcgggcgcgatcgggagggcggaaagaaaaatttacactttgtttgcggcaaataccatattagtactttcagcgagccgccggagatgtgccgcggggcgatgatttcgtccacacggatacgcgccatggtgggagacggccacttacgggaggcgcgggagatgctcgggcgcccgtatctgatagcggcgcagcgcgtgaagggcctgcatatcgccaccgagcgcttgagttgccctacgctgaactttaggatgccggagacgggtaaggttctgccgccggcgggcgtatacgcggcggagcttgaaacgggtaccggcggcggcggcaaaaaacggctgtcgggcgccttgtacttcggcgactgcccgacctacgagggccgcgacacgcactttgagtttcacgcgctagacttcggcggcgtcggcgccgccgagccggccgtgggcgagaacgtgagtctgtggttgcacgagtacatacgcccgggcgtcgcgtttccaaacgaagacgctttaaaggctcaaatcgcgctggacgttgacaggataagagatatttttattgacaaaattgaacgttaa

SEQ ID NO: 39502 - protein, 264 aa, Unknown
  Obtained from environmental sample
  DOMAIN (123)...(259): Riboflavin kinase
  misc_feature (1)..(264): Xaa is any amino acid
MVYPELSTMLLTTIPERAALMAEMGVDYLFLARFDEKFREMGQDEFVEKVLVRRLRAAAWVMGEGHHVGRDREGGKKNLHFVCGKYHISTFSEPPEMCRGAMISSTRIRAMVGDGHLREAREMLGRPYLIAAQRVKGLHIATERLSCPTLNFRMPETGKVLPPAGVYAAELETGTGGGGKKRLSGALYFGDCPTYEGRDTHFEFHALDFGGVGAAEPAVGENVSLWLHEYIRPGVAFPNEDALKAQIALDVDRIRDIFIDKIER

SEQ ID NO: 39503 - DNA, 600 bp, Unknown
  Obtained from environmental sample
  misc_feature (1)..(600): n is a, c, g, or t
ttgtttctgcttgcaactatgatcgggtatatgcacgaacaggaagggaaattttcggttgctgacgcgctgacaaaaataaacagtaaattaatacgccgtcatcctcatgtatttaacgggttacaagtaaaagacagcgcagaagttcttgataactgggcggctataaaaataaatcaggagggacgcaaacctaaagattcgatacttgatgaagtaaaagccggttttcctccgatggatcgcgcgtatatgctccagaaaaaagccgcaaagtttggttttgactggccggacacggcgggagtaattgaaaaaatccgggaagaattaaatgaagcgcaggaagcggcgcattccgaaacggaagcggacaaacttgaagaagaactcggcgatttgcttttttctgtcatcaatctgtgccgttttttgaaggtagagccttctgtcgcccttcgccgtaccaacggaaagtttattcagcgttttggatatgtagaaaaaaaaatgaaagaagcgggacatgaaatgaaaaaagaaaatctggctattatggataaattttggaatgaggcaaaaaacaacaacttttaa

SEQ ID NO: 39504 - protein, 199 aa, Unknown
  Obtained from environmental sample
  DOMAIN (102)...(165): MazG nucleotide pyrophosphohydrolase domain
  misc_feature (1)..(199): Xaa is any amino acid
MFLLATMIGYMHEQEGKFSVADALTKINSKLIRRHPHVFNGLQVKDSAEVLDNWAAIKINQEGRKPKDSILDEVKAGFPPMDRAYMLQKKAAKFGFDWPDTAGVIEKIREELNEAQEAAHSETEADKLEEELGDLLFSVINLCRFLKVEPSVALRRTNGKFIQRFGYVEKKMKEAGHEMKKENLAIMDKFWNEAKNNNF

SEQ ID NO: 39505 - DNA, 405 bp, Unknown
  Obtained from environmental sample
  misc_feature (1)..(405): n is a, c, g, or t
atggcggagttcgagctgaaacgccttaaaaacgcgggttttgaatcagcatccatgtataacgctatggccttttccgcgtatctccagaagcgttaccgtcaggctgtagattattatgaaagagctctggagcttgatattaacaacgctaccgcaatgaacagtatgggttttattcttgttgacaggggatttgacaccattaaggggttgatgctttgccgcaaggcggttgacatcagaccccaaaacgcagcctatatggattccctgggatgggcctgttacaaatgcggggacatggcggaagcccgaagctggctgcaaaaggcgatggcctgtgctcctaaggagaacgaaattcgggaacactacagaatagttacaggaggggccgcgtga

SEQ ID NO: 39506 - protein, 134 aa, Unknown
  Obtained from environmental sample
  DOMAIN (17)...(50): Tetratricopeptide repeat
  misc_feature (1)..(134): Xaa is any amino acid
MAEFELKRLKNAGFESASMYNAMAFSAYLQKRYRQAVDYYERALELDINNATAMNSMGFILVDRGFDTIKGLMLCRKAVDIRPQNAAYMDSLGWACYKCGDMAEARSWLQKAMACAPKENEIREHYRIVTGGAA

SEQ ID NO: 39507 - DNA, 444 bp, Unknown
  Obtained from environmental sample
  misc_feature (1)..(444): n is a, c, g, or t
atggcgagagagacggtacaaagttatatattagacacttaccgtatttttatagaaaaagttgccgcgggacgcggtatggacgcggaaaaagtggaaactgtagcgcagggcagaatattttcaggtacaagagcgcttgaagcaggattaattgacagtataggcactctttccgatgctttgcgaatggcgcaaaagttagctgaaataccggaaaatagaacagtcctttatagaaaatatcctgaaccgggttttttggaaaaacttgttaatcgttttccttttgcaaagattcttttaaaaaataaaaacagccaaacaaatacggcttcgttatttacaggactatttttgtcagatgatattcgttatcggcttgagaaaaacggtcaggttatgcctattttgccattagagttttctttgcttaggaaatag

SEQ ID NO: 39508 - protein, 147 aa, Unknown
  Obtained from environmental sample
  DOMAIN (1)...(72): Peptidase family S49
  misc_feature (1)..(147): Xaa is any amino acid
MARETVQSYILDTYRIFIEKVAAGRGMDAEKVETVAQGRIFSGTRALEAGLIDSIGTLSDALRMAQKLAEIPENRTVLYRKYPEPGFLEKLVNRFPFAKILLKNKNSQTNTASLFTGLFLSDDIRYRLEKNGQVMPILPLEFSLLRK

SEQ ID NO: 39509 - DNA, 630 bp, Unknown
  Obtained from environmental sample
  misc_feature (1)..(630): n is a, c, g, or t
gtggtactgatagagcatcaatcgaccataaaccccaatatgccgctcagaatgttgctctatatagcaatgtgttacatacagctgactgatgacgtggatatatacggacgcacgcggaaaacaattccccgcccggagtttatcgttttatataacggcgaggaagaacaaccggaagaggtagtattgaagctgtcagatatgtttgccgcctgtgatatggaataccctataaatcttgaacttatcgtacgtgtgtacaacataaataaaggccataaccccaaaatggcgcaacggagcgtgacgctcaacggatatgaggtatatatagcaaaagttcgcgaatacggcaagacgatacgcattgaacaagcggttgctcgtgctactgatgagtgtataaaagaagatattttagcggattttttaaaacttaatagaaaggcggtacaaaatatgctgacagccgaatgggattccgaagtagaaaagagggtcataagagaggagacgcggtgggaggcgggtatgaagattgcggggcgccttaaagccaaaggtatgagcgtagatgaaattatcgaactaaccgaactttcggtagacgatgttttaaaggcgtga

SEQ ID NO: 39510 - protein, 209 aa, Unknown
  Obtained from environmental sample
  misc_feature (1)..(209): Xaa is any amino acid
MVLIEHQSTINPNMPLRMLLYIAMCYIQLTDDVDIYGRTRKTIPRPEFIVLYNGEEEQPEEVVLKLSDMFAACDMEYPINLELIVRVYNINKGHNPKMAQRSVTLNGYEVYIAKVREYGKTIRIEQAVARATDECIKEDILADFLKLNRKAVQNMLTAEWDSEVEKRVIREETRWEAGMKIAGRLKAKGMSVDEIIELTELSVDDVLKA

SEQ ID NO: 39511 - DNA, 1203 bp, Unknown
  Obtained from environmental sample
  misc_feature (1)..(1203): n is a, c, g, or t
ttgcgcccggcccgtctcggcggcgttatccgcaaggggtctttcctgtccgcgcccgacggcggcaaggcgatccgccgcaatgcccccggctgtgagggcatcgcgcacggcccgcgcgcgaccctccgaaagcagcttgttgttctccggcgtccccacggagtccgtatgcccttcaacgagcagacgcatgtccggcttctcccgcatcatggtgacgatttcggcgatcaccggcagggattccggcttgattgccgtctcggcggtatcaaaatggatatacagggccacatgcccgatctgttcaagggccgtcgacatatccgctgcggtgacgagcagcggcgcctcaactgcgggagcgggcgcagatgccgttaccgccgtggcgggtgggggcaccgcaatcgtggaggcagacaagggaattgcggacgttttcgcaaccatgtacgctccccctgtcgcgccggccaaggtgagcataaacaacaccaccggcaaaaccagtatcttcatatccgccccgccggactttttttccgcttcctgcaccgtaccgctcatacatacttctcctttctccgttgttctccatccattgcaataccgggcctgcaaaaaggacgcagcctcttgccgtcgtcatgcggcatggagcgttcctcgtccttccgttgccgaagacaggatcgcacatatcaggacgggtgttccgttgcctgggcaacaacggcggcaattttttccgaagccgtccgtgaccgggctttgcggctattgctttcccccttccggccgatagagccttgcaggcgtgccgcgtcattcccgttcccaggcacaggcccatcggggaatacgttgcgtccgcccctcggagcgccgcccatgaacaataatctcctgaatatggccctgcagctttccgtgcaggacatgttttccggctcctggttttccggcgcaatgatgaaccagatttggacggaaatgatgcgcgccggcgtgaacggactcctccggaacacgggcggcgccggactgccgggcgctttgggcggcagcctgcgcggggatgcggccatgctgcgccaggcatcctccaacgtctcggaagcgcagaacatgatgaacatggcggcgaacgccgccggaagcatcgcagggctgctcaaggaagctcggccgatctga

SEQ ID NO: 39512 - protein, 400 aa, Unknown
  Obtained from environmental sample
  misc_feature (1)..(400): Xaa is any amino acid
MRPARLGGVIRKGSFLSAPDGGKAIRRNAPGCEGIAHGPRATLRKQLVVLRRPHGVRMPFNEQTHVRLLPHHGDDFGDHRQGFRLDCRLGGIKMDIQGHMPDLFKGRRHIRCGDEQRRLNCGSGRRCRYRRGGWGHRNRGGRQGNCGRFRNHVRSPCRAGQGEHKQHHRQNQYLHIRPAGLFFRFLHRTAHTYFSFLRCSPSIAIPGLQKGRSLLPSSCGMERSSSFRCRRQDRTYQDGCSVAWATTAAIFSEAVRDRALRLLLSPFRPIEPCRRAASFPFPGTGPSGNTLRPPLGAPPMNNNLLNMALQLSVQDMFSGSWFSGAMMNQIWTEMMRAGVNGLLRNTGGAGLPGALGGSLRGDAAMLRQASSNVSEAQNMMNMAANAAGSIAGLLKEARPI

SEQ ID NO: 39513 - DNA, 666 bp, Unknown
  Obtained from environmental sample
  misc_feature (1)..(666): n is a, c, g, or t
ttgcaggcccggtattgcaatggatggagaacaacggagaaaggagaagtatgtatgagcggtacggtgcaggaagcggaaaaaaagtccggcggggcggatatgaagatactggttttgccggtggtgttgtttatgctcaccttggccggcgcgacagggggagcgtacatggttgcgaaaacgtccgcaattcccttgtctgcctccacgattgcggtgcccccacccgccacggcggtaacggcatctgcgcccgctcccgcagttgaggcgccgctgctcgtcaccgcagcggatatgtcgacggcccttgaacagatcgggcatgtggccctgtatatccattttgataccgccgagacggcaatcaagccggaatccctgccggtgatcgccgaaatcgtcaccatgatgcgggagaagccggacatgcgtctgctcgttgaagggcatacggactccgtggggacgccggagaacaacaagctgctttcggagggtcgcgcgcgggccgtgcgcgatgccctcacagccgggggcattgcggcggatcgccttgccgccgtcgggcgcggacaggaaagaccccttgcggataacgccgccgagacgggccgggcgcaaaacaggcgggtggaacttgtgcgggtgaatttcttttga

SEQ ID NO: 39514 - protein, 221 aa, Unknown
  Obtained from environmental sample
  DOMAIN (116)...(211): OmpA family
  misc_feature (1)..(221): Xaa is any amino acid
MQARYCNGWRTTEKGEVCMSGTVQEAEKKSGGADMKILVLPVVLFMLTLAGATGGAYMVAKTSAIPLSASTIAVPPPATAVTASAPAPAVEAPLLVTAADMSTALEQIGHVALYIHFDTAETAIKPESLPVIAEIVTMMREKPDMRLLVEGHTDSVGTPENNKLLSEGRARAVRDALTAGGIAADRLAAVGRGQERPLADNAAETGRAQNRRVELVRVNFF

SEQ ID NO: 39515 - DNA, 567 bp, Unknown
  Obtained from environmental sample
  misc_feature (1)..(567): n is a, c, g, or t
atgcctatcaaggtcaacttcagcggccgcgccctgaaatatgccgaggaagaaatcgccgttgtcgcggacgtcatgcggcacggagaaaccctgacccagggccgccatcttcaggaatttcagaggaagttcgccgcgtaccaaggcttgccggaaagctcctgctttgcggtcatgaacggcgtgtccgccctggaactttccgcccaactgtgcctgttcaagccgggcgacgaggtcgtcgttccttcccacacctttaccgcttcggcctatccttttgccaaaaagggcgcgaagctggtctgggccgacattgaccttgcgacccgcgtggttacggcggacacgatcgaggccgtgctgacgcccaaaacgcgcgccatcgtggtcgtgcatttatacggctatgtggcggacatgcccgcgatcatggcattggcccgcgcgcgcggcatcttggtcatcgaggatgcggcccagtccataggcgcggatgtcggcggcatacgctccggctcgttcggcgatatgtccatttttacctaccctcggccgatctga

SEQ ID NO: 39516 - protein, 188 aa, Unknown
  Obtained from environmental sample
  DOMAIN (12)...(188): DegT/DnrJ/EryC1/StrS aminotransferase family
  misc_feature (1)..(188): Xaa is any amino acid
MPIKVNFSGRALKYAEEEIAVVADVMRHGETLTQGRHLQEFQRKFAAYQGLPESSCFAVMNGVSALELSAQLCLFKPGDEVVVPSHTFTASAYPFAKKGAKLVWADIDLATRVVTADTIEAVLTPKTRAIVVVHLYGYVADMPAIMALARARGILVIEDAAQSIGADVGGIRSGSFGDMSIFTYPRPI

SEQ ID NO: 39517 - DNA, 1176 bp, Unknown
  Obtained from environmental sample
  misc_feature (1)..(1176): n is a, c, g, or t
ttgcaacgctccgcgcggcgcgccgcgttaccgccgccggcgcacatgcaaggcgcaattgccttccacccaaccggccctgcggccacgaggttgttccatgtaccgcaacgtgaagtgtgttccgtattatgtttcggcaagggttccctgatgcagcttgtcgagcttgtggccgagcggcgcaagacgcacgggggcggggtggtgtttttcatcgatcatttttttcaggacggggcgctggcagcccgcctgtccgtggaaaagggcgaccggattatctatgtggacgtgacggacgagcccaccaccgactacatggatgccttgaccgcgcaagtgcgggaaggggacgccgccctgccgtgctgtctggtggccctcggcggcggcgcgaccatggacgcctgcaaggccgtggcgaacctgctgaccaatcccggtgtggcggaggactaccagggctgggatctggtgaagaatcccccggtgtataaaatcgccgtgcccacgcttgccggcaccgggtcggaatgttcccgcacctgtgtcctcagcaatgtgaaaaagcgcatcaaactgggcatgaacagcgatttttccatgttcgaccaggtcgtcatggacccggaactcacccgcaccgtgccgcgcgatcaatattttttcaccggcatggacacttacatgcactgcttcgagaccctcaccggctcataccgcaaccgcatcgtggacgcgttggccgaaaaggccgtggccatgtgcgaggatattttcctctctgacgacatgatgagcgaggtgaacctggaaaagctgatgatcgcctcctacctgggaggcatggcggccggcttcgtgggcgtcgtgcatccgttttccgcaggtctgtccgtcgccttgcatatgcaccacggcatagccaactgctacgccctgaccgtgctggaagacatttatcctgaacagcacgccgccttcatgcgcatgatggagcgccagcaggtgaccctgccccagggcatttgtcgcaacctgagcgcggaggagtacgatgccctgtaccatggcacgattgtgaacgagaagccgctttccaaccgtctcggcccggatttcagaaacatgctgaccaaagaaaacgtgctggaacgcttcaaaaggatgtag

SEQ ID NO: 39518 - protein, 391 aa, Unknown
  Obtained from environmental sample
  DOMAIN (41)...(371): Iron-containing alcohol dehydrogenase
  misc_feature (1)..(391): Xaa is any amino acid
MQRSARRAALPPPAHMQGAIAFHPTGPAATRLFHVPQREVCSVLCFGKGSLMQLVELVAERRKTHGGGVVFFIDHFFQDGALAARLSVEKGDRIIYVDVTDEPTTDYMDALTAQVREGDAALPCCLVALGGGATMDACKAVANLLTNPGVAEDYQGWDLVKNPPVYKIAVPTLAGTGSECSRTCVLSNVKKRIKLGMNSDFSMFDQVVMDPELTRTVPRDQYFFTGMDTYMHCFETLTGSYRNRIVDALAEKAVAMCEDIFLSDDMMSEVNLEKLMIASYLGGMAAGFVGVVHPFSAGLSVALHMHHGIANCYALTVLEDIYPEQHAAFMRMMERQQVTLPQGICRNLSAEEYDALYHGTIVNEKPLSNRLGPDFRNMLTKENVLERFKRM

SEQ ID NO: 39519 - DNA, 705 bp, Unknown
  Obtained from environmental sample
  misc_feature (1)..(705): n is a, c, g, or t
atgacagatcggccgaaacgtcaaagagcgagaaaggaacgccgcaaggcgggtcaatatcgccnggttcttgccaatgtgcatctgcattatgtgttagacctgtgggtagagcgagtgataaagaagacgtccgtaggggaggtgtactatgtcagatacgccgacgatttcgtgctaatgtttcagcacgggtgggaggcgaaagaagtccttgaagcgctgaaagcccgacttgcaaagttcgggctggaagttgcagaggacaagacaagggtacttccgttcggtcgctttgatggcacgaaagaggcttttgactttctcgggttcacgttttacaacacgaaaacgaggggtggtaagtatagggtaggcgtgcgcacgagcaaaacgaggctaaaagccaagaagcaagcggcaaagcagtggttcaagagtcgaatatgtaaaccaataacggaaacgatgaaactcgtcggagttgcgctaagaggttacagtaattactacggtataaacggaaacgcacgtcagttgtggaattactacagttacgtgaaatataccttttaccgtatgttaaataggcgtagccagaaaagcaagttctgtcgggacaagttcaaccgtatatggaaatactatatagacgaatcacgattagccgtgggtatttgggacagtaaaccgatgttggcttga

SEQ ID NO: 39520 - protein, 234 aa, Unknown
  Obtained from environmental sample
  misc_feature (1)..(234): Xaa is any amino acid
MTDRPKRQRARKERRKAGQYRXVLANVHLHYVLDLWVERVIKKTSVGEVYYVRYADDFVLMFQHGWEAKEVLEALKARLAKFGLEVAEDKTRVLPFGRFDGTKEAFDFLGFTFYNTKTRGGKYRVGVRTSKTRLKAKKQAAKQWFKSRICKPITETMKLVGVALRGYSNYYGINGNARQLWNYYSYVKYTFYRMLNRRSQKSKFCRDKFNRIWKYYIDESRLAVGIWDSKPMLA

SEQ ID NO: 39521 - DNA, 621 bp, Unknown
  Obtained from environmental sample
  misc_feature (1)..(621): n is a, c, g, or t
ttgatagcgtgtattatcctctttctctttcttggctgtacatttgactacggcgaaaaagaaccttccgaagaagaacagcccggccttatcatggaaaatgtcgagtatatacgggtaagatccgccgacccaagagcgaggttcaaagcggagcgcgccgagcgttacgagaaacaaggcgtaatgagaattcaaaacatgacctttgaacaatacggcgaccgcggcaaagaaattaacgctttgggaagcgcgggctacgcttccgtggaaattcaatccggcgatatcttcatggatcaaaacgtaaggatcgatgtggaaaccgatgacatttcaatccagacataccagcttgaatggagggaagaaccgcatatcctttccacgccggaagaaaatgaggtaaacatttatcaggataacggaacaagctttacgggaataggcctttatgttgaaacgcgcccccgccaatgggaatttaaaggcgatgtcggcggcttgtttgttcatgatgatgatgaagaggactctccggaggactccccgaagagcgccgccgcggaaaattcagcggaaaatattgtcaaagaaacaacggcggaagacttatga

SEQ ID NO: 39522 - protein, 206 aa, Unknown
  Obtained from environmental sample
  misc_feature (1)..(206): Xaa is any amino acid
MIACIILFLFLGCTFDYGEKEPSEEEQPGLIMENVEYIRVRSADPRARFKAERAERYEKQGVMRIQNMTFEQYGDRGKEINALGSAGYASVEIQSGDIFMDQNVRIDVETDDISIQTYQLEWREEPHILSTPEENEVNIYQDNGTSFTGIGLYVETRPRQWEFKGDVGGLFVHDDDEEDSPEDSPKSAAAENSAENIVKETTAEDL

SEQ ID NO: 39523 - DNA, 609 bp, Unknown
  Obtained from environmental sample
  misc_feature (1)..(609): n is a, c, g, or t
atgaagaaaaaactgatatttttcctgttatgctgctcgcttttgttttcatcggcggacaaatttacctttaaggcggatagagtgtcaggctcaagagcgctcggacaagaaacaaccatattaaccggaaatgccgaagtaaaatctgacagtttggttctgcgcgccgacagaatagagattcggggaaagaacaacgaatttattgactgtatcggcaatgtttggggttttgaagaagaaaaaaacatcctgttctttacggatagactgcgttatgaccgtgaaagaaaagtggcgcggcttgagggcaactcatcccttgaggacagggaaaatgaaattgtcgcaagaggccgttttatagaatatgacgatgaaaatgatattacggtttttgaaatttccgtgcgcttgttcaaggacgatatggtctgccgttcggaatatgcgatttataaccgtaaagataaactgctcgacctgacaggtttccccgtagtatacaaaaaagacgatgaattccacgctgaccgtattcgtatagatttagaaacagatgacgttacaatggaaggttctgtatcaggaaagataacaaactga

SEQ ID NO: 39524 - protein, 202 aa, Unknown
  Obtained from environmental sample
  SIGNAL (1)...(19)
  DOMAIN (5)...(189): OstA-like protein
  misc_feature (1)..(202): Xaa is any amino acid
MKKKLIFFLLCCSLLFSSADKFTFKADRVSGSRALGQETTILTGNAEVKSDSLVLRADRIEIRGKNNEFIDCIGNVWGFEEEKNILFFTDRLRYDRERKVARLEGNSSLEDRENEIVARGRFIEYDDENDITVFEISVRLFKDDMVCRSEYAIYNRKDKLLDLTGFPVVYKKDDEFHADRIRIDLETDDVTMEGSVSGKITN

SEQ ID NO: 39525 - DNA, 513 bp, Unknown
  Obtained from environmental sample
  misc_feature (1)..(513): n is a, c, g, or t
atgggaatggggccgacacccgctcctgacgaagtagatccggatattgtaaacgccggcggacagccggttaccgtaaagacaggagccgcgttctttgacagcgcgacatctttcggaataatacgcggcggccatgtagacgctaccattattggggcgctggaagtggacgaaaagggtagcattgcgaactggatagtgccgggaaaatcgattcccggcatgggcggcgccatggatctaatggcagcggcaaaaaaagttatagtcgcaacgactcataccaataaaggcgcaccgaaaatactgaagaactgtacccttccgtatggggctttggacgctattgacatgatcattacggaaatgggagtaatggaaattacgcctgacggcattgtgctgaccgagctgcaccccgattatacgaaagagcaggtacaggcggcgacaggggcgaagttgataatcagtccggacctgaagccgatggtaacagataacaggtaa

SEQ ID NO: 39526 - protein, 170 aa, Unknown
  Obtained from environmental sample
  DOMAIN (1)...(151): Coenzyme A transferase
  misc_feature (1)..(170): Xaa is any amino acid
MGMGPTPAPDEVDPDIVNAGGQPVTVKTGAAFFDSATSFGIIRGGHVDATIIGALEVDEKGSIANWIVPGKSIPGMGGAMDLMAAAKKVIVATTHTNKGAPKILKNCTLPYGALDAIDMIITEMGVMEITPDGIVLTELHPDYTKEQVQAATGAKLIISPDLKPMVTDNR

SEQ ID NO: 39527 - DNA, 675 bp, Unknown
  Obtained from environmental sample
  misc_feature (1)..(675): n is a, c, g, or t
atgcggaataaaatactaaactcaggcgatgaggctgcggcccaaataaaagacggttccgtcattatgattggcggttttatggcctgcggtacgccggaaattttaattgacgccctggtcaaaaaaggcgttaaagatctgatcgttatttgcaatgacggaggatggcccgataagggcgtcggcaaactcatagccaacggacaggtaaaacgccttatcgcgtcacatgtcgggcttaatccagaagtggcaaggcgcagcaataccgatgtcgaggccgacagactggaattgatcctggttccccagggcactctcgcggaacgtataagggccggcggcgcgggtcttggcggtgttcttacccctaccggagtgggaaccataatagccgaagacaaacatgtaattaatatcgacggcagagacttccttttggaaacacccctccgcgccgatttcgcccttatcagagcgtccaaaattgatacattcgggaacacgattttttacggaaccacaaaaaattttaacccccttatggcaacagcggctgattatgtaatcgccggagcctgtgagattgtggaaaccggcagtattgatcctaacgtcatccatctttcaggcatatttgtaaacgcgatagtaggaggagaaaaaccatga

SEQ ID NO: 39528 - protein, 224 aa, Unknown
  Obtained from environmental sample
  DOMAIN (6)...(221): Coenzyme A transferase
  misc_feature (1)..(224): Xaa is any amino acid
MRNKILNSGDEAAAQIKDGSVIMIGGFMACGTPEILIDALVKKGVKDLIVICNDGGWPDKGVGKLIANGQVKRLIASHVGLNPEVARRSNTDVEADRLELILVPQGTLAERIRAGGAGLGGVLTPTGVGTIIAEDKHVINIDGRDFLLETPLRADFALIRASKIDTFGNTIFYGTTKNFNPLMATAADYVIAGACEIVETGSIDPNVIHLSGIFVNAIVGGEKP

SEQ ID NO: 39529 - DNA, 537 bp, Unknown
  Obtained from environmental sample
  misc_feature (1)..(537): n is a, c, g, or t
gtgttcgaatcccttggccactatggcgcatggcaccaggctcaaggtgtgggccgtgtgggggtgcccgtgctcgtccagcatgatgtcggagttgccgtggtcggccgtgaccaacagggcgccttccatgcgaagcaccgcgtccgccactttccttacggaatcgtccactacggtgcatgcggacacggcggcgtccaggacgcctgtgtgacccaccatgtcgccgttggcaaggttgcagatgaccaccttgtactcgccggactcgatggactcgatcagccccctgaccacttggtggcagctcatctccggcatcaggtcgtaagtggcgaccttggggctgtcgacgaggcggcgcgattcgccggggaagggctcctccctgccgccgttgaaaaagaacgtgacgtgggcatacttttcggtctcggccgtgcggaactgcttgagccccttttcgctgatcacctcgccgaatatctttgcaaggttctggggcgggtaggccacggacacgtaggggtctag

SEQ ID NO: 39530 - protein, 178 aa, Unknown
  Obtained from environmental sample
  misc_feature (1)..(178): Xaa is any amino acid
MFESLGHYGAWHQAQGVGRVGVPVLVQHDVGVAVVGRDQQGAFHAKHRVRHFPYGIVHYGACGHGGVQDACVTHHVAVGKVADDHLVLAGLDGLDQPPDHLVAAHLRHQVVSGDLGAVDEAARFAGEGLLPAAVEKERDVGILFGLGRAELLEPLFADHLAEYLCKVLGRVGHGHVGV

SEQ ID NO: 39531 - DNA, 786 bp, Unknown
  Obtained from environmental sample
  misc_feature (1)..(786): n is a, c, g, or t
gtgcaacgccgtatattgcataccctatacgaagtggacgatggtaagttccataaggtggccaatattgtcggtcagtgcatgaagtaccacccgcacggcgacgcctctatcggcgacgcgcttgtcgctattgccaacaaagacttattcattgacaagcagggaaatttcggcaacatcttcaccggcgacccggcctcagccgtccgttacatagagtgccgtttgtcgccgcttgccgtggaatcgctcttcaatcctgagatcaccgaatatgtggactcttacgacgggcgcaaccgcgaaccggttacgctgccggcgaagttgcccgtcctcttagcgcttggcgcggaggggatagcggtggggatgtccaccaaaattctcccccacaacctaatcgaacttctcgaagcgcaaatagcctacctgcgcggcgaccggcgcttggtctttccggattttcctaccggcggtttagccgacgtctccgaatacaacgacggcaacggcaaggtgttgctgcgcgccaaactcgacacgagcgaccccaaacgcattgtcatacgggaattgccgttcggctcaaccaccgagtccatcatgacctccatagagaatgccgcccgtaagggtaagttgaaaatcgccggcatcagcgactacacagcggagaacgtggagatagaggtgcggctggcgcgcggaatccacacgcaagacaccgtagacgcactctacgcctttacagattgcgaatcgtcggtctccgtaacatga

SEQ ID NO: 39532 - protein, 261 aa, Unknown
  Obtained from environmental sample
  DOMAIN (2)...(260): DNA gyrase/topoisomerase IV, subunit A
  misc_feature (1)..(261): Xaa is any amino acid
MQRRILHTLYEVDDGKFHKVANIVGQCMKYHPHGDASIGDALVAIANKDLFIDKQGNFGNIFTGDPASAVRYIECRLSPLAVESLFNPEITEYVDSYDGRNREPVTLPAKLPVLLALGAEGIAVGMSTKILPHNLIELLEAQIAYLRGDRRLVFPDFPTGGLADVSEYNDGNGKVLLRAKLDTSDPKRIVIRELPFGSTTESIMTSIENAARKGKLKIAGISDYTAENVEIEVRLARGIHTQDTVDALYAFTDCESSVSVT

SEQ ID NO: 39533 - DNA, 915 bp, Unknown
  Obtained from environmental sample
  misc_feature (1)..(915): n is a, c, g, or t
gtgctctccaacccggagttcctcgcggagggtacggctattgccgacctgaataacccagaccgcgtcctcataggctcgcaacttacgccggaggggataaaggcgagagatcaggttgtggagatatacgccaattgggtgcctcgcgagcgtatcgtcactagcaacgtgtggagcgcggagttatcgaaactcgtggccaacgcctttttagcgcagcgcatatcctctataaacagcatctccgaactatgtgaaaagacagaggccgacgtgaccgaggtgtcgcggactattgggatggacagccgcatcggcagccgcttcttggtgtcgagcgtgggtttcggcgggtcgtgtttcaagaaggatattctcaacctggtgtacatctgccggagttacgggttaaccgaggtggccgattactgggagagcgtggtggagatgaacgaacaccagaagcgccgcttcgtgaataatatgctccgggcgatgttcaacaccgtagccggtaagaggatagcgctcttcggttttgcttttaaggccgacactggcgacactagagaatctccggctatagacgtggctatgcaactagtcaaagagcaagcgaaggtggtaatatccgaccccaaggcgcttgacaacgcgaaaatcgatttagcgtcatgtattgacaatgtggaatttataaacgacccatacgaagccgccaaaggcgcgcacgccattgccgtaatgacggagtggaatacatacaaggaacttgattacggaaagatatacgacggcatggaacgtccggcgtttatttttgacggtagaaacgttctgaatcacaaagcgctgttcgagatggggttcaacgtcttcccgctgggtcaaccggcgctgaagcatttttaa

SEQ ID NO: 39534 - protein, 304 aa, Unknown
  Obtained from environmental sample
  DOMAIN (177)...(283): UDP-glucose/GDP-mannose dehydrogenase family, UDP binding domain
  misc_feature (1)..(304): Xaa is any amino acid
MLSNPEFLAEGTAIADLNNPDRVLIGSQLTPEGIKARDQVVEIYANWVPRERIVTSNVWSAELSKLVANAFLAQRISSINSISELCEKTEADVTEVSRTIGMDSRIGSRFLVSSVGFGGSCFKKDILNLVYICRSYGLTEVADYWESVVEMNEHQKRRFVNNMLRAMFNTVAGKRIALFGFAFKADTGDTRESPAIDVAMQLVKEQAKVVISDPKALDNAKIDLASCIDNVEFINDPYEAAKGAHAIAVMTEWNTYKELDYGKIYDGMERPAFIFDGRNVLNHKALFEMGFNVFPLGQPALKHF

SEQ ID NO: 39535 - DNA, 978 bp, Unknown
  Obtained from environmental sample
  misc_feature (1)..(978): n is a, c, g, or t
ttgccgaaaatgaactacaatgttattttcaaaaaaagtactttgtttttccatcactatcacatttgccttatgctctgttttcacctttacgcagtttcaggcgatgatccatcttccagtactgacattacttacatgaccgccccgctttttccacatatgctttttatggagacggttaatcaatggaaaaaaatagataatgcccgcccttattgggttacttcaaaagaagaaatagaaaattttaaacgaatatcaaattatcaggtttcttttttgctgaataacgatattcttgctttttatggtcatcccgattcgcgtaatatgggcattttgggccgtcattcaattgaagagttagacagactgttgactgcccttgttccggagtacgaaaaagtcaatggcggacggaaagtgcataaggcgttttacttgatttatgggactgtttggcctaagggcgaaatagggacaatcggggataatctccttatgaaatatatcgagtatgggatgaagaacgatatattggtttttattgaccatcaaattggccgttatgatccgatagattcactaaaaaaaatgttgccgtatttgcgctatccaaacgtgcatcttgcccttgatcctgaatggcggacaaaaaagccaatggcggatattggcagtatgacagcggaagaaatcaatatggcgcaacaagtaatggaaaattatctaatagataataatattcccggtgagcgtatgcttgttattcatcaatttaactacggaatgattaaagatcgcgcgcaagttaaaagcaattataacagggtcagactggttcattgcgccgacggttttggttcgcctgaagttaaacgcgattcttacaattataatgcgcttgctactaatatgccgattaaggcttttaaattgttttacaattttggaatacccggcgtaggtgtatga

SEQ ID NO: 39536 - protein, 325 aa, Unknown
  Obtained from environmental sample
  misc_feature (1)..(325): Xaa is any amino acid
MPKMNYNVIFKKSTLFFHHYHICLMLCFHLYAVSGDDPSSSTDITYMTAPLFPHMLFMETVNQWKKIDNARPYWVTSKEEIENFKRISNYQVSFLLNNDILAFYGHPDSRNMGILGRHSIEELDRLLTALVPEYEKVNGGRKVHKAFYLIYGTVWPKGEIGTIGDNLLMKYIEYGMKNDILVFIDHQIGRYDPIDSLKKMLPYLRYPNVHLALDPEWRTKKPMADIGSMTAEEINMAQQVMENYLIDNNIPGERMLVIHQFNYGMIKDRAQVKSNYNRVRLVHCADGFGSPEVKRDSYNYNALATNMPIKAFKLFYNFGIPGVGV

SEQ ID NO: 39537 - DNA, 1104 bp, Unknown
  Obtained from environmental sample
  misc_feature (1)..(1104): n is a, c, g, or t
atggagttctggctggatgccagaattttcagcgaaagacattccgcaaaagtagctaaatcttgggatagggaatttttggaaaatcaaggggataaaccaaatcagggaagcggcacgttgaaggaggttaagtattccagctatgcgaggtacagggggcatttcactctgcgcttgggttttgcgaatttggattttgcgcgtgatgtccagcactgggggcccggctattacagcaaccttacattaaaccaagcagccgtgccttataatcaggttacgctctcaacaaagataggcccgctttctgtggtgagcctttatgcggatttggatgctggagagaacagtatgaaaaaggatgcgagtcgcaatttgtatgggcatcgctatgaacttgagcttaacaatttgacccttggcttgagcgagattacagttatttacaaattaaaccagccttggctttttgttcccatagtgccgctcttcgcggaaaaagggaatttcagcgaagatagtaacaacggtgccatagcatttgattttagttatagatttccgtttgggtttcgcctttactcggagtttttcctagacgatatggaaagccctgcgagtttaatcagaaacgacaacatagaggcaaagtgggcgtggatggcgggtttgatgtatgctagggatttgggggcgtggaaagctggcagcttggcggagtatgcaagagttgagccgtatgtatatacgcactttaagccctacaccgctcaaattgcgcacctcggctaccctgtaggcaacccgtctgggcctaatagccaaaccataaactggctcatttatgcaaaacacgcaaagcatttccaagcgcaactcaagcaggaatggttctggaaaggcaaggatggcggcgagcttaactacccaacgccaacggcagaccaccactcaaccgcaaagcattttttggacgaagctaagatgcagtattcgctaactccggctatatcttatatgagcgatcgttatgctatcagcgtggagtacactttctttgatagaaaagctttttgttcaagagccatgcttttgtggtaa

SEQ ID NO: 39538 - protein, 367 aa, Unknown
  Obtained from environmental sample
  misc_feature (1)..(367): Xaa is any amino acid
MEFWLDARIFSERHSAKVAKSWDREFLENQGDKPNQGSGTLKEVKYSSYARYRGHFTLRLGFANLDFARDVQHWGPGYYSNLTLNQAAVPYNQVTLSTKIGPLSVVSLYADLDAGENSMKKDASRNLYGHRYELELNNLTLGLSEITVIYKLNQPWLFVPIVPLFAEKGNFSEDSNNGAIAFDFSYRFPFGFRLYSEFFLDDMESPASLIRNDNIEAKWAWMAGLMYARDLGAWKAGSLAEYARVEPYVYTHFKPYTAQIAHLGYPVGNPSGPNSQTINWLIYAKHAKHFQAQLKQEWFWKGKDGGELNYPTPTADHHSTAKHFLDEAKMQYSLTPAISYMSDRYAISVEYTFFDRKAFCSRAMLLW

SEQ ID NO: 39539 - DNA, 1236 bp, Unknown
  Obtained from environmental sample
  misc_feature (1)..(1236): n is a, c, g, or t
atgattgccgacgctttttcattctcgacacaatacggcaagcccgtccttttccgccccacaacgcgcgtttgtcacagttgcgcgtcagttgaaatactggaacctctgccaaaaagcgaaccttgcggttttgtaaaaaacactagttgggttatttttccaaaactcgcgtactcaaacaaattcaaaatagaagaaaacttaaaagcgatgaaagaagaattttccgcttatgaaaaaaatatacttgccggaaaaggcaaaaaaggaattgcctcaggcggcgtaagttatgcctatacccgcgaggcattggcgcaatacaattatactccaacagataacggcctaaaaacattaaaaatttctacctatccgtttccggaaaaactcgctctttcgtttctggaagggcttgatgaagttcttgttattgaggaactggatccggtaatagaaaacgagcttatctatctttgcggattacacaatcttcgtgtaaagatacttggcaagcgaagcggccatgttcaggttgccggagaaaactcgcctgacagcgccataaaagtaattggggaattccttaatttaaaacaagaaaatgcagaaaacaaaacaccgcagatgccgccgcaggcgacactgccgctgttgccggttcgtgcgccggtgttatgcgctggctgtccccaccgcgcttctttctttgcggttaaggaagccgcaaaaggcaggaaggctgttttcaccggggacatcggctgttatacgctgggaaacgccatgccgcttgacatggtagacacctgtttgtgcatgggcgcgggtattaccgtagcgcagggccttaagcgaattgagcctgaggctgttcatttcgcttttatcggggattcaactttttttcacgccggaattaccggagtaataaacgccgtgtacaaccagaccgacattattgtcgttgtgctggataactcgacaacggcaatgacgggaaaccagccgcatccgggaaccggcgttacaatgatgaaggcccaaacgggaaaaatggacattgaaaagatcgtaaaggcgttaaatgtttcaagcgtagcaagggtaaacccctttgatcagaaaactgctaaagacgttgttcgttctttaatggaacaaaaaggcgtccgggtgcttttgtttgaagcgccttgcgttgttgtctcanagcccgcgaaaaatcactaa

SEQ ID NO: 39540 - protein, 411 aa, Unknown
  Obtained from environmental sample
  DOMAIN (254)...(397): Thiamine pyrophosphate enzyme, C-terminal TPP binding domain
  misc_feature (1)..(411): Xaa is any amino acid
MIADAFSFSTQYGKPVLFRPTTRVCHSCASVEILEPLPKSEPCGFVKNTSWVIFPKLAYSNKFKIEENLKAMKEEFSAYEKNILAGKGKKGIASGGVSYAYTREALAQYNYTPTDNGLKTLKISTYPFPEKLALSFLEGLDEVLVIEELDPVIENELIYLCGLHNLRVKILGKRSGHVQVAGENSPDSAIKVIGEFLNLKQENAENKTPQMPPQATLPLLPVRAPVLCAGCPHRASFFAVKEAAKGRKAVFTGDIGCYTLGNAMPLDMVDTCLCMGAGITVAQGLKRIEPEAVHFAFIGDSTFFHAGITGVINAVYNQTDIIVVVLDNSTTAMTGNQPHPGTGVTMMKAQTGKMDIEKIVKALNVSSVARVNPFDQKTAKDVVRSLMEQKGVRVLLFEAPCVVVSXPAKNH

SEQ ID NO: 39541 - DNA, 474 bp, Unknown
  Obtained from environmental sample
  misc_feature (1)..(474): n is a, c, g, or t
atgacgtttaactgtatgatagcgggcgtcgggggacaaggcactgtgcttgcttccaagttaatcgccgccgccgccataaaaaaaggcttcgatgtccgcactacggagacaatcggcatggcgcagcgcggcggcagcgtgttcgggcatgtccgtgtcggcgaccatgtcggcgaccatgtcggcggccatatattttctccgattattccccttggcggggccgacgcgcttatcggctttgagcccgcggaaacagtacgccaacttccatttctccgcaaagacggctctgtaattgtttataacagcggaaatatggacatgctcaaatatttaaaagaaaatgtacaaaaacttactgtaatagaagcgggacgcttgacggagtatagcgtaaaaacattaaatgtgttcttttgggagcggcggttcaaagcggcatattgccgtttgacgcggaaacattaa

SEQ ID NO: 39542 - protein, 157 aa, Unknown
  Obtained from environmental sample
  SIGNAL (1)...(18)
  DOMAIN (11)...(156): Pyruvate ferredoxin/flavodoxin oxidoreductase
  misc_feature (1)..(157): Xaa is any amino acid
MTFNCMIAGVGGQGTVLASKLIAAAAIKKGFDVRTTETIGMAQRGGSVFGHVRVGDHVGDHVGGHIFSPIIPLGGADALIGFEPAETVRQLPFLRKDGSVIVYNSGNMDMLKYLKENVQKLTVIEAGRLTEYSVKTLNVFFWERRFKAAYCRLTRKH

SEQ ID NO: 39543 - DNA, 432 bp, Unknown
  Obtained from environmental sample
  misc_feature (1)..(432): n is a, c, g, or t
gtgctggataactcgacaacggcaatgacgggaaaccagccgcatccgggaaccggcgttacaatgatgcgcacccagacagaaaaaatgagcattgaaaaaatcgtaaaggcgttaaatgtttctaatgtagtaaaagtaaacccctttgatcgaaaggcggctaaagaagctgtccgggccctaatcgaacaaaagggcgttcgcgtgcttttgtttgaagcgccctgcgtagttgtttcaaagcccgccggaaaatcaacggtaaccgccggtaagtgtacaggctgtcagctctgtataaagaaactgggctgccccgcccttggctttgagaacagtaaagcgcttgtcaattccggcctttgtacaggctgcggcttgtgcgccgctgtttgcgtatcaggcgcaattaaggcgggtgaaaaatga

SEQ ID NO: 39544 - protein, 143 aa, Unknown
  Obtained from environmental sample
  DOMAIN (116)...(139): 4Fe-4S binding domain
  misc_feature (1)..(143): Xaa is any amino acid
MLDNSTTAMTGNQPHPGTGVTMMRTQTEKMSIEKIVKALNVSNVVKVNPFDRKAAKEAVRALIEQKGVRVLLFEAPCVVVSKPAGKSTVTAGKCTGCQLCIKKLGCPALGFENSKALVNSGLCTGCGLCAAVCVSGAIKAGEK

SEQ ID NO: 39545 - DNA, 774 bp, Unknown
  Obtained from environmental sample
  misc_feature (1)..(774): n is a, c, g, or t
ttgcgctttaccggaaaaattatcgatgtaccggatatgtacaatctccccgcagatgtgccttattcctttaactcttcattcgacaaaattgcaggttataaaaccatttcaacgctgaccttcccgctgatcaccgccgacgggcgcctattgggcgtcattcaggttatcaacaaaaaggatgataagggaaatgttattgtgttttcccagaaagacgtattcctgatcacccatttcgcggctaatgctaccgtggcattgcagcaggcttatataaccagggccatgatcctccgcatgatcagaatggcggagctgagggatccaaaagaaaccggaacccatgtaaaccgtgtggcgggttacgcggttgagatttacgacaggtgggcgcataagcatgacattccccctgcagagcgtgaaagttttcgggatgtacttaagataggctcaatgctccatgatgtggggaaggtggctatctctgacgtgatccttaaaaagccggcccgttttacgccggaagaatttcagataatgcagctccataccctgtatggggccaatctttttgacgacatttattcgaatattgaaaggatggccaaggatatagccctgacccaccatgaaaactggaacggaaccggttatccgggatggctcgatccgatcagccgcgcgcccctaaaaaccaatgattcggggaagcctttgggcaaaaaggaagatgaataccgcttgccggaaggattgtcgccatag

SEQ ID NO: 39546 - protein, 257 aa, Unknown
  Obtained from environmental sample
  DOMAIN (114)...(249): HD domain
  misc_feature (1)..(257): Xaa is any amino acid
MRFTGKIIDVPDMYNLPADVPYSFNSSFDKIAGYKTISTLTFPLITADGRLLGVIQVINKKDDKGNVIVFSQKDVFLITHFAANATVALQQAYITRAMILRMIRMAELRDPKETGTHVNRVAGYAVEIYDRWAHKHDIPPAERESFRDVLKIGSMLHDVGKVAISDVILKKPARFTPEEFQIMQLHTLYGANLFDDIYSNIERMAKDIALTHHENWNGTGYPGWLDPISRAPLKTNDSGKPLGKKEDEYRLPEGLSP

SEQ ID NO: 39547 - DNA, 537 bp, Unknown
  Obtained from environmental sample
  misc_feature (1)..(537): n is a, c, g, or t
atgaaaatactggttgacgcggattcctgtccaaaggctgcgcgggaattggtgctgcgctgttcagggcggcggggaattaaggcggtattcgcggctaaccgtcccatgcccggtataagcggagaaaacgttgtaatggagatttgcccgcccggtgaaaatgccgccgacgacaggcttgtggaactcgccatgcccggagaccttgccgtgagccgcgaccttgccctggcaaaaaggctgttggaaaaaaacgtcgttgttatagatgaccgcggccgactctttactttggacaacatcaacgaactgctttccctgcggaattttaccgtgggccttgccgaaaacggccttggacttgaacgcacagcgaattacggtaaaaaggaacttaaaacgtttgctgacgccttggataagcagctaaccaaaattttaaaaggattaacctgtccccaaggcggcattgccgcccccccagtccctagcccccagtccccatctcaggatacaaattctgcgtctgtttga

SEQ ID NO: 39548 - protein, 178 aa, Unknown
  Obtained from environmental sample
  DOMAIN (1)...(146): Uncharacterized BCR, YaiI/YqxD family COG1671
  misc_feature (1)..(178): Xaa is any amino acid
MKILVDADSCPKAARELVLRCSGRRGIKAVFAANRPMPGISGENVVMEICPPGENAADDRLVELAMPGDLAVSRDLALAKRLLEKNVVVIDDRGRLFTLDNINELLSLRNFTVGLAENGLGLERTANYGKKELKTFADALDKQLTKILKGLTCPQGGIAAPPVPSPQSPSQDTNSASV

SEQ ID NO: 39549 - DNA, 786 bp, Unknown
  Obtained from environmental sample
  misc_feature (1)..(786): n is a, c, g, or t
gtggggaaacagcttgaaatactggtacaaaaacggacaaacgaactggttattcagagcgcgactattaccgccgcgtttgacgcgactcccgatctgatattctgcaaaaatttaaattcgcaatttatacgatgtaacaaaacttttgaaaaatactttaatatccgtgaagaggacattatcgggaaaggagacgctgaggccctgggaatatccgccgaagcggaggagcgttacaaagaacgggatcgtcatgttgtaagagagggccggaccctggtatttgaagaaaatataccttccgccgacggaataacacagctttttgaaacatccaaagttccgatggtgcaagacgggcagataatcgggctgatgtctatatcgcataacataaccgagcgtaaggcgatggaagaacaggcgatgagcgccagccgcgcgaaatcggcgttcctcgccaatatgagccacgagatacgcacgcccatgaacgccattaccggcatgaccgcgataggaaagtccgccaccgacgccgaacgcaaggattactgctttaccaaaattgaggacgcgtcgcggcacctgttaggtgtaatcaacgatattctggatatgtccaagattgaagccaacaagtttgaactgtcaccggtagaatttaattttgaaaaaatgatccagtcggcggtcaatgtcgttaacttccgcctggacgaaaacaccagaatttcacggtacaaattgataaaaaattcccaggaatatcattgccgatga

SEQ ID NO: 39550 - protein, 261 aa, Unknown
  Obtained from environmental sample
  DOMAIN (27)...(138): PAS fold
  misc_feature (1)..(261): Xaa is any amino acid
MGKQLEILVQKRTNELVIQSATITAAFDATPDLIFCKNLNSQFIRCNKTFEKYFNIREEDIIGKGDAEALGISAEAEERYKERDRHVVREGRTLVFEENIPSADGITQLFETSKVPMVQDGQIIGLMSISHNITERKAMEEQAMSASRAKSAFLANMSHEIRTPMNAITGMTAIGKSATDAERKDYCFTKIEDASRHLLGVINDILDMSKIEANKFELSPVEFNFEKMIQSAVNVVNFRLDENTRISRYKLIKNSQEYHCR

SEQ ID NO: 39551 - DNA, 663 bp, Unknown
  Obtained from environmental sample
  misc_feature (1)..(663): n is a, c, g, or t
ttgggggagaaagacggcctgtacaccatagaaattgcgataagcgacacggggatcggtataagtcccgaacagcaaaagcgtctgttcaattcttttcaacaggcggaaatcagcacggcgcgccgcttcgggggaaccggactgggtctggcgatttccaaaaacattgtcgaaatgatgggcggaacaataggggttcagtccgaactcggaaaaggctctgtttttacttttacggtacaggcgaagaagatcgttcatgtacatgacgcggcggataatccgccgggggtaaaaaaggatattgccgggctttttgcggagcggcgcgtgcttctggctgaagacatggaaataaaccgcgagatagtactggccctgcttgaaccggcgctgctggagatagactgcgctgaaaacggggcggaggctgtgcgcaaattcagcgaagcgccgcagaagtatgatttaatttttatggacgtacagatgcccgaaatggacggttatgaggcgacgcggcgtatccgggccctgaacctgccaaaagccaaaagcattccgatagttgccatgacagctaacgtgttccgggaagacattgaaaagtgcatggaagcgggcatgaacggtcatgtgggcaaacgcgttgaattttga

SEQ ID NO: 39552 - protein, 220 aa, Unknown
  Obtained from environmental sample
  DOMAIN (110)...(219): Response regulator receiver domain
  misc_feature (1)..(220): Xaa is any amino acid
MGEKDGLYTIEIAISDTGIGISPEQQKRLFNSFQQAEISTARRFGGTGLGLAISKNIVEMMGGTIGVQSELGKGSVFTFTVQAKKIVHVHDAADNPPGVKKDIAGLFAERRVLLAEDMEINREIVLALLEPALLEIDCAENGAEAVRKFSEAPQKYDLIFMDVQMPEMDGYEATRRIRALNLPKAKSIPIVAMTANVFREDIEKCMEAGMNGHVGKRVEF

SEQ ID NO: 39553 - DNA, 618 bp, Unknown
  Obtained from environmental sample
  misc_feature (1)..(618): n is a, c, g, or t
ttgactctaaagaacaatcagcgncttttaatcaccaacgagttaacccacgaagacgtatggctgcatggaaaaaactttaagccttccgaaaatacggcgtcaatcggaaacagcaaatattcaaccgacgggtcatatcactcaaataccgcgctatatttaaaattaggagaatggtttgattatttacgccaaaacggcgcttacgataatacaagaataataataatcgccgatcacggcagcagtgttgaaaatttattatcagacgagccgttatccataaaagacgaatcgcgcgaatcatataaccctgtttttttatttaaggactttaattctcacggtactttatccgtaaacagtgattttatgacgaatgccgacgttccgtttcttgcgcttaacggtataattgaaaatcccgcaaatccgtttacaggcaatcctattacaacacagccaaaagaaaacggcatatatatttcaacatatcacgcgcctatggccgctaatcacggaaaatatgtttataatgtaaaaaacgatcaatggatttatctttgcgattctatatttaaggcgtcaaactgggaaaaagttgaattaccgtga

SEQ ID NO: 39554 - protein, 205 aa, Unknown
  Obtained from environmental sample
  misc_feature (1)..(205): Xaa is any amino acid
MTLKNNQRLLITNELTHEDVWLHGKNFKPSENTASIGNSKYSTDGSYHSNTALYLKLGEWFDYLRQNGAYDNTRIIIIADHGSSVENLLSDEPLSIKDESRESYNPVFLFKDFNSHGTLSVNSDFMTNADVPFLALNGIIENPANPFTGNPITTQPKENGIYISTYHAPMAANHGKYVYNVKNDQWIYLCDSIFKASNWEKVELP

SEQ ID NO: 39555 - DNA, 696 bp, Unknown
  Obtained from environmental sample
  misc_feature (1)..(696): n is a, c, g, or t
ttgggcgcaggtatacaaacctgccgtaaactgatcgatgacggctggattggaactcctgttgcgtctaccgccgtaatgatgaaacgcggccctgagcactggcatccggaccctgaatttttctacaaggacggtggaggtccgatgttcgacatggggccgtactacatcaccgcactggtaaatttgcttggctctgtttcaagggtttcaggttccgccagaattagctctcctgtgaggactgtaacaaataaacatcagtacggcgctgtaataaaagtagaagttcctacgcacattgcgggcgtgttggattttacaagcggcgctgttggtacaattgttaccagtttcgacgtatattcccataccctgccctttattgaaatttacggaaccgaaggcacgcttaaagttcccgatcccaatacctttgaagggcctgtaattatcaggcgttttaatgatgaagaatggtataaaataccgctgcttaaaaattactctgataactcgcgcggtttgggaataaccgagatggctgaagcaatagaagaaaaccgcccccatcgcgcatcaggagaacttgccttccatgttctggatgtaatgcatggcatacatgacgcatcagaaacaggaaggcacatcaggcttaaaagcaagtgtaaaaggccggaagcgttataa

SEQ ID NO: 39556 - protein, 231 aa, Unknown
  Obtained from environmental sample
  misc_feature (1)..(231): Xaa is any amino acid
MGAGIQTCRKLIDDGWIGTPVASTAVMMKRGPEHWHPDPEFFYKDGGGPMFDMGPYYITALVNLLGSVSRVSGSARISSPVRTVTNKHQYGAVIKVEVPTHIAGVLDFTSGAVGTIVTSFDVYSHTLPFIEIYGTEGTLKVPDPNTFEGPVIIRRFNDEEWYKIPLLKNYSDNSRGLGITEMAEAIEENRPHRASGELAFHVLDVMHGIHDASETGRHIRLKSKCKRPEAL

SEQ ID NO: 39557 - DNA, 633 bp, Unknown
  Obtained from environmental sample
  misc_feature (1)..(633): n is a, c, g, or t
ttgaatatcatcacttgcttcattaggatcaacggcaaaaccgtcggcgtaatcgccaaccagccgagctggatagcgggctgcctcgacataaacgcctcggacaaggccgcgaggtttattagaacctgcgactgcttcaacatccccatactgaatctggttgacgtacccggctttttgcctggtactgaacaggagtacggcggcatcattaggcacggcgcaaaaatgctgttcgcttactccgaggcgacagtgcctaaggttacggtcatcgtaaggaaggcctacggcggcgcgtaccttgccatgtgttccaaagacctcggcgcggatctcgtttttgcctggccgcttgcggaaattgcagtaatgggccccgacggggccgcaaatatcatcttcaaaaatgacattcaaaattctgccgatccggcggcgacaaagcagcagaaaatcgacgagtacacaagggaattcgccacaccctacaaggcggcggaaaggggctttgtggacgatataatcgaaccaagccaaacccgcctacgcctgatcaacgcttttgaaatgcttgcagggaagaaaggaaacctgccgcccaaaaagcatggaaacatcccgttataa

SEQ ID NO: 39558 - protein, 210 aa, Unknown
  Obtained from environmental sample
  DOMAIN (1)...(208): Carboxyl transferase domain
  misc_feature (1)..(210): Xaa is any amino acid
MNIITCFIRINGKTVGVIANQPSWIAGCLDINASDKAARFIRTCDCFNIPILNLVDVPGFLPGTEQEYGGIIRHGAKMLFAYSEATVPKVTVIVRKAYGGAYLAMCSKDLGADLVFAWPLAEIAVMGPDGAANIIFKNDIQNSADPAATKQQKIDEYTREFATPYKAAERGFVDDIIEPSQTRLRLINAFEMLAGKKGNLPPKKHGNIPL

SEQ ID NO: 39559 - DNA, 618 bp, Unknown
  Obtained from environmental sample
  misc_feature (1)..(618): n is a, c, g, or t
ttggatccgggaaggacgcgtcccgtattggacgagtcaaaggcatgtgaaattttggaggcgcgccatcgtgttatcgagatccagctagtatcaggcgaatttatccccaatggcattattttgaacagcgccgtggcttacttcggcgagggggggggagggggatcccctccttatttcgagatgatcaccggccccaatatggcgggaaaatcaacatacctgcgctcggcggtccttatcacgctgatggcccagattgggtcatatataccggcaagccagggccggatagggctttgcgacaggatctactgccgcgtgggagcttccgacaacctggcgcggggggaatcgaccttccttgtagagatgaacgagaccgcctatatcctcaacacggcaagcgagaaaagccttgtaataatggacgaagtaggccgcggaaccggcaccaacgacgggctttcgatagcatgggcggtcagcgaggaacttcttgacagggttaaatgccgcactttttttgccactcattaccatgagctttcattgcttgcccatgaccgtatagtaatccgctcaagggaagtgctgagaaagacggcggcataa

SEQ ID NO: 39560 - protein, 205 aa, Unknown
  Obtained from environmental sample
  DOMAIN (6)...(205): MutS domain V
  misc_feature (1)..(205): Xaa is any amino acid
MDPGRTRPVLDESKACEILEARHRVIEIQLVSGEFIPNGIILNSAVAYFGEGGGGGSPPYFEMITGPNMAGKSTYLRSAVLITLMAQIGSYIPASQGRIGLCDRIYCRVGASDNLARGESTFLVEMNETAYILNTASEKSLVIMDEVGRGTGTNDGLSIAWAVSEELLDRVKCRTFFATHYHELSLLAHDRIVIRSREVLRKTAA

SEQ ID NO: 39561 - DNA, 384 bp, Unknown
  Obtained from environmental sample
  misc_feature (1)..(384): n is a, c, g, or t
ttgaacgacctaaaggccagatgcgcggccctatccaaattcgcgcaagaccaacggttcgagagccttggcagcagcgcaaagcgcatagcgaatatcttgaaagacgaaatacccgaaagactagaaaagggctatgcacccaatttgctggaacaggccgaagaaaagacactggcctcgcgcctaacagccattgagggagccaaggactatggcgcactgctggcgctgctggccgacctggcccagccattagaagaattcttcaacaaggtgatggtcaagtgcgaagacagtgccctgcgaaacgctaggctgtccctgctgcacaagctgagaaaatcgtttatgaaaattgcggattttggcctgtggcattga

SEQ ID NO: 39562 - protein, 127 aa, Unknown
  Obtained from environmental sample
  DOMAIN (26)...(113): DALR anticodon binding domain
  misc_feature (1)..(127): Xaa is any amino acid
MNDLKARCAALSKFAQDQRFESLGSSAKRIANILKDEIPERLEKGYAPNLLEQAEEKTLASRLTAIEGAKDYGALLALLADLAQPLEEFFNKVMVKCEDSALRNARLSLLHKLRKSFMKIADFGLWH

SEQ ID NO: 39563 - DNA, 957 bp, Unknown
  Obtained from environmental sample
  misc_feature (1)..(957): n is a, c, g, or t
ttgcgtatgcccctttttaataagcgcgttttggacaggcacacaaagcacatccacatagatgcaggccatatcgaaaccctaaagaaatgggcagaaaaccttagtgccggagtgtacgacgtagaaacgcaaagcgattccgagttcatccagcaaattttgattggcgtcttgggctatacaggcagcagcgggggcaaacagtggacggtggcaaagaatcaacccatcggcaatggcaatgtggacgtagctcttggccatttcaccccggactctgcggccatcatcgctccatttgaattgaaaggtgcaaaaacgcgggacttagacgcagccatccccacccgcgacgcaaaaggccacatgcgctacagatctcctgtgcagcaagcctgggagtacgcgatggatgctaagggaaccaagtgggttctggtgtccaattacagggaaatccgtctttacgcatttggctacgggcgcaaagattacgaatcattcgatcttgaatgtatggcggacgatagtcagtacaagcgcttcatgctgcttttgtcggcgaggcaccttcttgacggccagaccctttctctgctcaaagagtccgaacaggccgaaaaagacatcactaatgaactgtatggccgctacaaggcgcttcgcacaagcattattggggccatttacagcgaaaaccctgaaaaaaacaagctggatgtcatccgttgcgcccagacgataatggatcgcatcttgtttgtggcttttgccgaggacaaaggcctattgcccgataaaatgctggcaaaagcgtttgaggccgaaaaccgtttttacccgcttccaaaatgggaaaatttcaaaaagcttttcagcgccatcaacgagggcgacaacggccttgagattaatggttacaatggcggccttttctccacgatgctgagataa

SEQ ID NO: 39564 - protein, 318 aa, Unknown
  Obtained from environmental sample
  misc_feature (1)..(318): Xaa is any amino acid
MRMPLFNKRVLDRHTKHIHIDAGHIETLKKWAENLSAGVYDVETQSDSEFIQQILIGVLGYTGSSGGKQWTVAKNQPIGNGNVDVALGHFTPDSAAIIAPFELKGAKTRDLDAAIPTRDAKGHMRYRSPVQQAWEYAMDAKGTKWVLVSNYREIRLYAFGYGRKDYESFDLECMADDSQYKRFMLLLSARHLLDGQTLSLLKESEQAEKDITNELYGRYKALRTSIIGAIYSENPEKNKLDVIRCAQTIMDRILFVAFAEDKGLLPDKMLAKAFEAENRFYPLPKWENFKKLFSAINEGDNGLEINGYNGGLFSTMLR

SEQ ID NO: 39565 - DNA, 360 bp, Unknown
  Obtained from environmental sample
  misc_feature (1)..(360): n is a, c, g, or t
ttggaattgccgttaggtgttgtttctttaaagttttccggcggtcttggcgggcacaatgggcttcgctccatgaaaaaatgttttaacagcgcggatttttggcggatacgtataggcattggccgccccgattcaaggcttcccggacagggcggacatgaaggaagcggggagggtatttacgattgggttttatcggactttacaaaaaatgaacaagagactcttatgccaactcttgacgcgggagctaatcttttaatgcaagcttttgaaggtgatcctgaaaccttgttaaaagagtgggcaaaaaagaagataataattcaagaacgggaaagcgaggaaaagacatga

SEQ ID NO: 39566 - protein, 119 aa, Unknown
  Obtained from environmental sample
  misc_feature (1)..(119): Xaa is any amino acid
MELPLGVVSLKFSGGLGGHNGLRSMKKCFNSADFWRIRIGIGRPDSRLPGQGGHEGSGEGIYDWVLSDFTKNEQETLMPTLDAGANLLMQAFEGDPETLLKEWAKKKIIIQERESEEKT

SEQ ID NO: 39567 - DNA, 498 bp, Unknown
  Obtained from environmental sample
  misc_feature (1)..(498): n is a, c, g, or t
gtgggcaaaaaagaagataataattcaagaacgggaaagcgaggaaaagacatgacggcagatgaatcttttaaagagttatacgacattgttgtaagattgcggggtccgggcgggtgtccgtgggatatagaacaaaatccttcttcgcttagaggtgcgttaatcgaagaaacctacgaatgtcttgaagccattgatgaaaatgagccttctcatgttatggaagagcttggagatttatttttgcttgcaaccataattagctatatgcatgaacaggaagggaaattttccgtagcggacgcattgtcaaatttaaataaaaaattaatacgccgccatccgcatgtattcggcgaagtaaaagtaaaagacagtgctgaagttttaaacaactgggcggcaattaaagtgaatcaggagggacgaaagccgaaagattcaatacttgatgaagtaagcggtgggccttccgccgatggatcgttcttttaa

SEQ ID NO: 39568 - protein, 165 aa, Unknown
  Obtained from environmental sample
  DOMAIN (46)...(119): MazG nucleotide pyrophosphohydrolase domain
  misc_feature (1)..(165): Xaa is any amino acid
MGKKEDNNSRTGKRGKDMTADESFKELYDIVVRLRGPGGCPWDIEQNPSSLRGALIEETYECLEAIDENEPSHVMEELGDLFLLATIISYMHEQEGKFSVADALSNLNKKLIRRHPHVFGEVKVKDSAEVLNNWAAIKVNQEGRKPKDSILDEVSGGPSADGSFF

SEQ ID NO: 39569 - DNA, 492 bp, Unknown
  Obtained from environmental sample
  misc_feature (1)..(492): n is a, c, g, or t
atggacgggttcagcggaaagtatatatttatcggggaaaacggaggggacaatttcagcgccctgcagcagtgggcaaacggattcaccgtggaacaagacctgcccaggctggttgccctgagggtggaacacaggcttgtcgctccagcatccctttaccccgatgatgagtacggcgagtattatgaattttttataagggcggtatcgaacggggaatttttaaaagccgaaaaggaacagtctttttggctgaagcggaaaataaccgccgatggcgcggaaactgacggcattaccggcccgcggccgaatcctgacgccgcgaaggaacgttatgagtttttggtattggtcagcgttgacagggaaacgctgcaaaaacagattcagggaatcatggcgaatattaaaacaaaaataccgccgacaaaagaccaggccgcggcgatagtaaaaataaaaaataatatttttgaagggttctga

SEQ ID NO: 39570 - protein, 163 aa, Unknown
  Obtained from environmental sample
  misc_feature (1)..(163): Xaa is any amino acid
MDGFSGKYIFIGENGGDNFSALQQWANGFTVEQDLPRLVALRVEHRLVAPASLYPDDEYGEYYEFFIRAVSNGEFLKAEKEQSFWLKRKITADGAETDGITGPRPNPDAAKERYEFLVLVSVDRETLQKQIQGIMANIKTKIPPTKDQAAAIVKIKNNIFEGF

SEQ ID NO: 39571 - DNA, 363 bp, Unknown
  Obtained from environmental sample
  misc_feature (1)..(363): n is a, c, g, or t
atggaagcggttttacaatgggggctggacttcgtccggcaaatacaaactcttacggctccgtggctgaccgtaatcatgcgggcgattaccagcgcaggttcggccgccgccttcattcttattctttcttttatttattggtgcgttgacgaaaaaaaaggcctgcgcctggccgtggtattgctcatatctgcatggataaacctcgccctgaagcatcttctggatcagccacgccccttttttgaagcctacgacccgtcggtaggcagaacctccgtgataatgggggggctttccttccgcccacgctcagaattcccttgttatatggatgataatcgcctcatgggggattga

SEQ ID NO: 39572 - protein, 120 aa, Unknown
  Obtained from environmental sample
  misc_feature (1)..(120): Xaa is any amino acid
MEAVLQWGLDFVRQIQTLTAPWLTVIMRAITSAGSAAAFILILSFIYWCVDEKKGLRLAVVLLISAWINLALKHLLDQPRPFFEAYDPSVGRTSVIMGGLSFRPRSEFPCYMDDNRLMGD

SEQ ID NO: 39573 - DNA, 561 bp, Unknown
  Obtained from environmental sample
  misc_feature (1)..(561): n is a, c, g, or t
ttgattccccggctttcccgcgtcgttcattttgtcatagccgcctttttgtgcctgcttataggcttctccaggatctatcttggcgcccatttcccgaccgacgtcctgggcggctggctgtttggcggcataatactcaccgtttacttttttgccggcggccggattgaggccttgcttaaatccccccgcgcggccttgataagcgccgccgcccttgcctttgccatgaacatatatcggccctccgaacatatgctcatgcccggcggcatgatcctcggcctgggcataggctgtttcctctgccgccgttatgtgaattttaccgcctgtttgaaggacaggacgggtaccgcaaagctcgtaaccctgcttgtccgttacgcgctgggaatcacggcgatggctttattgtatgtggcgacaggaaaagccgttaacggcatgcgcggttccggcaattaccacctttatgtttttacgcgctatatcctcctgtcgatttggctttcggcaggcgccccctgggttttttgcaaactaagactggtatga

SEQ ID NO: 39574 - protein, 186 aa, Unknown
  Obtained from environmental sample
  misc_feature (1)..(186): Xaa is any amino acid
MIPRLSRVVHFVIAAFLCLLIGFSRIYLGAHFPTDVLGGWLFGGIILTVYFFAGGRIEALLKSPRAALISAAALAFAMNIYRPSEHMLMPGGMILGLGIGCFLCRRYVNFTACLKDRTGTAKLVTLLVRYALGITAMALLYVATGKAVNGMRGSGNYHLYVFTRYILLSIWLSAGAPWVFCKLRLV

SEQ ID NO: 39575 - DNA, 774 bp, Unknown
  Obtained from environmental sample
  misc_feature (1)..(774): n is a, c, g, or t
ttgattaccgacctgccgtcagggctgggcatacaggatgtccggattggcgcgaagggtccttccgggacaaagctgggggacatttccattggtgccgatgctaggaaggtcacggagtcgcccgagtacgttgccctaaaaaaagagcgcgacgcgttgcaggacaagattgacgcgctggagacagaagtcgaggccctgaaccaagagaccaggttcttgggcgagttcagggccgcgtatgacaaggacgcttcgaccaaactggtgtcgggcacacccactggggcttccgtggttgacatgtcgacctcgctgtccgctcgcctggcgaccgtcctggccaaggcccgaaagcagaagaggcaactgaccgaactgggagaggaagccaagaggctggacgcaaagatgcgccagatggcttcgatgcggagcgccagcccctgccgtgccgtcgtcgagatagtggcacagcgcccgggcgatgtggagatagagctttcctaccgcacgcgccaagcgcggtggacacctgcctacgaagtgcgtctgtcaggtgacgacaagagcctcgaactggtgctcttcgcgtcggtggtgcagacgagcggcgaggactgggcaaacgcaaaacttgaaatcaccaacgccaaggccagcaggagtcttgccatgccggcgttgcctgggcccgcaggtcgtcacttggacagaatatgtgccggccgccccgcagccaagaatcgaatactccaaatctgccgctaa

SEQ ID NO: 39576 - protein, 257 aa, Unknown
  Obtained from environmental sample
  misc_feature (1)..(257): Xaa is any amino acid
MITDLPSGLGIQDVRIGAKGPSGTKLGDISIGADARKVTESPEYVALKKERDALQDKIDALETEVEALNQETRFLGEFRAAYDKDASTKLVSGTPTGASVVDMSTSLSARLATVLAKARKQKRQLTELGEEAKRLDAKMRQMASMRSASPCRAVVEIVAQRPGDVEIELSYRTRQARWTPAYEVRLSGDDKSLELVLFASVVQTSGEDWANAKLEITNAKASRSLAMPALPGPAGRHLDRICAGRPAAKNRILQICR

SEQ ID NO: 39577 - DNA, 963 bp, Unknown
  Obtained from environmental sample
  misc_feature (1)..(963): n is a, c, g, or t
gtgacgacaagagcctcgaactggtgctcttcgcgtcggtggtgcagacgagcggcgaggactgggcaaacgcaaaacttgaaatcaccaacgccaaggccagcaggagtcttgccatgccggcgttgcctgggcccgcaggtcgtcacttggacagaatatgtgccggccgccccgcagccaagaatcgaatactccaaatctgccgctaaacctacgtccatggagaggctgtatgcccagaatatatacgttcgccccgatgccgcgcctgccgcggaattggacatgggcgatgcacagcagatggaggcgtcgagcgtggaagaggtcaagggtctggccaccacttggttgctggaaggcgtgaaggacgtaccgtcggacggggaaccgcacaggttcagggttgtctccgcagagattgagcctactctgctgctgatggccgtgccgcgcatcgaccccaccgtgtacagggccgccaggttccccattccaagcggtattccactgttccccaacgcgccgatggttcatttcgccgggacccaacgcataggcgagtcgccgcttctggttccaagcgcgggcaagccgatacagttgggcttcggcccctataggggcgtgcgcgtggccttgggcaggctggacgcgaaaaaggaaaacgtcggcactttcaccaaggaaacgcagtggactttgacagagcgctttgaaatcagcaatgacctaagcgagcgcgtgacagtggagattcaggacagggaactgagggcgggcaacgacaaggtcaaagtgtctttccagccagaaagaccgcccatggacggttcacagacacctgggatactctgctggaagtttgacctacagcccanagccacaataaatatgcccttcacctaccaaatcaaggttccgcagggcgttgggcgcaccattggtctggaaaactga

SEQ ID NO: 39578 - protein, 320 aa, Unknown
  Obtained from environmental sample
  misc_feature (1)..(320): Xaa is any amino acid
MTTRASNWCSSRRWCRRAARTGQTQNLKSPTPRPAGVLPCRRCLGPQVVTWTEYVPAAPQPRIEYSKSAAKPTSMERLYAQNIYVRPDAAPAAELDMGDAQQMEASSVEEVKGLATTWLLEGVKDVPSDGEPHRFRVVSAEIEPTLLLMAVPRIDPTVYRAARFPIPSGIPLFPNAPMVHFAGTQRIGESPLLVPSAGKPIQLGFGPYRGVRVALGRLDAKKENVGTFTKETQWTLTERFEISNDLSERVTVEIQDRELRAGNDKVKVSFQPERPPMDGSQTPGILCWKFDLQPXATINMPFTYQIKVPQGVGRTIGLEN

SEQ ID NO: 39579 - DNA, 657 bp, Unknown
  Obtained from environmental sample
  misc_feature (1)..(657): n is a, c, g, or t
ttggttatgcagattttatttacctttgtgcaggccttgggcatctgttccctgcttgccctggcaatcggggcggcggttaatattatcgggtttcccacgctggcgaaattctcccagcagcagcttatataccccctcttaatcactatcataaccacggaactgggccccctgcttaccgcttttatagtcatagcccgctcggcgaccgccatagccacggaaattgccggcatggttattaaccatgagatagaggcttatatatccgtaggcgttgatccaatcgagcatctcgccgtgccgcgcttcctcggtatgacaatttccctgctgctcctcaatatctacttttccgcgttcgggctggccggctcgtttatcgtcgcccaggttttccattcccttccggcggattactatttttccaacctgttaatgagcctgaaaatacaggatatttttattttgatggtcaaaagcgtttcctttgggatgattatatccatcgtggcgataaccgagggccttgcggtcgaaagggcgagtaccgaggttcctgtcgcgggactgagggctgtcagcaacgccttcgcgtgttgtatagtattgaatattatactctcggctatgtatcatatagtattggcgtaa

SEQ ID NO: 39580 - protein, 218 aa, Unknown
  Obtained from environmental sample
  SIGNAL (1)...(22)
  DOMAIN (1)...(213): Domain of unknown function DUF140
  misc_feature (1)..(218): Xaa is any amino acid
MVMQILFTFVQALGICSLLALAIGAAVNIIGFPTLAKFSQQQLIYPLLITIITTELGPLLTAFIVIARSATAIATEIAGMVINHEIEAYISVGVDPIEHLAVPRFLGMTISLLLLNIYFSAFGLAGSFIVAQVFHSLPADYYFSNLLMSLKIQDIFILMVKSVSFGMIISIVAITEGLAVERASTEVPVAGLRAVSNAFACCIVLNIILSAMYHIVLA

SEQ ID NO: 39581 - DNA, 576 bp, Unknown
  Obtained from environmental sample
  misc_feature (1)..(576): n is a, c, g, or t
ttgcccccgacgangggagaggtgtgtttcaggggaaagatatttttcgncatgaacaggatggagaatctggcgttcaggcgggaggccgcggtggtttttcaggattccgcgctgtgggcgaaccagagcctttttcaaattctggatttacnccttaggctgcattttccgtcaatgacattgaaacagcgggagaagaggatagaatcggtggtcgccgaggtggggtataaaaaagacctggggatacgtccggccgggctttccatgggcgagcagaagctgatcgcctttgcccgggcccttatctgccgccccatgctgctctatcttgacgaatggacggaatcgctggatgagacagcttcccagcatttaaaaaatatagtaaagaaactgcaaaaagaaggcgtctcggttatcatggtgagccatgacgcgcggactgtccgcgagctttcggattttgttataatgatcttcgggggcaagattttaaacaggtataccaaagaacagattacctctgatggtttcctggtcgaatttattgaaaagggtatggaaacatga

SEQ ID NO: 39582 - protein, 191 aa, Unknown
  Obtained from environmental sample
  DOMAIN (6)...(164): ABC transporter
  misc_feature (1)..(191): Xaa is any amino acid
MPPTXGEVCFRGKIFFXMNRMENLAFRREAAVVFQDSALWANQSLFQILDLXLRLHFPSMTLKQREKRIESVVAEVGYKKDLGIRPAGLSMGEQKLIAFARALICRPMLLYLDEWTESLDETASQHLKNIVKKLQKEGVSVIMVSHDARTVRELSDFVIMIFGGKILNRYTKEQITSDGFLVEFIEKGMET

SEQ ID NO: 39583 - DNA, 798 bp, Unknown
  Obtained from environmental sample
  misc_feature (1)..(798): n is a, c, g, or t
gtgggctactatgcaggctgcagggtaagtgccatgaaaggtcgcctgttagatgctgtcccactcagttccctaacgggcgttggcgcagcacttagtaacaaactggcgaaaatcaacctgcataccgtgcaggatctactcttacaccttcccctgcgctacgaagatcgcacccatctctaccccatcggagaactactgccgggcgtttatgccacggtggaaggcgaagtgctgaactgcaatatctccttcggcggtcggcggatgatgacctgccagatcagcgacggttccggcatcctcaccatgcgctttttcaatttcagcgcggcaatgaaaaatagcctggcggcgggccgccgtgtactggcttatggcgaagcaaagcgcggtaaatatggtgcggagatgatccacccggaataccgcgtgcagggcgatctcagcacgccagaattacaggaaacgctcacgccggtttatccaacaacggaaggcgtaaagcaggccacgctgcgtaaattaaccgaccaggcgctggatctgctcgacacctgcgccattgaagaactcctgccgccggaactgtcacaaggaatgatgacgctaccggaagcgttgcgcactttgcaccgcccgccaccgacgctacagcttagcgatctggaaaccgggcagcatccggaggcaacgtcgtctgattctggaagaactgctggcgcacaacctcagcatgttagccttacgtgccggagcacaacgtttttcatgccagccgctgagcgccaatga

SEQ ID NO: 39584 - protein, 265 aa, Unknown
  Obtained from environmental sample
  DOMAIN (73)...(147): OB-fold nucleic acid binding domain
  misc_feature (1)..(265): Xaa is any amino acid
MGYYAGCRVSAMKGRLLDAVPLSSLTGVGAALSNKLAKINLHTVQDLLLHLPLRYEDRTHLYPIGELLPGVYATVEGEVLNCNISFGGRRMMTCQISDGSGILTMRFFNFSAAMKNSLAAGRRVLAYGEAKRGKYGAEMIHPEYRVQGDLSTPELQETLTPVYPTTEGVKQATLRKLTDQALDLLDTCAIEELLPPELSQGMMTLPEALRTLHRPPPTLQLSDLETGQHPEATSSDSGRTAGAQPQHVSLTCRSTTFFMPAAERQ

SEQ ID NO: 39585 - DNA, 573 bp, Unknown
  Obtained from environmental sample
  misc_feature (1)..(573): n is a, c, g, or t
gtgggtgaaacttcctggaagaatggaacctgcgttcccggatttgacgttggcctggacccggggcggatgaaacctgccgagaaacaggcggtgagggcgttggttaaacaaggtgagctacacctgctggttgccacaaccgttattgaagtcggcgttgatgtgcctaacgccagtctgatgattatcggaaacccggagcgtctgggtctggcgcagttacaccagctgcgcgggcgcgtaggtcgtggcgcggtggcttctcactgcgtgctgctctacaaaacgccgctttctaaaacggtgcaaattcgcctgcaagtgctgcgcgacagtaacgacggttttgtgattgcgcaaaaagatctggagattcgcggccctggcgaattgttaggcacgcgtcagacgggtaatgctgaatttaaagtggcggatttactgcgcgatcaggcgatgatcccggaagttcagcgcctggcacgccatattcacgaacgttacccacaacaggcaaaagccctgatagaacgctggatgccggagacggaacgttactcgaatgcgtaa

SEQ ID NO: 39586 - protein, 190 aa, Unknown
  Obtained from environmental sample
  DOMAIN (9)...(86): Helicase conserved C-terminal domain
  misc_feature (1)..(190): Xaa is any amino acid
MGETSWKNGTCVPGFDVGLDPGRMKPAEKQAVRALVKQGELHLLVATTVIEVGVDVPNASLMIIGNPERLGLAQLHQLRGRVGRGAVASHCVLLYKTPLSKTVQIRLQVLRDSNDGFVIAQKDLEIRGPGELLGTRQTGNAEFKVADLLRDQAMIPEVQRLARHIHERYPQQAKALIERWMPETERYSNA

SEQ ID NO: 39587 - DNA, 357 bp, Unknown
  Obtained from environmental sample
  misc_feature (1)..(357): n is a, c, g, or t
atgagcgccgacgctcccgccgcggtcttaacttcggtactctggcactggggttcgtattatacgttccttgtgcaaagcgtcataaacggctcttttactaccgagccatggtttggttcccttaaagacggcgttgttaatatcgcccctctgaacaaaaatatctctttgaatgaacagaccgccagcatacttgaagaggaacggcggcgcattgaatccggaacttttgacgtgttcagcggggtcatggaaaccaacaaaggcaaaagcattggcagggaaggagaaaatctgcctgatgatgaaattcgtaacggtattaactggtactatcgtacggttgttgaataa

SEQ ID NO: 39588 - protein, 118 aa, Unknown
  Obtained from environmental sample
  misc_feature (1)..(118): Xaa is any amino acid
MSADAPAAVLTSVLWHWGSYYTFLVQSVINGSFTTEPWFGSLKDGVVNIAPLNKNISLNEQTASILEEERRRIESGTFDVFSGVMETNKGKSIGREGENLPDDEIRNGINWYYRTVVE

SEQ ID NO: 39589 - DNA, 1236 bp, Unknown
  Obtained from environmental sample
  misc_feature (1)..(1236): n is a, c, g, or t
atgaacagaccgccagcatacttgaagaggaacggcggcgcattgaatccggaacttttgacgtgttcagcggggtcatggaaaccaacaaaggcaaaagcattggcagggaaggagaaaatctgcctgatgatgaaattcgtaacggtattaactggtactatcgtacggttgttgaataatttgtttaccataccgcgttcaacatcgcgcaataattaccttcagttattgtttgtattcgcggccttcgcgcttatggcggttacgtcctatctttttatcggacgtattctgcagagccgccttttaagcggggcaaacgagcttcttttttctgccgaatccatgttagagccggactttcagaagccgaaaccanctcttttcaattcctattacgctgtacagaatatgctagagagagacgcaagccgtgatgaaattctcgattacctaaccgaaacaacccattggatgcgcagacccagtcaagggcttatgacttacaatggaatttatggatatataaatggggaattttatgatggcattggattgcaccctagcaaggattacgttccacaaacaatgccttggtatcaagcgggactgagaagcggcagattcgtatcttatacagcaccctatagagacttgcgtactggaaatactattgtgtctgtagttaggaatgttgacataagcaatggcgatgtagtgggaattctagtaatagacattaacattgactggttgatggaatatgtgagttcaattaagctcgctccgggtggttatggtatgctcctcagccagaatctgatattcgttacatatccagatagcaactatttaggcttgcaattacaggatttagggggtgaatatcagtacatagcaagtactctgcgttcaggaaaggatatatctgccgctaaaataacaaattctgacagcagttccgcaatagttttttttaaacatatctttaacaagtggtatttagggatagtaactccacaatacgaattttaccaagacctttataaaacttcccaaatactcaccgtgctggggcttgtccttgccttatttttgtctttcatactctggaaattatcttctgagagaacttatgctattgaaaaatctctaaaccttgaacaagctataatanaacaatggcagaactcgtggaatgtcgcgatggtacacaggtgggcacatagatag

SEQ ID NO: 39590 - protein, 411 aa, Unknown
  Obtained from environmental sample
  DOMAIN (213)...(293): Cache domain
  misc_feature (1)..(411): Xaa is any amino acid
MNRPPAYLKRNGGALNPELLTCSAGSWKPTKAKALAGKEKICLMMKFVTVLTGTIVRLLNNLFTIPRSTSRNNYLQLLFVFAAFALMAVTSYLFIGRILQSRLLSGANELLFSAESMLEPDFQKPKPXLFNSYYAVQNMLERDASRDEILDYLTETTHWMRRPSQGLMTYNGIYGYINGEFYDGIGLHPSKDYVPQTMPWYQAGLRSGRFVSYTAPYRDLRTGNTIVSVVRNVDISNGDVVGILVIDINIDWLMEYVSSIKLAPGGYGMLLSQNLIFVTYPDSNYLGLQLQDLGGEYQYIASTLRSGKDISAAKITNSDSSSAIVFFKHIFNKWYLGIVTPQYEFYQDLYKTSQILTVLGLVLALFLSFILWKLSSERTYAIEKSLNLEQAIIXQWQNSWNVAMVHRWAHR

SEQ ID NO: 39591 - DNA, 894 bp, Unknown
  Obtained from environmental sample
  misc_feature (1)..(894): n is a, c, g, or t
ttgaagagctggacaagcttggatttgacaatgtcctatcgattgaaagttccgccgcccattacgattggaatccctttcatcaagtttccctttgtccgctttattcttcctcaagaacgcttgaatcggggagaggagatcaacctggccgtgtccgaattgtcatgcccgctgttttttgtcctctggaacgatctcaagttcctccgaagcggcggggccgggcgaatggcggagcgcctcttcgccggggcccagggggaaaaaaatatttacaaaaggctctgcacgacgcctttgatccagaacgcgcgttcggaaaccatgcccaccctgattgtccccgcatttgttcacgaaaaaaaagccgaaaaagtaataagaacccttccgttcattccgaggaaggaagggcaattaactttgtacccttttgatggaatcggtatttacgacagggagcgatttatccgcctgagcggatttgatccttacattaaaaatttctactggcagctcatggattttggtttccgttccagcctatggggtgaagaaatcgcctctacggctctgattaagctttcatacgaaggacttgttcccgaagatgacagtacggtcgatgaaggctttttaagattttttctgaaaaaccttactccggtttttaagggcgattatgcccacgttccgttgcggcgttttccgggatacctaaaaatgaggggcggccttttagccgcatgggatgaatttttttccgcacgcgcctgggtcaaaaccaaccgctttcgttttagctctgacgctggaattatgacggagcttttcgcttcgattgatactgaggctgaagctgaagatgagttagcaatggaggaaaagtga

SEQ ID NO: 39592 - protein, 297 aa, Unknown
  Obtained from environmental sample
  misc_feature (1)..(297): Xaa is any amino acid
MKSWTSLDLTMSYRLKVPPPITIGIPFIKFPFVRFILPQERLNRGEEINLAVSELSCPLFFVLWNDLKFLRSGGAGRMAERLFAGAQGEKNIYKRLCTTPLIQNARSETMPTLIVPAFVHEKKAEKVIRTLPFIPRKEGQLTLYPFDGIGIYDRERFIRLSGFDPYIKNFYWQLMDFGFRSSLWGEEIASTALIKLSYEGLVPEDDSTVDEGFLRFFLKNLTPVFKGDYAHVPLRRFPGYLKMRGGLLAAWDEFFSARAWVKTNRFRFSSDAGIMTELFASIDTEAEAEDELAMEEK

SEQ ID NO: 39593 - DNA, 651 bp, Unknown
  Obtained from environmental sample
  misc_feature (1)..(651): n is a, c, g, or t
ttgtctgggaaaagggggcggctttgtacaacgggcactgtaaggccgaatatccggaaatttgcgcgctctgcgatgaatactatacctacaacttttaacgaaaatcttcccacttatactgcggtgggggggaatgaaaggaaagcctccacgggcctttcggcggtgatattgaacaggggagggaggtatccccgttacagcttctttgaagagctggacaagcttggatttgacaatgtcctatcgattgaaagttccgccgcccattacgattggaatccctttcatcaagtttccctttgtccgctttattcttcctcaagaacgcttgaatcggggagaggagatcaacctggccgtgtccgaattgtcatgcccgctgttttttgtcctctggaacgatctcaagttcctccgaagcggcggggccgggcgaatggcggagcgcctcttcgccggggcccagggggaaaaaaatatttacaaaaggctctgcacgacgcctttgatccagaacgcgcgttcggaaaccatgcccaccctgattgtccccgcatttgttcacgaaaaaaaagccgaaaaagtaataagaacccttccgttcattccgaggaaggaagggcaattaactttgtacccttttga

SEQ ID NO: 39594 - protein, 216 aa, Unknown
  Obtained from environmental sample
  misc_feature (1)..(216): Xaa is any amino acid
MSGKRGRLCTTGTVRPNIRKFARSAMNTIPTTFNENLPTYTAVGGNERKASTGLSAVILNRGGRYPRYSFFEELDKLGFDNVLSIESSAAHYDWNPFHQVSLCPLYSSSRTLESGRGDQPGRVRIVMPAVFCPLERSQVPPKRRGRANGGAPLRRGPGGKKYLQKALHDAFDPERAFGNHAHPDCPRICSRKKSRKSNKNPSVHSEEGRAINFVPF

SEQ ID NO: 39595 - DNA, 642 bp, Unknown
  Obtained from environmental sample
  misc_feature (1)..(642): n is a, c, g, or t
atggttcttgcccgccccgccctgtcgcttgtgatagaaacttccggcattggctggaaagcggacgagctaaaagccctggccgctttgcaggcggctccgaggaaaaaccacatggcccctctttcgtggatagtgtcgctggacgcgtttgattctgagcgttacaaggagcttcgagggcccggtttttccgaggcccaggattgcgctaaaacgttgctctcgctttttccgaatgacgcctacgttcaggcggtgcgccttaaaggcgcggaagacgacatcgaaaaattttaccgcttttggaagggggagagctctaagcaggttatcattcaaaagtacgacgattttgccggggccctttccaaaatgcaggccgccgatctttcccctgtaaagcgccgcccctgctggcatattcagagggacatgaacatccttctggacggcagagtcccgagttgcagggaaaacctggcggctctaaaaggaaacgccgaggtttggggaaacgctttctctgacgatctttcacttgtctgggaaaagggggcggctttgtacaacgggcactgtaaggccgaatatccggaaatttgcgcgctctgcgatgaatactatacctacaacttttaa

SEQ ID NO: 39596 - protein, 213 aa, Unknown
  Obtained from environmental sample
  misc_feature (1)..(213): Xaa is any amino acid
MVLARPALSLVIETSGIGWKADELKALAALQAAPRKNHMAPLSWIVSLDAFDSERYKELRGPGFSEAQDCAKTLLSLFPNDAYVQAVRLKGAEDDIEKFYRFWKGESSKQVIIQKYDDFAGALSKMQAADLSPVKRRPCWHIQRDMNILLDGRVPSCRENLAALKGNAEVWGNAFSDDLSLVWEKGAALYNGHCKAEYPEICALCDEYYTYNF

SEQ ID NO: 39597 - DNA, 984 bp, Unknown
  Obtained from environmental sample
  misc_feature (1)..(984): n is a, c, g, or t
ttgggcttgttcgccaaggcgcagggagccaggaggcctccttgtatacctgctcgacaaacaggggcttttctgtttcataatggattaatgaagtgcgctttaatttggctggtgatagcgctctgctttctttcatgcgccaaaaaggatacgcaggcaggcaatgcggtcccggttacggaaaacaagggggaagacttgccggatctggccgaagcaattgccaatttttacagggcagggcaggagacggcgggccttgatcctgacaggggggcttatgtcgaagactactggcgattgatctttggcgaagcgggaatcccggacaggcttgccagaaatgtcgctgcctcggcccttgaaagtccctcctttgttatggaactacttgtaatcttgcagcaggatccgtttacttattatctggttgacaagcagcaccccttgcctaacggctacgagcctgacgatttggttcccctgcaagccgggctttaccgccttgaccagagcgggataaggctgcgaaaaattgccgccgacgctttgcaggaaatggcagaagcggcggccaaagatggaattgcttttacgataggctcggcctaccgctcggcggcttaccaggcccaggtttacgaacgtgctgtgaacgcttacggcaaggaaaccgctgaccgcgaatccgcccagagcggcaaaagccagcaccagctcggactgaccatggacttctccccgattgacgatgcctttgccgcaactcccgccagtaaatggctaaaagaaaacgcaagccgctttggctggtcgctttcctttcccgacggctacgaggaaataacaggctaccgctgggaaagctggcattaccgctatgtgggcaaagacctggctgcgttcatcgacaagtactttaacggaatacaacaatacgcattacgctttatttatgaatttacgcgcctaaccgcctga

SEQ ID NO: 39598 - protein, 327 aa, Unknown
  Obtained from environmental sample
  DOMAIN (174)...(298): D-alanyl-D-alanine carboxypeptidase
  misc_feature (1)..(327): Xaa is any amino acid
MGLFAKAQGARRPPCIPARQTGAFLFHNGLMKCALIWLVIALCFLSCAKKDTQAGNAVPVTENKGEDLPDLAEAIANFYRAGQETAGLDPDRGAYVEDYWRLIFGEAGIPDRLARNVAASALESPSFVMELLVILQQDPFTYYLVDKQHPLPNGYEPDDLVPLQAGLYRLDQSGIRLRKIAADALQEMAEAAAKDGIAFTIGSAYRSAAYQAQVYERAVNAYGKETADRESAQSGKSQHQLGLTMDFSPIDDAFAATPASKWLKENASRFGWSLSFPDGYEEITGYRWESWHYRYVGKDLAAFIDKYFNGIQQYALRFIYEFTRLTA

SEQ ID NO: 39599 - DNA, 993 bp, Unknown
  Obtained from environmental sample
  misc_feature (1)..(993): n is a, c, g, or t
atgcttccctcccgccccggctgtggtggtcgtgtggctggcctctctcctggcggggcaaggtgccgggtattcctcaactggactgtgggggaaagcaacttgcgccattgcgtgacgctcaccggcgtccgccatgtgctgaccgcctccgcattgcttgaacgcctgggacgccagggcttcgttgcggaaaacattcctgtacagtggctcccgctggaagaaacggtcaaaaacctcggcctcgcgcaaaagatcggcggcgcgctgaaggcgcgcttccagcgctcgttcgccggctaccccatccccgaaacggcggcggtgcttttcacctccggctcggaatccctgcccaaggctgtgccgctcacccacctcaatcttgtgaccaacgccggcgatgccatagcagccctgcgggtgaagaaccacgacacggtcctcgccatgctgccgcccttccatgcgttcggacttttggtggacattgtgctgccgctcaccttcggcctgcgcacggcctatcaccccaaccccacggaatccggcccgctcacggccatggtgcgggatttcaggctctcgctcctggccgccgccccaaccttcctggaggccatgcttgaacgcgcgcgcgggacacaaaaccttgcgcccctgcgcttcgcctttgtgggcgcggaaaaatgcccggatcgcgtctatcgagcctttgcccgccaatgcccggaggctgccctgtgcgaaggatacggcattaccgaatgttcccctgtcgtttccgtgaaccgcacggacaatgtggtttccggcagcatcggccatgccctggcttccgtggtcaccgccgtggtgcgcgaggaagacggtcgcatcctcggccgcgccgggacggaggaacccggcatgctgctggtgcgcggccccagcatcttcggcggctatctcggagatgttccttcgccgttgggaattaaaccgcgataa

SEQ ID NO: 39600 - protein, 330 aa, Unknown
  Obtained from environmental sample
  DOMAIN (4)...(327): AMP-binding enzyme
  misc_feature (1)..(330): Xaa is any amino acid
MLPSRPGCGGRVAGLSPGGARCRVFLNWTVGESNLRHCVTLTGVRHVLTASALLERLGRQGFVAENIPVQWLPLEETVKNLGLAQKIGGALKARFQRSFAGYPIPETAAVLFTSGSESLPKAVPLTHLNLVTNAGDAIAALRVKNHDTVLAMLPPFHAFGLLVDIVLPLTFGLRTAYHPNPTESGPLTAMVRDFRLSLLAAAPTFLEAMLERARGTQNLAPLRFAFVGAEKCPDRVYRAFARQCPEAALCEGYGITECSPVVSVNRTDNVVSGSIGHALASVVTAVVREEDGRILGRAGTEEPGMLLVRGPSIFGGYLGDVPSPLGIKPR

SEQ ID NO: 39601 - DNA, 393 bp, Unknown
  Obtained from environmental sample
  misc_feature (1)..(393): n is a, c, g, or t
ttgtggattcaggaatgtatgaccagagatttttattttccggaaagtatgaaaaacttaaccgctttgaaagaattgggaataagcgcattagaccgccttccggattttataggtgaattgaaaaacttaaccagattggacattagccacaataaacttgaggttttaccggattttatcggtaacttgaaaaaactaagaatactaaatctgcacagcacatggatcacagaattgcctgaatgggttggcaatctgaaaaaccttgtcgatttggacataacaaacaacggcatcctgacagacccccaaatagaaaaaaaactgccaaaacttaaaaggttttctgacagctataacgattacagtataaaaaaacctcattactaa

SEQ ID NO: 39602 - protein, 130 aa, Unknown
  Obtained from environmental sample
  misc_feature (1)..(130): Xaa is any amino acid
MWIQECMTRDFYFPESMKNLTALKELGISALDRLPDFIGELKNLTRLDISHNKLEVLPDFIGNLKKLRILNLHSTWITELPEWVGNLKNLVDLDITNNGILTDPQIEKKLPKLKRFSDSYNDYSIKKPHY

SEQ ID NO: 39603 - DNA, 846 bp, Unknown
  Obtained from environmental sample
  misc_feature (1)..(846): n is a, c, g, or t
atggaaaccatactttcaattttaaataaaacaactgattttttgcaaaaacatggagtgccaaatgccaaactggattcgcaactcttgctttcgcacggtcttggcttaaatagaatggatttattcctgaattttgaccgcccattgcaagaaaaagagctatccgtgcttcgtcaaattgtggcaaggcgagccaaaagagaacctttgcagcacataatcggtagcgtgagttttagggggcaccaaataaaatgcgataaaagagcattagttcccaggcaagaaacggaattgattttggatatattgatggagtcagtaagggcgcgattaatcgcgcccttactggatgttggcacaggcaccggagctattgcaatagcggctgccttggaattgaatgcaaatgttgttgcctgcgatgtttcggaagaagcactcagccttgcaaaagaaaatgttgcctttcataaacttgaagaaaaaatttcccttgtgaaaagtgatttgctttctaatgtgccaaacaatactaaattcgatgctttgctcgcaaattttacatacattccgcttggcgataaaaattcattgcaaccagaagtccttaatggcgaccctcacttagcgctttttggcggcacagacggtttggagctaattcgccgccttctaaacacctgcgcaaattatttaatgcctgatgctcctgtgattttggaaattgccagtggtcaggaaaaaattttgcaaagtgaaagttttgccggaatgaaatgggttgaaaaccgaaaagattatgccgagcaagcaagattttctatattcaaaaaatgctag

SEQ ID NO: 39604 - protein, 281 aa, Unknown
  Obtained from environmental sample
  DOMAIN (99)...(253): Methyltransferase small domain
  misc_feature (1)..(281): Xaa is any amino acid
METILSILNKTTDFLQKHGVPNAKLDSQLLLSHGLGLNRMDLFLNFDRPLQEKELSVLRQIVARRAKREPLQHIIGSVSFRGHQIKCDKRALVPRQETELILDILMESVRARLIAPLLDVGTGTGAIAIAAALELNANVVACDVSEEALSLAKENVAFHKLEEKISLVKSDLLSNVPNNTKFDALLANFTYIPLGDKNSLQPEVLNGDPHLALFGGTDGLELIRRLLNTCANYLMPDAPVILEIASGQEKILQSESFAGMKWVENRKDYAEQARFSIFKKC

SEQ ID NO: 39605 - DNA, 564 bp, Unknown
  Obtained from environmental sample
  misc_feature (1)..(564): n is a, c, g, or t
atgctagcatatcacaacgaaaaatttatcaatagcgaacacggaaggtctgttcgcattatgtctgagtttttggcttcaaaagcaattttagacgataacaaaatagacaaaacaattgttatttttggttctgcaagaatacaaccgcaaaataaatactatcaagcggcaaataacttggctttcaagcttggacagtgggcaaaaaaccaaaaagaaagatacgctatatgcacaggcggcggaccaggcattatggaggcaggcaacaaaggtgcaaaagaagctgatgcccagtctcttggcttttgtatagaattgccttttgagcaaagcacaaatccttatgtggataaaaatttggaaattcagttccattacttttttttgcgcaagttttggtttttgtcaaagtctgcggcaataatagcttttcctggcggctggggaacttttgatgaattatttgaatccttgactatgcttcaaaacaacaaaacgactaatgtcccacttgttctgttggaacagaattctgaaaaacatctcggccgaatctga

SEQ ID NO: 39606 - protein, 187 aa, Unknown
  Obtained from environmental sample
  DOMAIN (87)...(187): Possible lysine decarboxylase
  misc_feature (1)..(187): Xaa is any amino acid
MLAYHNEKFINSEHGRSVRIMSEFLASKAILDDNKIDKTIVIFGSARIQPQNKYYQAANNLAFKLGQWAKNQKERYAICTGGGPGIMEAGNKGAKEADAQSLGFCIELPFEQSTNPYVDKNLEIQFHYFFLRKFWFLSKSAAIIAFPGGWGTFDELFESLTMLQNNKTTNVPLVLLEQNSEKHLGRI

SEQ ID NO: 39607 - DNA, 543 bp, Unknown
  Obtained from environmental sample
  misc_feature (1)..(543): n is a, c, g, or t
gtggatatttttgatactatcggaaccctcgtcggagttacaactcaggctaaacttattgacgatcaaggaaatattcccaacgtaaaacaggctcttctgtcagacgctatcggcactgtagccggagcggctcttggtacttctacggttaccagttacattgaaagctcagccggcgtttcagcgggcggccgtacggggcttaccagccttactacaggcatacttttccttttagccttgtttctttcgccgattttcctgcttataccgtccgccgctacggctccggctttaatctttgtcggtttctttatgctccagcctgtaacaagcattgattttaccgatcctaccgaaggcataccggcgttccttacaattataattatgcctctcgcttacagtattgcagacggcatagtgtacggaattatttcctatgttcttcttaaatttgccggaagaaaagctaaagatgttacggttataacatgggtgctgtttgttgtgttcatactgcatattattcttaaatag

SEQ ID NO: 39608 - protein, 180 aa, Unknown
  Obtained from environmental sample
  misc_feature (1)..(180): Xaa is any amino acid
MDIFDTIGTLVGVTTQAKLIDDQGNIPNVKQALLSDAIGTVAGAALGTSTVTSYIESSAGVSAGGRTGLTSLTTGILFLLALFLSPIFLLIPSAATAPALIFVGFFMLQPVTSIDFTDPTEGIPAFLTIIIMPLAYSIADGIVYGIISYVLLKFAGRKAKDVTVITWVLFVVFILHIILK

SEQ ID NO: 39609 - DNA, 744 bp, Unknown
  Obtained from environmental sample
  misc_feature (1)..(744): n is a, c, g, or t
atgaacaggctggaaaagtcgatagattctctttttaaaaattatgatgattacggcatggttaaccgctctgatactgagaatcttcccggaagggaaagcataaaaaacattgtgcgcggtttggaagaagtgctttttcctggctaccttgaaaatgtccgcaccgataacggaaacctgcgcaatattacaagcgataagattaatcagttggcgcaaaaattgatccgcgaggtagaaaagagccttgctttttccgcgcgtattggagcgttaaactgcggacatgggggctgcagagcggcggccgcccttgtaacggacgagttctttgaagaattgccgaaaataagggcttttctggcaaaagaccttgaagccgccgtccgcggcgaccctgccgcaatgagcgcggacgaagttatcctttcttatcccggatttcagtcgataaccgtacaccgcatggcgcactttttatggacgcggcaggttccccttataccgcgtatgatgaatgagcatgttcacaggagaaccggcattgatattcatccgggcgctcaaataggagagtcgttttttatagatcatgggacaggaaccgttataggagagaccacaataataggcaacaatgtaaaactttatcagggcgttacccttggggcgttatctgtaaaaaaagaggaaagcggccgtaagcgccatcctacaatagaggataatgttactatttag

SEQ ID NO: 39610 - protein, 247 aa, Unknown
  Obtained from environmental sample
  misc_feature (1)..(247): Xaa is any amino acid
MNRLEKSIDSLFKNYDDYGMVNRSDTENLPGRESIKNIVRGLEEVLFPGYLENVRTDNGNLRNITSDKINQLAQKLIREVEKSLAFSARIGALNCGHGGCRAAAALVTDEFFEELPKIRAFLAKDLEAAVRGDPAAMSADEVILSYPGFQSITVHRMAHFLWTRQVPLIPRMMNEHVHRRTGIDIHPGAQIGESFFIDHGTGTVIGETTIIGNNVKLYQGVTLGALSVKKEESGRKRHPTIEDNVTI

SEQ ID NO: 39611 - DNA, 789 bp, Unknown
  Obtained from environmental sample
  misc_feature (1)..(789): n is a, c, g, or t
gtgttaaatttgggcatggttccgattctcccctgtatcggctggagtccgtctggcaagccgtacaatgtaccgagcgatgaaatcgcccttgccgtctcaaaagcgcttggagctgtcaaattgttcattgtaacagccgccgacgggctgaatattgcgagacttaccccaaaagagacggaagatttgataaaaacaggctctattttccttcgggaacttaaattagccctaaaagccagtcaggaaggcgttcacagggtgcatattatcgatggaaggctggaaggagcggttttgaaggagatttactccaatttaggcgtaggaacgatgatttataccgatgaatacgactcgatccgccccttacattcaagagatttgcccgatattctgcgattaatggagcctttgatgcaaaaaggcatccttataaggagaaatcccgagcaaattcaggaaaaaaagaacgattattccgttttagagattgacggctctatccgggcttgcggcgcattgattgactggggcgaaaaacagggagaaatcgccgctgtagcgacagacccgaattacaccgatctcggtctcggcaggaaaattgtcggcttccttatcgaaaaagccaataaaagcaaaatgaggcgagcttttgtgctaaccacccaatcgcangactggtttgaatcgctgggcttcaagaggcatccgtggacagtctgcccgagaagaaacgcaaagtttatgatcaagtccgaaaaaagcaagtctttgcgctag

SEQ ID NO: 39612 - protein, 262 aa, Unknown
  Obtained from environmental sample
  DOMAIN (162)...(237): Acetyltransferase (GNAT) family
  misc_feature (1)..(262): Xaa is any amino acid
MLNLGMVPILPCIGWSPSGKPYNVPSDEIALAVSKALGAVKLFIVTAADGLNIARLTPKETEDLIKTGSIFLRELKLALKASQEGVHRVHIIDGRLEGAVLKEIYSNLGVGTMIYTDEYDSIRPLHSRDLPDILRLMEPLMQKGILIRRNPEQIQEKKNDYSVLEIDGSIRACGALIDWGEKQGEIAAVATDPNYTDLGLGRKIVGFLIEKANKSKMRRAFVLTTQSXDWFESLGFKRHPWTVCPRRNAKFMIKSEKSKSLR

SEQ ID NO: 39613 - DNA, 930 bp, Unknown
  Obtained from environmental sample
  misc_feature (1)..(930): n is a, c, g, or t
gtgggcttgcctacaggcgcgggatttgcggaattggggcataaagtgatatgtgtggataaagatacacagaaaatagactgtctgaataaagggaaaataacattatatgaaacggggctggaagaactcctgcacaaaaatgcctattgcggcaggctcagatttaccgctaaaacggaagaaggtgtgaaaaatgccgatgtagtaattattgcagtcggcacaccggcacatcctgtcacaaatgagccggatatgaaatatattcacgcggcagttacggaactggcgcaatatttgaccggctatacagtaatagcaataaaatctaccgtaccggtcggaacgggagataatttgacggatattatttcaaaaagcaactctaatgctgattttgatgttgtatcgctgccggaattcctgagggaagggtttgccgtatatgattttttcaatcctgacagagtagttataggagctgattctgaaagagcaaaaactgttatatccgaactataccgttcttttgaagataagtcggttttattatatgtttcaagaagatcgtcagaagcgataaagtatgccgcaaattcgtttttggctgtcaaagtgcactatatcaatgaaatgtccgacttttgcgaaaaatcgggcgcaaatattgctgaagtcgcaaaagggatgggattagacacaagaatcggttctaaatttttaaatccgggaccgggatacggcggttcctgtttcccaaaagacacaagcgctatggttgaaatggcccgtaactacggagtaaagcttacattgatagaaacagccgttgaacagaataaactgcgtaaaaaggggatggctcgcnagattatggacacggcgcgccctttttccataatagccgtttttgggtaccgcttttaa

SEQ ID NO: 39614 - protein, 309 aa, Unknown
  Obtained from environmental sample
  DOMAIN (189)...(284): UDP-glucose/GDP-mannose dehydrogenase family, central domain
  misc_feature (1)..(309): Xaa is any amino acid
MGLPTGAGFAELGHKVICVDKDTQKIDCLNKGKITLYETGLEELLHKNAYCGRLRFTAKTEEGVKNADVVIIAVGTPAHPVTNEPDMKYIHAAVTELAQYLTGYTVIAIKSTVPVGTGDNLTDIISKSNSNADFDVVSLPEFLREGFAVYDFFNPDRVVIGADSERAKTVISELYRSFEDKSVLLYVSRRSSEAIKYAANSFLAVKVHYINEMSDFCEKSGANIAEVAKGMGLDTRIGSKFLNPGPGYGGSCFPKDTSAMVEMARNYGVKLTLIETAVEQNKLRKKGMARXIMDTARPFSIIAVFGYRF

SEQ ID NO: 39615 - DNA, 309 bp, Unknown
  Obtained from environmental sample
  misc_feature (1)..(309): n is a, c, g, or t
ttgacagccaaaaacgaatttgcggcatactttatcgcttctgacgatcttcttgaaacatataataaaaccgacttatcttcaaaagaacggtatagttcggatataacagtttttgctctttcagaatcagctcctataactactctgtcaggattgaaaaaatcatatacggcaaacccttccctcaggaattccggcagcgatacaacatcaaaatcagcattagagttgctttttgaaataatatccgtcaaattatctcccgttccgaccggtacggtagattttattgctattactgtatag

SEQ ID NO: 39616 - protein, 102 aa, Unknown
  Obtained from environmental sample
  misc_feature (1)..(102): Xaa is any amino acid
MTAKNEFAAYFIASDDLLETYNKTDLSSKERYSSDITVFALSESAPITTLSGLKKSYTANPSLRNSGSDTTSKSALELLFEIISVKLSPVPTGTVDFIAITV

SEQ ID NO: 39617 - DNA, 363 bp, Unknown
  Obtained from environmental sample
  misc_feature (1)..(363): n is a, c, g, or t
gtggtcagcggtctgggcatctgcgggcgcggctattgctgccacgctgtttccgacaagattaagccggtatccataaaaatggcaaaagaccagaacctttcgtttaactcaatgaaaatctccggtccctgcgggcggctgctctgctgtctttcctatgaatatggcttttactgcgaacagatacgccatgttccccaagcgggggcccgcgtcagttacagcaatgaaatatggacggtaaccgaatcaaacatggttaccggacaggtaaaaatgatcaacaacgacagccgcatagtcacgattcccgccggtaattttgagaatgtcgaaaaccgctggcgtgttaagggctag

SEQ ID NO: 39618 - protein, 120 aa, Unknown
  Obtained from environmental sample
  misc_feature (1)..(120): Xaa is any amino acid
MVSGLGICGRGYCCHAVSDKIKPVSIKMAKDQNLSFNSMKISGPCGRLLCCLSYEYGFYCEQIRHVPQAGARVSYSNEIWTVTESNMVTGQVKMINNDSRIVTIPAGNFENVENRWRVKG

SEQ ID NO: 39619 - DNA, 609 bp, Unknown
  Obtained from environmental sample
  misc_feature (1)..(609): n is a, c, g, or t
atggattttactattggtcctgatgagcggcggtatctgctggcggttgcccgcgaaactattgccgctgaactggaagaccgtaaaccccagtaccccactgacgaagccgccaaaagccccgtgttgaaacaactttgcggggcctttgtcaccctgcacaaaaatactcccagcaaggctgccggcggcgaccttggcggcgcctctggcgagcgcagtttgcgcggctgcattggcaggatgacggcttccctgcccctggaagagacggtccgcaccatggcaagggaagccgcgtttggcgacccccgttttccacccctcagaaaagaagagctggcccgctgccagattgaaatatccgcgctttcccccatgtcggcctgtcccaatccccggcaggtcaaagtcggcgttcacggtctgtacctgatcaggggagggagagccggggtgctgctgccccaggttccggttgaacagggatggaatttgaatgaatatttggactacatttgcgttaagtcggggcttcctccaggttcttatgacgccccggacgcgcaattgtatacttttacagctatagtttttggcgaggaataa

SEQ ID NO: 39620 - protein, 202 aa, Unknown
  Obtained from environmental sample
  DOMAIN (8)...(202): AMMECR1
  misc_feature (1)..(202): Xaa is any amino acid
MDFTIGPDERRYLLAVARETIAAELEDRKPQYPTDEAAKSPVLKQLCGAFVTLHKNTPSKAAGGDLGGASGERSLRGCIGRMTASLPLEETVRTMAREAAFGDPRFPPLRKEELARCQIEISALSPMSACPNPRQVKVGVHGLYLIRGGRAGVLLPQVPVEQGWNLNEYLDYICVKSGLPPGSYDAPDAQLYTFTAIVFGEE

SEQ ID NO: 39621 - DNA, 759 bp, Unknown
  Obtained from environmental sample
  misc_feature (1)..(759): n is a, c, g, or t
ttggcccacggaaagtcgatgccgattataagaaaaaacgttccgggcgcgaaagctggtattgtcaacaacctggcctggatagaaagcgcgacaaataaacaggaagatatcgaagcggcaaaacgctgggatttggcttttaatcgctggtttatggaaccgctcttcggaaaagagtacccggaagaaatggtttcctggtacgggaaaaatatgcctgaaataaaaagcggcgattttgagcttatggcagctcccatggattttttaggcatcaattactatacccgccgccttgttgcgtatgccccggaagacagccatattaaagcgaagcaggtttaccgtcctcatattaagcgggcggaatttgaagaatgggaattgtaccctgaaggattgtacaagctactcgttaacattaaggaacagtataataatattccggtttatatcgccgaaaacggcacatcctgccctgacagaatttccgaagacggctgcgtccatgacccggaacgcgtggaatattaccgccgacattttgccgccacatggcaggccattcaggaaggctgcgatcttcggggttattttgtctggagcctttatgacaacctggaatggggttttggatttaccaaacgctttggctttgtttatatagaccgtgagaataacctgaaacgcattatcaaggattcagggcatttcatcgcttctgtgtatgataagaatggctttcgcattgattga

SEQ ID NO: 39622 - protein, 252 aa, Unknown
  Obtained from environmental sample
  DOMAIN (1)...(249): Glycosyl hydrolase family 1
  misc_feature (1)..(252): Xaa is any amino acid
MAHGKSMPIIRKNVPGAKAGIVNNLAWIESATNKQEDIEAAKRWDLAFNRWFMEPLFGKEYPEEMVSWYGKNMPEIKSGDFELMAAPMDFLGINYYTRRLVAYAPEDSHIKAKQVYRPHIKRAEFEEWELYPEGLYKLLVNIKEQYNNIPVYIAENGTSCPDRISEDGCVHDPERVEYYRRHFAATWQAIQEGCDLRGYFVWSLYDNLEWGFGFTKRFGFVYIDRENNLKRIIKDSGHFIASVYDKNGFRID

SEQ ID NO: 39623 - DNA, 537 bp, Unknown
  Obtained from environmental sample
  misc_feature (1)..(537): n is a, c, g, or t
atgcgctcccacggcatagaccggagcgtctgggatcgctacacggatgttaaagcttcctggtactaccaggtggttgaaccggggtataaatacaatatcccggacatactatcagccttgggaagggcccagctacgcagggcttacgatctactttccatgcgtgaaaagatagcttcagtttacgatgaagcttttcgcgatgactgtcgttttctgattcctccgaccggatgcggggatgcccgccacctttacccgctgcggcttcgcctggaaaatatttccgttacgcgcaacgctttcgccgaaaagctgcaggaaaggggcgttggtatttcggtacactttatcccacttcacaccatgccttattataaaaaccgctactcccttaaagacaatgatttccccgaaacgctaaaatctttcaatcagaccatttccctgcccatctggcctggcatggcagaaagccagattgagcgggtaattacaatagtcaaatctgtcgcttctgaatatactgggtaa

SEQ ID NO: 39624 - protein, 178 aa, Unknown
  Obtained from environmental sample
  DOMAIN (1)...(170): DegT/DnrJ/EryC1/StrS aminotransferase family
  misc_feature (1)..(178): Xaa is any amino acid
MRSHGIDRSVWDRYTDVKASWYYQVVEPGYKYNIPDILSALGRAQLRRAYDLLSMREKIASVYDEAFRDDCRFLIPPTGCGDARHLYPLRLRLENISVTRNAFAEKLQERGVGISVHFIPLHTMPYYKNRYSLKDNDFPETLKSFNQTISLPIWPGMAESQIERVITIVKSVASEYTG

SEQ ID NO: 39625 - DNA, 606 bp, Unknown
  Obtained from environmental sample
  misc_feature (1)..(606): n is a, c, g, or t
atggccgagcatgaggtaatgttgcaaaagaccgtaaccgcgattgtaacgccatctgcgatacggctgataaaattaaagagaaatatccgagctttaaacgtcagtctttcgcgtgatgtaaaatttattacgactcagcagcttgaggacgcatacccgaaacttactccaaaagagcgcgagaacgcgtatctaaaagaaaataaaaccgcgtttattatgcagataggcgatgtcttaaaatcgggcatcaagcacgacggacgcgccccggactatgacgactggacgctaaacggcgatattgttttctggaacgatgttcttgggtgcgcttttgaaatttcctcaatgggaattcgcgtcgatgaacaatcgctggacacacagcttacaaaagcaaaatgcgatcaccgcagaaaaatgcccttccacaaaatgctgctcgaaggcaaacttcccttgacgatgggcggcggcattggccaatcaagactgtgtatgcttctgcttaaaaaagcgcatgtcggagaagtgcaggtttccgtatgggacgaaaaaacagtatcaggctgtaagtccgccggaatcgagttattatag

SEQ ID NO: 39626 - protein, 201 aa, Unknown
  Obtained from environmental sample
  DOMAIN (4)...(113): Aspartate-ammonia ligase
  misc_feature (1)..(201): Xaa is any amino acid
MAEHEVMLQKTVTAIVTPSAIRLIKLKRNIRALNVSLSRDVKFITTQQLEDAYPKLTPKERENAYLKENKTAFIMQIGDVLKSGIKHDGRAPDYDDWTLNGDIVFWNDVLGCAFEISSMGIRVDEQSLDTQLTKAKCDHRRKMPFHKMLLEGKLPLTMGGGIGQSRLCMLLLKKAHVGEVQVSVWDEKTVSGCKSAGIELL

SEQ ID NO: 39627 - DNA, 852 bp, Unknown
  Obtained from environmental sample
  misc_feature (1)..(852): n is a, c, g, or t
atgaaaatagaaaagtaccgtcacccctttatattttatggggttgcagttattgttccttgggtactgtggttcactgtaggagcaatttcccattcgtctcttttcgagaaacatagttggattatctttggcagcatacttggaattatcggtctatgtgcgcctttagtggtggctatggctcttatactaccagataaagatntacgaaatgaacttaaagcctcctgtaccagcagttttaagggaattcatttgggttggtatgcattagtattccttttcccatttgccgtcatattgttggcgcaggcaatttctctgttgttcggtcacagcacagaacagtttaagatcgtggaaaaattttcattcaccgccggaatttttcctgcgtggtttatgatgttccttgcgccgataatcgaagaatttggctggcacacttacggtatccattgtgtacgccgacgtttcaacctatttactacttgtttagtttttggaattatctggggaatatggcatatgccgctttcctctatcaaaggctattatcaaaatgttgtcatggaaacaggcattatctattctatcaattttcttttaagccttattccatacctaatcattgataactggacttactacaaaacaaaaaggaatatgtttttgcaagtgtgccagcatttagtatttggttattctatggaactgtttcacacccatcctgatagtaaggttattcatacttttattctcatagttgtcagcgtagttatcgtgattaaaaatcgtaagtttttctttgataaaacatttgagcaggaagcaacacttggaaaatag

SEQ ID NO: 39628 - protein, 283 aa, Unknown
  Obtained from environmental sample
  misc_feature (1)..(283): Xaa is any amino acid
MKIEKYRHPFIFYGVAVIVPWVLWFTVGAISHSSLFEKHSWIIFGSILGIIGLCAPLVVAMALILPDKDXRNELKASCTSSFKGIHLGWYALVFLFPFAVILLAQAISLLFGHSTEQFKIVEKFSFTAGIFPAWFMMFLAPIIEEFGWHTYGIHCVRRRFNLFTTCLVFGIIWGIWHMPLSSIKGYYQNVVMETGIIYSINFLLSLIPYLIIDNWTYYKTKRNMFLQVCQHLVFGYSMELFHTHPDSKVIHTFILIVVSVVIVIKNRKFFFDKTFEQEATLGK

SEQ ID NO: 39629 - DNA, 885 bp, Unknown
  Obtained from environmental sample
  misc_feature (1)..(885): n is a, c, g, or t
atgattgaatacaattcgatatctcaactggtaaatgccgcgaatgagcgggggattaccatatcgcgcctggtacttgaaaaccaggcagcggaaatggggatcacggaagccgaattattggcgcgcatggagcaatcgcttgatgtgatgattagctcggctgatgcaggattaaaagaggatgtccgttctacaagcgggctaaccggcggggacggctataaagtcttgcaatacgcggcctcgggccataccatcggaggctcattctgcacaaaggcgatagcaagggccattggcattgcggagtataatgcttccatggggaggatcgtagccgcgcccactgcgggatcatgcggcatcctccccgcagcaatcatcaccatgatggaggagtacggcatagacaagggcgccgctgtcatggccctggtcactgcgggcgccatcggcatggtgatcattaacgaagcgtcaattgccggagcggagggcggctgccaggcggagtgcgggagcgctgcggcaatggctgcgggcgctattgtggaaatgcgtggcggctcaaacgacatggtcgccgacgcctgcgccattgcgatcaagaatcagttggggcttgtctgcgaccctgtggcggggctggtcgagatcccctgcataaagagaaacgccggcggcgtcatgtgcgccgtctgcgcggccgatatggccctcgccggggtcaggagccgtatccccattgacgaagtcgtcaccgccatgcgcgaagtcggtgaaagcattccgtccgcgctgcgggagacggcccagggcggtctggccgccaccccgaccggattaatgctcaaggagcaaatattcgggaaaacgacatag

SEQ ID NO: 39630 - protein, 294 aa, Unknown
  Obtained from environmental sample
  DOMAIN (5)...(279): Serine dehydratase alpha chain
  misc_feature (1)..(294): Xaa is any amino acid
MIEYNSISQLVNAANERGITISRLVLENQAAEMGITEAELLARMEQSLDVMISSADAGLKEDVRSTSGLTGGDGYKVLQYAASGHTIGGSFCTKAIARAIGIAEYNASMGRIVAAPTAGSCGILPAAIITMMEEYGIDKGAAVMALVTAGAIGMVIINEASIAGAEGGCQAECGSAAAMAAGAIVEMRGGSNDMVADACAIAIKNQLGLVCDPVAGLVEIPCIKRNAGGVMCAVCAADMALAGVRSRIPIDEVVTAMREVGESIPSALRETAQGGLAATPTGLMLKEQIFGKTT

SEQ ID NO: 39631 - DNA, 1134 bp, Unknown
  Obtained from environmental sample
  misc_feature (1)..(1134): n is a, c, g, or t
atgaagatagggctggatacttttgcctgtagcggcggtaaatccggagtaggtatgtatttaacccatttgttaaagcgaataactccttcacaagctcaatttgaactttttgggtgggaatatgaaaaatatgcttataatgatgtagcgcccaatattgaatttatcccgcagtgtcgcttttatggaagaacatcaaatgcattgtggcatttgtataaatatcccaaatttgcttcggtacggaaatttgacgcatgtctttttccggcggctcacaaacatcttccttacaattctccgtgtccgacaatcggcgtagttcatgatatggccgcttattggggtacgcgaaaaaccagagtacatcttggcgctattttacgcatgttccttcccgattcgcttcgccgtcttgataggataattgccgtaagcgaatgggtaaagcgggaattgatagaaaaagcgcatataaaggaaaacagaattgaagttgtgccaaacggagttgatcatacgtctttttatccgcggcaaagaaacgaagaaagtgtattgttaattcagccgttcagtttccgcagaccttatgtgctttgtgtttcgcggatagattatccgattaaaaaccatatcaggcttatagaagcattcggcatttttaaggaaaaaacaaaatacccgcacaggcttgtactggcgggcggcgacagcaacaatgcctctcttgtaaaggaagccgccgcttcttctccgtggagaagcgatattttctttacagggcatttcccccccaaaagcctgcctgaactttacgccggcgcggattttgcagtttgtccgtccatgtatgaaggttttggcatgggcgtggtggaagctatggcatgtggagtgcccgtgttatgcgcccgcgccgcctctcttcctgaaacagccgaacacgccgcgctttattttgatcctttaaacgtagaagatatggctgacagaatgattacagtcagcatggacagcaatatttacaacgaatgccgccgccttggccttgaaagggcgcaggccttctcatgggacaagtgcgtggaaagaacattacagataatttacgaaacggcgggcaagtga

SEQ ID NO: 39632 - protein, 377 aa, Unknown
  Obtained from environmental sample
  DOMAIN (185)...(354): Glycosyl transferases group 1
  misc_feature (1)..(377): Xaa is any amino acid
MKIGLDTFACSGGKSGVGMYLTHLLKRITPSQAQFELFGWEYEKYAYNDVAPNIEFIPQCRFYGRTSNALWHLYKYPKFASVRKFDACLFPAAHKHLPYNSPCPTIGVVHDMAAYWGTRKTRVHLGAILRMFLPDSLRRLDRIIAVSEWVKRELIEKAHIKENRIEVVPNGVDHTSFYPRQRNEESVLLIQPFSFRRPYVLCVSRIDYPIKNHIRLIEAFGIFKEKTKYPHRLVLAGGDSNNASLVKEAAASSPWRSDIFFTGHFPPKSLPELYAGADFAVCPSMYEGFGMGVVEAMACGVPVLCARAASLPETAEHAALYFDPLNVEDMADRMITVSMDSNIYNECRRLGLERAQAFSWDKCVERTLQIIYETAGK

SEQ ID NO: 39633 - DNA, 315 bp, Unknown
  Obtained from environmental sample
  misc_feature (1)..(315): n is a, c, g, or t
gtgcggaaaggctttcgtaaagagctggactcatactcggctttttttgagaatgacaggaaaacgtcaacgggcctggaaggctggatgaagagactgggtattgaaactgtaattataggcgggcttgccacagattactgtgtttttttcagcgcgatggatgcgaaaaaactgggatttgatactataattgttgaagacggcgtgcggggagtaggactgcccgcgggttctgtggaaaaggccgtctcggaaatgaaggcgtccggcataacctttgccgtttcagcgaaactgttggagaaattttga

SEQ ID NO: 39634 - protein, 104 aa, Unknown
  Obtained from environmental sample
  misc_feature (1)..(104): Xaa is any amino acid
MRKGFRKELDSYSAFFENDRKTSTGLEGWMKRLGIETVIIGGLATDYCVFFSAMDAKKLGFDTIIVEDGVRGVGLPAGSVEKAVSEMKASGITFAVSAKLLEKF

SEQ ID NO: 39635 - DNA, 462 bp, Unknown
  Obtained from environmental sample
  misc_feature (1)..(462): n is a, c, g, or t
ttgatggataaaaaagggcagtcagccctgtttacagattattacgccctcaccatgtcgcaggggtattggaaacacaacccccagcggcaggccgtattcgagatgtctttccggcggcagcccttcggcggcggttatacgatattcgcgggccttggaaccctgcttgaaagcctcgccgccttttctttttccgatgatgatattgaatacatcagaagccttggcgggtttgaagatcgcttccttgaataccttaaaaattttcgctttacaggttcgttgtgggcggtcgatgagggaaccgtggtttttccccaggaaccgctgatcagaatcagggggaacctcattgagtgccagatgattgaagcgatgctccttaacacaataaattttcaaagcctgattgcgactaaacccggcgcgtctggcttgcctcggggaaaggctcgataa

SEQ ID NO: 39636 - protein, 153 aa, Unknown
  Obtained from environmental sample
  misc_feature (1)..(153): Xaa is any amino acid
MMDKKGQSALFTDYYALTMSQGYWKHNPQRQAVFEMSFRRQPFGGGYTIFAGLGTLLESLAAFSFSDDDIEYIRSLGGFEDRFLEYLKNFRFTGSLWAVDEGTVVFPQEPLIRIRGNLIECQMIEAMLLNTINFQSLIATKPGASGLPRGKAR

SEQ ID NO: 39637 - DNA, 828 bp, Unknown
  Obtained from environmental sample
  misc_feature (1)..(828): n is a, c, g, or t
atggaattcgggttgcgccgcgcgcaggggccggacggagcgatggccgcttcaagggcggcgtttataggcggcgcaatcggaacttccaacaccctggcggggaaagcatacggcattcccgtgatggggactatgggccactcctggataatggcgttttccgatgaagaagaagcgtttaacgcgtacgcggaactctacccggacagatccgtgttccttatagacacgtatgacaccttaaaatccggcatagtaaacgcgattaaggccggaaaaaaattgaaagaacaggggaagaaattcggagtgcgccttgattccggggatatcgagtatctttccactgaagtaaggaaggcgctggatgaagccgggtttaacgacgcgagcataaccgtttccaacgaattggatgaaactattgttgaaactatggtgaggatgggggctccggttgacacctggggcgtcgggacgaatatggtcacgggcggcaacgacgcggcccttaccggcgtatacaaaatggcggcctgcgaggataaaaacggcaatatgacgccggtgatgaaattttcggacaaccccgaaaagactaccaatccgggcatcaagcaggtatggcggctgaaggacgagcagggcgcgccgcttgccgacatactggcccttgacggtcctgacgaggttgaaacttttgaattgggcagccgctgctgtttctggcacacttccggggactaccggcattttttccatgaaatcggggcggagccgaagccgctcctgaaaatgcgcctgaataaggctctgccgatctga

SEQ ID NO: 39638 - protein, 275 aa, Unknown
  Obtained from environmental sample
  DOMAIN (1)...(214): Nicotinate phosphoribosyltransferase (NAPRTase) family
  misc_feature (1)..(275): Xaa is any amino acid
MEFGLRRAQGPDGAMAASRAAFIGGAIGTSNTLAGKAYGIPVMGTMGHSWIMAFSDEEEAFNAYAELYPDRSVFLIDTYDTLKSGIVNAIKAGKKLKEQGKKFGVRLDSGDIEYLSTEVRKALDEAGFNDASITVSNELDETIVETMVRMGAPVDTWGVGTNMVTGGNDAALTGVYKMAACEDKNGNMTPVMKFSDNPEKTTNPGIKQVWRLKDEQGAPLADILALDGPDEVETFELGSRCCFWHTSGDYRHFFHEIGAEPKPLLKMRLNKALPI

SEQ ID NO: 39639 - DNA, 324 bp, Unknown
  Obtained from environmental sample
  misc_feature (1)..(324): n is a, c, g, or t
ttggacgagccgtatggctgtcaacagataatggattaccttgaagcgggagcaatacgaaactcggttaatttaccccgttgcaaacttgaccagcgcgctcccaacagactgcttgttataaataaaaatatcccgaatatggtaggacaaataacaacccttcttgcaggcgcaaatataaacataacagaccttatcaatcatcatcgcgatgaatttgcgtataacatcattgataccgaacagcagatttcaagcactgtgctggagaaaatccttaaagtggaaggaattataagagtccgaacaatagaaaaatga

SEQ ID NO: 39640 - protein, 107 aa, Unknown
  Obtained from environmental sample
  misc_feature (1)..(107): Xaa is any amino acid
MDEPYGCQQIMDYLEAGAIRNSVNLPRCKLDQRAPNRLLVINKNIPNMVGQITTLLAGANINITDLINHHRDEFAYNIIDTEQQISSTVLEKILKVEGIIRVRTIEK

SEQ ID NO: 39641 - DNA, 549 bp, Unknown
  Obtained from environmental sample
  misc_feature (1)..(549): n is a, c, g, or t
ttggggcatacagtgcaaaagatgaagaacaagccttctctgctgggagaattcgggcttgcatttgatataaacaagggtaaggcttttaaaaccgggaattattcattacacgaaaaagccctttccatgtactacgatgccgtcgacgcaaatatgcttcattcgactatatggaattattcagcaagcaatacaaataaatacggagacagttggaatgatgaagacctttcaattttttccgaaggcagggaaagagcgacagcaggctggaaacgtccataccctatggctgtggcgggaaaacttctaaggttcagatgggacacaaaacgtaaagaatttatttgccgtttcgaagcggacaagaatataaaagcgccaagcataatttatctgcccgctgaaaccttcggcggtaatttagacctttcaccaaagatagaaaccggcggcttacgttatgaacataacagagaagaacagtgtttatttgtctacaatgatgattacagcggggaagctataattaaggtgcggttataa

SEQ ID NO: 39642 - protein, 182 aa, Unknown
  Obtained from environmental sample
  misc_feature (1)..(182): Xaa is any amino acid
MGHTVQKMKNKPSLLGEFGLAFDINKGKAFKTGNYSLHEKALSMYYDAVDANMLHSTIWNYSASNTNKYGDSWNDEDLSIFSEGRERATAGWKRPYPMAVAGKLLRFRWDTKRKEFICRFEADKNIKAPSIIYLPAETFGGNLDLSPKIETGGLRYEHNREEQCLFVYNDDYSGEAIIKVRL

SEQ ID NO: 39643 - DNA, 771 bp, Unknown
  Obtained from environmental sample
  misc_feature (1)..(771): n is a, c, g, or t
atggggagtttatccgccgatcttcgaaaactgctgtataaccttggctttttttacaggacattgaggggcgtcggctcttttattaaacgctggaaagtttcatctcgtattctggttatgcagattctgttcacctttgtgcaggctttgagcatctgctccctgctcgccctggcgataggggcggcggtcaatattatcggttttccccaactgcagaaatttggccagcagcagcttatatatcccctcttaatcaccataataaccacggaactggggcccctgcttacagcctttattgtcatcgcccgttcggcgaccgccatagccacggaaatcgccgggatggtgattaaccacgagatagaggcgtatatatccataggcgtcgacccgatcgagcatcttgccgtgccgcgcttcctcggcatgacgctgtccctgctgctgcttaatatttacttttccgcgttcgggctggccggctcgtttatcgtcgcccaagttttccattcccttcccgcgaattactatttttccaaccttttaacgagcctgaaaatacaggatatttttattttgattttgaagagcgtttcctttgggatgatcatatccatcgtggcgataaccgagggccttgccgtcgagagggcgagcaccgaggttcctgtcgcggggctgcgggctgtcagcaacgcattcgcgagctgtatagtattgaatattatcctctcggctatgtatcatatagtaatggcttaa

SEQ ID NO: 39644 - protein, 256 aa, Unknown
  Obtained from environmental sample
  DOMAIN (8)...(251): Domain of unknown function DUF140
  misc_feature (1)..(256): Xaa is any amino acid
MGSLSADLRKLLYNLGFFYRTLRGVGSFIKRWKVSSRILVMQILFTFVQALSICSLLALAIGAAVNIIGFPQLQKFGQQQLIYPLLITIITTELGPLLTAFIVIARSATAIATEIAGMVINHEIEAYISIGVDPIEHLAVPRFLGMTLSLLLLNIYFSAFGLAGSFIVAQVFHSLPANYYFSNLLTSLKIQDIFILILKSVSFGMIISIVAITEGLAVERASTEVPVAGLRAVSNAFASCIVLNIILSAMYHIVMA

SEQ ID NO: 39645 - DNA, 543 bp, Unknown
  Obtained from environmental sample
  misc_feature (1)..(543): n is a, c, g, or t
gtgagcaacccggaaaaagaacgcataggaaaagccgccgcgaatgaggtaaaaccgggcgacactatttttattgacatagggacaaccacagagtatttggcgctgaatatcccccagaacagccccatcacggtgctgtgctttacaattaacaccctctttgaggtgtatcagaaaaatgtccagcatctgataatgggcggcggttactaccaccccgatacccagttgtttgaatcctcggacacggtaaattttatccggcaaaccagggccagcaaatacttcctgtccgccgccggggtcagcaaggaaatgggccttacctgcataaaccagtatgaagtcggcgtaaagcaggcctgcattgattcatccctgaaaaaaatcctccttacggactcaagaaaattcggcgttgtcagatccgcctttttttccccgctggataaaatagacatgataatcaccgatgacggaataagcgccgaatgggtcaaaatcatcgaggatatgggcatcgcgctgcatgtggtttag

SEQ ID NO: 39646 - protein, 180 aa, Unknown
  Obtained from environmental sample
  DOMAIN (3)...(159): Bacterial regulatory proteins, deoR family
  misc_feature (1)..(180): Xaa is any amino acid
MSNPEKERIGKAAANEVKPGDTIFIDIGTTTEYLALNIPQNSPITVLCFTINTLFEVYQKNVQHLIMGGGYYHPDTQLFESSDTVNFIRQTRASKYFLSAAGVSKEMGLTCINQYEVGVKQACIDSSLKKILLTDSRKFGVVRSAFFSPLDKIDMIITDDGISAEWVKIIEDMGIALHVV

SEQ ID NO: 39647 - DNA, 420 bp, Unknown
  Obtained from environmental sample
  misc_feature (1)..(420): n is a, c, g, or t
ttgccagagcaaccacattccactacctacgccaattcaacctcagcaacccattctgccacatcaattgattccacaacctccgccaattcaactgcaacaaccaattccgctagggcaaccaattctacaatcacatccaattttgccacatcaacccattctacaacctccgccaattcaaccgcaacaaccaattccacagccaccgcaaccaattccacaatcgcatcctattctaccagaacaaccgattccacaacctacgccaattcaaccgcaacaaccaattccacagccgccgcaaccaatccaatcgcaacaacccacttcacaaccgcagcagaccacgccaccaccgctacagccatcccagccacaaccacaaccatcctcgccaatcattccgcaaaaaattga

SEQ ID NO: 39648 - protein, 139 aa, Unknown
  Obtained from environmental sample
  misc_feature (1)..(139): Xaa is any amino acid
MPEQPHSTTYANSTSATHSATSIDSTTSANSTATTNSARATNSTITSNFATSTHSTTSANSTATTNSTATATNSTIASYSTRTTDSTTYANSTATTNSTAAATNPIATTHFTTAADHATTATAIPATTTTILANHSAKN

SEQ ID NO: 39649 - DNA, 711 bp, Unknown
  Obtained from environmental sample
  misc_feature (1)..(711): n is a, c, g, or t
atgcaggtaaagaagaaagccgcgaaaaagacctattcggcagccaaaaaaggcttcccgaagaagaagatcacgtttgacgacttgaccgccctcgtcgccaatatagccgacgcccaagccaaaaccgaggccgcccacgccaaaaccgaggcttcgattgacaggctatccgccgtccaagccaaaaccgaggcctcccttttggaactacatgccgaagtcagggaaacctcggaggccgtccggcaactgaacgacacgctcggcgggatgggcggacacctcggcgaagtgatagagtttatcgtcatacccaagatacgccccgcgataaacgctttgggtaatcactcgtttaaagaactcacggcgaggaaaatcgtcgagaccgttatcaacgatagaaagagaaaactaaccgaggtagacgtgctgctgtacggcgacaccgaggctatggccgttgagataaagacttgtttacagacaagcgatgttgataaacacatggagcgtctgcaaatactgcgcgaccacgaagcggacgccgagatcaaaggcaagacgcttttcggcgcggtggtaggcgcaatcgtacacgagccaatcagaacctacgccctgaaaaagggtctatacgtcatagagatccgcgaagaagaggataaattagacatagacaaacccgacacctgccggacatggtaa

SEQ ID NO: 39650 - protein, 236 aa, Unknown
  Obtained from environmental sample
  misc_feature (1)..(236): Xaa is any amino acid
MQVKKKAAKKTYSAAKKGFPKKKITFDDLTALVANIADAQAKTEAAHAKTEASIDRLSAVQAKTEASLLELHAEVRETSEAVRQLNDTLGGMGGHLGEVIEFIVIPKIRPAINALGNHSFKELTARKIVETVINDRKRKLTEVDVLLYGDTEAMAVEIKTCLQTSDVDKHMERLQILRDHEADAEIKGKTLFGAVVGAIVHEPIRTYALKKGLYVIEIREEEDKLDIDKPDTCRTW

SEQ ID NO: 39651 - DNA, 513 bp, Unknown
  Obtained from environmental sample
  misc_feature (1)..(513): n is a, c, g, or t
ttgcacactgctcactgcgtcattgccctttgttccttatttatgctatactccccgcaaaggagaatacatatggaagccctgaaaaagaacccatcgtggaaaggccggcgcgggccggtggtgctggtcataatggacggcgtaggatacggaaaatataaggaaggcgacgccgtagcggattcaaaaatggaccatctgctcgcaatcagggcgaaaagccccaatacaaagctgaaagcccacgggaaggccgtaggactgccctccgacgaggatatgggaaacagcgaggtagggcataacgctatgggctgcggacgagtctttaatcagggcgcggcgctggtgtcaaaatccattgaaacaggcgcgatgtttgagggaacagcctggaaagagctaatctcgaatgtattgcaagatggccgtaggccatcaactctgcattttcttggcttattctccgacggtaacgtgcacagccatcggatcacctcaaggccatga

SEQ ID NO: 39652 - protein, 170 aa, Unknown
  Obtained from environmental sample
  DOMAIN (36)...(170): BPG-independent PGAM N-terminus (iPGM_N)
  misc_feature (1)..(170): Xaa is any amino acid
MHTAHCVIALCSLFMLYSPQRRIHMEALKKNPSWKGRRGPVVLVIMDGVGYGKYKEGDAVADSKMDHLLAIRAKSPNTKLKAHGKAVGLPSDEDMGNSEVGHNAMGCGRVFNQGAALVSKSIETGAMFEGTAWKELISNVLQDGRRPSTLHFLGLFSDGNVHSHRITSRP

SEQ ID NO: 39653 - DNA, 300 bp, Unknown
  Obtained from environmental sample
  misc_feature (1)..(300): n is a, c, g, or t
atggatgaacagatgtttggtatttcgcaaaatgctttagataaaataaaatcggttttattttccgcacagggaattgagcaggttattttatacgggtctcgtgccaaaggcaattataaagaagggtctgacatagacttggttataaaagggaatttaacttttgacgatttggtaaaaatcagtgttagcctagatgatttaaatttaccatggaaaatagacttatctttgtatagccaaataaaaaacgagaatttactggaacatataaacaaagttggtaaagttatttaa

SEQ ID NO: 39654 - protein, 99 aa, Unknown
  Obtained from environmental sample
  DOMAIN (9)...(95): Nucleotidyltransferase domain
  misc_feature (1)..(99): Xaa is any amino acid
MDEQMFGISQNALDKIKSVLFSAQGIEQVILYGSRAKGNYKEGSDIDLVIKGNLTFDDLVKISVSLDDLNLPWKIDLSLYSQIKNENLLEHINKVGKVI

SEQ ID NO: 39655 - DNA, 561 bp, Unknown
  Obtained from environmental sample
  misc_feature (1)..(561): n is a, c, g, or t
atgcgtagcgaacgtattgctcgctgcccgcttagtaatcgctttgcctcaaagcacggctttacgcagagcacgcagtggtttgagcgcacccttgacgatagtgcgaacaaaaggcttgccattcccgaagcatttttagcgagcgatgccatgctcattttagcggagaatgtggcgagcggaatagttgttcatcacaaaattatagagaggcacataaacgaggaattgccatttatggcaacggagaatattttgatggaagcggtgaaaaaaggtggtgaccgtcaaattctgcacgaggaaattcgcgaactctcgcagcaagctgcatacacggttaaagaaaagggcttggacaacgacttgctcgagcgtatattgtcttctggtaagtttgggttagagcggagcgacttggaacgcattttggatttaaaaaaattcataggacgtgcgccggagcaaaccgaggagtttgtgaatttggaagcaatgcccgccattgggaagttcagtgattggaaaagcagtggtggtgcggaagtgaaggtttaa

SEQ ID NO: 39656 - protein, 186 aa, Unknown
  Obtained from environmental sample
  misc_feature (1)..(186): Xaa is any amino acid
MRSERIARCPLSNRFASKHGFTQSTQWFERTLDDSANKRLAIPEAFLASDAMLILAENVASGIVVHHKIIERHINEELPFMATENILMEAVKKGGDRQILHEEIRELSQQAAYTVKEKGLDNDLLERILSSGKFGLERSDLERILDLKKFIGRAPEQTEEFVNLEAMPAIGKFSDWKSSGGAEVKV

SEQ ID NO: 39657 - DNA, 894 bp, Unknown
  Obtained from environmental sample
  misc_feature (1)..(894): n is a, c, g, or t
gtggctgcgggtccgctntgcagcgaagcacttgcggagcaaattaaaaaaattacaggcgaagaatttctgcatttttttgatgcagtggcaccaattatagaaagcgattccatagaccattctttggcttttgccatgaaccgccacgaaaaagggagttctgccgattttataaactgtcccttagacaaagaaacatatttagagttcgttaaaaggttgcaagaggcagatagcgtagaagaaaagccttttgaaaaaggggagttgtttgaaggttgcctacccgtagaagaaatggcaaggcgcgggacagatacccttcgctttggaccaatgcgccctattgggcttggcaagcattatgcggttatacagcttcgcgcagaaaatgcgcaaaaaacgctttacaatatggtgggtttccaaaccaggctcaaatggaactgccaaaaagaaattttcaggcttgttccagctttaaaaaacgctgaatttgcaaggcttggctgtatgcaccgcaacacattcatagaaagtccaaaactcttggataaaaccttaaaattaaattcacataaaatttggttcgctgggcaaataaccggagccgaaggctacacagaagccatagccactggctggtatgcggcttggaatatggcaaatcatttgcaaggcaaggaacctgaacttcttccgaatggaacttgcattagggcattggtagaggcaataactgctccgaatgaacattttcaacctatgaatttcaatttcggattattgccaagaccagagaatttgcgaaaaagcataaaaaagaatttcttaacccagcagtctcaaaaaaatttaagtatatttttgagatgctgccgaaagaattga

SEQ ID NO: 39658 - protein, 297 aa, Unknown
  Obtained from environmental sample
  DOMAIN (1)...(230): Glucose inhibited division protein A
  misc_feature (1)..(297): Xaa is any amino acid
MAAGPLCSEALAEQIKKITGEEFLHFFDAVAPIIESDSIDHSLAFAMNRHEKGSSADFINCPLDKETYLEFVKRLQEADSVEEKPFEKGELFEGCLPVEEMARRGTDTLRFGPMRPIGLGKHYAVIQLRAENAQKTLYNMVGFQTRLKWNCQKEIFRLVPALKNAEFARLGCMHRNTFIESPKLLDKTLKLNSHKIWFAGQITGAEGYTEAIATGWYAAWNMANHLQGKEPELLPNGTCIRALVEAITAPNEHFQPMNFNFGLLPRPENLRKSIKKNFLTQQSQKNLSIFLRCCRKN

SEQ ID NO: 39659 - DNA, 426 bp, Unknown
  Obtained from environmental sample
  misc_feature (1)..(426): n is a, c, g, or t
atgattgcatatccggcaaaatttgaaaaggccgctgaaggtggttatgttgttgaatttattgacataccttcttgtgttaccgagggggatactctggaagaagctaaagcaatggcaaaagaagctctgtccgccatgttgtacagtctggattccagaaaaatgtccattcccaagccttcagttgtaaaaaagaggggggtatattatatcgaacctgagttgaaaattgcctttgcgattgccctcaaaaaagagcgggagcgtctgggattatcccaaaaggatgttgcagaacgtatgaatgttaattgggcatattatcagcgtatagaaaatccccgcaagacaaacccaacactgggaaccattgaaaaactacagaaagttttcgagcggcagtttatttcattgtctttctga

SEQ ID NO: 39660 - protein, 141 aa, Unknown
  Obtained from environmental sample
  DOMAIN (84)...(139): Helix-turn-helix
  misc_feature (1)..(141): Xaa is any amino acid
MIAYPAKFEKAAEGGYVVEFIDIPSCVTEGDTLEEAKAMAKEALSAMLYSLDSRKMSIPKPSVVKKRGVYYIEPELKIAFAIALKKERERLGLSQKDVAERMNVNWAYYQRIENPRKTNPTLGTIEKLQKVFERQFISLSF

SEQ ID NO: 39661 - DNA, 705 bp, Unknown
  Obtained from environmental sample
  misc_feature (1)..(705): n is a, c, g, or t
atggaacagcaaacaggaatgaaagaagcggcaggcagggcggcggttgacgcgctggtacacagcggcatgaagttggggctgggtaccggttccaccgcaattttcgccattcgcagagttggcgagcttttggcgcaagggacattaaaggacatcagcgcctttgccaccagttttcagtctgaaattgaatgtgaaaaactgggcatccctttttatccccttaactcgcgggaactgtccggcagccttgatttaaccattgacggcgcggacgaagttgatccgcagaatcgtctgatcaaaggtggcggcggcgcgttgttaatcgagaagattgccgcctacgcttccgccgcctatgccataacagttgatgagtcgaaaatcgtcaacagtctgggaaccggttttcctgttccggtagaagtggtccccgcggcgcgggtcagcgcgggcaaagccctccaggcgctgggagcggcgataatactgcgggaagcgctgcgcaaggccggtcccgtaattaccgaacacggcaacctgatactggacatacgttttcccgaaccggttgatccggcggaaatggaaaataaaattaaccatattcccggagtggtggagaatgttttttttacccgtatacttccggtagtgtatattgcccattcggacgggactgttgaagtgaggaaataa

SEQ ID NO: 39662 - protein, 234 aa, Unknown
  Obtained from environmental sample
  DOMAIN (53)...(230): Ribose 5-phosphate isomerase A (phosphoriboisomerase A)
  misc_feature (1)..(234): Xaa is any amino acid
MEQQTGMKEAAGRAAVDALVHSGMKLGLGTGSTAIFAIRRVGELLAQGTLKDISAFATSFQSEIECEKLGIPFYPLNSRELSGSLDLTIDGADEVDPQNRLIKGGGGALLIEKIAAYASAAYAITVDESKIVNSLGTGFPVPVEVVPAARVSAGKALQALGAAIILREALRKAGPVITEHGNLILDIRFPEPVDPAEMENKINHIPGVVENVFFTRILPVVYIAHSDGTVEVRK

SEQ ID NO: 39663 - DNA, 393 bp, Unknown
  Obtained from environmental sample
  misc_feature (1)..(393): n is a, c, g, or t
atgggtcttaaggaacgccttgaaagcctggaactttccataacaatgcccgccggcgctaatggaaagctttatggttctgtcaccagccacactgtgtctgatgaaatggcaaagcttggcttccagatcgaccgcaagaagatcgatctcgcaagcggcataaaaaatgtaggcaagtacaaagcggtgattcggctgtacgaaaattcccaggcggaaatccagttgaacatcatcgggcaggagataaaaaccgaaacccatgaagcgccgcccgcccgcccgcaccgccgccgcagagatgaagccgctccggccgcggaaaatcacgctgctgaagaagcgcccgcgtccgcgccggcagaaacgcccgcagatggccaagcttag

SEQ ID NO: 39664 - protein, 130 aa, Unknown
  Obtained from environmental sample
  DOMAIN (3)...(82): Ribosomal protein L9, C-terminal domain
  misc_feature (1)..(130): Xaa is any amino acid
MGLKERLESLELSITMPAGANGKLYGSVTSHTVSDEMAKLGFQIDRKKIDLASGIKNVGKYKAVIRLYENSQAEIQLNIIGQEIKTETHEAPPARPHRRRRDEAAPAAENHAAEEAPASAPAETPADGQA

SEQ ID NO: 39665 - DNA, 786 bp, Unknown
  Obtained from environmental sample
  misc_feature (1)..(786): n is a, c, g, or t
atgtatcagatcggccgagctgtgtttgccggcgtcggggaacgttcgcgcgaaggcgccgacctttggaaggaaatgaccgaaagcggcgttatcgacaaaaccgccctggttttcggacagatgaacgagcctcccggagcgagaatgagggtcgcgcttgccggccttaccatggcggaacatttccgcgatcaggacaggcaggacgtgcttttatttgttgacaatattttccgctttatccaggcgggcgcggaagtttccgcccttcttggacgcatacccagcgcggtcggttaccagcctaccctcgccaacgaaatgggcagtcttcaggaacgtatcgccagcacctcaaaaggttcgattaccagcattcaggcggtatatgtgcccgccgacgaccttaccgaccccgcccccgcaacgacctttgcccaccttgacgcgaccaccacgctttcgcgcaaaatcgtagagttgggaatatacccctctgtcgatcctctcgcttcaagctcccgaattcttgacgctgccattgtgggcgacgatcactacaacacggcccgccgcgcccagcagatattgcagcgttacaaagaattacaggacataatcgccattttgggcatggacgaactgtccgaggaggacaagctaaccgtcaccagggccagaaagatccagcgttttttcagccagccgttttttgtcggggaaaaatttaccggcattcccgggcgttatgtaggggtcaaggaaaccgtacgcggcttttaa

SEQ ID NO: 39666 - protein, 261 aa, Unknown
  Obtained from environmental sample
  DOMAIN (188)...(260): ATP synthase alpha/beta chain, C terminal domain
  misc_feature (1)..(261): Xaa is any amino acid
MYQIGRAVFAGVGERSREGADLWKEMTESGVIDKTALVFGQMNEPPGARMRVALAGLTMAEHFRDQDRQDVLLFVDNIFRFIQAGAEVSALLGRIPSAVGYQPTLANEMGSLQERIASTSKGSITSIQAVYVPADDLTDPAPATTFAHLDATTTLSRKIVELGIYPSVDPLASSSRILDAAIVGDDHYNTARRAQQILQRYKELQDIIAILGMDELSEEDKLTVTRARKIQRFFSQPFFVGEKFTGIPGRYVGVKETVRGF

SEQ ID NO: 39667 - DNA, 402 bp, Unknown
  Obtained from environmental sample
  misc_feature (1)..(402): n is a, c, g, or t
gtgcatacgccccggcggattttttattccggcaaggtacaggcaatcacgatcagccttgaggacggagagatcggcatatacgcgaaccactccccttttaccgctcacagcgttacaggcacgctccgcattaaagaagacagcggcaactggcgctccgcgtttgtctgcggcggcattctggaagttaaagaacataaaaacgtgctgatggttgaaagcgccgactggccggaagaaataaacgttgagcgcgttctcgagatcaaaaagcagtccgaggaaatattaaaaaattcgcaattaaaatttgagattgacaaagcgaaaaagaaactgcaccatgccgaatgcaggttgaaagttgtgggttatttaaatctcacaacgccacagtaa

SEQ ID NO: 39668 - protein, 133 aa, Unknown
  Obtained from environmental sample
  DOMAIN (3)...(81): ATP synthase, Delta/Epsilon chain, beta-sandwich domain
  misc_feature (1)..(133): Xaa is any amino acid
MHTPRRIFYSGKVQAITISLEDGEIGIYANHSPFTAHSVTGTLRIKEDSGNWRSAFVCGGILEVKEHKNVLMVESADWPEEINVERVLEIKKQSEEILKNSQLKFEIDKAKKKLHHAECRLKVVGYLNLTTPQ

SEQ ID NO: 39669 - DNA, 426 bp, Unknown
  Obtained from environmental sample
  misc_feature (1)..(426): n is a, c, g, or t
ttgctgcaaataacggcggaacagtggaaaccggcggctgccggaaaaggactggcgataaatgtaaatacaaaagaaaccattatcaccgccgattacgaccgcttaaaacaggtttttatcaacatactgtctaatgccgtaaaatacaccgacaagggcagtataactattacaatggataaggcggatggaacgccaggtccgcaatgtcttgttacaataaccgataccggtatagggatacctgaagatgatctgccccgtatttttgaacgattttaccgcagtgataaatcccgcagccgcagtaccggcggttcgggaattgggttgacaatagcggcgaccataattcacgctcacggtggcactattgaggcgaaaagcggcaaagaggggacggtgtttactgtggcgttgtga

SEQ ID NO: 39670 - protein, 141 aa, Unknown
  Obtained from environmental sample
  DOMAIN (31)...(140): Histidine kinase-, DNA gyrase B-, and HSP90-like ATPase
  misc_feature (1)..(141): Xaa is any amino acid
MLQITAEQWKPAAAGKGLAINVNTKETIITADYDRLKQVFINILSNAVKYTDKGSITITMDKADGTPGPQCLVTITDTGIGIPEDDLPRIFERFYRSDKSRSRSTGGSGIGLTIAATIIHAHGGTIEAKSGKEGTVFTVAL

SEQ ID NO: 39671 - DNA, 420 bp, Unknown
  Obtained from environmental sample
  misc_feature (1)..(420): n is a, c, g, or t
ttgcgaaaaaatgggcgggcaatacaaaatatgcctacaattgagggacatataaatgatttaaagatcaagggttattgctgctcccagttagtggcaataatagtgggtctggaaccgctgggcgaagaaaacgatggcttgctgcgctcgttgcgcgggctttgtatcggcatgtacaataaaagggcctgcggcgctttaaccggcggcgcctgcgccctttcactgcatttacagggcaacggtttaacggaagcctgtcgtgatctgactgagtggtttgaacggcgttttgggagcgccgactgcaaggatttgataggcgatgcccctgggccggcaatgatctgtatggacatcgtacaggaaacatgcgaaaaatgcatggaaatgctggtggagatggattgcctgtaa

SEQ ID NO: 39672 - protein, 139 aa, Unknown
  Obtained from environmental sample
  misc_feature (1)..(139): Xaa is any amino acid
MRKNGRAIQNMPTIEGHINDLKIKGYCCSQLVAIIVGLEPLGEENDGLLRSLRGLCIGMYNKRACGALTGGACALSLHLQGNGLTEACRDLTEWFERRFGSADCKDLIGDAPGPAMICMDIVQETCEKCMEMLVEMDCL

SEQ ID NO: 39673 - DNA, 873 bp, Unknown
  Obtained from environmental sample
  misc_feature (1)..(873): n is a, c, g, or t
gtgctgctttccggtccaggacgttttaatccgctgaataacccgaatgaggccatggacagacagcattatgtaattgaaaaaatggttgagtacggttatgccgacaaggatgaagctgaagcttcatttatagaatactgggataattatgactggacaagagcttcaatttcggcatattacagccgcgaagacaaagcgccgtggttcagtgaatatgtacgccgcgagcttgatgtaataatgtacggcactagggattactaccgcgacggttatgtagtgcatactactcttgatcttaaacatcaggaagcggcggaaaaatttatggctgaagggctggaaaaagccaacagggaatattccaggtccagcggaagaagcaatgttcaggcagagaggacttatataccaattgtagaattactgaccctgtattttgatcttaccgatattcgcgccactgccttggggcaaaatgaagtgaaagcggtttcccgttatacaaaaacgatcaatcctgttgtggatatggccgctcttgctttcggtattcccgaattaaaagatataaccaatcagggttttgcccagcaaaaggtaaataccgagagaaatgtagtagaaggaacgcttatctcaattgagaatgaaacaggctatataaccgctattgtaggcggctcaaaatatgacgagtcaaatcagcttatacgagccgctcaaggtaacattcagccgggttcgtcttttaaaccgctttattattccgcggctatagatactcataaagttacagccgctactttaatttacgatgttccgatggtattccacaacgaagacggaactccgtatatccgctaa

SEQ ID NO: 39674 - protein, 290 aa, Unknown
  Obtained from environmental sample
  misc_feature (1)..(290): Xaa is any amino acid
MLLSGPGRFNPLNNPNEAMDRQHYVIEKMVEYGYADKDEAEASFIEYWDNYDWTRASISAYYSREDKAPWFSEYVRRELDVIMYGTRDYYRDGYVVHTTLDLKHQEAAEKFMAEGLEKANREYSRSSGRSNVQAERTYIPIVELLTLYFDLTDIRATALGQNEVKAVSRYTKTINPVVDMAALAFGIPELKDITNQGFAQQKVNTERNVVEGTLISIENETGYITAIVGGSKYDESNQLIRAAQGNIQPGSSFKPLYYSAAIDTHKVTAATLIYDVPMVFHNEDGTPYIR

SEQ ID NO: 39675 - DNA, 900 bp, Unknown
  Obtained from environmental sample
  misc_feature (1)..(900): n is a, c, g, or t
atggatatttcccttttggcttcttttagcaagggaaatgaacacaaaaacataagcgaaatgctagagcttgcaaatgggggtgcttatggttttggagatggtggcattcctgttggcaacctgcgttttttgagaatggtttttgaatatgggggggcaacaggaaaaacattttatatgcatcctttggaaccagatttgtgcaacactggttttgtgaacgaagggctttattcagatatgcttggttttaagggaattcccgaacaagcagaaacagtggtggtttacagaatgttggaattttccagatggtttaaagtacctgtgcattttagagaaatttcctgtgaaaaaagtttggagctaattgaaatatcaagaaatagaaaatccaaaataaactgcgatgttggaatttatcatcttttatttgatgattccagtttagtggaactttcttctgaatatagtttttcttctccgctaagaacccagaaggacaaagaagccttgtggaaagggcttttaaacggcaatgtgcagcgtataagctgcaatcattttcctgtgcgtaagcaagacaagcaaacaaattttgaagatgcaatccctggtgctgtttctttggaaattgccctttctgctctgtggcatatcactgggcaaaaaaccggagggcatcctgaacgtttgttggattggctgagtgctggtgttttggagcagggcaagccagcgaatttaattctctttaatcctgatttggaatgggaagttagcgaaaatacttttgcaggtccggtgtgcaattctcctcttttggggcaaacgttgaaggggaaaatcgttggaacttatttgggtacggagtggcgggaacaatttataaactaa

SEQ ID NO: 39676 - protein, 299 aa, Unknown
  Obtained from environmental sample
  misc_feature (1)..(299): Xaa is any amino acid
MDISLLASFSKGNEHKNISEMLELANGGAYGFGDGGIPVGNLRFLRMVFEYGGATGKTFYMHPLEPDLCNTGFVNEGLYSDMLGFKGIPEQAETVVVYRMLEFSRWFKVPVHFREISCEKSLELIEISRNRKSKINCDVGIYHLLFDDSSLVELSSEYSFSSPLRTQKDKEALWKGLLNGNVQRISCNHFPVRKQDKQTNFEDAIPGAVSLEIALSALWHITGQKTGGHPERLLDWLSAGVLEQGKPANLILFNPDLEWEVSENTFAGPVCNSPLLGQTLKGKIVGTYLGTEWREQFIN

SEQ ID NO: 39677 - DNA, 411 bp, Unknown
  Obtained from environmental sample
  misc_feature (1)..(411): n is a, c, g, or t
atgaaaatggttattgacgctaatctgtttatttccgcgcttatctgggacggcattcccgaaacagtcgttaatagggttgccgacagattggacacgttattcatatcggacgctatcttggatgaaattgatcggacgttcagaaaaccgaagttcggtcgtagcgaggatcaagtcgtttcttttgtggcatacattaaaaaaatcggaaaaactgttactgtctcccctaaacaccggataactaacgtctgccgagaccccgacgacgacaaatatatagaatgcgccctcgccgccggagccggctacatcatatcaggcgacagcgacctgttggacctcaaagagtacggcgggatcaaaatcgtgaacgctcgtgactatttggacgttgctggcggctga

SEQ ID NO: 39678 - protein, 136 aa, Unknown
  Obtained from environmental sample
  DOMAIN (3)...(124): PIN domain
  misc_feature (1)..(136): Xaa is any amino acid
MKMVIDANLFISALIWDGIPETVVNRVADRLDTLFISDAILDEIDRTFRKPKFGRSEDQVVSFVAYIKKIGKTVTVSPKHRITNVCRDPDDDKYIECALAAGAGYIISGDSDLLDLKEYGGIKIVNARDYLDVAGG

SEQ ID NO: 39679 - DNA, 762 bp, Unknown
  Obtained from environmental sample
  misc_feature (1)..(762): n is a, c, g, or t
atggcttctgaaatttatcacgggcgaataatgatgaaaaacgccaaagacaggctgataagggcaaatttaaggcttgttgtttcaatcgcgaaaaaatacacaaacagaggaatgccgttttttgatcttgtacaggaaggaaatatcggtcttatcaaagcggttgaaaaatttgaataccaaaaagggtttaaattttccacttacgcgacatggtggatcaggcaggcgattacccgttccatctcggatcaggcaagaacaatccgcgtacctgttcacatgatagagcagataaacaaagttgttcgcgaatcaagacagcttttacagagtctgggcagagagccgactgatgaggaaatagcggaaaaattgggctggcccgcgttaaaagttaaatcggtaaaaaatgtcgcgcgcgaacccatcagtcttgaaacgccgattggcgaagaagaagattcgctgttaggtgattttatcgaagacaaggatgtggaaaatcccgctaaccagacggcgtttaaagtgcttcaggaacagatgggcagcgttctttccacgcttcccgcgcgcgaacaggaagttttaaaaatgcgtttcggtcttgacgacggatattcgcttactcttgaagaagtaggtttatattttaatgttactcgcgaaagaataaggcaaatagaagcgaaagctctgcgccggctaaggcatccgaagagaagccgcaaattaaaagattatttggaccattaa

SEQ ID NO: 39680 - protein, 253 aa, Unknown
  Obtained from environmental sample
  DOMAIN (187)...(240): Sigma-70, region 4
  misc_feature (1)..(253): Xaa is any amino acid
MASEIYHGRIMMKNAKDRLIRANLRLVVSIAKKYTNRGMPFFDLVQEGNIGLIKAVEKFEYQKGFKFSTYATWWIRQAITRSISDQARTIRVPVHMIEQINKVVRESRQLLQSLGREPTDEEIAEKLGWPALKVKSVKNVAREPISLETPIGEEEDSLLGDFIEDKDVENPANQTAFKVLQEQMGSVLSTLPAREQEVLKMRFGLDDGYSLTLEEVGLYFNVTRERIRQIEAKALRRLRHPKRSRKLKDYLDH

SEQ ID NO: 39681 - DNA, 801 bp, Unknown
  Obtained from environmental sample
  misc_feature (1)..(801): n is a, c, g, or t
ttggtggaagaagacagctcgtcggacgaagatgaaggcgataaccaaaaagctcaggaagcgggcaagaaaaaatcctcgggcggaaacaataaggattccacccttgttgacgatcccataaggctgtatcttagggaaatcggaagggaacatcttttaaccgcggaacaggaaattgagctttccaagaaaatggaagaaggcgaaaatatcgtaaaaaacgtaattaaaagatcaggtatgataatacctgagtttttcaacatcgcgcaaaaagcgttttcaaaaagagattttagggagcttaacctttcaaaaaaagaaataacggaacacatgaccgaataccgcagattaaaccaattctataaagacacgttacgcgcgattcaagttgaattaagaaactatattgacttaaaaagacagttaatcgtaaaagatgtggattacaaagaagacaaggattgctcatttctgcgtaaaaagataatgaaagtggtaaaaaatacccatttgcatccggaagagattcaggcgttttccgataaatttatagtcgcgtcaaaaaagataaagcgttatataaaagaacaggaacggcttgaaaagcaccttaaagttaattcattaaaagagcttcgcacgatgggaaggtatcttaccattaaagaagaacgtgaaaaacttgaaaaagaactcggtttaacttcggatgaaataaaggaaaaaatcaggcttatacaggtaaatgataaaaaattaaggactctggaagcggattttgagagccgatag

SEQ ID NO: 39682 - protein, 266 aa, Unknown
  Obtained from environmental sample
  DOMAIN (38)...(74): Sigma-70 factor, region 1.2
  misc_feature (1)..(266): Xaa is any amino acid
MVEEDSSSDEDEGDNQKAQEAGKKKSSGGNNKDSTLVDDPIRLYLREIGREHLLTAEQEIELSKKMEEGENIVKNVIKRSGMIIPEFFNIAQKAFSKRDFRELNLSKKEITEHMTEYRRLNQFYKDTLRAIQVELRNYIDLKRQLIVKDVDYKEDKDCSFLRKKIMKVVKNTHLHPEEIQAFSDKFIVASKKIKRYIKEQERLEKHLKVNSLKELRTMGRYLTIKEEREKLEKELGLTSDEIKEKIRLIQVNDKKLRTLEADFESR

SEQ ID NO: 39683 - DNA, 549 bp, Unknown
  Obtained from environmental sample
  misc_feature (1)..(549): n is a, c, g, or t
atgtatcttttgcagttcgtgggaggtcctgaagccgtcgaagaagtgcacgaacggcacgcgggcctcgagcgtcgccgcgtgggcgatgagggcgaagtccatggcctcctgcacggtggtggagcagagcatggcgaagcccgtctgccgaaccgacatcacgtcgctgtggtcgccgaagatggagaggccctgacaggccagcgcgcgggcggagacgtggaagacggtgggcgtaagctcgccggcgatcttgtacatattggggatcatgagcagcagaccctgcgacgccgtgaaggtggtggtcagagacccggcgcagagcgccccgtggacggcgcccgccgcgccgccctcagactgaagctcggctacatgcgggatcgtcccccaaatgttcttctcgcccgccgacgacttctcctcggcggtctcggccataggcgaagagggcgtgatggggtaaatggcgataacctcggttacggcgtgcgcgacgtgggcggttgccgagttaccgtcgtgcgggaccattttttgtga

SEQ ID NO: 39684 - protein, 182 aa, Unknown
  Obtained from environmental sample
  misc_feature (1)..(182): Xaa is any amino acid
MYLLQFVGGPEAVEEVHERHAGLERRRVGDEGEVHGLLHGGGAEHGEARLPNRHHVAVVAEDGEALTGQRAGGDVEDGGRKLAGDLVHIGDHEQQTLRRREGGGQRPGAERPVDGARRAALRLKLGYMRDRPPNVLLARRRLLLGGLGHRRRGRDGVNGDNLGYGVRDVGGCRVTVVRDHFL

SEQ ID NO: 39685 - DNA, 369 bp, Unknown
  Obtained from environmental sample
  misc_feature (1)..(369): n is a, c, g, or t
atggatgatttcaaaatggattccgggataaatcaggatgacagccttgcgaaggtaattccggaggcttttgaaacaggccccggcgctgaagcaaatattccttttgatgatgatctggaggtttttgcagatgaggacatctcgcttgataatttagataaggaagagtcccttgctgccaaggcggaaagagttaacgaaaaggaaaacggtctttcatccgaagtgaaagaagaggtaaagaaagtgctttcatacatggatcatctgttggaatctctgcccgaagaaaaaatcgaggaattcgcgaagtccgagcatttcgatacttacaagaaactgttcaaggaattaggattggtatag

SEQ ID NO: 39686 - protein, 122 aa, Unknown
  Obtained from environmental sample
  misc_feature (1)..(122): Xaa is any amino acid
MDDFKMDSGINQDDSLAKVIPEAFETGPGAEANIPFDDDLEVFADEDISLDNLDKEESLAAKAERVNEKENGLSSEVKEEVKKVLSYMDHLLESLPEEKIEEFAKSEHFDTYKKLFKELGLV

SEQ ID NO: 39687 - DNA, 1065 bp, Unknown
  Obtained from environmental sample
  misc_feature (1)..(1065): n is a, c, g, or t
atgactaacgctaaccggatgtacgaagggtttaacgcaaacgagcgccgcgatctttatgccaacgctttgaataaatcgcttgaagtatttgtttcctattcagaaaaagaattcagcgatattatgtcaaaaggcttaaggcctatcgcgtccgcggcgggtttggacaggattaccgtattccgtatttataatcaagggatcatgctcagcggggaaaaataccggtgggacaggcttaaaggcggaacggttccgattgacgatgaattaaaagaactatccgccagtccggtactcgaacgctttatttcaattatgtcagatgacatctgcataagtctcaaacgcagtaattttaaggaagatgaagccgcgttattagccccgcgcggcgttatgtcaatcttgttagttccggttttcaccgaaggcgagttttggggcgttgtcgtttgcaatgatataaccatggaacgtgatttcgacagtgactgtatcgccatgctgcgctcaaccgcgcgtatgtgcgtaagcacgattatcagagaggaaaaaaccaaaaacgccaacaacgcggcggaagcgctgaagcgccgcgaaaaaatgctggacttattaaacaaagtttccctgatctttttatccggaagcgaggaaaaatccggagatatgatggcggcaggcgtgcatttaattgccgacatgtctgaaattgacaggctgattctttgccgcaaccacatagcaaccaacagtttgcttgcgtctgaagtctaccgctgggacagggcttccgggggcagcaccgaattggctgttgctctcattggcgtaccttacgcgcagttgatacctgattgggaagagcttttgtctgacggaaaacacataaacagcccatcaagactgatgtctgaaaacgcagctaaaacgcttctatcgtttggggttctgacagccgccgttataccgatacatataaacaacgctttttggggctttgcgcttttaggcgataccaaaaatgaacgttattttgaggatgatatcattaaatga

SEQ ID NO: 39688 - protein, 354 aa, Unknown
  Obtained from environmental sample
  DOMAIN (38)...(182): GAF domain
  misc_feature (1)..(354): Xaa is any amino acid
MTNANRMYEGFNANERRDLYANALNKSLEVFVSYSEKEFSDIMSKGLRPIASAAGLDRITVFRIYNQGIMLSGEKYRWDRLKGGTVPIDDELKELSASPVLERFISIMSDDICISLKRSNFKEDEAALLAPRGVMSILLVPVFTEGEFWGVVVCNDITMERDFDSDCIAMLRSTARMCVSTIIREEKTKNANNAAEALKRREKMLDLLNKVSLIFLSGSEEKSGDMMAAGVHLIADMSEIDRLILCRNHIATNSLLASEVYRWDRASGGSTELAVALIGVPYAQLIPDWEELLSDGKHINSPSRLMSENAAKTLLSFGVLTAAVIPIHINNAFWGFALLGDTKNERYFEDDIIK

SEQ ID NO: 39689 - DNA, 534 bp, Unknown
  Obtained from environmental sample
  misc_feature (1)..(534): n is a, c, g, or t
ttgaaagataggggagtgcagaagacagtaatgcttactggcgataatccgagcatagcgcaaagcgtcgcctctgaattgggtatagatgaagtttacggcggattactgccgcacgaaaaagtagagatactggaaaaattaatagaaaagaaaaacccaaagagcaaacttgcctttacaggagacggaataaatgacgcccctgttctctcgatagcggacatcggcgtcgctatgggcgcattgggctcagacgcggcgattgaagccgcagacgtggtattgatgaccgacgaaccttcaaaattagcgcaagctgtggatatatcaagatttacgtgtaaaatagtaacgcagaatataattttctcgttaggtgtaaaaatagtatttcttgttttcggcgcattcggcatagctgcaatgtgggaagcggttttcgccgatgtaggagtctgtttattggcgatacttaattgtatgcggatattgcgggtaagnggtaaggttgaagatcatcaaattgcataa

SEQ ID NO: 39690 - protein, 177 aa, Unknown
  Obtained from environmental sample
  misc_feature (1)..(177): Xaa is any amino acid
MKDRGVQKTVMLTGDNPSIAQSVASELGIDEVYGGLLPHEKVEILEKLIEKKNPKSKLAFTGDGINDAPVLSIADIGVAMGALGSDAAIEAADVVLMTDEPSKLAQAVDISRFTCKIVTQNIIFSLGVKIVFLVFGAFGIAAMWEAVFADVGVCLLAILNCMRILRVXGKVEDHQIA

SEQ ID NO: 39691 - DNA, 324 bp, Unknown
  Obtained from environmental sample
  misc_feature (1)..(324): n is a, c, g, or t
atgccgaatgcgccgaaaacaagaaatactatttttacacctaacgagaaaattatattctgcgttactattttacacgtaaatcttgatatatccacagcttgcgctaattttgaaggttcgtcggtcatcaataccacgtctgcggcttcaatcgccgcgtctgagcccaatgcgcccatagcgacgccgatgtccgctatcgagagaacaggggcgtcatttattccgtctcctgtaaaggcaagtttgctctttgggtttttcttttctattaatttttccagtatctctactttttcgtgcggcagtaatccgccgtaa

SEQ ID NO: 39692 - protein, 107 aa, Unknown
  Obtained from environmental sample
  misc_feature (1)..(107): Xaa is any amino acid
MPNAPKTRNTIFTPNEKIIFCVTILHVNLDISTACANFEGSSVINTTSAASIAASEPNAPIATPMSAIERTGASFIPSPVKASLLFGFFFSINFSSISTFSCGSNPP

SEQ ID NO: 39693 - DNA, 702 bp, Unknown
  Obtained from environmental sample
  misc_feature (1)..(702): n is a, c, g, or t
gtgaccgtcaaagggaacgtactctgcaaattcggcttcgtcggcaccggcaagggaaccataaccgcaaccggcaacgtcaacttaggctttatgaagaaccaaacggtcatcgccggcggcaacgtcaatatcgccaaagaggcgataaactgcaacatcaccgccgacaaagcgataaccgtctacggccacccactctcggtcgccggcggaatgttggccgccaaggggtcgataaccgtgagaaacgtgggcaacatcagcggaatcaaatccaccctgcagatagacccggaaccgaaactcatggaggaaatgaacgccataaaagccgtcatagcgcaacacgaggaaaacgcgaaaaaactagaaaacatgataaaaggcatgcctccggccgagcaggtgagaaacaaagagcacgtacgcaaactgaagaacacgatcatagccttaaggcagcaaatcgccgctcaagaagagaaagcgcgtctgcagaatatactgatgaacaaattcgaaaacgccttcatacgcatagaccgcatcgcgtaccccggcacaacgatnagattcggaaacatgaacatgtctttgtcggacacgttgcagggcggaaagacaatacgggtaatcaaccaagaggtcagggtgtactccgataggcctattagacctactaaggctaaagaggattag

SEQ ID NO: 39694 - protein, 233 aa, Unknown
  Obtained from environmental sample
  misc_feature (1)..(233): Xaa is any amino acid
MTVKGNVLCKFGFVGTGKGTITATGNVNLGFMKNQTVIAGGNVNIAKEAINCNITADKAITVYGHPLSVAGGMLAAKGSITVRNVGNISGIKSTLQIDPEPKLMEEMNAIKAVIAQHEENAKKLENMIKGMPPAEQVRNKEHVRKLKNTIIALRQQIAAQEEKARLQNILMNKFENAFIRIDRIAYPGTTXRFGNMNMSLSDTLQGGKTIRVINQEVRVYSDRPIRPTKAKED

SEQ ID NO: 39695 - DNA, 954 bp, Unknown
  Obtained from environmental sample
  misc_feature (1)..(954): n is a, c, g, or t
gtggaaagactaataaagatctccgacgcccacatagaagtgggcgtaatccctgatttaggcggtatggttgcgttactccgcatactcggcaaacccaatatcctaaaggccgaccgaagcctctggaacgaaccgccggcgccgacgcgcaagttcggcccgaatcccgcctggaagccctacaacggccacatagtctggctggggccgcaaagcgagtggtgggcgcaccaagacaagagccccaaaaaacgccgcgaacgcgcggtctggccgcccgacccgtacataaacaacggatgctacgaggtgatagagcgcagcggcacggaggtggtgatgcgcggccccgaaagcgagttcagcggggtacggcttgtcaaatcggtcaggataaagaacggcaaggcgctcttcaacgtccgcgccgtgaacatccggaacaaaccggtctcgtgggatctatggctgaacacgcgggtagacggatacgctatgtgctatgccccggtgtcgtcgatgaaaaaggtgcgtatcgacgccccgaacgggaacggcggagacagcgagccgtgtatattttcacacgtagacggatactgcaccgtggaaccgcgtaaaccgtcaaagggtaaggagaggcgtttcggcaaggcgttcatacaagccggaaagggcatgatggcggcttttgcggcgtcgcaggcgctggtaataaaattcaaaaggcactcgtcggcgttgatacatccggagcaggcgttggtggaattttataatataaccacaaacaacaaagaagacgcgctaacggaattagagtaccacgcgccttataggacgctggccccgggcgagtctatggaggcggagcaggtctgggaactttatccgtttaaaccgaagcctacgcaagcggagtgtgtcgagtttttatctaatcctctttag

SEQ ID NO: 39696 - protein, 317 aa, Unknown
  Obtained from environmental sample
  misc_feature (1)..(317): Xaa is any amino acid
MERLIKISDAHIEVGVIPDLGGMVALLRILGKPNILKADRSLWNEPPAPTRKFGPNPAWKPYNGHIVWLGPQSEWWAHQDKSPKKRRERAVWPPDPYINNGCYEVIERSGTEVVMRGPESEFSGVRLVKSVRIKNGKALFNVRAVNIRNKPVSWDLWLNTRVDGYAMCYAPVSSMKKVRIDAPNGNGGDSEPCIFSHVDGYCTVEPRKPSKGKERRFGKAFIQAGKGMMAAFAASQALVIKFKRHSSALIHPEQALVEFYNITTNNKEDALTELEYHAPYRTLAPGESMEAEQVWELYPFKPKPTQAECVEFLSNPL

SEQ ID NO: 39697 - DNA, 819 bp, Unknown
  Obtained from environmental sample
  misc_feature (1)..(819): n is a, c, g, or t
ttgttctcactcagatatcgccgaagaccgtcacgggcgggcggcgcggcggctacgttcaccgtgaggcctcagagcggtctttctgccagcgaatatgattatgacgacgtgataactattacgggcaccaacaaggccaaggtggatatagcggtttcgttcaaggtagtgaaggatcccgtgtacgccataacagccacggagctgttgccgttcggcagcttgctcggcccgtcttacacgcagccgcctgctcagaaggttactgtaaccaatacgggcacgagcgcggttacgttgaccaagccgaccgctgtcaactacgtgatagactctctgttgacgacaaccttagcggccaacgccacgacgacctttaccgttcagcccaagccgggtttgaatttcgggaattacgcggagactataacgatcaacggcagcaacgggacgagcgcgacggtgtatgcggagttcagcgttgtgacgaaggcgaagccggatttgagcgcgtcggagttggcgtcgttcgggactgtgctgtataagtcgggagttactccgccgtacgcgcagccggcggcgcagacggttacggtaaccaatacgggaacgaacgcgattgtgggattgagggtggaggagttgctgtcgtcgtcgaccgtttacggttacgatataggagcgcttacggagacgaccttaatggcgggcgcgagggcgacctttaccgttcggcctaaggcggatctgaatcttggggattacgcgagggatatagtgataagcggcacggcggtagacggcacggattga

SEQ ID NO: 39698 - protein, 272 aa, Unknown
  Obtained from environmental sample
  SIGNAL (1)...(29)
  misc_feature (1)..(272): Xaa is any amino acid
MFSLRYRRRPSRAGGAAATFTVRPQSGLSASEYDYDDVITITGTNKAKVDIAVSFKVVKDPVYAITATELLPFGSLLGPSYTQPPAQKVTVTNTGTSAVTLTKPTAVNYVIDSLLTTTLAANATTTFTVQPKPGLNFGNYAETITINGSNGTSATVYAEFSVVTKAKPDLSASELASFGTVLYKSGVTPPYAQPAAQTVTVTNTGTNAIVGLRVEELLSSSTVYGYDIGALTETTLMAGARATFTVRPKADLNLGDYARDIVISGTAVDGTD

SEQ ID NO: 39699 - DNA, 495 bp, Unknown
  Obtained from environmental sample
  misc_feature (1)..(495): n is a, c, g, or t
ttgcacgggagcgcgtgtgttcggagaaatagcggcgaggttgttggagtgctggcagtaacaggcaaaaaagccaaagcaatagtgtacgcaagcgatgttgaagaagcctgcataaaccagattgaagaagttctaggcaatgaatttttagctgaggaaaaaataagaataatgcctgactgccacgctggaaacaatatttgcataggattcacctcaacaatgaacagtcagtgggcggttccaaattacataggagttgacataggctgcggagttgcctcatatccaattgataaaacagaagttgattttaggaaatttgatgtgcaagttaggagaagcactccttcgggatatgaaatccacaagcattttgacgaggatagatgcaaagacgtttattcaaaaattgcaaaaaattcatttcatctgtttgttgaagaactgaacgaactggttaaaaaacntggggctaaattttcgctctaa

SEQ ID NO: 39700 - protein, 164 aa, Unknown
  Obtained from environmental sample
  misc_feature (1)..(164): Xaa is any amino acid
MHGSACVRRNSGEVVGVLAVTGKKAKAIVYASDVEEACINQIEEVLGNEFLAEEKIRIMPDCHAGNNICIGFTSTMNSQWAVPNYIGVDIGCGVASYPIDKTEVDFRKFDVQVRRSTPSGYEIHKHFDEDRCKDVYSKIAKNSFHLFVEELNELVKKXGAKFSL

SEQ ID NO: 39701 - DNA, 738 bp, Unknown
  Obtained from environmental sample
  misc_feature (1)..(738): n is a, c, g, or t
atgtcattaaaagatataaaaaaaataatagccattgcaagcggcaaaggcggtgtggggaaatccaccgccgctgccaatcttgctatggcaacagccctagaagggaaatccgttggtattctagatgccgatttatacggaccgagcatggggctgatgtttggtttgaacaacgatgttgtgcctgcattctcgcacggcgttaaggttgcctctcttgcccagttatttccagcagaaaaagcgaatgcttggagaggccctagagcggcagctttgatcaacaatttgctgaattttgtggagtgnggaaatttggatgtattgttcatagatatgccaccaggcacaggagatgttcagctttccattattcagggctgcaaactgagtggtgccattatggtaagtacacctcaagaggtggctcttgcggattgcataaagggcattgacctttttaatgaattagatgtacccattttgggtttgattgagaacatgagcagttttatttgcgataaatgtgaaaaagaacattttatctttggcaaggatggcgcaaagaagttggcagaaaaaatggaaattccttttttggggcaaattcccattgaagcatcgcttatggaaggcggagaaaatggtttgccggcagtgcttgcgaacccaaattgcacgggagcgcgtgtgttcggagaaatagcggcgaggttgttggagtgctggcagtaa

SEQ ID NO: 39702 - protein, 245 aa, Unknown
  Obtained from environmental sample
  SIGNAL (1)...(24)
  DOMAIN (10)...(194): CobQ/CobB/MinD/ParA nucleotide binding domain
  misc_feature (1)..(245): Xaa is any amino acid
MSLKDIKKIIAIASGKGGVGKSTAAANLAMATALEGKSVGILDADLYGPSMGLMFGLNNDVVPAFSHGVKVASLAQLFPAEKANAWRGPRAAALINNLLNFVEXGNLDVLFIDMPPGTGDVQLSIIQGCKLSGAIMVSTPQEVALADCIKGIDLFNELDVPILGLIENMSSFICDKCEKEHFIFGKDGAKKLAEKMEIPFLGQIPIEASLMEGGENGLPAVLANPNCTGARVFGEIAARLLECWQ

SEQ ID NO: 39703 - DNA, 864 bp, Unknown
  Obtained from environmental sample
  misc_feature (1)..(864): n is a, c, g, or t
atgaatcttaaggcatccgaccttatccagaaacttatgagcatgggccagatggttacaattaaccagcagatcgatgccgacacagcgacaattcttgccgccgagttcggggcggatgtaaaaattgtcagtctttacgacgagacggtaattgaaacggaatcggatgacaacgcggtaatgcttcctcgccctccagttgttacggttatggggcatgttgatcacggtaaaactaaattgttagatgccattcgcaaatccgatgtagtgtctggtgaattcggcggcattacccagcatatcggcgcgtacatggtggaaaccccacacggcgcgattacatttttggatacgcccggccacgaggcgtttacccgcatgagggcgcgcggggcgcagataactgacattgtagttcttgttgtcgccgcggacgacggcgttatgccgcagacaattgaggccattaaccatgcgaaagaagcggacgtgccgatcatagtcgccgtaaataaaattgacaaacctgaagcaaatcctgacagggtaaaaagtcagctttcagatttggggcttatgccggaagactggggcgggcagaccatgtttgtagcgctttccgcccttcaaaaaacaggtattgataaattgatagatgccatccttttacagtcggaaatccttgacttaaaagccaatttccagcgcagcgccgaaggaaaaattctggaatcaaaaatagatcacgggcgcggtatcgtggcgaccgtaatggtggaaagaggaaccgtcgcaataggcgattgttttgtggcgggggttttggccgggaaaagtgcgcgcgattatttacgataa

SEQ ID NO: 39704 - protein, 287 aa, Unknown
  Obtained from environmental sample
  DOMAIN (67)...(176): GTPase of unknown function
  misc_feature (1)..(287): Xaa is any amino acid
MNLKASDLIQKLMSMGQMVTINQQIDADTATILAAEFGADVKIVSLYDETVIETESDDNAVMLPRPPVVTVMGHVDHGKTKLLDAIRKSDVVSGEFGGITQHIGAYMVETPHGAITFLDTPGHEAFTRMRARGAQITDIVVLVVAADDGVMPQTIEAINHAKEADVPIIVAVNKIDKPEANPDRVKSQLSDLGLMPEDWGGQTMFVALSALQKTGIDKLIDAILLQSEILDLKANFQRSAEGKILESKIDHGRGIVATVMVERGTVAIGDCFVAGVLAGKSARDYLR

SEQ ID NO: 39705 - DNA, 303 bp, Unknown
  Obtained from environmental sample
  misc_feature (1)..(303): n is a, c, g, or t
ttgtcaattttatttacggcgactatgatcggcacgtccgcttctttcgcatggttaatggcctcaattgtctgcggcataacgccgtcgtccgcggcgacaacaagaactacaatgtcagttatctgcgccccgcgcgccctcatgcgggtaaacgcctcgtggccgggcgtatccaaaaatgtaatcgcgccgtgtggggtttccaccatgtacgcgccgatatgctgggtaatgccgccgaattcaccagacactacatcggatttgcgaatggcatctaacaatttagttttaccgtga

SEQ ID NO: 39706 - protein, 100 aa, Unknown
  Obtained from environmental sample
  SIGNAL (1)...(26)
  misc_feature (1)..(100): Xaa is any amino acid
MSILFTATMIGTSASFAWLMASIVCGITPSSAATTRTTMSVICAPRALMRVNASWPGVSKNVIAPCGVSTMYAPICWVMPPNSPDTTSDLRMASNNLVLP

SEQ ID NO: 39707 - DNA, 750 bp, Unknown
  Obtained from environmental sample
  misc_feature (1)..(750): n is a, c, g, or t
ttgtggcgggggttttggccgggaaaagtgcgcgcgattatttacgataagggagataaaatcaacaaggcgactcctcacatgcccgttgaagttcttggctttgaaggaatccccaacgcagaggacccgctgcaggtagtagccgatgaaaaagtggcgcgcgaattctcgtcaaagcggcaggaactgcgccgttttgaagacgcaaagatactgcgaaaggtgacaatggacaatctgcatgacatgataagcgacggcacaattcaggaattaaaagttatcattaaagcggacgttcaggggtcggcggaagcgttaaaatcaagtttggaaaaattaagcacaaaagaaatacgccttcatgtaatacaggcgcttcccggtcccgtcaacgaaggcgacgtagaccttgcgattgcgtccaaagcgataattatcagctttaacgtccgtcccctgcccaaggcgaaaatcctggccgatcaggagaaagtagacatcagaaaatacaatgtaatttacagagcggtagatgaaataagactggcaatggaaggaatgttgaaaccggatacaaaggaagaagtaataggaaccgttgaagtccgcaataccttcaaagtgccgaaagtaggcactatcgccggttgttatgtgcaaatcgggtattataaagcgcagctgtaccgtaaatgttctgcgggatcaggttgttattcacacaggaaaaatagcgtcgcttaa

SEQ ID NO: 39708 - protein, 249 aa, Unknown
  Obtained from environmental sample
  misc_feature (1)..(249): Xaa is any amino acid
MWRGFWPGKVRAIIYDKGDKINKATPHMPVEVLGFEGIPNAEDPLQVVADEKVAREFSSKRQELRRFEDAKILRKVTMDNLHDMISDGTIQELKVIIKADVQGSAEALKSSLEKLSTKEIRLHVIQALPGPVNEGDVDLAIASKAIIISFNVRPLPKAKILADQEKVDIRKYNVIYRAVDEIRLAMEGMLKPDTKEEVIGTVEVRNTFKVPKVGTIAGCYVQIGYYKAQLYRKCSAGSGCYSHRKNSVA

SEQ ID NO: 39709 - DNA, 669 bp, Unknown
  Obtained from environmental sample
  misc_feature (1)..(669): n is a, c, g, or t
ttgaggctattcaaattatttgagcaatgtgttaaacttaatataatgcggtttattttcaacgcatttatttgtattctcctctgtacttttcccgctgttgcccagtcacccggcggagcaggtacacaacccgtttccgcaatggaaaattaccgtattggcagggatctggaaagcctgaaccgcatgaacgaggcgaatacctattacaacgaggctgtccgccaatgccttgacgaagtgtccggcaataccgcctcgcgcactacctatacggttttaacatggacattgcagcggcaaagaagattttccgaagtagtaagctggggagaacagggtcttagattatttcctgacgaataccgcattatggaaacaatgggggaggcgtttttttatcttgatgattacgcgcgttcgctttcttatatgcagcgttatacaaacgccctgccccagggggatcgcgcttctgtcgcgttttttttctccggtgaaatttaccgtataacgcaaaaataccaccatgcggacattgcctataccactgcgttacgttttgaaccaacctcgccctttggtggtacaggctcggctccgtgcgcgaagaaatcggccacagaaaccaggctattgacgcgtaccagcaggccctgcgtataa

SEQ ID NO: 39710 - protein, 222 aa, Unknown
  Obtained from environmental sample
  misc_feature (1)..(222): Xaa is any amino acid
MRLFKLFEQCVKLNIMRFIFNAFICILLCTFPAVAQSPGGAGTQPVSAMENYRIGRDLESLNRMNEANTYYNEAVRQCLDEVSGNTASRTTYTVLTWTLQRQRRFSEVVSWGEQGLRLFPDEYRIMETMGEAFFYLDDYARSLSYMQRYTNALPQGDRASVAFFFSGEIYRITQKYHHADIAYTTALRFEPTSPFGGTGSAPCAKKSATETRLLTRTSRPCV

SEQ ID NO: 39711 - DNA, 366 bp, Unknown
  Obtained from environmental sample
  misc_feature (1)..(366): n is a, c, g, or t
gtggctaaggaaattgatgtcgcgcaggcaaccccgacaccgggagaaaagctgcccacttcctcggggaggaatttcgccagatccggcggcgtagcccaggctgtgagggcaaggctcaaagatccttcgatactgagagaaactgtcattgacggccttgataaagagggaatgaaacgcctcgccgaattcggcaagataaacacaggtcagcttccctacacggaagggacacccaaccttattgaagtaatgacgtgtcagggaggctgtgtcgccgggccttcggtagttaccaacacaaaggttgccttggcgcagctggcaaaatatgcggaattcggcgcaaagataaatagctag

SEQ ID NO: 39712 - protein, 121 aa, Unknown
  Obtained from environmental sample
  misc_feature (1)..(121): Xaa is any amino acid
MAKEIDVAQATPTPGEKLPTSSGRNFARSGGVAQAVRARLKDPSILRETVIDGLDKEGMKRLAEFGKINTGQLPYTEGTPNLIEVMTCQGGCVAGPSVVTNTKVALAQLAKYAEFGAKINS

SEQ ID NO: 39713 - DNA, 843 bp, Unknown
  Obtained from environmental sample
  misc_feature (1)..(843): n is a, c, g, or t
atggacgagtatcaggctgtctggaaggatcttgttaaagccgacctgggccatccggaagcttttgttttgggcaatcagatccttattgggcttgtaaagaacgtcaaagtgataaccaccagcaggggagatcgaatggccttcgcgacactggaagattacaacggcgaaattgagctgactttttttcccgcggcctggactcaatgcggggaaaaaatagagaacgataaagtggctatgcttaaagggaaaatcgattaccagcagaacagggataaatacagtttcaccgtagatgagtttctggaagtggataaggccggaattgtttctgaaaacactcaatttggtaatgataaaaatgttaaaagggaaaataaagaggatgcgcggcaatcggacagattcgcgaatttgcggaagtacgctaaagacatggagctgaacctgctggatttcagtaaagataaagcggaagccggaacctacattgctattggaaccctcagttctataagaacccacattgataaaaagggcaatgaaatggctttcggtactttacaggacgatcttggtgaaggtactatcgacctgttgttttttgcgagggcatgggaaaactgcaaggcaaaggcaatagttgatgaggttttggcggtcaaggggactatcgatgcgcagcgggatagaaataacggtcaaaccaacgggaaaaacaccctgattgtgtcaagcattcaggatgtcaataaactggtcaataaagctgataaaataggagcggataaggaagcgtcggatttaaaatccgctaataaaaaatccgcagattaa

SEQ ID NO: 39714 - protein, 280 aa, Unknown
  Obtained from environmental sample
  DOMAIN (165)...(252): OB-fold nucleic acid binding domain
  misc_feature (1)..(280): Xaa is any amino acid
MDEYQAVWKDLVKADLGHPEAFVLGNQILIGLVKNVKVITTSRGDRMAFATLEDYNGEIELTFFPAAWTQCGEKIENDKVAMLKGKIDYQQNRDKYSFTVDEFLEVDKAGIVSENTQFGNDKNVKRENKEDARQSDRFANLRKYAKDMELNLLDFSKDKAEAGTYIAIGTLSSIRTHIDKKGNEMAFGTLQDDLGEGTIDLLFFARAWENCKAKAIVDEVLAVKGTIDAQRDRNNGQTNGKNTLIVSSIQDVNKLVNKADKIGADKEASDLKSANKKSAD

SEQ ID NO: 39715 - DNA, 489 bp, Unknown
  Obtained from environmental sample
  misc_feature (1)..(489): n is a, c, g, or t
atgaacgcgatcagttccaattcaaggtataaggccgaggctctcaggctcattgaattggtgaacaccgatcataaactgcgggatatgctggcctttggaattgagggtgtcaatttctcctatgtcaaacccaatgtggtacgtaacttaaccgcagaccaatggaacctcgcccgctaccagcagggaactttcttccagatgtccaccatggaaggggatcctgagaacgcctgggatcaggtgcgccttcaaaacgaacaggccgaatcatctgtactgcttgggttcatctttgacaacaaggccgtcatcaacgaggttgcgaactgcaaagccgtctttgacagatataagaatgagcttctcaccggcgcatccaatccggatacggctgttccggccatgatgcgggatcttaatgcggcgggcttccaaaaaattatggatgaagcccaacgtcaggtgaacgctttcaggcgttag

SEQ ID NO: 39716 - protein, 162 aa, Unknown
  Obtained from environmental sample
  misc_feature (1)..(162): Xaa is any amino acid
MNAISSNSRYKAEALRLIELVNTDHKLRDMLAFGIEGVNFSYVKPNVVRNLTADQWNLARYQQGTFFQMSTMEGDPENAWDQVRLQNEQAESSVLLGFIFDNKAVINEVANCKAVFDRYKNELLTGASNPDTAVPAMMRDLNAAGFQKIMDEAQRQVNAFRR

SEQ ID NO: 39717 - DNA, 726 bp, Unknown
  Obtained from environmental sample
  misc_feature (1)..(726): n is a, c, g, or t
atgggcgaagagtctgatatatcttggggggacaaaactcccaatgttcttcgcctgcggaaaactgtacgaagcagggctgagatctggtggaaccagggcaatcaactaagggcttccgcacataaggcaaaaccaatgggaaaaataaaaagcgccctggaaatcgcgcttgaaaaaaccgaatcggtaaagagcgacaagggcagtatagggcagtttgaggcaaagcagaaaggcaaaaaactcgccaaccaatttcttgagggcgcggttaagtccctgcaagacgaaataaaaaagagccctgcaggcgaaaaagaaagccttaagcagggcatattcgacgttttaatttctcaaattaccctgcctttggtaaaagacgatataaaacggatcgaagccgctggtcaagggcttaacgcggttatagagagcaagcgttttgccgaaatttctaaacagtttgtccaaattatgaatcagtttcttgaggaagcgggccatttcgaggaagccatcaaaaagcaatacgcgccaaaactgcgccaaaaggaagaagagatttcccgccgcatggggcgaaatataaaactggatcctttccaggatccggaattcgcagccttttacaaccagaacatgcaagccctcaaggcaaattaccagtctgcggcggatcaggtacgggaagaagcgcaaaggctttttgaaaagaaataa

SEQ ID NO: 39718 - protein, 241 aa, Unknown
  Obtained from environmental sample
  misc_feature (1)..(241): Xaa is any amino acid
MGEESDISWGDKTPNVLRLRKTVRSRAEIWWNQGNQLRASAHKAKPMGKIKSALEIALEKTESVKSDKGSIGQFEAKQKGKKLANQFLEGAVKSLQDEIKKSPAGEKESLKQGIFDVLISQITLPLVKDDIKRIEAAGQGLNAVIESKRFAEISKQFVQIMNQFLEEAGHFEEAIKKQYAPKLRQKEEEISRRMGRNIKLDPFQDPEFAAFYNQNMQALKANYQSAADQVREEAQRLFEKK

SEQ ID NO: 39719 - DNA, 894 bp, Unknown
  Obtained from environmental sample
  misc_feature (1)..(894): n is a, c, g, or t
ttggacgaaactacagcttcagaccccgcgataataaaattacttgaatacgcaagagaaaaaaagactctttcatacgaggagttatccgattttcttcccgaacatataaccaactcagataaaattgaaaatgttttagcgcttcttgaggctaataatgttcagctaatcgaagaagacagcgcctctgacgatgaagaaaacgataatcaaaaaactcaaggcgggaataaaaagaaaaccgcaggttccgataaggattcttctcttgttgacgatccaataaggctttatttacgcgaaatagggcgcgaacatttgttaacagcggaacaggaaattgagctttccaaaaaaatggaagaaggtgagaacatcgttaaaaatgtaataaaaagatcgggcatgataatacccgaattctttaatatcgcccaaaaaacattttccaaacgagatataagggagcttaatctttctaagaaagaaataaccgagcacatgacggaatatcgcagattaaatcaattttacaaagatacgttacgcgcaatacaaattgaattaagaaattatatcgacttaaaaaaagtattaatcgtaaaagatattgattacaaagaagataaggaatgttccgctcttcgtaaaaaaataatgaagacgctaaaaaacactcaaatacatcccgatgaaattcagacgttttcagacaaatttataatagcctccaagaaaatcaaacgttacataaaagagcaggaacgccttgaaaaacacttaaaagttggttcattaaaagaacttcgcacaatgggaagataccttacaatcagggaagagcgcgaaaaactgaaaatgagttgggcttccgccgctcggccgatctga

SEQ ID NO: 39720 - protein, 297 aa, Unknown
  Obtained from environmental sample
  DOMAIN (3)...(80): Sigma-70 factor, region 1.1
  misc_feature (1)..(297): Xaa is any amino acid
MDETTASDPAIIKLLEYAREKKTLSYEELSDFLPEHITNSDKIENVLALLEANNVQLIEEDSASDDEENDNQKTQGGNKKKTAGSDKDSSLVDDPIRLYLREIGREHLLTAEQEIELSKKMEEGENIVKNVIKRSGMIIPEFFNIAQKTFSKRDIRELNLSKKEITEHMTEYRRLNQFYKDTLRAIQIELRNYIDLKKVLIVKDIDYKEDKECSALRKKIMKTLKNTQIHPDEIQTFSDKFIIASKKIKRYIKEQERLEKHLKVGSLKELRTMGRYLTIREEREKLKMSWASAARPI

SEQ ID NO: 39721 - DNA, 846 bp, Unknown
  Obtained from environmental sample
  misc_feature (1)..(846): n is a, c, g, or t
atgcatagaagaactgactgcgctaggaaagtggattgcaaaatgcctgtaaaaatttcactgggtatttctccttgcccaaacgatacctttatctatcaaaatctcattgagggcaaagtccaaactccttgctctatttcagtggaatatgccgatgttcaaaccttgaatgaaaaagttttgaaaggcgaattggatatggcaaaagtgagttgtgccgtatatccattggtaaaagacaattacagaattttagacagcggaggtgcaataggctatggctgcggtcccttattgctttcttctttcagcgaaaaatttgatcccgaattccctgtctatttacccggcgaacaaacaaccgctgctgctctattcaacttctggataaaaaaactctcaactctcaactctcaactctcaactaaaaaaatccaaatcctaaaatttgacgaactataccgtgagctttgcgagaaaaaaataaaacaaggagtggttatacacgagcatcgctttacttggcagagagacggtttgcatttaatagcagacttaggtgcatattgggaacaggaattgcaagtacctattccgttgggttgcacggtgataaaaagggatttgggcgaagaacttgccaaagagatggattcatgcgttcaaaaaagtttgaaactcgcttgggaacgcaaagagcctgttaccgatttcatcagaaaactagctcaaatagacgatgatgcggttattttgcagcatataaagatgtttgtgaatgaatattcgctgaataggggcgaaaaaagcgaaaaagcatttagtttactatatttgccctag

SEQ ID NO: 39722 - protein, 281 aa, Unknown
  Obtained from environmental sample
  DOMAIN (18)...(281): Uncharacterized ACR, COG2107
  misc_feature (1)..(281): Xaa is any amino acid
MHRRTDCARKVDCKMPVKISLGISPCPNDTFIYQNLIEGKVQTPCSISVEYADVQTLNEKVLKGELDMAKVSCAVYPLVKDNYRILDSGGAIGYGCGPLLLSSFSEKFDPEFPVYLPGEQTTAAALFNFWIKKLSTLNSQLSTKKIQILKFDELYRELCEKKIKQGVVIHEHRFTWQRDGLHLIADLGAYWEQELQVPIPLGCTVIKRDLGEELAKEMDSCVQKSLKLAWERKEPVTDFIRKLAQIDDDAVILQHIKMFVNEYSLNRGEKSEKAFSLLYLP

SEQ ID NO: 39723 - DNA, 540 bp, Unknown
  Obtained from environmental sample
  misc_feature (1)..(540): n is a, c, g, or t
ttgcgacgggtaatttttttaaaggggaaaaaaatctttgttgcggcgggcggagacgcggcctgtgatgaagcgcgctatctttcacatctttcaagccagataattcttgttcacaggcgggatactttgcgagcgcaaaaagcccttgccgaaagaacattgaacaatcctaatattaaagtacgttttaatacggttatcaaagaaataaagggcggtaaaaaagtcagttcagttgttttgtcagatacagttaacggcaatgtttatgaagagcaggctgacgctgtttttatttttgccggaactgttcctcagtcatctctggcttgcggcggtttaaatgcaaaacttgatgaaagcggctatattatcacggatcaagaaatggctgctaacgtacccggtttgttcgcggcaggcgatatccgctcaggcgctttccggcaggtaataacagccgccgctgacggcgcaatggcagctcacagcgcttccgtttacattgatgggcttaattcaggaaaagcaaaatga

SEQ ID NO: 39724 - protein, 179 aa, Unknown
  Obtained from environmental sample
  DOMAIN (11)...(103): Pyridine nucleotide-disulphide oxidoreductase
  misc_feature (1)..(179): Xaa is any amino acid
MRRVIFLKGKKIFVAAGGDAACDEARYLSHLSSQIILVHRRDTLRAQKALAERTLNNPNIKVRFNTVIKEIKGGKKVSSVVLSDTVNGNVYEEQADAVFIFAGTVPQSSLACGGLNAKLDESGYIITDQEMAANVPGLFAAGDIRSGAFRQVITAAADGAMAAHSASVYIDGLNSGKAK

SEQ ID NO: 39725 - DNA, 1278 bp, Unknown
  Obtained from environmental sample
  misc_feature (1)..(1278): n is a, c, g, or t
atgaaatgcccctattgcgacacagaatttgaaattgccgctttggaagaataccaaaaggagattgcagctgcaaaggataattttggatgggcaaaagaagaagttccacaagaatgggaacaaggcgaacttgaagatttgagttccggttcctgcccttcttgcggagcggaacttttaggcgatgccaacaccgttgcgatggtatgcccgtgttgtggcaatgctcagattgtaagcaaaaggctttctggatttttaaaaccagattatgttattccattcaaacttgaaaaagagaatgcggtaaaagagttgaaaaatttttgcagcggaaaaaaactacttccagatttttttgtcaaagagaaccacgtgaacaatgttcaaggagtttatgttcccttttggctttttgatgcagaagcaagcgggcgcgtatgcttcaaggcaaccaaggctaaaagagcaacggattatataaaaaccgaatactattccgtgattagagagggaaatattgtatttgaaaaaatacccgttgatggctccgaaaaaatggacgataaatatatggatgccatagaaccttttgattatgcgcagatgaaagattttgacacaacttatttggcaggttatgttgccgaaaaatatgatgttgatgcagaaaagagcaaggagagagcagcgcgcagaataaaggcttctgtggaaaaggaatttgagaattccattgttggttatgattcggtgaaagtggaaagttcctcgattagcgtgaaggaaggccaagccagctatgcgctttttccggtatgggtactcaacaccaaatatagagaggaaaattatctttttgttatgaatggtcagtctggccgccttgttggaaggttgcccatagactcaaaaaaaatttggaaatacggttttatatattcgggcattttagggcctattctaaccgctttggtatttgccttatggtatagcgacccgaatttcgctctgtttgccgctgttgcgtgggttttggcttttataatgggctttgcttttgtattcagctggaaatcccaaatgaacaccgctctattaaaagatgaagcaaatgcgtatatcgtcaaagaaagcgtggttttaaagaataaaaatgacaaattcctttatagcaaggtcagcaaagttgcgcagcaagcctccaaagccgcacttaccggagctcttgttaaaggtgccatgcaatactctgccaagagaaaggttttttaa

SEQ ID NO: 39726 - protein, 425 aa, Unknown
  Obtained from environmental sample
  misc_feature (1)..(425): Xaa is any amino acid
MKCPYCDTEFEIAALEEYQKEIAAAKDNFGWAKEEVPQEWEQGELEDLSSGSCPSCGAELLGDANTVAMVCPCCGNAQIVSKRLSGFLKPDYVIPFKLEKENAVKELKNFCSGKKLLPDFFVKENHVNNVQGVYVPFWLFDAEASGRVCFKATKAKRATDYIKTEYYSVIREGNIVFEKIPVDGSEKMDDKYMDAIEPFDYAQMKDFDTTYLAGYVAEKYDVDAEKSKERAARRIKASVEKEFENSIVGYDSVKVESSSISVKEGQASYALFPVWVLNTKYREENYLFVMNGQSGRLVGRLPIDSKKIWKYGFIYSGILGPILTALVFALWYSDPNFALFAAVAWVLAFIMGFAFVFSWKSQMNTALLKDEANAYIVKESVVLKNKNDKFLYSKVSKVAQQASKAALTGALVKGAMQYSAKRKVF

SEQ ID NO: 39727 - DNA, 816 bp, Unknown
  Obtained from environmental sample
  misc_feature (1)..(816): n is a, c, g, or t
ttgagccaaagtctttcccgtctacggatgttttgttcgcttcactgggttgtggcgcgacccgcagcaatggatttgagcgatcaatcagttatcacagtggtgattcaaacatattgcgctgacggcgtttgcactatctggagattacttgcggagatgattgtggaacccctaaggcggttgacggagataacccgctccgttacaaaggctctgacgacttggcctattcaggcaagaccctggtctaatgaaatggacgaattcatatttaccagtcaacaagcggtagacgggatgaacgagatattgaagggcattaaccacagaaacctcgcggttagccatgtaaacgaaatgagccttgaaaacaaccgccactttcaatccctacaacgtgaaaccgaaaagttcactgacacggctgataacggtaaacaaaaaatcctcgtggtagatgacgacagcatccaccttgaaatgatagaaaccgcgctgtcagacgaatacgaggtgtccacagcgaaatccggcaaagaagcgctgggcttgttctatcagggccttgtccccaacttaattttactggacttgataatgcccgatatggacggctggaacacctacaccagaataaaggccataggcggcctgtacaacaccccgatagccttttttacgtcttcggacgaccccaaagacaaacaacacgcccgcgaaatgggggcggttgattacatcaaaaagccctatgaaagaaacgacctgttattcagggtgggaagaatcatgaaacagggagttgccgcatga

SEQ ID NO: 39728 - protein, 271 aa, Unknown
  Obtained from environmental sample
  DOMAIN (148)...(262): Response regulator receiver domain
  misc_feature (1)..(271): Xaa is any amino acid
MSQSLSRLRMFCSLHWVVARPAAMDLSDQSVITVVIQTYCADGVCTIWRLLAEMIVEPLRRLTEITRSVTKALTTWPIQARPWSNEMDEFIFTSQQAVDGMNEILKGINHRNLAVSHVNEMSLENNRHFQSLQRETEKFTDTADNGKQKILVVDDDSIHLEMIETALSDEYEVSTAKSGKEALGLFYQGLVPNLILLDLIMPDMDGWNTYTRIKAIGGLYNTPIAFFTSSDDPKDKQHAREMGAVDYIKKPYERNDLLFRVGRIMKQGVAA

SEQ ID NO: 39729 - DNA, 720 bp, Unknown
  Obtained from environmental sample
  misc_feature (1)..(720): n is a, c, g, or t
ttggcaaataagctaggtagcggaaatagcaacttttttattcgtgaaaaaatgctgaacgctatgactacaaatgaaacctcgttttttagagacgagcatcnttatgtggcattcaaggaaaaaattatgccagatatattggatcgtattaaagagcgtaaagaacgttcttggcaacgcagaggttcaaaggtcagtatgtggagtgttgcggcaagttctgggcaagagccttattctatggctatgattattgctgatgtaatcagcggaaaaagcccggatgtagtttcgctggaagattttggaattttaggtacagatatttcctctaaagttttatcaaaagctatggaaggaaggtatggagctttggaagtggccagagggttaaccacagaaatgcggaataagtattttttgctggacggcgattcatatatagtagatgaaaaacttcgcggaatcgtgaatttcaaaacttttaacattcaagagtcctttttgcaaataggttcatttgacgttatattctgccgcaatattctgatatatttcacagatgacgcaaagcgcaaaatactatcccaactgtggcatgtgcttgctccaaaaggttatctgctcttaggtgctgcggaaaatatgtataacctgaacagcgattttgaaacggaaagatacggcgcaaccactatctatagaaagccttcttga

SEQ ID NO: 39730 - protein, 239 aa, Unknown
  Obtained from environmental sample
  DOMAIN (25)...(237): CheR methyltransferase, SAM binding domain
  misc_feature (1)..(239): Xaa is any amino acid
MANKLGSGNSNFFIREKMLNAMTTNETSFFRDEHXYVAFKEKIMPDILDRIKERKERSWQRRGSKVSMWSVAASSGQEPYSMAMIIADVISGKSPDVVSLEDFGILGTDISSKVLSKAMEGRYGALEVARGLTTEMRNKYFLLDGDSYIVDEKLRGIVNFKTFNIQESFLQIGSFDVIFCRNILIYFTDDAKRKILSQLWHVLAPKGYLLLGAAENMYNLNSDFETERYGATTIYRKPS

SEQ ID NO: 39731 - DNA, 306 bp, Unknown
  Obtained from environmental sample
  misc_feature (1)..(306): n is a, c, g, or t
atggcaaaaacgcgcggtgaaaccgcagccggcaagacgcgtggtgaaaccgcggccgcaaaaaaagacatgaaaaatttcgaggaaaggcttgaacggctggaggttttgggcgagaagatccggaaaaccgacattcccctggatgaggcaataaaggcttttgaggaagggattaaactggcaaggacccttgaaaacgaccttgaaaaaattgaaagccgcattgagatactgatgaacagcgcccaggcccccgccgacgaggcccctgaactggagttgtttgacgaagatagggagtag

SEQ ID NO: 39732 - protein, 101 aa, Unknown
  Obtained from environmental sample
  DOMAIN (25)...(88): Exonuclease VII small subunit
  misc_feature (1)..(101): Xaa is any amino acid
MAKTRGETAAGKTRGETAAAKKDMKNFEERLERLEVLGEKIRKTDIPLDEAIKAFEEGIKLARTLENDLEKIESRIEILMNSAQAPADEAPELELFDEDRE

SEQ ID NO: 39733 - DNA, 1158 bp, Unknown
  Obtained from environmental sample
  misc_feature (1)..(1158): n is a, c, g, or t
ttgaaagttctttttccantagtcatggttgaaggtgaagtttcaaattgcaggccggcaagttcaggtcatctgtatttcagcctgaaagactcaggcgcaaaaattgacgctgtaatgttcagaaacaggctgaggactctgaactntgagccaaaggacggtatgcttctccgtgtacggggaagcctttccgtgtacgctcccagggggacatattccattgtatgtgaagaaatggaaatcgcgggagcgggggaaatacttgccatgcttgaaaagcgtaaacaaaagtttgccgccgaaggtctttttgatgccgagcgtaaacgtcccctgccccgcttccccgaaactgtgggagtggtaagttctcctacgggggctgcggtacgcgacattcttaacatactcggaaggcgggcttcgcgcataaaggtaataatacttcccgctcctgtgcagggagacgaagccgcttcttttatagcggcgagaatcaggcaggctaaccaatggcgtctcgctgacgtgcttatcgtgggcaggggcggaggttctatagaagaccttttgcccttctccgatgaggaagttgtgcgcgcaacagcggaatccgttattcccgttgtcagcgcggtgggacatgaaattgactgggccttatgtgattttgcagccgatctgcgcgctcctaccccttccgccgcggcggagcttgtaagcgccgaattgacaacggttctgtcaaacatcagaaccattagcgagtttttaaccgcgtccataaagacaaggattgaaaaggccagactccttttgcgccccttcggcgccgaggaccttgaataccgcttccgttccattttacagccgcgcctcgtgcgctttgacgacgccaaggaaaatcttgtcgagggcatggcggctcttgtcggaaacctgcgaaaaaggcatgagctggcccttgccatacttgaggcgggaagccctcttgcggtaatggaacggggcttttccgtggttatgaacagaagaacaggggccattatcaggggcggagacgaagcccgccccggcgaccgtcttgatatacgccctttacatggtaatattacggcagtaacggaggaatgttatggcaaaaacgcgcggtga

SEQ ID NO: 39734 - protein, 385 aa, Unknown
  Obtained from environmental sample
  DOMAIN (8)...(83): OB-fold nucleic acid binding domain
  misc_feature (1)..(385): Xaa is any amino acid
MKVLFPXVMVEGEVSNCRPASSGHLYFSLKDSGAKIDAVMFRNRLRTLNXEPKDGMLLRVRGSLSVYAPRGTYSIVCEEMEIAGAGEILAMLEKRKQKFAAEGLFDAERKRPLPRFPETVGVVSSPTGAAVRDILNILGRRASRIKVIILPAPVQGDEAASFIAARIRQANQWRLADVLIVGRGGGSIEDLLPFSDEEVVRATAESVIPVVSAVGHEIDWALCDFAADLRAPTPSAAAELVSAELTTVLSNIRTISEFLTASIKTRIEKARLLLRPFGAEDLEYRFRSILQPRLVRFDDAKENLVEGMAALVGNLRKRHELALAILEAGSPLAVMERGFSVVMNRRTGAIIRGGDEARPGDRLDIRPLHGNITAVTEECYGKNAR

SEQ ID NO: 39735 - DNA, 882 bp, Unknown
  Obtained from environmental sample
  misc_feature (1)..(882): n is a, c, g, or t
atgtatgatattgaagatattttagaagctgaaagtccctctcacgcggttgagttgctacgccaacacccggacgcgaaaattatcgcggggggcagtgacgtgttaatcgaaatccgcgagggcaggcttgcgggccgcacattgatgagtattcagaaacttgattgtttgcggggagtaaagattgatccggatggcgctatccgcattggcgcgttgacgagtttttcccatgtcgcgcaagacccggtcatacagaaaaacatccccgtgcttgcggaggcggtgctgaccatcggcgggccgcagttgcgcaacatcggcactataggcggtaatgtctgcaatggggttacgtccgcggacagcgcctcgaccctgctggcctatgacgtggtgatggaatacctcggccccaacggtctgcggctggttcccatttccgaacattataagggcgcaggtaaaaccgccctggcccatgacgaaatcttgcaggctattcttgttccaaaggaaagttatgaaaattgttttggcaattatataaaatacgccatgagggaagccctggacatagcaaccctgggatgttcggcaaatgtccggctttcaaaagatcgcaaaactattgacagagcccgtctggcatacggcgtcgccgggcccgtccccatgcgcgttcccggcgcggaacaggcagcggccggaaaacccccaaacgccgaaaccgcggccgcaattgccaaactggtgttaaacgacattaacccgcgctcaagctggcgggccagcaaggaattccgcctgcacttggcggaagagcttgccaaacgggcgattaccgaatcgcttaaacgcgcgggggtatcgttatga

SEQ ID NO: 39736 - protein, 293 aa, Unknown
  Obtained from environmental sample
  DOMAIN (182)...(290): CO dehydrogenase flavoprotein C-terminal domain
  misc_feature (1)..(293): Xaa is any amino acid
MYDIEDILEAESPSHAVELLRQHPDAKIIAGGSDVLIEIREGRLAGRTLMSIQKLDCLRGVKIDPDGAIRIGALTSFSHVAQDPVIQKNIPVLAEAVLTIGGPQLRNIGTIGGNVCNGVTSADSASTLLAYDVVMEYLGPNGLRLVPISEHYKGAGKTALAHDEILQAILVPKESYENCFGNYIKYAMREALDIATLGCSANVRLSKDRKTIDRARLAYGVAGPVPMRVPGAEQAAAGKPPNAETAAAIAKLVLNDINPRSSWRASKEFRLHLAEELAKRAITESLKRAGVSL

SEQ ID NO: 39737 - DNA, 426 bp, Unknown
  Obtained from environmental sample
  misc_feature (1)..(426): n is a, c, g, or t
gtggaagtcgacatcccattctgcaaaattaaactgctggaaatggttaattgccatgactgtggcactctgatcaacccaaaaacagccgaagcgcaggttcacggcggcatgagcatggcgattggttatggattgtacgagaagatgttatacgattccaaaacgggaaagctccttaacggcaatctgcttgactataaactgccgacgattatggaccacccgaggcttgaagctgaattcattgaaaaccacgagccgaccagcccttatgggacaaaggctctcggcgagccgccgaccgtgcccggcgcttcggctattcgtaatgccgtgcttcacgccaccggcgttgggatcaatactattccgcttacgccccatgtgctttttgcggaattcaaaaaagcggggttgatataa

SEQ ID NO: 39738 - protein, 141 aa, Unknown
  Obtained from environmental sample
  misc_feature (1)..(141): Xaa is any amino acid
MEVDIPFCKIKLLEMVNCHDCGTLINPKTAEAQVHGGMSMAIGYGLYEKMLYDSKTGKLLNGNLLDYKLPTIMDHPRLEAEFIENHEPTSPYGTKALGEPPTVPGASAIRNAVLHATGVGINTIPLTPHVLFAEFKKAGLI

SEQ ID NO: 39739 - DNA, 681 bp, Unknown
  Obtained from environmental sample
  misc_feature (1)..(681): n is a, c, g, or t
atggacatggacaccaccattgaaagccgaatagcttgccttcaggcgtttgatccgctgtttcccacagggtcctacactatgtcgagcggcatggaaacctacacgcaaaaaggacttgtgcagaataaatcttctcttatctcatacctaaaggctcaactttacattttgccctacggcgacttaggcgtctgcgccaaaacagcgcaaggcgaagattttattttaatggacaacctttgcgccgcgatgaaacaaccctacgagatacgaacaggcagtgaaaaaatctgcacgcgttttttgaaagcgcaggagacgctgtgcagctatccgtcgcttgccgcatacagactggcgataaaacaggaaaaatgcaaaggacattatcctgtcgcggtcggtcttttcatacgcgacttaaaagcgaacataggcgaggcgctggaattgtattgctacagccttttgtcgcagacagtaaaccacgccgtcaaattaattccgcttgggcaatcagacggacaggcggctctttttgaagctctgcgcctgatacccggcgtggcgcaaaaggcactgacggcggatgttgacggcttgggagtctccggctgcggttttgatttacgcgcaatgcagcatgagacgctgcgcggaagactttatataaattaa

SEQ ID NO: 39740 - protein, 226 aa, Unknown
  Obtained from environmental sample
  DOMAIN (40)...(189): UreF
  misc_feature (1)..(226): Xaa is any amino acid
MDMDTTIESRIACLQAFDPLFPTGSYTMSSGMETYTQKGLVQNKSSLISYLKAQLYILPYGDLGVCAKTAQGEDFILMDNLCAAMKQPYEIRTGSEKICTRFLKAQETLCSYPSLAAYRLAIKQEKCKGHYPVAVGLFIRDLKANIGEALELYCYSLLSQTVNHAVKLIPLGQSDGQAALFEALRLIPGVAQKALTADVDGLGVSGCGFDLRAMQHETLRGRLYIN

SEQ ID NO: 39741 - DNA, 522 bp, Unknown
  Obtained from environmental sample
  misc_feature (1)..(522): n is a, c, g, or t
atgaacaatatacaaattaaatttatcaacactcaaaaaaccataacctgcccttacggcactattgcctcgactcttgttgagcattttggcattccgcaggagaaaattgcggcaatcaaggaaaataacgaaatacgcccgcttggaacgactttacttgcgaatgcgtcggtcgaacctatccttattgattcttcagaaggcgtcgcggtttatcgccgtaccctttcttttgttttggctattgcggcgcagaaaatatttccaaaggacggagtgtatgtaggtcattcgcttggatacagttattactatacgttaagctccggcgacaagccaaaagaaagcgatattaaaaaacttgaagacgaaatgcgcgctcttataaaagaaaatcttcaaatatcatttaaatatctttcttatgaagaagcgttacagttattcaaaaaaaataaccaaacagacacagtgcttcttctggaacatagaagttctccgctttatcaaggtaaatga

SEQ ID NO: 39742 - protein, 173 aa, Unknown
  Obtained from environmental sample
  misc_feature (1)..(173): Xaa is any amino acid
MNNIQIKFINTQKTITCPYGTIASTLVEHFGIPQEKIAAIKENNEIRPLGTTLLANASVEPILIDSSEGVAVYRRTLSFVLAIAAQKIFPKDGVYVGHSLGYSYYYTLSSGDKPKESDIKKLEDEMRALIKENLQISFKYLSYEEALQLFKKNNQTDTVLLLEHRSSPLYQGK

SEQ ID NO: 39743 - DNA, 942 bp, Unknown
  Obtained from environmental sample
  misc_feature (1)..(942): n is a, c, g, or t
ttgtttaatataataggaacctgctgggcgcttcccctcttaaaacctcttctggctttggttaactttgctactcccggaaccatgacaggcgcgtttcaggatcctatggttccaacccaccttgccatgcttcacacggttttcaatatgataaacaccattgtatttctacccttcgtaaagcagtttgccgctctggtttcttttattataaaagataaaaaaatcgaagaagaagaaacagaagaaaggcattaccatcttgaatatatttcaggcgcgatgcgggacacgccggagcttaacattttacgcgccgaaaaagagatcagcgatatggtcggccttgtctcggatatgttcggtgaattcagttccattctgaattccatgcaggaagccccattaacagaagacgccgtgaacaagcttatcgcggattataaagaaaaagaaaattatgcggatgaaatgcgggaagcccttacagacttccttgtggaatgtaccagggaagggttaagttcccattccgaaaagagggtttcaaggctgctccgaattgtcgcggatctggaagatatgtcggatgcctgttacggcatcagctttctccttgaattgagtgtgcggaaaaaccatgttataaagagcaaggaagtaacagccctgatcccctatgtagccctggtagaaggatttttaaaattcatcaaatttataaaacttgggagcgtaatttcaaaagaacagtccaagtgggcgcgggatcttgaaaaccagattgacgaatcccgcgacaggctgcgtaaacttggccgaaagcgcattgaagcgggcaaagacgtaaaaacagaattgctatttatagatctggtccgccgcatcgaaaagctcggagattactgttacagtatcgccggagcccttgcgtattaa

SEQ ID NO: 39744 - protein, 313 aa, Unknown
  Obtained from environmental sample
  misc_feature (1)..(313): Xaa is any amino acid
MFNIIGTCWALPLLKPLLALVNFATPGTMTGAFQDPMVPTHLAMLHTVFNMINTIVFLPFVKQFAALVSFIIKDKKIEEEETEERHYHLEYISGAMRDTPELNILRAEKEISDMVGLVSDMFGEFSSILNSMQEAPLTEDAVNKLIADYKEKENYADEMREALTDFLVECTREGLSSHSEKRVSRLLRIVADLEDMSDACYGISFLLELSVRKNHVIKSKEVTALIPYVALVEGFLKFIKFIKLGSVISKEQSKWARDLENQIDESRDRLRKLGRKRIEAGKDVKTELLFIDLVRRIEKLGDYCYSIAGALAY

SEQ ID NO: 39745 - DNA, 759 bp, Unknown
  Obtained from environmental sample
  misc_feature (1)..(759): n is a, c, g, or t
ttggattctctgcaaagagatgcgcctgtcaccgtttcagacgcgcaagcgctgctggaacggataaaaaccggggatatgctgaaactgcgcggcgttgcgggaattttccccgccgccgccgatggcgatgatattgtaatcggtgacaggcaccgtttttgttttttacgcagccagaacaaaaaacccgccggaaggttcaactcctgtttggcggattttgtcgcgccggcggacggcgggcgggcggttgattgggtagggctgtatgccctgagcgccggtttcggcattgagaatgccggctttgatgatcattacgatacgctgctgctggcgagtctggcgaatgcgctggcggaggcttttgtcgaagaaattcacctccgtacccggcgggaatggtggggttatgcgccggatgaatctctttctgttgaagaaattctgaaaggcggttttacgggcatacgtcccgcctttgggtatccctcttgtccggatcacgaggataaacgcattgcctttgaactgcttgaagcggaaaaacgctgcggcctgaaactaacggacaccgcaatgattattcccgccgcctcggtatgcggtatgttttttgccggtcctgcggcgtattacttcggcattgggactataggcgatgaccagttggctgattgggcagggcgcaaaggcatcggcgttgaagaagcccggcggcggaccggttaccctccgtttgttcccaggcggtaa

SEQ ID NO: 39746 - protein, 252 aa, Unknown
  Obtained from environmental sample
  DOMAIN (85)...(217): Vitamin B12 dependent methionine synthase, activation domain
  misc_feature (1)..(252): Xaa is any amino acid
MDSLQRDAPVTVSDAQALLERIKTGDMLKLRGVAGIFPAAADGDDIVIGDRHRFCFLRSQNKKPAGRFNSCLADFVAPADGGRAVDWVGLYALSAGFGIENAGFDDHYDTLLLASLANALAEAFVEEIHLRTRREWWGYAPDESLSVEEILKGGFTGIRPAFGYPSCPDHEDKRIAFELLEAEKRCGLKLTDTAMIIPAASVCGMFFAGPAAYYFGIGTIGDDQLADWAGRKGIGVEEARRRTGYPPFVPRR

SEQ ID NO: 39747 - DNA, 1029 bp, Unknown
  Obtained from environmental sample
  misc_feature (1)..(1029): n is a, c, g, or t
gtggacatgactgccgaacaccgggagaagaattggacggcgttgtcacgctacttgtctgccagacttacggaggagctgtcgctcggccgtcaagcgattttgctgctcaacaggcgcggcttctccacatcgcttctgtgcagagggtgcgggtacttgcacacctgccccaactgctccgtaaacatgcgctaccacaaggccgacaccgcgctcaaatgccacctctgcggctacgaggaaccggcgctcgttagttgccaaaaaaaaaaagggaccaagatcaagtacaatggtacgggtatacagaaggcggaagagatgataaaggagcgcttcccggagaatcggatactgcggatggatcaagacactacgcggcgcaagggttcgcacgcggcgatactcgacgctttcgccggcggcggcgcggacatactgcttggaacgcagatggtggccaaaggcctgaacttccccggcgtgcgctttgtgggcgtggtctttgccgacaccggcctgcacctgcccgacttccgcgccgccgagcgcactttctcgctgattgtgcaggttgccggcagggcagggcgttattttcccgacggcaaggttatagtccagaccttccgcatgggcgaccctgtgataacccgttcctgcgcaattgacgtgaaaggtttttttgaagcggaacttagccagcgtgaagctctcaatttcccaccctatacccggcttatacgtttcagcgcccgcagtcataaccccacgcgcgccgataccgcaatcaagcgccttgccgcgctcgccgcgccgcttatcccccccggtgccgacatgcttggaccggcggaatgtcccataggtgtaatcaatggaaaccatcgccagcagcttatcctgcgcggtaaatcaatgggcaccctgcacggcgccgcccgcgtccttttggaacgttatgaaaaaggccgtgacagccaggtgtatatggaagtggacgtggatccggtgaacctgctataa

SEQ ID NO: 39748 - protein, 342 aa, Unknown
  Obtained from environmental sample
  DOMAIN (111)...(201): Helicase conserved C-terminal domain
  misc_feature (1)..(342): Xaa is any amino acid
MDMTAEHREKNWTALSRYLSARLTEELSLGRQAILLLNRRGFSTSLLCRGCGYLHTCPNCSVNMRYHKADTALKCHLCGYEEPALVSCQKKKGTKIKYNGTGIQKAEEMIKERFPENRILRMDQDTTRRKGSHAAILDAFAGGGADILLGTQMVAKGLNFPGVRFVGVVFADTGLHLPDFRAAERTFSLIVQVAGRAGRYFPDGKVIVQTFRMGDPVITRSCAIDVKGFFEAELSQREALNFPPYTRLIRFSARSHNPTRADTAIKRLAALAAPLIPPGADMLGPAECPIGVINGNHRQQLILRGKSMGTLHGAARVLLERYEKGRDSQVYMEVDVDPVNLL

SEQ ID NO: 39749 - DNA, 681 bp, Unknown
  Obtained from environmental sample
  misc_feature (1)..(681): n is a, c, g, or t
atgagcgaatatattctcgaaatagaaaatctaaccaaagaattccccggcgttaaggctcttgataaagtcaatttaagagttaaaaaaggcgagattcactcgctgtgcggagaaaacggcgcggggaaatccacactgatgagttgtatttcgggcgtttaccccaacggtgattacgaaggtaaggtttttttcaaagggcgtgaaactaattacaatagcgttaaagacagtgaaaaagaggggcttgctattattcatcaggaattggcgcttagcccttatttatcaatttatgaaaatatttttctgggacacatggaaaccagttttggcgtaatcaactgggataaatatataaaagaatcaaaaaaatatctgaataccgtagggctgtacgagccgcccgaaaccgttgtaagcaaactgggggtgggcaaacaacagttgatagaaatagcccgcgccctttcaaagaaaacggaactgctcattctggacgaacctacatcttctcttaatgatgatgaaagcgaaaaactcctcaatctgatacttgaatttaaacgccagggtattacctcggtgatgatttcccataaattgaatgaagtgcttaagttgccgatacggggactatcctgcgtgacggccgttccatcagcacctatgatgtaa

SEQ ID NO: 39750 - protein, 226 aa, Unknown
  Obtained from environmental sample
  DOMAIN (31)...(213): ABC transporter
  misc_feature (1)..(226): Xaa is any amino acid
MSEYILEIENLTKEFPGVKALDKVNLRVKKGEIHSLCGENGAGKSTLMSCISGVYPNGDYEGKVFFKGRETNYNSVKDSEKEGLAIIHQELALSPYLSIYENIFLGHMETSFGVINWDKYIKESKKYLNTVGLYEPPETVVSKLGVGKQQLIEIARALSKKTELLILDEPTSSLNDDESEKLLNLILEFKRQGITSVMISHKLNEVLKLPIRGLSCVTAVPSAPMM

SEQ ID NO: 39751 - DNA, 882 bp, Unknown
  Obtained from environmental sample
  misc_feature (1)..(882): n is a, c, g, or t
ttgttaaaaatatttttgaacgcaagaggaagggataaaatggcgatttaccctgttctaaaaagcgcatttagcataatgatcccgatattttttgccgctttcggcggactttttcccacgctagccggagcattgaacatcgcccttgagggattgctactgtcaggagcattttgttctttgactgttttttacttctcaggtagcgtaacagtcgccgtactgtccgccatttttaccgcgacaatactgtcggcgttacactcgttagctgttttcaaacttaaagccgatttatttatttcaggtctggcgataaatttattctcaagcggtttgtgcgtagttctttcggaaaaaatattcggcacaaagggagtagtcgcggcgaatagcgcaagcggcttgttaatatggtatgtgattttgggaataatcctgctgataatttcacatatcgctatttacaaaaccccgttcggttacaggcttagagcttgcgataaaaacgcagacgcgcttgttggtcttggaataaaaccagtattctaccaaacagccgcctttttaatatccggttttttctgcggcataggcggttcctttttaagtttaaatctgggagcgttcgtacccggaatgtccgcgggcaaaggctggatcgccctcgccgtaattttcctcggtgtaaaaaaaccggtaggcattcttgtcgcagctttcgttttcgccctagccgaatgtttttcaaactacgctcaaggtttttggcaaataccggcgggctttattttggcgtttccgtatatttgtacattaattgcgataatagttgtgtcggttattccttcttataccgcaaaactgacgagcaaataa

SEQ ID NO: 39752 - protein, 293 aa, Unknown
  Obtained from environmental sample
  DOMAIN (19)...(277): Branched-chain amino acid transport system / permease component
  misc_feature (1)..(293): Xaa is any amino acid
MLKIFLNARGRDKMAIYPVLKSAFSIMIPIFFAAFGGLFPTLAGALNIALEGLLLSGAFCSLTVFYFSGSVTVAVLSAIFTATILSALHSLAVFKLKADLFISGLAINLFSSGLCVVLSEKIFGTKGVVAANSASGLLIWYVILGIILLIISHIAIYKTPFGYRLRACDKNADALVGLGIKPVFYQTAAFLISGFFCGIGGSFLSLNLGAFVPGMSAGKGWIALAVIFLGVKKPVGILVAAFVFALAECFSNYAQGFWQIPAGFILAFPYICTLIAIIVVSVIPSYTAKLTSK

SEQ ID NO: 39753 - DNA, 363 bp, Unknown
  Obtained from environmental sample
  misc_feature (1)..(363): n is a, c, g, or t
atgaaaacaatcccctcgaaactcgctttggcagcaggctttttgcttgctatggcattaactttttcctgctcgtctggcggagggggcggaaatgaccctggcggagatgcaagctcctcatcggtcggcgaagtcggcgatggtagcagtagctctggtcctcgcaaaggcggttcatctagctctgacgttaatgcggtggattcatcgtcatcgtcagttgtaatcatatctagttccagttccatcgataataattcgtcatcatcagtcggcggaggcggttcgtccagttccatcgataatagttcgtcatcgtcagtcggcggaggcggttctcgtgccgctcggccgatctga

SEQ ID NO: 39754 - protein, 120 aa, Unknown
  Obtained from environmental sample
  SIGNAL (1)...(26)
  misc_feature (1)..(120): Xaa is any amino acid
MKTIPSKLALAAGFLLAMALTFSCSSGGGGGNDPGGDASSSSVGEVGDGSSSSGPRKGGSSSSDVNAVDSSSSSVVIISSSSSIDNNSSSSVGGGGSSSSIDNSSSSSVGGGGSRAARPI

SEQ ID NO: 39755 - DNA, 516 bp, Unknown
  Obtained from environmental sample
  misc_feature (1)..(516): n is a, c, g, or t
atgacagacgtgagtgtggtaggtattccaaacgctgacaaatcctctcttgtttgcaaaatttcaagcgcaaaacgcaaagtagcagactatcctttcactacaatagaacccatattaggcattgtgcgaataaaaaaccgaagttttgtgattgcagatattccgggcttaatagaaggcgcaagcgagggcaagggtttggggcatcgttttttgaggcacatagagagaaccaaagccctgctttttgtcatagacggttttgaagaaaatgcttggaaatcttattgtatgttaaaaaaggaattggaagcatttcaccccaaactgctagagaaaaaatttatagttgcccttaataaaagcgatttggatatttcaaaagccaaaaaggaatttgcaaaacataagcaaaaagtgatagaaacctgtgctttgagcggagacggctgtcaggctctaactgctgctcttggcgatattgtttttgtgggtcaagcgaagaagtggtaa

SEQ ID NO: 39756 - protein, 171 aa, Unknown
  Obtained from environmental sample
  DOMAIN (2)...(124): GTPase of unknown function
  misc_feature (1)..(171): Xaa is any amino acid
MTDVSVVGIPNADKSSLVCKISSAKRKVADYPFTTIEPILGIVRIKNRSFVIADIPGLIEGASEGKGLGHRFLRHIERTKALLFVIDGFEENAWKSYCMLKKELEAFHPKLLEKKFIVALNKSDLDISKAKKEFAKHKQKVIETCALSGDGCQALTAALGDIVFVGQAKKW

SEQ ID NO: 39757 - DNA, 915 bp, Unknown
  Obtained from environmental sample
  misc_feature (1)..(915): n is a, c, g, or t
ttgtttttccgcgccgaccatttctatcccggccttcaccggctttatatagatggcaattttctgttccccggcctttttgttactatcgcctgcggcgcgatttccggtttccattccctggttgctacgggatcgacctccaaacagataagcagtgaaaagcatatgcttcctatttcttacggctcaatgctggtggaaaccatggtagcggtccttgcccttatcgcggttggttcgctcgcatggaacgggaaactgccggaaggcacccctccggttatcttcgcgaccgcggtttccggttttcttttccagctcggcctgccccatcaggcgtcttttaccatagtatcgctggctgtttcatcgtttgtttttacaacgctggataccgtcgcccggctgggacggctttcccttcaggaacttttttccgttgacggcgccgatggcgctattggcggtcaaaaacaaaagaagagcctatgggccctgattctccaaaacagggtggccgcttcggtttttaccctggggcccgcctaccttctggctataatgggttatcagaatatatgggctttattcggagccgccaaccagctccttgccgcccttaccttaatcgcctgtaccttgtttttcaaaaagaccggcaggcgtatttatatgattatcgttccgaccgtaatcatgctggccgtcacctatacttccctttcattaagtataataaggaagattacgcttttgttgaacggcacattcaacgcggcggttgacggcattcaaatgtgtattgcgctcctgcttttggtattgggaattcttgtagcggcctcatgcgcttacaaattgtttagcaggaatgaaaataggaaagtgttgccctgccatgaaagactttaa

SEQ ID NO: 39758 - protein, 304 aa, Unknown
  Obtained from environmental sample
  misc_feature (1)..(304): Xaa is any amino acid
MFFRADHFYPGLHRLYIDGNFLFPGLFVTIACGAISGFHSLVATGSTSKQISSEKHMLPISYGSMLVETMVAVLALIAVGSLAWNGKLPEGTPPVIFATAVSGFLFQLGLPHQASFTIVSLAVSSFVFTTLDTVARLGRLSLQELFSVDGADGAIGGQKQKKSLWALILQNRVAASVFTLGPAYLLAIMGYQNIWALFGAANQLLAALTLIACTLFFKKTGRRIYMIIVPTVIMLAVTYTSLSLSIIRKITLLLNGTFNAAVDGIQMCIALLLLVLGILVAASCAYKLFSRNENRKVLPCHERL

SEQ ID NO: 39759 - DNA, 1251 bp, Unknown
  Obtained from environmental sample
  misc_feature (1)..(1251): n is a, c, g, or t
ttgggcatttgcccgccagcaggagttatgcaggttaggttcggaggcacagtagaaactttcaacgtaaatggcgaaatccgccactactggcacgctgccgaaagcgtagaagctatgccctacgataccccaattccgggctacaaaaacaatacggtgaatacgcttcgcttgtggagtgcgcagtctaacaatttcaatttgcaaactttcaacgagggccgctatgttgatgcaaccgctaaaatggaagaatgggaatccataacaaaagttctgtatccaaacgattcttctgtgaacgggaaaaaacttcgcttaaaacagcaatattttctctgtgcggcttcgcttcaagatatcattcgccgctatgaacgcggaagcgatgttcaagaagctattgaaaaaatggcaaaagtgaacaaaatttcttcttctggcttaacgctcttaaatcttgagcacgttgaacgcagaaaactccttgctaaccttccaaagaaagttgcaatacagctaaacgatacccaccctgcaatagcaattccagaacttatgcgtttgctggttgatatttacaaactctcttggcaagacgcttggggcataaccaccgagatttttgcctatacaaaccacacccttatgccagaggctttggaaaaatggtcggttaatttatttgaggaattattgcctcgccacttgcaaatcatttacgaaatcaatgcgaaattccttgaatcggtttgggcaaaatggccgggcgaaagtgagcgcgttagccgtatgtctataatccaagaaggcgatgaaaaaatggttcgtatgggttatctctctgttataggctcgcacagcgtcaacggagtagcggctcttcacagcgaacttttaaaaacaaacctgttcaaagatttttacgagttgtggccagaacgctttaacaacaaaacaaatggtgtaactccgcgccgctgggttgcaaaggcaaatcccgcaatgactcttgccataagcaaaaaaataggagactcgtggattggcgatttgagcaagataaagaaaatagagagccatttaaacgatgctgcattccaagatcattttgttcaagccaaattggagaacaaaaagaaattgataagcaccataaaaaacgttcaaggagtggagataataaacccagattccatctttgatgttcaggtgaagcgtattcacgaatacaaaaggcagctttga

SEQ ID NO: 39760 - protein, 416 aa, Unknown
  Obtained from environmental sample
  DOMAIN (1)...(416): Carbohydrate phosphorylase
  misc_feature (1)..(416): Xaa is any amino acid
MGICPPAGVMQVRFGGTVETFNVNGEIRHYWHAAESVEAMPYDTPIPGYKNNTVNTLRLWSAQSNNFNLQTFNEGRYVDATAKMEEWESITKVLYPNDSSVNGKKLRLKQQYFLCAASLQDIIRRYERGSDVQEAIEKMAKVNKISSSGLTLLNLEHVERRKLLANLPKKVAIQLNDTHPAIAIPELMRLLVDIYKLSWQDAWGITTEIFAYTNHTLMPEALEKWSVNLFEELLPRHLQIIYEINAKFLESVWAKWPGESERVSRMSIIQEGDEKMVRMGYLSVIGSHSVNGVAALHSELLKTNLFKDFYELWPERFNNKTNGVTPRRWVAKANPAMTLAISKKIGDSWIGDLSKIKKIESHLNDAAFQDHFVQAKLENKKKLISTIKNVQGVEIINPDSIFDVQVKRIHEYKRQL

SEQ ID NO: 39761 - DNA, 804 bp, Unknown
  Obtained from environmental sample
  misc_feature (1)..(804): n is a, c, g, or t
atggccgagcttccgcagattatcgttaatgaagctgagcagacccttgacgtgatctacaccctcagggacaatctgtactggagttattataattccgacaaaaagattccggtaacaagcgacgacgtggtcttctggtataacgaaattgaaggcgatgaggagtgccaaagttccgcgtacaacgggcagttcctcactatggaagacggcagcgaggcccgcgtcactattcataaaattgacgacaagcgtttccgtttccactttccccgcattgtcgcggacccgctgttaaccaccaaccgcgatttcggcccgcgccatgtgtacgaaccggcaaaaaaagcaaacggcgttcagggggtgcgcgaccttttcagcgtggcatccgatccgaagctgatcccctcgatggggcaatggtttctggttgaatatgtccagagccaaaggcttgtatttaagcgcaattccgattactggaaaaaggacggcgccgggctttccataccttacatcgaagaagatatcgtgcagatacttcccgatcagaataccgagtaccttgtgttcaaggaaggcaggcttgaaacatacaacgcgcggcccgaagacctcaacgaactggttaataaacagaatgccccttacacggttttcaatgccgaaggaaaccttggtcccggattttggagctttaaccagaatccaaaaaactcaagcgagccttattatgactggtttaccaaaaaggaattccgccaggccatgtcctgcctgctcaccgccagcgcttga

SEQ ID NO: 39762 - protein, 267 aa, Unknown
  Obtained from environmental sample
  misc_feature (1)..(267): Xaa is any amino acid
MAELPQIIVNEAEQTLDVIYTLRDNLYWSYYNSDKKIPVTSDDVVFWYNEIEGDEECQSSAYNGQFLTMEDGSEARVTIHKIDDKRFRFHFPRIVADPLLTTNRDFGPRHVYEPAKKANGVQGVRDLFSVASDPKLIPSMGQWFLVEYVQSQRLVFKRNSDYWKKDGAGLSIPYIEEDIVQILPDQNTEYLVFKEGRLETYNARPEDLNELVNKQNAPYTVFNAEGNLGPGFWSFNQNPKNSSEPYYDWFTKKEFRQAMSCLLTASA

SEQ ID NO: 39763 - DNA, 696 bp, Unknown
  Obtained from environmental sample
  misc_feature (1)..(696): n is a, c, g, or t
ttgaacgcccaggtctacaggggccttgccgagccaaagctggattttttcccgccgccaaaccctttctacaatcccgacataaagctggaataccagtacaatccggaaagggcgcttgaactgcttgcatccgtcggttttacccgcgatagacggggggcgctgcgcgacgataaaaaccgccgtgtggaatttgatctttctttttcctccgataataccgttactgcggatgtcgcctcaattattgtggacgagctaggcaaaataggcattaaggtgaatatccgtgtaacggattttcaaaaactggtggaacagcttacttccacctatgactggcagaccattatgatagggctggggacaaaccttttcccgatccagggttccaatgtatggccttcgaccggcaaccttcacctttggcatcctttacaggagaagccattcaccgaatgggaggcgcgtatcgactacctgtacaacgagggtagttatacgattgacagagaaaaggcttttgagatctgggacgaataccagcgcctccttctggagcaatgccctgttatctaccttatgcgaatgagaggtttctgggccattcaaaaccgctgggattttaccaacgtgtactatgataatttgaacggcgctgaaacgcagcatatatttttgtcggcgaattag

SEQ ID NO: 39764 - protein, 231 aa, Unknown
  Obtained from environmental sample
  misc_feature (1)..(231): Xaa is any amino acid
MNAQVYRGLAEPKLDFFPPPNPFYNPDIKLEYQYNPERALELLASVGFTRDRRGALRDDKNRRVEFDLSFSSDNTVTADVASIIVDELGKIGIKVNIRVTDFQKLVEQLTSTYDWQTIMIGLGTNLFPIQGSNVWPSTGNLHLWHPLQEKPFTEWEARIDYLYNEGSYTIDREKAFEIWDEYQRLLLEQCPVIYLMRMRGFWAIQNRWDFTNVYYDNLNGAETQHIFLSAN

SEQ ID NO: 39765 - DNA, 1182 bp, Unknown
  Obtained from environmental sample
  misc_feature (1)..(1182): n is a, c, g, or t
gtgaagctgggaatatttggcggcagttttaatccggttcaccttggtcatctttttcttgcggataaagcgctttcagaattaaaactggacaggattgtgtttgtaccggcatacctgtctccgtttaaacttgcggctgaaggaacggaaagcaatgcggacaacagaattgccatgctttccgcctcagttgcaggaggcagccgttatgcgattgacgactgcgaaatcaagcgtgaaggggtttcctacacaatagacacccttgaggacataatcgtccgctatttgccgtccggaaaaccgtccctgattataggagacgatcttgcgcaggatttcccaaaatggcgcgacagtgaaagaattttacagttagctgacatagttataggcaggcggatttgttcctctgctgttgattatccgttttcgcatacatttattgacggtgaagtaatggatatttcttcgcaaactgtaaggcagaaaatcagcgaaggaagcaattggtcttctcttgtcccgtccgcagtaagggatattattatggacaggcggctttacggctatgacggcgctgtacagaacgaagacaacctgcattccgtaattatgcgcatagaaactgaagcgagagaaacactcagtaccgcgcgttttcttcattcaaggaatgttgcccttcttgcgcatgacctttgccgccgtttcggtctagctccatggtacggctgccttgcgggaatcgcacacgatcttgcgaatcaactggataacaaacagatgttaaaaattgtaaaaaccgccggaatggatatttccgctcttgaacttgacaaaccgaatcttttgcacggaaaagccgcggcggtattgataagagagcgtttctgcattaataatgaagatgtgcttgaggctgtggcattccatacgtcgggtatcgagaatatgggacctctggcgaaggtaatctatattgccgataaaaccgaaccctcaagaatgatagagcctgcattaaggaagatgtgcagggaggatactttggataacattcttattgccgtgattgaaaagacaattatcaaactgcgggcaaaagggcaggatttatcccaggatacagttttattgttaaacaagataaggaaaggaaaaattgagaataattaa

SEQ ID NO: 39766 - protein, 393 aa, Unknown
  Obtained from environmental sample
  DOMAIN (221)...(336): HD domain
  misc_feature (1)..(393): Xaa is any amino acid
MKLGIFGGSFNPVHLGHLFLADKALSELKLDRIVFVPAYLSPFKLAAEGTESNADNRIAMLSASVAGGSRYAIDDCEIKREGVSYTIDTLEDIIVRYLPSGKPSLIIGDDLAQDFPKWRDSERILQLADIVIGRRICSSAVDYPFSHTFIDGEVMDISSQTVRQKISEGSNWSSLVPSAVRDIIMDRRLYGYDGAVQNEDNLHSVIMRIETEARETLSTARFLHSRNVALLAHDLCRRFGLAPWYGCLAGIAHDLANQLDNKQMLKIVKTAGMDISALELDKPNLLHGKAAAVLIRERFCINNEDVLEAVAFHTSGIENMGPLAKVIYIADKTEPSRMIEPALRKMCREDTLDNILIAVIEKTIIKLRAKGQDLSQDTVLLLNKIRKGKIENN

SEQ ID NO: 39767 - DNA, 741 bp, Unknown
  Obtained from environmental sample
  misc_feature (1)..(741): n is a, c, g, or t
gtggctattacaaaagaaattaaaaggcttgaaaaatcaaatgtatccttaaatatcaccgtccccaaagaggatgtgagatctcagtataatgagatgataagggaatatacccaaaacatgcagttaccgggcttccgtaaagggaaagtcccaagggaagtgttggaacggaaatttggcgacgctcttaaagacgacgctttaggacggatactggaatcgtcgctacaggagatttttaaagatgaaaacctgccacgaagcgaaaaaccactgccctattccactcctgaacttgagggtaagccggtttttgattttgataatgaccttcagttttccgtaatttacgatgttttaccggatgtgaaaatcgggcagtggaaagggctaaatgttgagcatccttacgcggaagtcgaaaaagaagacattgataaagaactggaacaaatccgcgagcgaaacgccattgttatggatcgggatgaaaacgcttccgcgaaaaaaggcgatgttgtaaccatcgactaccaaatctatgaagaaaacggcgaagcaaagcccgatatgcagcgtaaggattttgtttttaccgtcggtttaggaaccattgtttacaaattagacgatgatgtcatagggatgaaaaaaggcgagacaaaagaatttattaaaaaatttgacaatgataatctagaaaccacgctcgccggcagttcaagaaaaatcaaataa

SEQ ID NO: 39768 - protein, 246 aa, Unknown
  Obtained from environmental sample
  DOMAIN (164)...(239): FKBP-type peptidyl-prolyl cis-trans isomerase
  misc_feature (1)..(246): Xaa is any amino acid
MAITKEIKRLEKSNVSLNITVPKEDVRSQYNEMIREYTQNMQLPGFRKGKVPREVLERKFGDALKDDALGRILESSLQEIFKDENLPRSEKPLPYSTPELEGKPVFDFDNDLQFSVIYDVLPDVKIGQWKGLNVEHPYAEVEKEDIDKELEQIRERNAIVMDRDENASAKKGDVVTIDYQIYEENGEAKPDMQRKDFVFTVGLGTIVYKLDDDVIGMKKGETKEFIKKFDNDNLETTLAGSSRKIK

SEQ ID NO: 39769 - DNA, 561 bp, Unknown
  Obtained from environmental sample
  misc_feature (1)..(561): n is a, c, g, or t
gtggatgaaaaatatcaaacccttgaagatcttaaaaacagtatcagggacaggcttaacaaagacctggaacaaaggctcagggatgtaaagataaccaaactactggaaaagataatggaaaaaaccccggtagaaatccccgagtcaatgatgcggatggaacttaacgacagatggcagaatttagcaatgcgtttaaataccgatgccaacgggctttacaaaatgatagggagcaagcaggctgaactggctattgaagagtggagacctgaagccgcaaaagccctccattcccgattgatagtggaaaccctcattgaagaactgaaaatcgatgtaaatgacgaagaagtggaaaaagaacttgaaagactggcgaaagaaagtcaggtttcagttgaggatgtaaaaaaatactatgaggaggggcaattgatggagtatgtgaaagaagatattaaaaaacgcaggttttttgacattctccttgaaaaaaacaccgttaaattcggggagaaaaaaagctatatagacctgttctcgaataacgtgtaa

SEQ ID NO: 39770 - protein, 186 aa, Unknown
  Obtained from environmental sample
  DOMAIN (2)...(161): Bacterial trigger factor protein (TF) C-terminus
  misc_feature (1)..(186): Xaa is any amino acid
MDEKYQTLEDLKNSIRDRLNKDLEQRLRDVKITKLLEKIMEKTPVEIPESMMRMELNDRWQNLAMRLNTDANGLYKMIGSKQAELAIEEWRPEAAKALHSRLIVETLIEELKIDVNDEEVEKELERLAKESQVSVEDVKKYYEEGQLMEYVKEDIKKRRFFDILLEKNTVKFGEKKSYIDLFSNNV

SEQ ID NO: 39771 - DNA, 852 bp, Unknown
  Obtained from environmental sample
  misc_feature (1)..(852): n is a, c, g, or t
gtggttattctcgctggcaggggttgcccttaccgctgcacatattgcgttttgccgcaaacgatgaacgggcacacttatcgcaaacgcgaaccaaaagacgttgttgacgaacttgaatacataaaggaaaacttcggtgatttgggcgaagtgttttttgaagacgatactttcacagcagataaagaaaatgtaaaagctatatgcacagaaattttgaacagaaaacttaaaatggtttggagttgcaatgcaagagcagatgttcccgcagatttacttttgttgatgaagcaagccggatgccgtgaaatgtgcgttggttttgaatctgcaagcgcagatgttttgaacagtgttagaaaaggtttaaagcaaagcgaggcaatgccatttatgcaaaatgcaaaaaaagctggaatttttgttcacggctgttttatggttggcaatgagggagacacaaaagaaactttagaagacactctgaaatacgcaaaaaaactttccccaaacaccgcgcaattttaccccattatggcatacccaggaaccaccgcatacaaagaagccttgcagagcggtgccttaaccagcaatgattacggtcaatggctggataaagacggctatcaccgcacaaccattagccgcccagagctttcgtctcaagacttggttgatttttgcgaccgtgcccgcagagaattttatttgcgcccaaaatatttagttaagcaaattaaactagctctttttaatagggaagaacgcaagcgtttaacaagaggctttggaactttttacaaacatttgttcagaaaacacggttcactaaattacaaataa

SEQ ID NO: 39772 - protein, 283 aa, Unknown
  Obtained from environmental sample
  DOMAIN (3)...(167): Radical SAM superfamily
  misc_feature (1)..(283): Xaa is any amino acid
MVILAGRGCPYRCTYCVLPQTMNGHTYRKREPKDVVDELEYIKENFGDLGEVFFEDDTFTADKENVKAICTEILNRKLKMVWSCNARADVPADLLLLMKQAGCREMCVGFESASADVLNSVRKGLKQSEAMPFMQNAKKAGIFVHGCFMVGNEGDTKETLEDTLKYAKKLSPNTAQFYPIMAYPGTTAYKEALQSGALTSNDYGQWLDKDGYHRTTISRPELSSQDLVDFCDRARREFYLRPKYLVKQIKLALFNREERKRLTRGFGTFYKHLFRKHGSLNYK

SEQ ID NO: 39773 - DNA, 414 bp, Unknown
  Obtained from environmental sample
  misc_feature (1)..(414): n is a, c, g, or t
atgaatataagcgatatgccgtatcctgcgttcccaagcatgggttatgcaatcagcattgcccagagcagcggcagggcgtcggtgcctgtttccccttcagcctatatttactcgcattttgagcatgtttcaggtgtacctgccccggatggcgtgaaaggcgtaaacatcgacaagctgaaaatcctcgacacccttatcggacagctttcccgcatgaaacaagggcctgaaccatctgatgcgtttgaatcccaggtggttgggacagaccagggcaacgaacagcgcataaacaccctcattgaacatttccagaaccaggtacggacaactcaggcggcgaacgcaagtaacccttacgccgcatctgctccgcttgtcggcgcgatattcagcatcagcgtttag

SEQ ID NO: 39774 - protein, 137 aa, Unknown
  Obtained from environmental sample
  misc_feature (1)..(137): Xaa is any amino acid
MNISDMPYPAFPSMGYAISIAQSSGRASVPVSPSAYIYSHFEHVSGVPAPDGVKGVNIDKLKILDTLIGQLSRMKQGPEPSDAFESQVVGTDQGNEQRINTLIEHFQNQVRTTQAANASNPYAASAPLVGAIFSISV

SEQ ID NO: 39775 - DNA, 372 bp, Unknown
  Obtained from environmental sample
  misc_feature (1)..(372): n is a, c, g, or t
gtgcctttctacaccgaggatcagcttcttgggaagaaaatcattgtcgcctacaaccttaaacccgcaaaactccgcgggatagagtctaagggaatgcttcttgccgcgggcgataaaaacggagtaggccctgccggggaggcggttgagcgggtcgaggtgctggacgccggcgattgtccggttggaacaaggctgttgccggaaggcgaagaagcgggaacgcctcccgttgagatcgacatagacacgtttttttcttatcctattatcgttaaggataacgaggtattaaacggaggaaaaaaattgtgccttaacggaaacgcggttcgcacaaaagctattccaaatggagaagtccattag

SEQ ID NO: 39776 - protein, 123 aa, Unknown
  Obtained from environmental sample
  DOMAIN (1)...(66): Putative tRNA binding domain
  misc_feature (1)..(123): Xaa is any amino acid
MPFYTEDQLLGKKIIVAYNLKPAKLRGIESKGMLLAAGDKNGVGPAGEAVERVEVLDAGDCPVGTRLLPEGEEAGTPPVEIDIDTFFSYPIIVKDNEVLNGGKKLCLNGNAVRTKAIPNGEVH

SEQ ID NO: 39777 - DNA, 342 bp, Unknown
  Obtained from environmental sample
  misc_feature (1)..(342): n is a, c, g, or t
atgaataccggtttgtacaatatgctcattgcttttttaaccgcccttaccatcgtacttggaatgcgcataatgggagccatgctgatttcaagtctgatcattttccccgcgctcagctcaatgcgcctgttcaagaaattcagaagcgttaccgtttgttccgcccttgtttcgatactgtgcttttttacagggattgttatttcttatatatacgcaacgcccacaggcgcgagcgttgtgctcgttaacataattgtatttgcgctgttttggcttattgaaactatgcgcaattcggctataataaacaagtacaggagggaaaatcatgcgtga

SEQ ID NO: 39778 - protein, 113 aa, Unknown
  Obtained from environmental sample
  SIGNAL (1)...(26)
  misc_feature (1)..(113): Xaa is any amino acid
MNTGLYNMLIAFLTALTIVLGMRIMGAMLISSLIIFPALSSMRLFKKFRSVTVCSALVSILCFFTGIVISYIYATPTGASVVLVNIIVFALFWLIETMRNSAIINKYRRENHA

SEQ ID NO: 39779 - DNA, 624 bp, Unknown
  Obtained from environmental sample
  misc_feature (1)..(624): n is a, c, g, or t
ttgcggacggcggttgcccgttgtcaggcaagcatctcgcggaatactccatggtttcgtttgcttgtctcatggggggaatgcactatgagtaaacacattgtcgtgctttccggttccccacgcaaagagggaaacaccgtacggctgacggaagcgtttcttgaaggcgcacaggcggcaggcaaggagatttctctcttcatggcggccggtctgcacatcggaggctgccggggatgcggatattgcttcaagcatcacgtctgcgtccagcaggacgacatgctgcccatacttgacgctctccgcaaggccgatgccctggttctggcgtctcctgtctactatttcggcgtgagcgcccagatcaaactcgtcattgaccgcttttacgccctgcttgaggtggggatgcccgtccggcgcgccgctttgctgatgacttgcggcgatgccacagaggcctcggccgcatcttccatttccatgttccgccagatatgcgcgtaccagaaatgggaggaggccgggatcatcatcgctccgggcctgcacagcccaggagaaattgaaggacgcgcggaactggcgcaagccagacttcttggcgaaagcatataa

SEQ ID NO: 39780 - protein, 207 aa, Unknown
  Obtained from environmental sample
  DOMAIN (32)...(204): Flavodoxin-like fold
  misc_feature (1)..(207): Xaa is any amino acid
MRTAVARCQASISRNTPWFRLLVSWGECTMSKHIVVLSGSPRKEGNTVRLTEAFLEGAQAAGKEISLFMAAGLHIGGCRGCGYCFKHHVCVQQDDMLPILDALRKADALVLASPVYYFGVSAQIKLVIDRFYALLEVGMPVRRAALLMTCGDATEASAASSISMFRQICAYQKWEEAGIIIAPGLHSPGEIEGRAELAQARLLGESI

SEQ ID NO: 39781 - DNA, 834 bp, Unknown
  Obtained from environmental sample
  misc_feature (1)..(834): n is a, c, g, or t
ttgggacagatggcgacaggcattccatggtggacttatgatgccggcggtttcttccgcccgcgcgaccagtacgaaagcgaggaatatcatgagcgttttctacgctggctgcaagcggcgacttttcttccactgatgcgcgttcacggctatatgagcaacaccgaaccatggcgctacggcgacgaagtgcagcgcatatctacgcaatatataaacatgcgctatcgcctgttaccatatatttattcgcaggtggcggcagtttcatttgacggttcaacattaatgagacctttagtaatggatttccccacagacagtgaagccctgaagcaaaaaggcgaatacatgttcggtaaatcattgctcgttgcacccgtcaccgaagcgcaggtaaagcaatggactgtttatttgcccaaaggcgcagactggtatgatttttggacaaacgaaaagatgaaaggcggacagactgttgacaggcaaacgcctcttgacttgattccgctgtacgtcaaagccggcagtataattcctttcggacccgaagtacaatatgccaccgaaaagccttgggacaatcttgaaattcgcgttttttccggtgcaaacggaacatttaccctttatgaagatgaatttgacaattataattacgagaagggcgcatataccgaaattcccgttgaatggaacgattcggcacgcaaattgaccgtcggcgcaagaaaaggcgcatacaacggaatgttgaaagatagaaaatttacagtcgttcttcaggacggaacaagaaaacgattgattacaacggtaaaaaaatag

SEQ ID NO: 39782 - protein, 277 aa, Unknown
  Obtained from environmental sample
  DOMAIN (2)...(181): Glycosyl hydrolases family 31
  misc_feature (1)..(277): Xaa is any amino acid
MGQMATGIPWWTYDAGGFFRPRDQYESEEYHERFLRWLQAATFLPLMRVHGYMSNTEPWRYGDEVQRISTQYINMRYRLLPYIYSQVAAVSFDGSTLMRPLVMDFPTDSEALKQKGEYMFGKSLLVAPVTEAQVKQWTVYLPKGADWYDFWTNEKMKGGQTVDRQTPLDLIPLYVKAGSIIPFGPEVQYATEKPWDNLEIRVFSGANGTFTLYEDEFDNYNYEKGAYTEIPVEWNDSARKLTVGARKGAYNGMLKDRKFTVVLQDGTRKRLITTVKK

SEQ ID NO: 39783 - DNA, 906 bp, Unknown
  Obtained from environmental sample
  misc_feature (1)..(906): n is a, c, g, or t
atgccgagcgttaggggcgcggatatgatctttatcaccgcgggaatgggcggcggaacagggacaggatcggctccgattgtcgctaaaatagcaaggcagttgggcgcgcttacggtagccgttgtaacaacgccttttgaatttgaaggccgttacaaaatgaggcttgccgaagaagggatcgcaaaattgcgcgacgaagttgacactttaattgttatcccgaatcaacatctttttaaagttgttgacagtaaaacaacgtataacaaagcctacatgatagctgatgaaattctgtgccggggcgtacagggaatttcagagcttattacggaaacaggatttcagaatactgattttgccgacatcgaaactgtcatgaaaggcaaaggcgacgcgcttatgggcattggctttggcaccggcgaaaacagggcgcaggacgctattaaaaacgcaattgacaacccgcttcttgaagatacaagcatagacggagcgacgggagttcttataaatatcgtaggacctgaggacataacgcttgttgaaataaataattgcattctgtcagtaaaagaaaaatgcgatccggaagtaaacattattcacggtcttcgcatagatccggaatttgacaatgctattcagataacgatcattgccacaggttttagcggaaacaggcgtatggatgccaaaaaaagcgatcccgttaaagttcagaatttggattttattgattacaatgaatttgagggaatggttgaaaagacaaaaaaagcagaatttctttcatatctgccccagcgtgaatatcatgatgatctggacgtaccctccattataagaaaacataattataatacggaaactaaaactgttgtggagaaatattag

SEQ ID NO: 39784 - protein, 301 aa, Unknown
  Obtained from environmental sample
  DOMAIN (1)...(116): Tubulin/FtsZ family, GTPase domain
  misc_feature (1)..(301): Xaa is any amino acid
MPSVRGADMIFITAGMGGGTGTGSAPIVAKIARQLGALTVAVVTTPFEFEGRYKMRLAEEGIAKLRDEVDTLIVIPNQHLFKVVDSKTTYNKAYMIADEILCRGVQGISELITETGFQNTDFADIETVMKGKGDALMGIGFGTGENRAQDAIKNAIDNPLLEDTSIDGATGVLINIVGPEDITLVEINNCILSVKEKCDPEVNIIHGLRIDPEFDNAIQITIIATGFSGNRRMDAKKSDPVKVQNLDFIDYNEFEGMVEKTKKAEFLSYLPQREYHDDLDVPSIIRKHNYNTETKTVVEKY

SEQ ID NO: 39785 - DNA, 873 bp, Unknown
  Obtained from environmental sample
  misc_feature (1)..(873): n is a, c, g, or t
ttgctggaacgctatgtccgaggagtctacggggtggaactggccgtcgtctatcgtcagcttcacgcccactatggggaatccgatgatcttgcctttagccagacacgccctgaaacccttgtcgcaggaggggatgtattctataggtatcacgccgcccttgatgttgtcgacgaactcgtaatcctgctcgtggttaggctccaagatacccgcgacccgtccatactggcccgcgccgcccgtctgcttcttgtgcgtgtagtcgaaacgcgccgccgccgtcaccgtctcgcggtaggccacctgcggcattccggtctctatcgccaccttgtactcgcggcgcatacgctctatgtacacgtcgaggtgcagttcgcccataccgcggataatcgtctcgttggactcggggtctacaaaggtcttgaacgtcgggtcttccttcgtgaaccggttcagcgccttagacatattgtcggacgactgcttgtcgaccggcttgatggccagcgatatgaccggctcgggcacgtacatcgtggtcatcgcgtagttgagcccgttctccgtgaacgtgtcgccggaggcgcactctataccgaagagcgccactatgtcgcccggccccgcgtcgtgaatgtcttccgtgaacgaggcgtgcattcggataagacgccccaccttgaaacgcttgccgctgcgcgtgttcgtcagctctatgcccttctttatcgtgccctgatacacccttatataggtcaactggccgtactgaccgtcctcgagcttgaacgcgagcgctatcatcggcgcgcttgggtcggccttgaggatgatcggggcttcgttgttgtcgaggtctaa

SEQ ID NO: 39786 - protein, 290 aa, Unknown
  Obtained from environmental sample
  misc_feature (1)..(290): Xaa is any amino acid
MLERYVRGVYGVELAVVYRQLHAHYGESDDLAFSQTRPETLVAGGDVFYRYHAALDVVDELVILLVVRLQDTRDPSILARAARLLLVRVVETRRRRHRLAVGHLRHSGLYRHLVLAAHTLYVHVEVQFAHTADNRLVGLGVYKGLERRVFLREPVQRLRHIVGRLLVDRLDGQRYDRLGHVHRGHRVVEPVLRERVAGGALYTEERHYVARPRVVNVFRERGVHSDKTPHLETLAAARVRQLYALLYRALIHPYIGQLAVLTVLELERERYHRRAWVGLEDDRGFVVVEV

SEQ ID NO: 39787 - DNA, 864 bp, Unknown
  Obtained from environmental sample
  misc_feature (1)..(864): n is a, c, g, or t
atgataggcgacataggttacctaaagctgcttaccttttcaccgatgacaattgaccgttccagggatgcgattaggagctttacttccaataattacaaaggcctcatccttgatctaagaaataactacggagggctgctcaattccgccgttgatgtgtgcaaccttttctctgaaagcggaatcgtggtatcaacaaaatcccgcatagcctcggaaaatatggtcttctatgcccgccgtggaagggcaatggtaggagcgaatattcctgtaattgtgctaataaatcggggttccgcgtcggcttcggagatagttgccggcgctcttaaagactggggccgggcttatctggttggcgagagatcttttgggaaaggttcggttcagcaggtatacccgctggacaaggtcggttttaaaataaccaccgcgcgttactacactccaagcgatgtaaacatcgacaaaatcgggatccctccggatcgccttgtcaagttccccgagttcaccgacgcggacgcggagaaacttaacacgatgataaaagacaacaagataccgtcctttgtcaaggacaatcccaaggcaacgcctgcccaggtcgagaattttgccagaacccttgaaaaagaatataaacttgatttctcgctgctcaaacgccttatacgcaacgagcaaaaccgcaccactattgccccggtgtacgatcttgagtacgatgtgcagcttcaggaagcggtgaacattctcagaagcggcgaattccgcaccctgatgcagaccactaaaacgttaagggctttgcaggaagaagcctccggggatggggatctggcgcacgcatcttaa

SEQ ID NO: 39788 - protein, 287 aa, Unknown
  Obtained from environmental sample
  DOMAIN (4)...(168): Peptidase family S41
  misc_feature (1)..(287): Xaa is any amino acid
MIGDIGYLKLLTFSPMTIDRSRDAIRSFTSNNYKGLILDLRNNYGGLLNSAVDVCNLFSESGIVVSTKSRIASENMVFYARRGRAMVGANIPVIVLINRGSASASEIVAGALKDWGRAYLVGERSFGKGSVQQVYPLDKVGFKITTARYYTPSDVNIDKIGIPPDRLVKFPEFTDADAEKLNTMIKDNKIPSFVKDNPKATPAQVENFARTLEKEYKLDFSLLKRLIRNEQNRTTIAPVYDLEYDVQLQEAVNILRSGEFRTLMQTTKTLRALQEEASGDGDLAHAS

SEQ ID NO: 39789 - DNA, 1710 bp, Unknown
  Obtained from environmental sample
  misc_feature (1)..(1710): n is a, c, g, or t
atggccgagtttcctgctgcttctcttccgccggcggctttctcgcaagtcgcttatacgcttgacgcggctttaagcaattcaatcttttacctgaatgggaagataccgcctaagtccaaagttgtcgttttgaatttcacttcggactggcctaaattgtccgattatgtgattgaggaattaatcggctatatcgtcaacgataacgctttgacggtcgttgaccgcgccaacctggatttaataagcaaggaaatgaatttccagttgtcgggcgaagtgagcgacgcgacggccatgtctgtcgggagaaagctgggggcgcaggttataatttccggcgcggtatcgacggtcggcagcacctaccgtctgcgcattaaggcgatatcggtagagaccgcgcagatactgggaatgcagaatgtggacgtggcgcaggacagcaggataggggctttgaccggaacggggtatatcgcgccttccgcaacaacgccagtcaacaccaactcttcaggcaatttaaccttatggaccttcaccgatgaattgggaaaaatggtgaaaagcaattattttaaaccgccattcagaggggtaaatgttacggtatccgaaaccccgacagatcaattcccgggaaaactggacccggttcttttttccggcaggggcgcgcccgatgtttttgctttggaagacagttttgtccgcagatacatcgagtcgggctttttactggatctaaccgatatctacgaggcaaaccggcaaaagcttatggcgtatccggtggaagtgggaacgtataacggcagggtatacggtttgtcatggcaggcatgtcccggcgctatgttctatcgccgcagtcttgcaaagaaatattttggaaccgatgatcccaagacagtacagacatattttacaaactttaacaaattccttgaaaccgcaaaattgctcaaagataaatccgacggcgcatgcgttgttgtttccgcattaggcgacttaaggaattcattcctttcagccagacaggaatcctggttagtgaacggcaaattggtagttgatccggccatggaacagtacatggaaatttgtaaaaccctgcatgacaatcgttgggaaggccgcgttggtcagtggtcagaaggctggtttggcggaatgagaggcgagcttaaagacgaaaacggaaaagcgttagaagtattctcatatttcctgcccacatggggtctccactatgtacttaaaaccaatgctcccggcacatcaggcgactgggctatgatccagggtccctcttcctatcgctggggcggcacatgggttggcgcatataaaggaacaaagaatcctatcgcggctaaagagtttatccgctacgtaaccaccgatgatactttccttgaagcttgggcgaatgatacaggcgatatggtaagcaacgtcgttgtcatcaacaaaattaaagatacctataaagagccctatctcggcggacagaatcactatgcagaatttgccgaaatggcgaaaggcgttaatggcagacttcttcagggaagcgatgaagccattgaagctatgtttgatgaagcggttaccgctttcgtaaacggagaaaaatcccaagatcangctctgaaagattttagggcgcaggcggaagctcagtttgtaaaatactga

SEQ ID NO: 39790 - protein, 569 aa, Unknown
  Obtained from environmental sample
  SIGNAL (1)...(20)
  DOMAIN (152)...(476): Bacterial extracellular solute-binding protein
  misc_feature (1)..(569): Xaa is any amino acid
MAEFPAASLPPAAFSQVAYTLDAALSNSIFYLNGKIPPKSKVVVLNFTSDWPKLSDYVIEELIGYIVNDNALTVVDRANLDLISKEMNFQLSGEVSDATAMSVGRKLGAQVIISGAVSTVGSTYRLRIKAISVETAQILGMQNVDVAQDSRIGALTGTGYIAPSATTPVNTNSSGNLTLWTFTDELGKMVKSNYFKPPFRGVNVTVSETPTDQFPGKLDPVLFSGRGAPDVFALEDSFVRRYIESGFLLDLTDIYEANRQKLMAYPVEVGTYNGRVYGLSWQACPGAMFYRRSLAKKYFGTDDPKTVQTYFTNFNKFLETAKLLKDKSDGACVVVSALGDLRNSFLSARQESWLVNGKLVVDPAMEQYMEICKTLHDNRWEGRVGQWSEGWFGGMRGELKDENGKALEVFSYFLPTWGLHYVLKTNAPGTSGDWAMIQGPSSYRWGGTWVGAYKGTKNPIAAKEFIRYVTTDDTFLEAWANDTGDMVSNVVVINKIKDTYKEPYLGGQNHYAEFAEMAKGVNGRLLQGSDEAIEAMFDEAVTAFVNGEKSQDXALKDFRAQAEAQFVKY

SEQ ID NO: 39791 - DNA, 1821 bp, Unknown
  Obtained from environmental sample
  misc_feature (1)..(1821): n is a, c, g, or t
atgatagatttgccgagccgaacagtggtggtgggtgaggacgtacacttcaagctgccggaaggggccagttacttccttgccgtcagccagttgccaacgggtctttacggttcggaatatactctggcaagggccagatcggcttgggccatacaaaacttgtcgctgcacctgccaatggaatcatttggcaagtacgactggaaagagcttgccgcaatcgttgacgatgacccccttgcctttcttgcggccctgccaaaagtggggtcaagcggcggtctagtggaaaggctccgttcggccatagccagcaactcttaccccttagcgctattgtggacccccgaagacatgaacagggtttttctggttccgccggaacattttgtgctgctcagggacgcattcccatttgaagtagccattacgcttccgggccatggccacctcaatttgaggtctattcgcgcagggaagttccatgttgcttctctgccgccagttgctggactgcgcgtttgcgaagacgcgcacttggaattgaaccgcttctccgaggccggcggcaagcgcaccaagggaacgatgagattcttgccaaaattgcacacagaaaagccatcctccgcagtgaagcgtcgaggcttcagcttcgccgggcgtgccgtctctgcaaaacatgccaaggcagagcaggagaatcttgtcgccagcagggccaacgccgtggcattggtgagggggctcggcggcgcggcagccgaaagcgcggcgcaaatcaaaaagccaatccatgggggacagcatccacagccgatccaaaaactccgaaaccgatgcatagcgctgctgactaatgggcgtggtgggatggcgcgaatacacgctgacctagggcgcatcaccagcaagtacgactgcgcccttggggcaaatctgcatcctacggctccttgcgaccgccacgtctttgtcaaaagggtcagggcgtgggttaacgccgatggattcataacagagctgaacgccgaaacgctgatcaggttctttgccggaccgcccgcgtcgtgggttttcctcggacacgccggagacggcagggccgcagaaatttacttggacgcagacattttgcctggcagcaataccttggttctgcgctttgagaggactgatgaacccccagaacacggcagcgacctgccggatgtcgccaaagtgcctctgtcagtccgtttggacgttgaggacagatcattccattgcgaaaccaaaaaatgggaaggcgcggacaggtacctagaccaaatcaccaagcacgacaaaagcgggtttatttttacccctgcatccgataggcggttggtggcattttcagacaccggggcctttaacagggagcctgaatggagcctgaacctcccacacaccgtagagggtactagaggccagacagactgcggcgatgcgtggagtccaggatggttcgatatcgaaatgtccaagggtagcgtaactcacatattggtcagcgctgaagaacgaattaccaagcaattgggccgattttcagtccatgcgaaaaaccgccctaacccccctgatcggactggccttatcataattcaagagcacttaataccaaaccttggtgggtttcgtaatcgaaaaaaacggctcaactctatcattgccggttacccttgttttttggattggggcagggacacatttattagcctgcctcggtatgaatatccttcgggtttggtacaagaaactggtcaaaatattggttacctatcccgcccctaa

SEQ ID NO: 39792 - protein, 606 aa, Unknown
  Obtained from environmental sample
  misc_feature (1)..(606): Xaa is any amino acid
MIDLPSRTVVVGEDVHFKLPEGASYFLAVSQLPTGLYGSEYTLARARSAWAIQNLSLHLPMESFGKYDWKELAAIVDDDPLAFLAALPKVGSSGGLVERLRSAIASNSYPLALLWTPEDMNRVFLVPPEHFVLLRDAFPFEVAITLPGHGHLNLRSIRAGKFHVASLPPVAGLRVCEDAHLELNRFSEAGGKRTKGTMRFLPKLHTEKPSSAVKRRGFSFAGRAVSAKHAKAEQENLVASRANAVALVRGLGGAAAESAAQIKKPIHGGQHPQPIQKLRNRCIALLTNGRGGMARIHADLGRITSKYDCALGANLHPTAPCDRHVFVKRVRAWVNADGFITELNAETLIRFFAGPPASWVFLGHAGDGRAAEIYLDADILPGSNTLVLRFERTDEPPEHGSDLPDVAKVPLSVRLDVEDRSFHCETKKWEGADRYLDQITKHDKSGFIFTPASDRRLVAFSDTGAFNREPEWSLNLPHTVEGTRGQTDCGDAWSPGWFDIEMSKGSVTHILVSAEERITKQLGRFSVHAKNRPNPPDRTGLIIIQEHLIPNLGGFRNRKKRLNSIIAGYPCFLDWGRDTFISLPRYEYPSGLVQETGQNIGYLSRP

SEQ ID NO: 39793 - DNA, 1155 bp, Unknown
  Obtained from environmental sample
  misc_feature (1)..(1155): n is a, c, g, or t
ttgccaataacgacaacagcgggcaacaaggtggtcgttggtgcagacatggaagtgagcgagatacgaaaagaaatgcggaaaatattgacaacgcaccttttaattggtgcgggcatccttgtttttggcttggtgctcacattcccctttgctcgaaagatgacgaaatctgtgaccgatattgcatcaagcattcagcacatcactagcagtttggacttcacaagtgcaattgcagtcaaggacgaagacgaaattggcaaaatagccgaaaacatcaattctttgcaaaatgcactgcgagagagcatccgcgaggcgtacgaaatgtccgcaaccagcgcggagaatgccgaaaagttcaacgcttccgctgaatccatccaaagccaagtggactccacggcgcaaaaagtcagtcagattgccgaaaagaccgtacaaataaatgagcaagcccaagtcgccgcgcagcacactgcgtcaatacagcaggacatcaatggcacaaacctgcaactgtcagacgcgcaaacggccatgaaggaattggcagatggcgtcaacctgacggccaaaaacagtcgccagcttgcaaatgacctccagtcgctgaacgtncaggtaggtgccataaggtctgttctggtgacgataacggaaatatccgaccacaccaacctgctggcgctgaacgcctccatagaggccgcgcacgcgggcaacatgggagtggggttcgctgtcgttgcgggcgaggtgggcgacttggccaacaaaacccaagagaccgtgagcgaatccgaaaatgtagttaagcagatcattgatggcgttgatggcgtgatacgcgaaatggtcaaaatcgttgaagcaaatgaaaaacttgctcaaacatcaaacaaatcactcgaggtcatccaagctataaatgggcgcctagcacatatcgcatctagcaacgccgagtgcgtgtcgagcagcgactccataaagaattccatcgccgatatttcagaaaacctcaaccttgcaaacgccgcgctggaaacaagcaattccaatgtggtcgaaatggtcaacacggcgtcttccatttgggaagatgccaatggggtcaaaatccaaatgtccaagtttcgggttaattag

SEQ ID NO: 39794 - protein, 384 aa, Unknown
  Obtained from environmental sample
  DOMAIN (33)...(103): HAMP domain
  misc_feature (1)..(384): Xaa is any amino acid
MPITTTAGNKVVVGADMEVSEIRKEMRKILTTHLLIGAGILVFGLVLTFPFARKMTKSVTDIASSIQHITSSLDFTSAIAVKDEDEIGKIAENINSLQNALRESIREAYEMSATSAENAEKFNASAESIQSQVDSTAQKVSQIAEKTVQINEQAQVAAQHTASIQQDINGTNLQLSDAQTAMKELADGVNLTAKNSRQLANDLQSLNVQVGAIRSVLVTITEISDHTNLLALNASIEAAHAGNMGVGFAVVAGEVGDLANKTQETVSESENVVKQIIDGVDGVIREMVKIVEANEKLAQTSNKSLEVIQAINGRLAHIASSNAECVSSSDSIKNSIADISENLNLANAALETSNSNVVEMVNTASSIWEDANGVKIQMSKFRVN

SEQ ID NO: 39795 - DNA, 444 bp, Unknown
  Obtained from environmental sample
  misc_feature (1)..(444): n is a, c, g, or t
ttgaccatttcgcgtatcacgccatcaacgccatcaatgatctgcttaactacattttcggattcgctcacggtctcttgggttttgttggccaagtcgcccacctcgcccgcaacgacagcgaaccccactcccatgttgcccgcgtgcgcggcctctatggaggcgttcagcgccagcaggttggtgtggtcggatatttccgttatcgtcaccagaacagaccttatggcacctacctgnacgttcagcgactggaggtcatttgcaagctggcgactgtttttggccgtcaggttgacgccatctgccaattccttcatggccgtttgcgcgtctgacagttgcaggtttgtgccattgatgtcctgctgtattgacgcagtgtgctgcgcggcgacttgggcttgctcatttatttgtacggtcttttcggcaatctga

SEQ ID NO: 39796 - protein, 147 aa, Unknown
  Obtained from environmental sample
  SIGNAL (1)...(20)
  misc_feature (1)..(147): Xaa is any amino acid
MTISRITPSTPSMICLTTFSDSLTVSWVLLAKSPTSPATTANPTPMLPACAASMEAFSASRLVWSDISVIVTRTDLMAPTXTFSDWRSFASWRLFLAVRLTPSANSFMAVCASDSCRFVPLMSCCIDAVCCAATWACSFICTVFSAI

SEQ ID NO: 39797 - DNA, 873 bp, Unknown
  Obtained from environmental sample
  misc_feature (1)..(873): n is a, c, g, or t
gtggaaataaaagatgatcagggcaatgtcgtacgcgttattgaaaacaaggaacagcgttttgaacgttttaatatgaaggaatttttcaagaggttatttacttctaaaaagcaaattgatattccgcccgcgattatctgggacggaatccgcagtacgggagaagcgcccatagacggcaaatatacgtttacaattacagcgactgacaatttgggcaataaggccgtaagtcccgtttacgaaaccgtaattaaaaacaaggttcccgtaatatcaataaacccgattcccgacgcgcaaagaatttttgatcccaagagcggtacaacgggcggcgctcagggtggaaacagaaatgttacaattactccaaaaggctcggcggaagacgcgtgggaaagcgcgatttacaatcccacaggacagaaaattaaaacatttgaaactcaaagcggggagccaaaacccgtagtatgggacggcagaaccgattcagaccaaatcgcccctgacggcgtatatattttccgcatcggcacgacggacaaggcgcaaaattccgcgagcgctgaattgacaaacatcatccttgactcaagggaagcggaggcgtttttaacaacttccgtttcggcgattgcgcccaaaaaagatcaagccgccaatatggtcaatttcaccaaccgtctttcgataaacgacggaatttacaactggaaactggaattaaaagatgaaacgggaagcgtacggcgcacgttctccggaagctctcctgttcccgcgngttcaggttggaacggtcttgatggagcagggcaatacgcgaaggtttttaccacggctgagcttacggtaaattcctaa

SEQ ID NO: 39798 - protein, 290 aa, Unknown
  Obtained from environmental sample
  misc_feature (1)..(290): Xaa is any amino acid
MEIKDDQGNVVRVIENKEQRFERFNMKEFFKRLFTSKKQIDIPPAIIWDGIRSTGEAPIDGKYTFTITATDNLGNKAVSPVYETVIKNKVPVISINPIPDAQRIFDPKSGTTGGAQGGNRNVTITPKGSAEDAWESAIYNPTGQKIKTFETQSGEPKPVVWDGRTDSDQIAPDGVYIFRIGTTDKAQNSASAELTNIILDSREAEAFLTTSVSAIAPKKDQAANMVNFTNRLSINDGIYNWKLELKDETGSVRRTFSGSSPVPAXSGWNGLDGAGQYAKVFTTAELTVNS

SEQ ID NO: 39799 - DNA, 399 bp, Unknown
  Obtained from environmental sample
  misc_feature (1)..(399): n is a, c, g, or t
gtgcgggggcagaaagtagaagacatcaaaatgggaagccgttttgagcgggtaaatattattggcgctctttgcaacaatgaccatatagccgttgaatgctataaacattcgacagacagcgctttttttgaagactggtttgaaaattattttctaaaagaaattcctaaaggctgcacagcaataatggacaatgcaaggttccactcaaaggagcggctgcgcaagctggcaagaggaaaggtgagattattgttcctgccgccatattcgccggactacaaccctatagaaaaatcatgggcaaatatgaaacgctatctccgtgataatatgcatgattatcaatttgttgattttgcaatctatgaatattttggttattcagttatttaa

SEQ ID NO: 39800 - protein, 132 aa, Unknown
  Obtained from environmental sample
  misc_feature (1)..(132): Xaa is any amino acid
MRGQKVEDIKMGSRFERVNIIGALCNNDHIAVECYKHSTDSAFFEDWFENYFLKEIPKGCTAIMDNARFHSKERLRKLARGKVRLLFLPPYSPDYNPIEKSWANMKRYLRDNMHDYQFVDFAIYEYFGYSVI

SEQ ID NO: 39801 - DNA, 366 bp, Unknown
  Obtained from environmental sample
  misc_feature (1)..(366): n is a, c, g, or t
atgtatagcatagattatatacggcgtgcggtaggctacaaagatgaagggcatactttcagggaattgaaagatacgtttaatattccgccagaaacgtattatcaatggaaagaaaagctcgaaaacggatacgatgggacgaaagtctttcgggaaaggtcgcgaaagatagacaaagagaaactaaaaaaagccgtagaggaaaaaccggatatgtacctttatgaactggcacagttgtttgattgtactccccaagcggttttcctcatgcttgaaaaactcaatataacgcgaaaaaaaagtccttcacttattatgaaaagtccgaagaaaagcgtgcagaatttattacacggctaa

SEQ ID NO: 39802 - protein, 121 aa, Unknown
  Obtained from environmental sample
  DOMAIN (1)...(120): Transposase
  misc_feature (1)..(121): Xaa is any amino acid
MYSIDYIRRAVGYKDEGHTFRELKDTFNIPPETYYQWKEKLENGYDGTKVFRERSRKIDKEKLKKAVEEKPDMYLYELAQLFDCTPQAVFLMLEKLNITRKKSPSLIMKSPKKSVQNLLHG

SEQ ID NO: 39803 - DNA, 507 bp, Unknown
  Obtained from environmental sample
  misc_feature (1)..(507): n is a, c, g, or t
gtggaggatgagagcgcctatatagacggcggcgaccttgacgcctcgctttgccgtctagccgcggcaaaggccggcggcgcgtcggcgggccgtccggacgctttggtattgggggcggacacggtagtggcggttgacgccgagattttgggaaaggccgtagacaaggccgacgcgcgacggatgttgcgcctcctttccggcaggcgacacacggtggtgacgggcgtagcgctcttgtgttccgatgcgggtttttgcgagtcggcggcggtccgtacagaggtgtttttcagggcgcttgaggacgaggagattgatcactacctctcctttcctgaatacgaggataaggccggcgcgtacgcggttcagggcggggccatgacttttatagataggatagagggttgctactacaacgtgatgggtctcccggtcacggcaacgcttggcttattcaaaaagtttgtaagaaaggaagtttcaaatggcagaaaataa

SEQ ID NO: 39804 - protein, 168 aa, Unknown
  Obtained from environmental sample
  DOMAIN (1)...(164): Maf-like protein
  misc_feature (1)..(168): Xaa is any amino acid
MEDESAYIDGGDLDASLCRLAAAKAGGASAGRPDALVLGADTVVAVDAEILGKAVDKADARRMLRLLSGRRHTVVTGVALLCSDAGFCESAAVRTEVFFRALEDEEIDHYLSFPEYEDKAGAYAVQGGAMTFIDRIEGCYYNVMGLPVTATLGLFKKFVRKEVSNGRK

SEQ ID NO: 39805 - DNA, 591 bp, Unknown
  Obtained from environmental sample
  misc_feature (1)..(591): n is a, c, g, or t
atggacagaattaacaagagcattgacgggctcatggagacttacggaaaatacggcatggtcaaccattcgggggaggcgagccttcccggcagggaaagcatagcgcatatcgtacgcggcctggacgaacttatcttcccgggctttcgggagaaccagggactggatcacagcaacttaaagcttataaccgcggaaaaggtgaaccaccttgcccgcgagctcatacgcgaggttgagaaaagcctcgcgtattcagcgcgggtcggcgctttaagctgcggacagggcggctgccacgccgcggcggagcttatcgtcgagggcttctttgatgagcttcccgccatacgccgcgccctgtccctggatatgcaggcgaatttccgcggagaccccgccgcgaagagcgaagacgaggttattctttcctatcctggttttcaggcgatcaccgtccaccggcttgcccattatttttgggaggcgcaggttcccctcataccccgcatgatgagcgaactggtgcacggcagcaccggcattgacattcatccgggggcgaaaatcggcgagtcgtttttatga

SEQ ID NO: 39806 - protein, 196 aa, Unknown
  Obtained from environmental sample
  misc_feature (1)..(196): Xaa is any amino acid
MDRINKSIDGLMETYGKYGMVNHSGEASLPGRESIAHIVRGLDELIFPGFRENQGLDHSNLKLITAEKVNHLARELIREVEKSLAYSARVGALSCGQGGCHAAAELIVEGFFDELPAIRRALSLDMQANFRGDPAAKSEDEVILSYPGFQAITVHRLAHYFWEAQVPLIPRMMSELVHGSTGIDIHPGAKIGESFL

SEQ ID NO: 39807 - DNA, 618 bp, Unknown
  Obtained from environmental sample
  misc_feature (1)..(618): n is a, c, g, or t
gtgatccagtccctggttctcccgaaagcccgggaagataagttcgtccaggccgcgtacgatatgcgctatgctttccctgccgggaaggctcgcctcccccgaatggttgaccatgccgtattttccgtaagtctccatgagcccgtcaatgctcttgttaattctgtccataggtttattcttaactcctcattgctctttccccactccctactccccactccctactccctagtaaaagcgttaattaaattctccaccgacattgacgccatgcctgccgtcgcctccgtggtatgggcggctgtgtggggggtaaacacgacgttctccaacccgaaaaggggcgagttctgcggcggctcttcctcgtacacgtcaaggccaagcccgtccagatggccggacttgatcaagtcgcaggccgcggcctcgtcaataagcccaccccgcgcggtattgataatgatcgcgcccctcttcatgtgccgcatcgcttcggcggaaataatatggcgggtatccggattcagcggcaaatgcaggctgagaaaatccgactccctcagcagggtatcaaaatccacgcagcgaatatcatttgcctgcgcgtaa

SEQ ID NO: 39808 - protein, 205 aa, Unknown
  Obtained from environmental sample
  misc_feature (1)..(205): Xaa is any amino acid
MIQSLVLPKAREDKFVQAAYDMRYAFPAGKARLPRMVDHAVFSVSLHEPVNALVNSVHRFILNSSLLFPHSLLPTPYSLVKALIKFSTDIDAMPAVASVVWAAVWGVNTTFSNPKRGEFCGGSSSYTSRPSPSRWPDLIKSQAAASSISPPRAVLIMIAPLFMCRIASAEIIWRVSGFSGKCRLRKSDSLSRVSKSTQRISFACA

SEQ ID NO: 39809 - DNA, 930 bp, Unknown
  Obtained from environmental sample
  misc_feature (1)..(930): n is a, c, g, or t
atgaaaatacttgtaacgcccgcttcgtttaaacagggagcttcatctgccgtcatggacaggctggtaaattttgccgatgaacttgtgttcaacacaaagggcaagcccctgaccgaggacgagcttgtcgttatgctcaaaggctgcgacggctgtatcgccgggcttgatccttttaacagaatggtcattgaaagctctgacgcgttgaaggttatttcccgttacggcaccggtattgacaatgtggacattgcggccgcgaaggagaggggggtaaccgtctgcaggacgcccggagtgaattcacaggcggtcgcggaactggcgattacctttatgctctgccttgcccggcaggtccccatgctggacagaaaaacgcgggaaggctattgggtcagatccgtgggcgttgaattgcatgcaaagacattgggcattctggggcttggcgccgtgagcaaaagaacggcgcgaattgccgcgggtttctcgatgaacgtgctggcctgcgatcccaatatggataaggattacgcgcaggcaaatgatattcgctgcgtggattttgataccctgctgagggagtcggattttctcagcctgcatttgccgctgaatccggatacccgccatattatttccgccgaagcgatgcggcacatgaagaggggcgcgatcattatcaataccgcgcggggtgggcttattgacgaggccgcggcctgcgacttgatcaagtccggccatctggacgggcttggccttgacgtgtacgaggaagagccgccgcagaactcgccccttttcgggttggagaacgtcgtgtttaccccccacacagccgcccataccacggaggcgacggcaggcatggcgtcaatgtcggtggagaatttaattaacgcttttactagggagtag

SEQ ID NO: 39810 - protein, 309 aa, Unknown
  Obtained from environmental sample
  DOMAIN (3)...(309): D-isomer specific 2-hydroxyacid dehydrogenase, catalytic domain
  misc_feature (1)..(309): Xaa is any amino acid
MKILVTPASFKQGASSAVMDRLVNFADELVFNTKGKPLTEDELVVMLKGCDGCIAGLDPFNRMVIESSDALKVISRYGTGIDNVDIAAAKERGVTVCRTPGVNSQAVAELAITFMLCLARQVPMLDRKTREGYWVRSVGVELHAKTLGILGLGAVSKRTARIAAGFSMNVLACDPNMDKDYAQANDIRCVDFDTLLRESDFLSLHLPLNPDTRHIISAEAMRHMKRGAIIINTARGGLIDEAAACDLIKSGHLDGLGLDVYEEEPPQNSPLFGLENVVFTPHTAAHTTEATAGMASMSVENLINAFTRE

SEQ ID NO: 39811 - DNA, 549 bp, Unknown
  Obtained from environmental sample
  misc_feature (1)..(549): n is a, c, g, or t
atgggcggctgtgtggggggtaaacacgacgttctccaacccgaaaaggggcgagttctgcggcggctcttcctcgtacacgtcaaggccaagcccgtccagatggccggacttgatcaagtcgcaggccgcggcctcgtcaataagcccaccccgcgcggtattgataatgatcgcgcccctcttcatgtgccgcatcgcttcggcggaaataatatggcgggtatccggattcagcggcaaatgcaggctgagaaaatccgactccctcagcagggtatcaaaatccacgcagcgaatatcatttgcctgcgcgtaatccttatccatattgggatcgcaggccagcacgttcatcgagaaacccgcggcaattcgcgccgttcttttgctcacggcgccaagccccagaatgcccaatgtctttgcatgcaattcaacgcccacggatctgacccaatagccttcccgcgtttttctgtccagcatggggacctgccgggcaaggcagagcataaaggtaatcgccagttccgcgaccgcctgtga

SEQ ID NO: 39812 - protein, 182 aa, Unknown
  Obtained from environmental sample
  misc_feature (1)..(182): Xaa is any amino acid
MGGCVGGKHDVLQPEKGRVLRRLFLVHVKAKPVQMAGLDQVAGRGLVNKPTPRGIDNDRAPLHVPHRFGGNNMAGIRIQRQMQAEKIRLPQQGIKIHAANIICLRVILIHIGIAGQHVHRETRGNSRRSFAHGAKPQNAQCLCMQFNAHGSDPIAFPRFSVQHGDLPGKAEHKGNRQFRDRL

SEQ ID NO: 39813 - DNA, 1434 bp, Unknown
  Obtained from environmental sample
  misc_feature (1)..(1434): n is a, c, g, or t
gtgaggtacggcgacctttggagaatatacacggttaatttcgtgaacgcgggagacctgcctgtcgttgtcggcggcaacgaacaaaaggaaggagcgattgttaccataacggctgggacggcgccagcaggcaaggtattcaaaatgtggaagagtgaaagcgatggcgtaacttttgacttttcttacggcgccacaacacgttttattatgcctgatcacgatgtgacggtatcggctgactttgtgaatgcgtttacagatagccgggacggtcaagtgtacgggatagcggaaatagcgaaccaaaagtggatggataggaatcttaactatgacccgaagaaaagtaccgggtctttgtgttatgataatagtgcggatagttgtaataaatacggcagattatatgattgggtgacggcaatgaatcttgatacaacctattataacaaatatgggggtgacgataagattacggtagaaggaatttgtcctagcggttggcatttgccgaaggatgaagagtgggcggaattgagaaacgcggtgggaggagcggggtggtataacaatggcacgggtagtaacttaaaagcgaaaagcggttggcaagcgggcgataatggttccgatgtttatgggttttcggctctacctgccggtataaccaacgattttcaaggagttttccatagcggcggcttgagtggctattggtggggtgcggatgataatcaaagtgggagcggcaataacaatgcgaagtattattatgtacaaggggggcattttagtcgaggcgatggaacgagtaaaagaaatgctatgtcggtgagatgtgtgcaaacaattaaggtacaacttaccatgcctgaatttacaccgccctccggcttagtctacaacggtaaaatgcaatcggcgaggatacctgaaaacgaacattggagcgtgatagacggagaaaagagaaacgccggcgattacaccgcgagggtagttttgaatgacccgttgaaatacgggtggaggaacggcacgaccgacgagttgacatttgattggtcgataggaaaggccgagggcttttttgtcagaatcgaggcgagagcggtctatcgcgatggtcttacactcggcggcgtagagttgcccgcgggttatgtttggtccgatccggctaccgaattggaagaaacggacgacgggaaaagtttcgcggcggtctacgacgatcctaacggcaactacaaaacggcaagcggtaatatcagcgtgaaattcgttaaggacgcgcggtggacgtacaaggtaacggtcgcgaacggcggcgcgggcgcgagcgacgtcgcagagtacgcgaaaggcgcgaaggtctccgtaacggcggggactcatccgcagaatctcacgttagaaaatggatga

SEQ ID NO: 39814 - protein, 477 aa, Unknown
  Obtained from environmental sample
  misc_feature (1)..(477): Xaa is any amino acid
MRYGDLWRIYTVNFVNAGDLPVVVGGNEQKEGAIVTITAGTAPAGKVFKMWKSESDGVTFDFSYGATTRFIMPDHDVTVSADFVNAFTDSRDGQVYGIAEIANQKWMDRNLNYDPKKSTGSLCYDNSADSCNKYGRLYDWVTAMNLDTTYYNKYGGDDKITVEGICPSGWHLPKDEEWAELRNAVGGAGWYNNGTGSNLKAKSGWQAGDNGSDVYGFSALPAGITNDFQGVFHSGGLSGYWWGADDNQSGSGNNNAKYYYVQGGHFSRGDGTSKRNAMSVRCVQTIKVQLTMPEFTPPSGLVYNGKMQSARIPENEHWSVIDGEKRNAGDYTARVVLNDPLKYGWRNGTTDELTFDWSIGKAEGFFVRIEARAVYRDGLTLGGVELPAGYVWSDPATELEETDDGKSFAAVYDDPNGNYKTASGNISVKFVKDARWTYKVTVANGGAGASDVAEYAKGAKVSVTAGTHPQNLTLENG

SEQ ID NO: 39815 - DNA, 411 bp, Unknown
  Obtained from environmental sample
  misc_feature (1)..(411): n is a, c, g, or t
atgtcagaccaatcgcctatatcgaacacgtcacctgccaatttagaatcgcccaaacagaaaaaatttcataatcttacttcaagcggcgggtttaaaatcgccatgcttgttatcattattttacttttgttgatacccgttgctatgattcgttcattgattagtgagcgcagttatcgcgctgatgaagtggaagactcaatcatggaggcatggggaagccaatttatgctgtatggccccgtgatccgtattcctgttatcgagcgtgaagagataaagacaaagacggagaaggaaggggagaaaattgaaattattacgcgcaattacacgctttggattactccaaaagatgtaaaaatcggcgctgattttccgcgcagaaaaaacgctggctcgcgataa

SEQ ID NO: 39816 - protein, 136 aa, Unknown
  Obtained from environmental sample
  misc_feature (1)..(136): Xaa is any amino acid
MSDQSPISNTSPANLESPKQKKFHNLTSSGGFKIAMLVIIILLLLIPVAMIRSLISERSYRADEVEDSIMEAWGSQFMLYGPVIRIPVIEREEIKTKTEKEGEKIEIITRNYTLWITPKDVKIGADFPRRKNAGSR

SEQ ID NO: 39817 - DNA, 564 bp, Unknown
  Obtained from environmental sample
  misc_feature (1)..(564): n is a, c, g, or t
ttggggtacgatgacgcattgaatcttgccgcgcaaaagctcgcgcagataccgccacagacggtctgccaaaactgcggcgcacgttacgaagacggagagttttttttaccctggttcaacaccgaaaaaccactttcctcggcttcagtttcacataaaataatttggttgcattatttaacagccaacggcatacaaaaacaatccggtcatttaatcgcctacagggaagccgctccggcgcttttttacgaagctaatttcaacaaacgcgccgtaaaaccccttgttaaccattttggcaaaaacccgcaaaacctcatttgtaccggcaccgcccttggcggacagacggttaaaatgggcgatgccgccgttactataaatgttcttccgtatttaccgatgacattcatcatctgggaagcaagcgaagaatttccccccgatgggaacatactttttgatcaaacggcaaaaacatggttagcgtcggaagaccttgcggtattggcgagccttgcggtttgcgagttgattgaagcggataaatcatcatga

SEQ ID NO: 39818 - protein, 187 aa, Unknown
  Obtained from environmental sample
  misc_feature (1)..(187): Xaa is any amino acid
MGYDDALNLAAQKLAQIPPQTVCQNCGARYEDGEFFLPWFNTEKPLSSASVSHKIIWLHYLTANGIQKQSGHLIAYREAAPALFYEANFNKRAVKPLVNHFGKNPQNLICTGTALGGQTVKMGDAAVTINVLPYLPMTFIIWEASEEFPPDGNILFDQTAKTWLASEDLAVLASLAVCELIEADKSS

SEQ ID NO: 39819 - DNA, 933 bp, Unknown
  Obtained from environmental sample
  misc_feature (1)..(933): n is a, c, g, or t
gtgtggctggatatcgccgtcagcgataccggcatcggcgtacgcgagaatgacctgaaaaagctgtttaatgattatgtccaggtcgataccaaattcaaccgcagcattgaaggtacgggactgggcctgcccattaccaaaaaacttgtagagcttatgcaggggcaaatcagcgcggaaagcgagtacggcaaaggcaccaccttccgcgtgcggctgggccagggttttgtcgataactcgattatcggaccggaagttgtgaacaaactccgcagtttccagtatgccgaagacaaacgtattgccaacaagaagcttttacggctcgatttaagctacgcccgcgtactggtagttgacgacgtcctgaccaatctggacgtaacggcgggcctgctgcgcaaatacagaatgcaggttgactgcctggacaacggccctgccgcgattcaacggataaggggcggaaatcctgtttacaacgccatattcatggatcacatgatgcccgatatggacggcatagagacggcggacaatatccgggccctgggcacggactacgcgaaaaatataccgataatcgcccttaccgccaacgccatccatggcacggagcagttgttttatgatcacgattttcaggcgtttgtaaccaaacccatcgacatgacggaactggatttggttatcagaaaatgggtgcgcgacgaaacccgggacgacgtgcccgttatcaacgctccggtttatcacgattattacgaacaaataacgatagaaataccgggcgtggatacgaaaaaagggcttagtctgtacgccggcgacacgggcgtttatctggccctgctgaaatcctatgtcgccaacacgcccgggacttttggacaaattgaagatcgtttcggaaagcaccttacctaa

SEQ ID NO: 39820 - protein, 310 aa, Unknown
  Obtained from environmental sample
  DOMAIN (2)...(77): Histidine kinase-, DNA gyrase B-, and HSP90-like ATPase
  misc_feature (1)..(310): Xaa is any amino acid
MWLDIAVSDTGIGVRENDLKKLFNDYVQVDTKFNRSIEGTGLGLPITKKLVELMQGQISAESEYGKGTTFRVRLGQGFVDNSIIGPEVVNKLRSFQYAEDKRIANKKLLRLDLSYARVLVVDDVLTNLDVTAGLLRKYRMQVDCLDNGPAAIQRIRGGNPVYNAIFMDHMMPDMDGIETADNIRALGTDYAKNIPIIALTANAIHGTEQLFYDHDFQAFVTKPIDMTELDLVIRKWVRDETRDDVPVINAPVYHDYYEQITIEIPGVDTKKGLSLYAGDTGVYLALLKSYVANTPGTFGQIEDRFGKHLT

SEQ ID NO: 39821 - DNA, 336 bp, Unknown
  Obtained from environmental sample
  misc_feature (1)..(336): n is a, c, g, or t
atggatgatgagcaaaaaaagattatcgcggtagacgacgttcccgagaatttaacggctatcaggaatacattgaaagacctgtacgaggtgtatccatgcccctgtgcaatgaaaatgtttgaattattggaacatgtcaagccggatttaatattgctggatgtaaagatgccggacatggacgggtatgaggcgataaagaagctgaaaagcgacgccagattcaaggaagtgcctgttattttcctgaccgccttgagcgaagaacaaaacgaaattgaaggcttaaaactcggcgccgtgattatatccacaaacctcggccgattctga

SEQ ID NO: 39822 - protein, 111 aa, Unknown
  Obtained from environmental sample
  DOMAIN (6)...(108): Response regulator receiver domain
  misc_feature (1)..(111): Xaa is any amino acid
MDDEQKKIIAVDDVPENLTAIRNTLKDLYEVYPCPCAMKMFELLEHVKPDLILLDVKMPDMDGYEAIKKLKSDARFKEVPVIFLTALSEEQNEIEGLKLGAVIISTNLGRF

SEQ ID NO: 39823 - DNA, 618 bp, Unknown
  Obtained from environmental sample
  misc_feature (1)..(618): n is a, c, g, or t
gtgttttttgttctggtctatgcgtatatcgtcgtctatattgtggatggttttatctatgcggaccctgacgtacccgctcttttgcagtttcgcgagaagctctttgtacgctccctttctgttgttgactaccggggcgaggatttggaacttaaccccggcgtcgagcgacaggattctgtcggttatctcctgcacggattgtctggcgatgacgcgcccgcacttgtggcaggtgggcgtccccacgcgggcgaagagcaggcgcatatagtcgtggatctcggtgatcgtccccacggtggagcgcgggttgtggccggaggtcttctgctctatggatatggccggcgacaatccgtcgatcctgtcgacgtcgggcttctccatgaggccgaggaactgccgggcgtacgaggagagcgattcgacgtagcggcgctggctctcggagtagagcgtgtcgaaggcgagcgacgactttccggagccggagagtccggtgatcaccgtcaggctgtttcgcgggatcacgacgtcgatgtttttgaggttgtggacgcgcgcgccctttatttctatgttgcgcattgtgtttccgtgatagagtggtag

SEQ ID NO: 39824 - protein, 205 aa, Unknown
  Obtained from environmental sample
  misc_feature (1)..(205): Xaa is any amino acid
MFFVLVYAYIVVYIVDGFIYADPDVPALLQFREKLFVRSLSVVDYRGEDLELNPGVERQDSVGYLLHGLSGDDAPALVAGGRPHAGEEQAHIVVDLGDRPHGGARVVAGGLLLYGYGRRQSVDPVDVGLLHEAEELPGVRGERFDVAALALGVERVEGERRLSGAGESGDHRQAVSRDHDVDVFEVVDARALYFYVAHCVSVIEW

SEQ ID NO: 39825 - DNA, 849 bp, Unknown
  Obtained from environmental sample
  misc_feature (1)..(849): n is a, c, g, or t
atgatcggagcccacagcatacccccctcctcctcagggctgttccaccgccacaacagccccagggctgttccgcaacagcaatatcaacagccaccccagcaggcatacccgccgcaacagcaataccaatatccaccccagcaagcatatccgccacaacaacaataccaatatccaccccaacaggcatacccgccaccaccaccccagcaagcagttctaccccaacaacctacacctacacaagaaaattgcgctcaagaaataccagggataagatttggagtgagatccggcttaaatttaagttcttgggatgtggatgtggataatgatgatggctatggctttagcctaggatggcaagtaggtgttgttgccgatataggttccaaatactttttctttcacccagggattatgttcataggaaaaggaacagattttactgatagtaaaacatcaggaactggtaattatgcaaacactgtcgacattgaagctacagccagtgcttattatatagaagcacccttattgctttcttttaaaccgattcctgaactcagaatagatgtagggcactatgtaagttatggtttatttggaacaatggaaactacatctacagttaaatcgaataccggtacgaacagttccaccaccaaacaaaaaacttttaaatttttggatgattttgactttggtctcagttttggtttaggcgttgagataaagaattatttcgttggcgtaaactatgaatttggactcgaagacatagctgaagatggtccagaaacaaaaaatcaaacatgggctttaaaattcggttataatttttaa

SEQ ID NO: 39826 - protein, 282 aa, Unknown
  Obtained from environmental sample
  misc_feature (1)..(282): Xaa is any amino acid
MIGAHSIPPSSSGLFHRHNSPRAVPQQQYQQPPQQAYPPQQQYQYPPQQAYPPQQQYQYPPQQAYPPPPPQQAVLPQQPTPTQENCAQEIPGIRFGVRSGLNLSSWDVDVDNDDGYGFSLGWQVGVVADIGSKYFFFHPGIMFIGKGTDFTDSKTSGTGNYANTVDIEATASAYYIEAPLLLSFKPIPELRIDVGHYVSYGLFGTMETTSTVKSNTGTNSSTTKQKTFKFLDDFDFGLSFGLGVEIKNYFVGVNYEFGLEDIAEDGPETKNQTWALKFGYNF

SEQ ID NO: 39827 - DNA, 600 bp, Unknown
  Obtained from environmental sample
  misc_feature (1)..(600): n is a, c, g, or t
gtgcaacacgtgagcccttccatttccataataatttgcagccgcagccaaagcgaagctttgagcgtgcggcgaaatttgctaggaacggcaaaatatcccaaaagtttggaaattattattttggataataggaaaaaaaacgagggtttgtgcgccgtgtataatcaaggcgtagcaaaagccagcggcagagttttggtgtttatgcacgaagatgtgtggatgatggaaaaggactgggacacagttcttttgaaaaaattcagagattatccagaaatgcaaattttgggtgttgcaggcacagctctgttaaaaccagagccttatgcgcactggcctgcgtcaaatattccttacacttttggaaaagtgatacatttgaacaaaaaaaacgaagagttttttctcgctatttacaacgaaagagatggagaccaagaagctgtagttgttgatggtttgtggtttaccattagaaaaacactatttgaaaaatgtcgctttgacgaacagacctttaccaaattccatttttacgatttggatataagcatgcaggctctagaatttgccaacgtttatgtaactctatga

SEQ ID NO: 39828 - protein, 199 aa, Unknown
  Obtained from environmental sample
  misc_feature (1)..(199): Xaa is any amino acid
MQHVSPSISIIICSRSQSEALSVRRNLLGTAKYPKSLEIIILDNRKKNEGLCAVYNQGVAKASGRVLVFMHEDVWMMEKDWDTVLLKKFRDYPEMQILGVAGTALLKPEPYAHWPASNIPYTFGKVIHLNKKNEEFFLAIYNERDGDQEAVVVDGLWFTIRKTLFEKCRFDEQTFTKFHFYDLDISMQALEFANVYVTL

SEQ ID NO: 39829 - DNA, 612 bp, Unknown
  Obtained from environmental sample
  misc_feature (1)..(612): n is a, c, g, or t
atggcaaaggtcaaactcacaaaaaacgctttaaaggcagagcgagatgccctcaaaaggtttcaacgctatttgcctaccttgcagttgaaaaaacagcagctccaaatggaaatcagaggtgtgcagtctagggttgaatccaaaagacgagaagaagccgctttgcttgccgatatggataattggataaagctatttgccgaaccaattgaatggggcaaatatctcaaagttgataaagttcttatgggcgagggcaatattgccggagttacaatcccagtgtttgataacgtggtttttgaacgcagcattccagatttgttcgatacacctgtttggatagacgatggtattcgcgctttggagcatttggttagcttgcgcttggagcgcagggttatagaagagcaataccgccttttgaccgaagagcttagaaccacaaaccaaagggtaaatttgtttgagaaagtgaaaataccagaagcaaaagagaacattcgcgttgttcgcatattcctgggcgaccagcagacagccggcgtttgcaggtctaaaatagcaaagaacaagagtgttgccaagaatgcagcagaagctgcttaa

SEQ ID NO: 39830 - protein, 203 aa, Unknown
  Obtained from environmental sample
  DOMAIN (2)...(195): ATP synthase subunit D
  misc_feature (1)..(203): Xaa is any amino acid
MAKVKLTKNALKAERDALKRFQRYLPTLQLKKQQLQMEIRGVQSRVESKRREEAALLADMDNWIKLFAEPIEWGKYLKVDKVLMGEGNIAGVTIPVFDNVVFERSIPDLFDTPVWIDDGIRALEHLVSLRLERRVIEEQYRLLTEELRTTNQRVNLFEKVKIPEAKENIRVVRIFLGDQQTAGVCRSKIAKNKSVAKNAAEAA

SEQ ID NO: 39831 - DNA, 972 bp, Unknown
  Obtained from environmental sample
  misc_feature (1)..(972): n is a, c, g, or t
atgggggcatttttttacccgggcagagccaacaccggaaaattgcatatcgccgatttagagtatccggcgtttattacgaaaaaacagtccatcgggatttttgccccggacattgattttttcagccgcgtcctgcccgcgcgcaaggaagacggatcaaaaattgatcacgggctcgcgcttcttgtgtgcggctcgcgcggaatgagcggcgccgccgcgctcgcttccatggccgcgcttcgcagcggatgcggaatggttcatcttgcggtgccaaaatcgcttgttaacacattagctgttaaggttacggaacctgttttacatcccttatctgaaaccgcttccggcgcctgcgcggcgtccgcgctgaatgaagtcctttcgctctgcgaacgcatggacgctctttgtgtcggttccgggttgtcgagagacacgcagaccgcgtcttttgttcgggaacttattgataaaacggataaacccgccgtgattgacgcggacggtcttaacgcgtttacgggttgtttgccggagtttgcgaaacacaagggagaggttgtcatcaccccgcacatgggagaatggaaaagactcttcggcgacttgcccgatgaaccgcttgatcgcataaacaagctcagagactgcgcgtcacaatacaatgtaaatattttactgaaaggaaacccctctttggcggtaagccctaaaggaaccactgtcattcttccttttggaaattcctctctggcgaaagcgggaacgggagatgttctgggcggcatcattgtctcccttatcgcgcagggctgctcctgtttcgaggcggcgattttgggcgcgtatctgcacggggaggctggacggcttgcgagtttagaacttaccgagtattccgtgctggcaagcgacttgatgcggtatattccggaagttattaaaagcgtgctggaaatttag

SEQ ID NO: 39832 - protein, 323 aa, Unknown
  Obtained from environmental sample
  DOMAIN (61)...(315): Carbohydrate kinase
  misc_feature (1)..(323): Xaa is any amino acid
MGAFFYPGRANTGKLHIADLEYPAFITKKQSIGIFAPDIDFFSRVLPARKEDGSKIDHGLALLVCGSRGMSGAAALASMAALRSGCGMVHLAVPKSLVNTLAVKVTEPVLHPLSETASGACAASALNEVLSLCERMDALCVGSGLSRDTQTASFVRELIDKTDKPAVIDADGLNAFTGCLPEFAKHKGEVVITPHMGEWKRLFGDLPDEPLDRINKLRDCASQYNVNILLKGNPSLAVSPKGTTVILPFGNSSLAKAGTGDVLGGIIVSLIAQGCSCFEAAILGAYLHGEAGRLASLELTEYSVLASDLMRYIPEVIKSVLEI

SEQ ID NO: 39833 - DNA, 672 bp, Unknown
  Obtained from environmental sample
  misc_feature (1)..(672): n is a, c, g, or t
gtggaagtctccaaatacgcgcaaagtttgacgcggaagccagtgaaaggcatgctgacaggccccatcacgattttgaattggtcattcccacgcgaagacatcagcggccgtgaaatggccacgcagatcgccctcgccatccgcgacgaggtgcttgaccttgaagcggcggggattcgcgtcattcagattgacgaggcggcgttgcgtgaaaagttgccgctccgcaaatccgattggcacggcgaatatctcaactgggcgatacccgctttccgcttaacgcacagcggcgtgaaaccggagacccaaatccacacccacatgtgttacagcgagtttcaggacatcatcaaggagattgacgagatggacgcggacgttatttcctttgaggcaagccgctcttcgctcgcgattctcggcgcgatagaggcaagcggcttcgagaccgccgtaggccccggcgtctacgacatccactcgccgcgcgtcccgtccgaacaggaaatcacggaggcgctgaacgttatcctcaaatccgtaaagcccgaaaaactatgggtaaacccggactgcggcttaaagacgcgcggcaacgaggagaccgtgccgagcctgaaaaacttggtcgcggcggctaaggcggttaggagcaatatcagttga

SEQ ID NO: 39834 - protein, 223 aa, Unknown
  Obtained from environmental sample
  DOMAIN (1)...(217): Cobalamin-independent synthase, Catalytic domain
  misc_feature (1)..(223): Xaa is any amino acid
MEVSKYAQSLTRKPVKGMLTGPITILNWSFPREDISGREMATQIALAIRDEVLDLEAAGIRVIQIDEAALREKLPLRKSDWHGEYLNWAIPAFRLTHSGVKPETQIHTHMCYSEFQDIIKEIDEMDADVISFEASRSSLAILGAIEASGFETAVGPGVYDIHSPRVPSEQEITEALNVILKSVKPEKLWVNPDCGLKTRGNEETVPSLKNLVAAAKAVRSNIS

SEQ ID NO: 39835 - DNA, 873 bp, Unknown
  Obtained from environmental sample
  misc_feature (1)..(873): n is a, c, g, or t
gtgcgggcgctcttaggcgggagcgggaaagcggacgcggcggcggtcggcgacaagataaacacgcttagggaggccgtggcgcggatgccggtcacagcggcgccaagcgatcaaggccgcgatacggttacgagggacggcggaacaagcggcaatcggccggagagcaacgcggcgtcagccaatactcagtctgccgccagccggctgtcggcgtcaaccaacgaaaccgccgtcaataacacagccaaagcgccggagacgttcacacgtatcaacgcgcaactcgcggttcatagggcgtcttccgtatcgtcaggcaacatcaacccaaacgcaggcggcaatagcgcaaagaccgccgacgctttcccggctgtcaatcgcgggtttgcgcctcaacagccacagcaatctcaatcgtcccaacaaactcaacaaccatctgtacagacgggaggtattaacacaaccggtatcaacgcggttgataatcaaaatgttcgcggcgatgccggtattaacaggtctataccggttgacagtattcgcggtatgaatatcagcgcaagcaatattaatacgaacaatgccaaccctacggataatcaaaatatacgcggtgatgtcggtattaataatagacaaggcgtagttgataattcgcgaggtatcaataattcgggcggaatcggtattaatactaatagcaatatccggcctatcgataattctatcggtatgaatatcaatgcaagcggcgttaatgcaaagaatatcaatacaaataatattaatgcaagcgatattaacgcaaagagtattaatgtgagcggtatgaacacgaataatgctcaatcctcccgataa

SEQ ID NO: 39836 - protein, 290 aa, Unknown
  Obtained from environmental sample
  misc_feature (1)..(290): Xaa is any amino acid
MRALLGGSGKADAAAVGDKINTLREAVARMPVTAAPSDQGRDTVTRDGGTSGNRPESNAASANTQSAASRLSASTNETAVNNTAKAPETFTRINAQLAVHRASSVSSGNINPNAGGNSAKTADAFPAVNRGFAPQQPQQSQSSQQTQQPSVQTGGINTTGINAVDNQNVRGDAGINRSIPVDSIRGMNISASNINTNNANPTDNQNIRGDVGINNRQGVVDNSRGINNSGGIGINTNSNIRPIDNSIGMNINASGVNAKNINTNNINASDINAKSINVSGMNTNNAQSSR

SEQ ID NO: 39837 - DNA, 672 bp, Unknown
  Obtained from environmental sample
  misc_feature (1)..(672): n is a, c, g, or t
ttggcgtcttccgaggattatatgcttgcgggcgaggcaatgatcgccctggcaagactgcgggatcttgcgttctgtccccatattgaaaatatcattctttatacgcaaaacccccggctgaaaattatgggcgtggaagctttgggcatatacgccctgcccgattcgcttaatacttttgttaatattataaaaaacacgaatccgccgccctttctgcttaacgaggttattctggcaatgtccgccattcttggcacgcagaatcaattttaccgcattctggcgcgttttatcgctgaaccttctctggcttcggcgcttgctctggacgaagcggaatccgccgccgcgtactacaaatcaaatattggttggcggaaaggcggtaaaagaaaaacggaattgccgcttctggacaggcaggcgggcagtattcatgaggctgtatccgcacttgaaaacaaaggcgacggcaaggttctgtcgctctggatacaggctctccccgatttcgccttttccgatgagcctgcctttaagaccgcgcagattcttttttcagaaattcttgtagatgacaatatggcttcccacaagtgtctgcgtcttctgatgacccactgggcggcgtatcaaatccgggtctggacacagaggttaaaataa

SEQ ID NO: 39838 - protein, 223 aa, Unknown
  Obtained from environmental sample
  misc_feature (1)..(223): Xaa is any amino acid
MASSEDYMLAGEAMIALARLRDLAFCPHIENIILYTQNPRLKIMGVEALGIYALPDSLNTFVNIIKNTNPPPFLLNEVILAMSAILGTQNQFYRILARFIAEPSLASALALDEAESAAAYYKSNIGWRKGGKRKTELPLLDRQAGSIHEAVSALENKGDGKVLSLWIQALPDFAFSDEPAFKTAQILFSEILVDDNMASHKCLRLLMTHWAAYQIRVWTQRLK

SEQ ID NO: 39839 - DNA, 381 bp, Unknown
  Obtained from environmental sample
  misc_feature (1)..(381): n is a, c, g, or t
gtggaaaaaatagtcgtccagatagttttgtttcagggtattccccatgcctccgccatgagaaaagcggaatcctttatcaaagaaaactttacccgaaaaatcagcctgcgtgaagtcgcgaaaatagccggtctttccgcgccctatttcagcactattttcaaagaggaaatgggcgaaaacctttccaaatatattaacaggcaaagggtggagaaggccagcagaatgcttttggaaacagacatttccctgtccgaaatatcgaacgcctgttgttttgacgatcaaagctggttttcaaaaattttcaaaagctttaccggcatcagccccagcaagtaccgcagtcagggaggaaaaattaatattgcctga

SEQ ID NO: 39840 - protein, 126 aa, Unknown
  Obtained from environmental sample
  DOMAIN (22)...(68): Bacterial regulatory helix-turn-helix proteins, AraC family
  misc_feature (1)..(126): Xaa is any amino acid
MEKIVVQIVLFQGIPHASAMRKAESFIKENFTRKISLREVAKIAGLSAPYFSTIFKEEMGENLSKYINRQRVEKASRMLLETDISLSEISNACCFDDQSWFSKIFKSFTGISPSKYRSQGGKINIA

SEQ ID NO: 39841 - DNA, 897 bp, Unknown
  Obtained from environmental sample
  misc_feature (1)..(897): n is a, c, g, or t
atgcgttatttaatattgggagatataaaaatgaacggaacaaaagtaaagcagatggctcgctctatatccggcaaattgattacgccggttccgtctgaatttaaagaagagtttaaccgaatccaactgcagcatactgtatggggacttatcatttttggctttgtagaaattgtttatgctgtagcaaaagtgctgataatacagaaatttccgctcagatttacctatatacaccatgatttttatgtatcgctttcttcctatttggccgctatgagtctgtttgtgttattggctgtttgttttttcaaaagaaggaaaaacagcgtactatggtttctgtgttatttatttgctcttttgattcattcctttgcaatattgaatatgatttctaccgattcggagaggctgtttctgtttatttttacatcaactttatttgtttccatgtttgtttttaattttaaaccaaggttgtttatgttgtccgcagttctgttttacgcgcttactgctgccatactcatcaacaatcctcatttatatgaggagttgcaacctttacacctgttcatactatatatctttctttccatgatgatagttaaaatgctgtattacgggaccgaggttaaattatttgccgaaaaagccagaattaatgaaataaacaataagctggaaactttgtcaaaaactgatgaattgacacagctcaataaccggcgttccctgttgggctatatggatttcctgtggaaacaatgcggacgtttgcagcttccggtaaacgcgctcatgatagatgttgattattttaaaaaatataacgatacattgggacacgtggaaggcgatcaggcgcttattgccgtcgctccatgctaa

SEQ ID NO: 39842 - protein, 298 aa, Unknown
  Obtained from environmental sample
  DOMAIN (230)...(298): GGDEF domain
  misc_feature (1)..(298): Xaa is any amino acid
MRYLILGDIKMNGTKVKQMARSISGKLITPVPSEFKEEFNRIQLQHTVWGLIIFGFVEIVYAVAKVLIIQKFPLRFTYIHHDFYVSLSSYLAAMSLFVLLAVCFFKRRKNSVLWFLCYLFALLIHSFAILNMISTDSERLFLFIFTSTLFVSMFVFNFKPRLFMLSAVLFYALTAAILINNPHLYEELQPLHLFILYIFLSMMIVKMLYYGTEVKLFAEKARINEINNKLETLSKTDELTQLNNRRSLLGYMDFLWKQCGRLQLPVNALMIDVDYFKKYNDTLGHVEGDQALIAVAPC

SEQ ID NO: 39843 - DNA, 942 bp, Unknown
  Obtained from environmental sample
  misc_feature (1)..(942): n is a, c, g, or t
atgggtcagaattcggcacgagatgcgagagcccgcagcagggcggcttttttttccgtgcttgccgtggcggcggtacttgccgcctgcacagcaaaaaaaccggcgcaggaggcggcttcccggcagaagccggtcctccgcgccgcctacctccccacggccaattatcttacgacattgacgaagacgcaaattctccaggaggagcttgcgcgggaaggggccgaagtagaattcatcggcccttcggctccggtggacgccataaaaatcgttacttcgggaaacgcggacataactaccacgggcacgggcttctttatcaatctggtaaatcagggcaatgagtgggttgctttcgcgctggaaaagtattcgggggattcgcagggcattgtcgccgctccgaacagcggcatagagagccttgccggtttgtacggcaagaaagtcggcatagcgcagcggggggcaacggcggattacattctttccgcggctttcagccacgccggactggatatttcccgcattgaaaaagtagaactggcgcaggcggattttgccgcggcctttgtttcagggcgcatagacgcgctggcctcttttgaccagaacttcgccaacgccctcgccgtgcccggcgcgaaaaaactgatagacggtacggagtacggttccctcaactggagcctgcatatcgcctcacgcgcttttgctgaaaagcacccggaacttttacgcgccgcctaccgcgctttacacagggaggctgcccgcgcgcagaaggagccttctctcatcatggacgcgtaccggcaattcggcgcaagcgaaacgcagatcgccatcctcaaaattttaatgtaccgcagattctttcccttggacgcgcaggcccgtggcggactttgcccgccaggccggccagtacgttga

SEQ ID NO: 39844 - protein, 313 aa, Unknown
  Obtained from environmental sample
  SIGNAL (1)...(29)
  misc_feature (1)..(313): Xaa is any amino acid
MGQNSARDARARSRAAFFSVLAVAAVLAACTAKKPAQEAASRQKPVLRAAYLPTANYLTTLTKTQILQEELAREGAEVEFIGPSAPVDAIKIVTSGNADITTTGTGFFINLVNQGNEWVAFALEKYSGDSQGIVAAPNSGIESLAGLYGKKVGIAQRGATADYILSAAFSHAGLDISRIEKVELAQADFAAAFVSGRIDALASFDQNFANALAVPGAKKLIDGTEYGSLNWSLHIASRAFAEKHPELLRAAYRALHREAARAQKEPSLIMDAYRQFGASETQIAILKILMYRRFFPLDAQARGGLCPPGRPVR

SEQ ID NO: 39845 - DNA, 336 bp, Unknown
  Obtained from environmental sample
  misc_feature (1)..(336): n is a, c, g, or t
atgaagagcaatgttctcgggactgccgtaacaataggcggggttgtgtacggcaacgtgattgccggcgaatctctcgtcgtcctttccacggcgcttgtgttaggcgatataattacacgccggatcaaagcggatgagggctgccttattcacggcaaaataaaggtttgccccgatgaggaaagctgggccagcgccgtcagcgagtaccgtgacgcccagaggataaaatcggctctgcctgttttcgcgaaaaaagcaggcaaggacgaggcttccccggcaaaaggcgggacggcaaaggataaggcctcgctcaggggtgaggtttag

SEQ ID NO: 39846 - protein, 111 aa, Unknown
  Obtained from environmental sample
  SIGNAL (1)...(22)
  misc_feature (1)..(111): Xaa is any amino acid
MKSNVLGTAVTIGGVVYGNVIAGESLVVLSTALVLGDIITRRIKADEGCLIHGKIKVCPDEESWASAVSEYRDAQRIKSALPVFAKKAGKDEASPAKGGTAKDKASLRGEV

SEQ ID NO: 39847 - DNA, 795 bp, Unknown
  Obtained from environmental sample
  misc_feature (1)..(795): n is a, c, g, or t
atgagcgattttgatgaagaagatatttcccttcttgaggacaggccgggagaaagggaggcggcttcaagcgtcagcgaggtggttaaatccccggggattgaagccatcgcgccggatacgccagtcttccggctgcgactttcctattcacatgaaacttttcttgccatttaccgggatgattctctgtaccccggctcaatggttatagtccccacacgttacggcaaggatcttgcgcaggtgatagggcccgtgcgctgcaagcacgacatttctgacattgtctggattgagcgtgtcgcggctaaggaagacatggacaaggcggagcataaccacgcgctggaacgggacgcgtttaatatctgtaaagagaaaatcatgaatcatcaacttgaaatgaagctggtgcatgtccactatttgctggaagagcccaagattctgtttttctttacagcggaaaaccgcgttgacttccgcgaactggtgaaggaccttgtcagcgtttttaagacccgtatcgagctgcgccagatcggcgtccgagacgaagccagggtggtaagcgggctgggtatttgcgggcggggttactgctgtcattccgtttccgacaagcttaaacccgtgtcaataaaaatggcaaaagatcagaatctttcgtttaactcgatgaagatatccggggcctgcggaaggctgctctgctgccctttctacgagcacggcttttattgcgagcagatccgccctatccccgcaggaagctcaaaggtaaaaccatga

SEQ ID NO: 39848 - protein, 264 aa, Unknown
  Obtained from environmental sample
  DOMAIN (95)...(182): PSP1 C-terminal conserved region
  misc_feature (1)..(264): Xaa is any amino acid
MSDFDEEDISLLEDRPGEREAASSVSEVVKSPGIEAIAPDTPVFRLRLSYSHETFLAIYRDDSLYPGSMVIVPTRYGKDLAQVIGPVRCKHDISDIVWIERVAAKEDMDKAEHNHALERDAFNICKEKIMNHQLEMKLVHVHYLLEEPKILFFFTAENRVDFRELVKDLVSVFKTRIELRQIGVRDEARVVSGLGICGRGYCCHSVSDKLKPVSIKMAKDQNLSFNSMKISGACGRLLCCPFYEHGFYCEQIRPIPAGSSKVKP

SEQ ID NO: 39849 - DNA, 306 bp, Unknown
  Obtained from environmental sample
  misc_feature (1)..(306): n is a, c, g, or t
atgacaatatccgtattttcggagcaggatattggagagaagggagagataaatatgaacaaaagaaaaattaattacacaaatgccccaaaaggtatttctagtgcaataactgaaggtaaaatagtaactgattttttaccttctcctgaagaattagttaggaaagagcctaaagtaaaaataacaataacattaaactccgggagtgttaatttttttaaaaaacatgcgcgaagaaataatgtaaaatatcaaacaatgataaatgaagtactggataaatatgtccaaagatataaataa

SEQ ID NO: 39850 - protein, 101 aa, Unknown
  Obtained from environmental sample
  misc_feature (1)..(101): Xaa is any amino acid
MTISVFSEQDIGEKGEINMNKRKINYTNAPKGISSAITEGKIVTDFLPSPEELVRKEPKVKITITLNSGSVNFFKKHARRNNVKYQTMINEVLDKYVQRYK

SEQ ID NO: 39851 - DNA, 333 bp, Unknown
  Obtained from environmental sample
  misc_feature (1)..(333): n is a, c, g, or t
gtgattgtcactcggcgttaccagttgacaatatggctaaatatacatataattatacatatgacatttgaatgggacgaaaataaaaacttggaaaatattgaaaaacataaagtttcatttgaaacagctcaggaggcattttttgataaaaaacgaataataattaaggacaaaaaacactcaaaaaaagaagaaagattttactgtataggcaatgatggaaacggtatattaacagtaagatttaccgttaaaaatgacaatatccgtattttcggagcaggatattggagagaagggagagataaatatgaacaaaagaaaaattaa

SEQ ID NO: 39852 - protein, 110 aa, Unknown
  Obtained from environmental sample
  DOMAIN (21)...(108): Protein of unknown function (DUF497)
  misc_feature (1)..(110): Xaa is any amino acid
MIVTRRYQLTIWLNIHIIIHMTFEWDENKNLENIEKHKVSFETAQEAFFDKKRIIIKDKKHSKKEERFYCIGNDGNGILTVRFTVKNDNIRIFGAGYWREGRDKYEQKKN

SEQ ID NO: 39853 - DNA, 303 bp, Unknown
  Obtained from environmental sample
  misc_feature (1)..(303): n is a, c, g, or t
atggcgcgtggaactttatcaaatatcacacaagatgaaatagaatacgctcgcttgactactctgataaaaagcgagcttgactggcgaagcgggatggcagacgctgaaaagaaaggacgcaatgaaggtcttatcgaaggtcttatcgaaggacgtaaagaaggtcgtggtgaaggacttatcgaaggacaatacaaagctaatctcgaaaacgccagaaagatgaaatcaatggggtttttgacagaacagatacaagatgttacaggtctctcaacggagattatcgctcagttgtga

SEQ ID NO: 39854 - protein, 100 aa, Unknown
  Obtained from environmental sample
  misc_feature (1)..(100): Xaa is any amino acid
MARGTLSNITQDEIEYARLTTLIKSELDWRSGMADAEKKGRNEGLIEGLIEGRKEGRGEGLIEGQYKANLENARKMKSMGFLTEQIQDVTGLSTEIIAQL

SEQ ID NO: 39855 - DNA, 375 bp, Unknown
  Obtained from environmental sample
  misc_feature (1)..(375): n is a, c, g, or t
atgacagttcacaatgaacttagtttcggattttttgaagccgtttaccaagaagcacttgaaaaagaattttgttttcaaagtatcccatataaacgagaagtttcattacctatttattataaaggcgaagtattatcaaaaaactatatagcggattttgtatgttatgaaaatataattgtagaattaaaagcagtttcatcattgtcttctgaacataaagcacaagtattaaattatctgaaagcagcaaaatttgaacttggtcttttaattaattttggtgaaagtaaattaaaatatgaacgtcttattcgtgttaattcgcgtaattcgttgataaattctaaaaaggaaagcgtcaacgaatga

SEQ ID NO: 39856 - protein, 124 aa, Unknown
  Obtained from environmental sample
  misc_feature (1)..(124): Xaa is any amino acid
MTVHNELSFGFFEAVYQEALEKEFCFQSIPYKREVSLPIYYKGEVLSKNYIADFVCYENIIVELKAVSSLSSEHKAQVLNYLKAAKFELGLLINFGESKLKYERLIRVNSRNSLINSKKESVNE

SEQ ID NO: 39857 - DNA, 1281 bp, Unknown
  Obtained from environmental sample
  misc_feature (1)..(1281): n is a, c, g, or t
atgcccgataacaacagttcagccattacccaaaaagtgtggagtatgtgcggcgttctctacgatgacggagtcagttacggcgattatctggaacagcttacttatttgattttcctgaaaatggctgatgaatattcaaaaccaccgtacaaaagaaatctcggtatacctgaaaaatttaattgggaaaaactttatccgctctcgggagcggaactggaaaaccattacaaaaagacactggaggctctggcgaaactcggcggaatcttgggcgaaatatttaccggagcgcagaacaagttgagcgaagccgccaaattaaaacgcatcgtcaacatgataggcgaagtaaattgggtgtccatgtccgccgatgtaaagggcgatatttacgaggggcttctggagaaaaacgccgaggacacaaagagcggcgctggtcagtattttacgcctcgtcctcttatcagagcgatggtcgcctgtctgaaacctgaacctgaaaaaacaatagtagaccctgcctgcggaacaggcggtttttttcttgccgcttacgattacttgaccaatcctgaaaattacaaactcgacaggaaacagcgtgagtatttgaagtataaaacatttcatggttgggaaattgttcccaacaccttccgcctctgcctgatgaatttgtttctgcacaacatcggcgatctggatggaaaagttcctgttatccgcaatgacgctctcctttccgctccaaaagaaacctttgattatgttttaaccaatccgccattcggcaaaaaaagcagtatgacttttaccaacgatgaaggcgaacaggaaaaagaagaccttgtttacaaccgtcaggatttttgggctaccacttcaaacaagcagctcaattttgttcagcacattcacagtatattaaaatcagacggcaaagccgctgtagtagttcccgacaatgtgctgtttgaaggcggcgcangagaaatcgtccgcaaaaaactgcttgaaaccaccgatttacatacaattctgcggcttcccacaggcgttttttacaaacagggagtaaaagcaaatgtgattttctttgacaaacaaagcgcaagtcccgatccttggacaaaagaggtgtgggtatacgattttcgtaccaatatacattttactttgaaacagaatcccctgcgtttcgaggacttgcaggaattcatcaagtgttacaatcccgataccgacacaaacgcaaagaacatggagcgataa

SEQ ID NO: 39858 - protein, 426 aa, Unknown
  Obtained from environmental sample
  DOMAIN (124)...(426): N-6 DNA Methylase
  misc_feature (1)..(426): Xaa is any amino acid
MPDNNSSAITQKVWSMCGVLYDDGVSYGDYLEQLTYLIFLKMADEYSKPPYKRNLGIPEKFNWEKLYPLSGAELENHYKKTLEALAKLGGILGEIFTGAQNKLSEAAKLKRIVNMIGEVNWVSMSADVKGDIYEGLLEKNAEDTKSGAGQYFTPRPLIRAMVACLKPEPEKTIVDPACGTGGFFLAAYDYLTNPENYKLDRKQREYLKYKTFHGWEIVPNTFRLCLMNLFLHNIGDLDGKVPVIRNDALLSAPKETFDYVLTNPPFGKKSSMTFTNDEGEQEKEDLVYNRQDFWATTSNKQLNFVQHIHSILKSDGKAAVVVPDNVLFEGGAXEIVRKKLLETTDLHTILRLPTGVFYKQGVKANVIFFDKQSASPDPWTKEVWVYDFRTNIHFTLKQNPLRFEDLQEFIKCYNPDTDTNAKNMER

SEQ ID NO: 39859 - DNA, 585 bp, Unknown
  Obtained from environmental sample
  misc_feature (1)..(585): n is a, c, g, or t
atgattatcgttcatcacggcataatatgggagggcattaagagcataacaggtccgctatacaagcaaattgagttcttggtcaggaacaacataaacctttacgcctcgcacctaccgcttgactgccatccaacgcttggcaataatatacaaatagcgaaagctcttggtctcacaaatatacaaccgttcggaacttacaggggtataaagatcggctttgaaggctacttgaaaacggcagcgagtgttaaatctatatcggaattggtaaaaaggaagtttggaggtcctgtgtcttccctgccattcggtccgcagaagatacggcgagttgccattgtgtcgggcggggggtcatcgtcaattcccgaagctattgagaaaaagatagacctatatataacaggagaatcctcgcacgagaatcatcacgctgcgttggaaggcaatctcaatgtgatttacggaggtcactatcatactgagaaagctggtgtgcaggcacttggcaagtttttgagcaagaaatttggagtggaaactgaatttttggacgtctccaaccgccctcaaacctaa

SEQ ID NO: 39860 - protein, 194 aa, Unknown
  Obtained from environmental sample
  DOMAIN (1)...(188): NIF3 (NGG1p interacting factor 3)
  misc_feature (1)..(194): Xaa is any amino acid
MIIVHHGIIWEGIKSITGPLYKQIEFLVRNNINLYASHLPLDCHPTLGNNIQIAKALGLTNIQPFGTYRGIKIGFEGYLKTAASVKSISELVKRKFGGPVSSLPFGPQKIRRVAIVSGGGSSSIPEAIEKKIDLYITGESSHENHHAALEGNLNVIYGGHYHTEKAGVQALGKFLSKKFGVETEFLDVSNRPQT

SEQ ID NO: 39861 - DNA, 597 bp, Unknown
  Obtained from environmental sample
  misc_feature (1)..(597): n is a, c, g, or t
atggttcaccaaggagcttttgaaagcgccttgttctacggtaaattgttctttgtcatggaagcggattcggcgtttacgcgtccatgccctgacagggtggcgcgtatcgccgaagttaccgaagctatgaagaaagctgaaattgacagcggctaccgcctggacaactttatacaactgctttccggggacgcggcgccgcaagcggcgatgccggaggcgtctaagccgcaagcgtcagcgccccaagtgccgcaattgaaaaagccggccgcggtaaaaaagccggtcgaaacaaaaaagccaactctgaaaaaggaagcgccagaggcgaagacaaccgcaacgaaaaaacccgctcctaaaaaggaagcgcccgcgacaaaaacaaccacagcgaagaaacctgcgccagcggtaaaaaagccggccgcaacgaaaaagccaactctgaaaaaagaagcgcccgaagcaaaaacaaccgctgtgaaaaaatcagcgcctaaaaaggaatcgcctgcgacaaaaataaccgcagcgaaaaaaaccgcgcccaaaaaaacaataaaaggaaaaaaaaggaatgaaacttaa

SEQ ID NO: 39862 - protein, 198 aa, Unknown
  Obtained from environmental sample
  misc_feature (1)..(198): Xaa is any amino acid
MVHQGAFESALFYGKLFFVMEADSAFTRPCPDRVARIAEVTEAMKKAEIDSGYRLDNFIQLLSGDAAPQAAMPEASKPQASAPQVPQLKKPAAVKKPVETKKPTLKKEAPEAKTTATKKPAPKKEAPATKTTTAKKPAPAVKKPAATKKPTLKKEAPEAKTTAVKKSAPKKESPATKITAAKKTAPKKTIKGKKRNET

SEQ ID NO: 39863 - DNA, 405 bp, Unknown
  Obtained from environmental sample
  misc_feature (1)..(405): n is a, c, g, or t
ttgggcgcggtttttttcgctgcggttatttttgtcgcaggcgattcctttttaggcgctgattttttcacagcggttgtttttgcttcgggcgcttcttttttcagagttggctttttcgttgcggccggcttttttaccgctggcgcaggtttcttcgctgtggttgtttttgtcgcgggcgcttcctttttaggagcgggttttttcgttgcggttgtcttcgcctctggcgcttcctttttcagagttggcttttttgtttcgaccggcttttttaccgcggccggctttttcaattgcggcacttggggcgctgacgcttgcggcttagacgcctccggcatcgccgcttgcggcgccgcgtccccggaaagcagttgtataaagttgtccaggcggtag

SEQ ID NO: 39864 - protein, 134 aa, Unknown
  Obtained from environmental sample
  misc_feature (1)..(134): Xaa is any amino acid
MGAVFFAAVIFVAGDSFLGADFFTAVVFASGASFFRVGFFVAAGFFTAGAGFFAVVVFVAGASFLGAGFFVAVVFASGASFFRVGFFVSTGFFTAAGFFNCGTWGADACGLDASGIAACGAASPESSCIKLSRR

SEQ ID NO: 39865 - DNA, 651 bp, Unknown
  Obtained from environmental sample
  misc_feature (1)..(651): n is a, c, g, or t
atgaattatagtttgtttatggaaattgatttaagattggaagaagaaaaagactataaaacagtagaaaatttaacaagagaggcattttggaataactatgtccccggttgcgatgaacatttgctcgtccataatttaagaaggacaaatgtatttataaaagaattggattttgtggcattgtataataataaaatagttggaaatattatgtatgctaaatccgcaattaaaaataatgatttagaatacactgtattaacgtttggtccgttaagcgtattgcctgaatatcaaaataagggaattggcggaaaacttataaaccatactataaaattatcaagagaaatgggatataaaagtataataatatatggagacctcgaatattataaaagatttggatttaaagaatcaaaagaatataaaataacaaacaaggacaaaaaattccctgcggcattattggttttagaattatatcccaatgcattaaatggaatagaaggcgtatttgacgaaggaaaagcctatgaaatagataaaaatgaagcggaagaatttgacaaaaattttattgcaaaggaaaaaggatattcaaaatcacaggaaaggtttaaagaactgtcaaataaatatttatag

SEQ ID NO: 39866 - protein, 216 aa, Unknown
  Obtained from environmental sample
  DOMAIN (59)...(139): Acetyltransferase (GNAT) family
  misc_feature (1)..(216): Xaa is any amino acid
MNYSLFMEIDLRLEEEKDYKTVENLTREAFWNNYVPGCDEHLLVHNLRRTNVFIKELDFVALYNNKIVGNIMYAKSAIKNNDLEYTVLTFGPLSVLPEYQNKGIGGKLINHTIKLSREMGYKSIIIYGDLEYYKRFGFKESKEYKITNKDKKFPAALLVLELYPNALNGIEGVFDEGKAYEIDKNEAEEFDKNFIAKEKGYSKSQERFKELSNKYL

SEQ ID NO: 39867 - DNA, 765 bp, Unknown
  Obtained from environmental sample
  misc_feature (1)..(765): n is a, c, g, or t
ttggcttatggcggcggccgagataccatatctgcccttatcatttacgcggcgaaaattccgcccgcggaatatttcaaaattatttcggatgaacgggttattgccgcattcaaggtttcatttttctcggccatagccgccgcactgctgaatttcgtattcggttttattattgcgtggattttggcacgacataacttttttggaaagaaaataattgatgcctgcatagatttgccttttgccattcccactgctgtagcaggtatttcgcttgctatggtattttcatccaacggttttatggggaaatttctttcattgttcaatatttcactagaatattctagagtaggcatagttattgcgcttgtctttatagggctgccgtttgtggtgcgtaccgtgcaaccagttatagaggaattggatagcggagtggaagaagccgccgcaagccttggggctaattttttccaaatttttttcaaggttatttttccctcggtgctgcccgctattattaccggagcggcaatggcttttgcccgcgggctcggtgaatacggctccgttatatttatatccagcaatatgccttatgagagcgaaatagttccgctgttaatcataaaaaaacttatgcagtttgattatgcgggtgcaagtgctattggcgcaactatgcttgtaatagcctttattatgctgttcatcacaaacattcttcaaaatcacatgataaaggagcgttcctcatga

SEQ ID NO: 39868 - protein, 254 aa, Unknown
  Obtained from environmental sample
  DOMAIN (34)...(250): Binding-protein-dependent transport system inner membrane component
  misc_feature (1)..(254): Xaa is any amino acid
MAYGGGRDTISALIIYAAKIPPAEYFKIISDERVIAAFKVSFFSAIAAALLNFVFGFIIAWILARHNFFGKKIIDACIDLPFAIPTAVAGISLAMVFSSNGFMGKFLSLFNISLEYSRVGIVIALVFIGLPFVVRTVQPVIEELDSGVEEAAASLGANFFQIFFKVIFPSVLPAIITGAAMAFARGLGEYGSVIFISSNMPYESEIVPLLIIKKLMQFDYAGASAIGATMLVIAFIMLFITNILQNHMIKERSS

SEQ ID NO: 39869 - DNA, 855 bp, Unknown
  Obtained from environmental sample
  misc_feature (1)..(855): n is a, c, g, or t
atgactaaaacaagaactattaatgaaccgctatgggtaaaggttttattgttctttatctccggcatatttttatctgtgttcatagttttgccattggtgacaatttttagggaggcattaaaagctggcattgctgtttatttgcaaactttcacagatccgggtgtagcggctgcaatacgcctttccctatttacggtattgatatgtgttccaatcaatacttttttcggagttttcatagcatggctaataacgaaatacgaattcccatgcaagaaaattttaactacgcttatagatgtgccgtttagcatttctcctgtgatagcagggcttctttttatctttatgttcggttcctttggatggtttggaacttggcttatggaccacgatataagaattgttttcgctgttccgggaatagttctcgccactctttttgtttctttcccatttgtagcccgcgaacttacgccgcttatgcgtgaactcggaaaagacgatgaggaagctgcccttaccttgggtgcttcgggattccaaattttttggaaagtaacccttccgaatataaaatggggtttattatatggaattatacttacaaacgccagagctatgggagaattcggagcagtgtctgttgtatctgggtttgtcagaggagttacgactaccatgccgctctatatagatattctttacggagaatatatgtttagagccgcttttgctctcgcatctcttttgacatttttagcacttgtaacaatcatcgtaaaagccgttttagaatattacatagcagctcaaaaaaaatctatggaggtagaaatacaatcatga

SEQ ID NO: 39870 - protein, 284 aa, Unknown
  Obtained from environmental sample
  DOMAIN (57)...(273): Binding-protein-dependent transport system inner membrane component
  misc_feature (1)..(284): Xaa is any amino acid
MTKTRTINEPLWVKVLLFFISGIFLSVFIVLPLVTIFREALKAGIAVYLQTFTDPGVAAAIRLSLFTVLICVPINTFFGVFIAWLITKYEFPCKKILTTLIDVPFSISPVIAGLLFIFMFGSFGWFGTWLMDHDIRIVFAVPGIVLATLFVSFPFVARELTPLMRELGKDDEEAALTLGASGFQIFWKVTLPNIKWGLLYGIILTNARAMGEFGAVSVVSGFVRGVTTTMPLYIDILYGEYMFRAAFALASLLTFLALVTIIVKAVLEYYIAAQKKSMEVEIQS

SEQ ID NO: 39871 - DNA, 558 bp, Unknown
  Obtained from environmental sample
  misc_feature (1)..(558): n is a, c, g, or t
atgggcatggagctggccggtattatttgcgccgtgaagcactttcccggaagcgccggcgcggacccccactattttccaggcaaactgaacggcgacaaggaagctctgggggaacttgtcttcccatttgccgcccttattcggaataatcaaacaagggcaatcatggtttcccattcggctgttccggcctgggacgccaaaaacatcgccagtctttcgcctgcggtaatgggcgaatggctaaggcaggaacttgggtttgagggccttataatcagcgacgacttttccatgggcgcggcaacaggctcaggcagaacaaagccggaagacgcggcagtccaatcccttattgccggcgcggacattatactggtatggccccccgatctgcggcgcacacacagggcgattcaagaggctctttctgacggcaggctttcccgccagcgcctggaagagtcggcggggaggataatatttaacaaaataaaaaataaaaaagaagagggaaaaaaggaagaaaaatcgggagtggggagtggaaaataa

SEQ ID NO: 39872 - protein, 185 aa, Unknown
  Obtained from environmental sample
  DOMAIN (1)...(128): Glycosyl hydrolase family 3 N terminal domain
  misc_feature (1)..(185): Xaa is any amino acid
MGMELAGIICAVKHFPGSAGADPHYFPGKLNGDKEALGELVFPFAALIRNNQTRAIMVSHSAVPAWDAKNIASLSPAVMGEWLRQELGFEGLIISDDFSMGAATGSGRTKPEDAAVQSLIAGADIILVWPPDLRRTHRAIQEALSDGRLSRQRLEESAGRIIFNKIKNKKEEGKKEEKSGVGSGK

SEQ ID NO: 39873 - DNA, 789 bp, Unknown
  Obtained from environmental sample
  misc_feature (1)..(789): n is a, c, g, or t
atggtaagtgccatcccggaagaaaaaacagaggaagcccgttggcaggaataccgcaaaacacgggatccaaaaatccgtgaggctttcatcaagcaatacgccccattggttaaatatgtggcggcaaaagtcgccataggaatgcccaataatgttgaatttgacgatcttgtcggcttcggtgtctttgggctgatagacgcaatagataaatatgacacggaaaaaaacgtaaaattcaagacttatgcggtgacgcgcatacggggggccattttcgacgagctcaggcagattgactgggtgccccgttccgtaaggcagaaaaccagggagattgagtcaacgataagctcccttgaggcccagcttggaaggacggtttccgaccaggaaatcgccggggcgctgggaatgaacgaagatgaatacctgaaaaccctgcagaaaatctccagcacctcaatcctttcccttcatgacgtttggttttccggggatgaaaaggaccgcgtttccattgtagacagcatagaagcgccttccagcatgaacccggacattatggtggaaaaggaggtcatgcgtcaggtgataatagccgcgattaacgaactgccggacaaggaaaagaaaatactgattctctattattatgaagacctgaccttaagagacattggcagggtgcttgaggttaccgaatcccgcgtctcccagctccacagcaaagccatactccacctgcgctccaaactgacaaatatccgcaaaggcatagtttaa

SEQ ID NO: 39874 - protein, 262 aa, Unknown
  Obtained from environmental sample
  DOMAIN (104)...(186): Sigma-70 region 3
  misc_feature (1)..(262): Xaa is any amino acid
MVSAIPEEKTEEARWQEYRKTRDPKIREAFIKQYAPLVKYVAAKVAIGMPNNVEFDDLVGFGVFGLIDAIDKYDTEKNVKFKTYAVTRIRGAIFDELRQIDWVPRSVRQKTREIESTISSLEAQLGRTVSDQEIAGALGMNEDEYLKTLQKISSTSILSLHDVWFSGDEKDRVSIVDSIEAPSSMNPDIMVEKEVMRQVIIAAINELPDKEKKILILYYYEDLTLRDIGRVLEVTESRVSQLHSKAILHLRSKLTNIRKGIV

SEQ ID NO: 39875 - DNA, 936 bp, Unknown
  Obtained from environmental sample
  misc_feature (1)..(936): n is a, c, g, or t
atgatgaacgcagctattgtggatgttatgaacagtacggggcatacactcccagaggcacatcacgatgatagacttatggctgctcttgcagaagatgtatatacacacacagggtttgagaattttggaattccgttttgcatgactgttgaagcagaagtgctgggcagtgagataaattttggcacacttaattgcgaaccaaaaattcaaacggaacgctttgcagatgcttcgcaggttgaatacaaagacattagccaaatgctcaaacaagggagaatttcgggtgtggtgcaggcagggtggcacttatcccacaaaaacgcggatgttccggttataggaaatttaacaggcccaataagcacagctgcatcggttatagaccctatgaactttttaaaggggcttagaaaagatagagaaggttcgcacaaggtgcttgattatgttgtggattttctaatagcttatgctcagttgatgattgagggcggtgcaaccgttatttcagtaggcgacccaactgccaccggagaaatactcggaccaaagatgttcaaagaatacgctgttacttatttaaacaagttggttgagggaattggcaaaactggaactccggttattgtgcatatatgcggcgatttaggcagtgttaaacaatacattccagaaattcgctctcaagcaatttccacagatgcaaaagtgaacttgcgtgaattgaaggaagaatatccaagtcttgtgacgatggggaatttaagcacctatatgcttgaattcggaaaaccagagcaagtatctgtacaagcaaagcgactggtggagcaaaaaatagatatcatcgctccagcttgcggactcagcacttcttcttctttggataatataaaggcatttacgcaatcggtgaaggagggatag

SEQ ID NO: 39876 - protein, 311 aa, Unknown
  Obtained from environmental sample
  DOMAIN (1)...(311): Uroporphyrinogen decarboxylase (URO-D)
  misc_feature (1)..(311): Xaa is any amino acid
MMNAAIVDVMNSTGHTLPEAHHDDRLMAALAEDVYTHTGFENFGIPFCMTVEAEVLGSEINFGTLNCEPKIQTERFADASQVEYKDISQMLKQGRISGVVQAGWHLSHKNADVPVIGNLTGPISTAASVIDPMNFLKGLRKDREGSHKVLDYVVDFLIAYAQLMIEGGATVISVGDPTATGEILGPKMFKEYAVTYLNKLVEGIGKTGTPVIVHICGDLGSVKQYIPEIRSQAISTDAKVNLRELKEEYPSLVTMGNLSTYMLEFGKPEQVSVQAKRLVEQKIDIIAPACGLSTSSSLDNIKAFTQSVKEG

SEQ ID NO: 39877 - DNA, 603 bp, Unknown
  Obtained from environmental sample
  misc_feature (1)..(603): n is a, c, g, or t
ttgccttgcattaactttattggagttggtgagatagatgtcagtgaagaaaccactgttcttgaagcggctcggcaactcggcattgttatagaatcgccttgcaacggagcgggagtttgcggaaaatgcaaggtgcggctctcaggagattcgcagagcaaagaggaaacttatgtgttggcttgcgaaacacacgtgcttgaggacatgagcgtttttccaccggaaaaagagaaaaaccacacattgaaaattttatcaggcgggaaaagttttgatattgaattaaacccaaatgtgggaaagcggtatatagctgagaaaggtatgacagaggttagggcaggggaggaaattctttgtacggaaccccggaaatacggcagagaaaattttaggattatctttggatataggaacaaccacattggttttatcccttatagatttaaacgatgggcgggaaatagattcggtttctgctatgaacccacaggctgtatatgcacaggacctacttttctccgcattaagtttgcaagcattgaaaagggttttggaaacctatgcggaatgctcttcattactgaagtccaataa

SEQ ID NO: 39878 - protein, 200 aa, Unknown
  Obtained from environmental sample
  DOMAIN (5)...(69): 2Fe-2S iron-sulfur cluster binding domain
  misc_feature (1)..(200): Xaa is any amino acid
MPCINFIGVGEIDVSEETTVLEAARQLGIVIESPCNGAGVCGKCKVRLSGDSQSKEETYVLACETHVLEDMSVFPPEKEKNHTLKILSGGKSFDIELNPNVGKRYIAEKGMTEVRAGEEILCTEPRKYGRENFRIIFGYRNNHIGFIPYRFKRWAGNRFGFCYEPTGCICTGPTFLRIKFASIEKGFGNLCGMLFITEVQ

SEQ ID NO: 39879 - DNA, 579 bp, Unknown
  Obtained from environmental sample
  misc_feature (1)..(579): n is a, c, g, or t
atgaagtacgatgtaattttagccggagtcggcggacagggcgtcctttcagtctcctccattatcgcgcttgcggcggtgagcgaagggcttgatgtccgccagtccgaggttcacggcatggctcaaagaggcggcgcggtattgtcccatctgcgcatttcaaacgcgaaaatagcgggtgatcttgttccaagaggcgccgccgaccttatcatttccatggaaccgcttgaaagcctgaggtatctgtcatggcttaaagaaggcggcgttcttgtaacttcaaccgaaccttttaataatatacccgattatcctgacatcgaagaattaatttcttcgataaagcgcctgccgcgcagtttcatggtagatgccggaaagctcgcgaaagaagcggggcttgcgaaggcggcaaacacggtcatggtcggtctttcttcatgcttccttccgataaaaccgcaaagccttgaaaaaacaattgcgggagtgttctctaaaaaaggaacgcaaagcgttgaatctaacgcgaaagcttttaaacttgggcaagcggctgcaaacggaaagtaa

SEQ ID NO: 39880 - protein, 192 aa, Unknown
  Obtained from environmental sample
  SIGNAL (1)...(25)
  DOMAIN (11)...(187): Pyruvate ferredoxin/flavodoxin oxidoreductase
  misc_feature (1)..(192): Xaa is any amino acid
MKYDVILAGVGGQGVLSVSSIIALAAVSEGLDVRQSEVHGMAQRGGAVLSHLRISNAKIAGDLVPRGAADLIISMEPLESLRYLSWLKEGGVLVTSTEPFNNIPDYPDIEELISSIKRLPRSFMVDAGKLAKEAGLAKAANTVMVGLSSCFLPIKPQSLEKTIAGVFSKKGTQSVESNAKAFKLGQAAANGK

SEQ ID NO: 39881 - DNA, 1062 bp, Unknown
  Obtained from environmental sample
  misc_feature (1)..(1062): n is a, c, g, or t
atgcgcaaggcggaaaccgtaaaccctgtttttctgttagacgagatcgataaactttccagtgattcnaggggcgatcccgcgtccgcccttctgaagtttctgnacccggagcaaaattcaacctttgtagaccattatcttgaggttcaatacgatctatccaaggttatgtttataactaccgcaaactccctgcacacgatcccgtatcccctgctcgaccgcatggaaataatcgaagttcccggttacggcgagaacgaaaaacttacgatagcgaaacaattcttggttccaaaagagttaaaagaaaacggactttcttccgcgaaaataaaattcagggatgacgcgctgaaaagcattatacgccattggacaatggaatcgggagtgcgtaaccttgaacgagagacggcgcggtgcatcaggcgcattgcgaggggagccgtaaacatgggatacggcaaggaaaggcccgtatcttcgttcaagaaaacggtaacgcccgccgtaatagaaaaactgctcggcagaaaaaaatacaaacgcgacgttgttttcagcgaggcgcgtatcggcgtaacatacgggcttgcgtggacggaaacaggcggaacgattttacccgtagagacaatccgttacaacggaaacggggaactattaatcacgggaaacctcggcgacgtaatgaaggagagcgcccgcattgccctgtcttacctgcacagtacctgcgacaaatacaatttttccgtaaaagacttgagcaaatcaaactttcacatccatgtccccgagggcgctatcccgaaagacggaccttccgcgggtatcacgctcgcctcatctttgctttctaccctttgcaaaactccgccgcgcccttgcatcgcgatgacgggagagcttacccttacgggcagagtgctggctatcggcgggttaaaagaaaaaatgcttgccgcgatcaggaacaatatggagacggtcctttacccaaaaacaacgaggccgactggaacgaactggataaagacattcgcgactcaataa

SEQ ID NO: 39882 - protein, 353 aa, Unknown
  Obtained from environmental sample
  DOMAIN (1)...(133): ATPase family associated with various cellular activities (AAA)
  misc_feature (1)..(353): Xaa is any amino acid
MRKAETVNPVFLLDEIDKLSSDSRGDPASALLKFLXPEQNSTFVDHYLEVQYDLSKVMFITTANSLHTIPYPLLDRMEIIEVPGYGENEKLTIAKQFLVPKELKENGLSSAKIKFRDDALKSIIRHWTMESGVRNLERETARCIRRIARGAVNMGYGKERPVSSFKKTVTPAVIEKLLGRKKYKRDVVFSEARIGVTYGLAWTETGGTILPVETIRYNGNGELLITGNLGDVMKESARIALSYLHSTCDKYNFSVKDLSKSNFHIHVPEGAIPKDGPSAGITLASSLLSTLCKTPPRPCIAMTGELTLTGRVLAIGGLKEKMLAAIRNNMETVLYPKTTRPTGTNWIKTFATQ

SEQ ID NO: 39883 - DNA, 381 bp, Unknown
  Obtained from environmental sample
  misc_feature (1)..(381): n is a, c, g, or t
atgaaagctcctgccttttttgcacagattcctttgggaaggagtggacgctccgggggataccctgcgccttgtgatactatgccgcctgcctttcagaagtccaagcgacccggttttgaagcccgcagtgaggccctggaaagccggggcggaaacgcgtttatggatctttcccttccggaagccgtgatgaaattcaagcagggtttcgggcgacttatgcggcgttcaagcgatcacggggttgtcgtggttctggacggcaggctcctccgcaaaaactacggcaaggcctttcttaacgccctgcccgaaactaaaacctgctttgaaaaatttgactcaatccttcacgcggtagaagattttttgttttaa

SEQ ID NO: 39884 - protein, 126 aa, Unknown
  Obtained from environmental sample
  misc_feature (1)..(126): Xaa is any amino acid
MKAPAFFAQIPLGRSGRSGGYPAPCDTMPPAFQKSKRPGFEARSEALESRGGNAFMDLSLPEAVMKFKQGFGRLMRRSSDHGVVVVLDGRLLRKNYGKAFLNALPETKTCFEKFDSILHAVEDFLF

SEQ ID NO: 39885 - DNA, 885 bp, Unknown
  Obtained from environmental sample
  misc_feature (1)..(885): n is a, c, g, or t
gtgcttgagctttgcggcagcgaaggggtttttcgcctgacgcctcaaaaggatgaagttataaaggccaggctgtcccctgaattttcttcccttagaaaaagcattaattcatttgcaagctttgtcagggaattgcttgaaaaaataccaaaggaagacgaagacgaccctgtggtctgggaaattcgctcgacgcttcgcagactggattcggtctctacggtctgcacttcttttttggaatacagggaaaacaccgatgatgtgatgtggatagaacggcggggcgcggaagcgggatcgctcagtaacgcgggaaaacgtgcgtctgacggtccgtgggcggtgttcaacgtcacgccgctggacgttgctccgcatttgaaggaagccctttttgagccaaacaaaaccgtgatctgcgtttccgctactttaactacaggaagatcgggagaaaattcatttgattactggaaatcccgatccggcctcagccttgtggcggaaagggaaatcctgtgcggggtttttaattctgattttccgtatgagactaacgtgcttctggcttctccctttgacgctcccctgcccacggaaacgacctacgaggcttttgtaaatgccgcgacggcttcgctggcggaagtttcaggaggttccgcgctgattctttttacctcttactatgcattaagaagcgcatacgagactgcaaagccggtgctggaaaatcagggcatacgggtgctaaagcagggcgatgacgacagaaaccgcctgcttgcttcttttttaaaagatgaaagctcctgccttttttgcacagattcctttgggaaggagtggacgctccgggggataccctgcgccttgtga

SEQ ID NO: 39886 - protein, 294 aa, Unknown
  Obtained from environmental sample
  misc_feature (1)..(294): Xaa is any amino acid
MLELCGSEGVFRLTPQKDEVIKARLSPEFSSLRKSINSFASFVRELLEKIPKEDEDDPVVWEIRSTLRRLDSVSTVCTSFLEYRENTDDVMWIERRGAEAGSLSNAGKRASDGPWAVFNVTPLDVAPHLKEALFEPNKTVICVSATLTTGRSGENSFDYWKSRSGLSLVAEREILCGVFNSDFPYETNVLLASPFDAPLPTETTYEAFVNAATASLAEVSGGSALILFTSYYALRSAYETAKPVLENQGIRVLKQGDDDRNRLLASFLKDESSCLFCTDSFGKEWTLRGIPCAL

SEQ ID NO: 39887 - DNA, 402 bp, Unknown
  Obtained from environmental sample
  misc_feature (1)..(402): n is a, c, g, or t
ttgctaccatcagaatattttattgtatcagaaaatccacacatagaaaattcagctagtgtgatgtggaatgttttttcgaaattatcattttttcctcttctttggaatattgttccttttcatcctcatgaaagaaacaatattaatagtaacagaacaccggaaccacaagaaataaaagcatactgttattttgttgaagatttattgaaactatttccatccgtaaatcgagaaaatggtatttatgctgtaggtaggaaagctcaaaaagggcttgcaaatatagggttattaacaatgtatgatgaaagcaaatacatacgtcatccttctcatggtggaactgaaaaatgtagaaaaaaaataatcgaaatagcagatctatcgaaaaagtaa

SEQ ID NO: 39888 - protein, 133 aa, Unknown
  Obtained from environmental sample
  misc_feature (1)..(133): Xaa is any amino acid
MLPSEYFIVSENPHIENSASVMWNVFSKLSFFPLLWNIVPFHPHERNNINSNRTPEPQEIKAYCYFVEDLLKLFPSVNRENGIYAVGRKAQKGLANIGLLTMYDESKYIRHPSHGGTEKCRKKIIEIADLSKK

SEQ ID NO: 39889 - DNA, 456 bp, Unknown
  Obtained from environmental sample
  misc_feature (1)..(456): n is a, c, g, or t
ttgatgagatggactcaggcggactgcttcctgtttgatttcatttccaattcaccggatgacactttctctcttggacagcgtatagcctcttttctttcagaaggttccgttgtcgcccttcagggagagcttggaagcggtaaaacatatcttgttaaaggcatcgcaaagggtttgggcgtaacagaaaccataacaagccctacttacacaattataagcgaatacaattcctctcccgctctttaccatattgacgcataccgcctgtcaggcgacgaggattttgaaaacgcgggcggccgcgaaacaattaactccggcggaatctctttaattgaatggagcgagcgcattccaaattcaattccaaaaaacgtaattacggttattcttaaaataacaggcccttgttccagattaattcaaataaaaggattggaaaaattatga

SEQ ID NO: 39890 - protein, 151 aa, Unknown
  Obtained from environmental sample
  DOMAIN (22)...(143): Uncharacterised P-loop hydrolase UPF0079
  misc_feature (1)..(151): Xaa is any amino acid
MMRWTQADCFLFDFISNSPDDTFSLGQRIASFLSEGSVVALQGELGSGKTYLVKGIAKGLGVTETITSPTYTIISEYNSSPALYHIDAYRLSGDEDFENAGGRETINSGGISLIEWSERIPNSIPKNVITVILKITGPCSRLIQIKGLEKL

SEQ ID NO: 39891 - DNA, 888 bp, Unknown
  Obtained from environmental sample
  misc_feature (1)..(888): n is a, c, g, or t
ttggaagagcttgccgaaaaaccgtggaagatttatcagtctaccgatttcagcgaagacaccaccgtttgggaccgtatcagccagggcgatgttatgctgcatatgccgtaccagtcttttgatcctgtcgtgcgattttttcaggaagcggctaacgatccgcaggtaatatcaataaagaccgcgctgtacagaacaggaggcgcgattccgggaagctcaatgcaggcaagctcttccgctttttctcccgtggtaagggcgctggagcaggcggctttgaacggaaagcacgtaacggcgcttgttgagcttaaagcccgctttgacgaggagcgcaatatttcatgggcgaacaggcttgaaaaagccggcgttattgtcgtgtacgggctttctcgcttaaaggtacattccaagatttcaatggttatgcgccgcgaaaacgaccgtgttaaacgctatgtgcatctttccaccggcaactacaacgacaggacggcgaagtattatgaggatatatgcatttttacctgcaaagaagaaatcgcctacgacgctggaattctttttaatatgctgacaggctactctaccgtcagtcagatgatgaggctcacctctgccccttccggcctaaaacggcgttttttggaacttatcgaaagggaggcaaacaggtcgcggcataaatacccgtccaaaattaccgcaaaaatgaactcccttaccgacattgacataataaaggcgctttacgcggcttcctgcgccgggagtaaaaatatccctgtggcgttcgcggcatttgcccccttaataccggggtatccccgggggtttcccaaatatcagcgttatcagcattatcgatcactaccctga

SEQ ID NO: 39892 - protein, 295 aa, Unknown
  Obtained from environmental sample
  DOMAIN (1)...(294): Polyphosphate kinase
  misc_feature (1)..(295): Xaa is any amino acid
MEELAEKPWKIYQSTDFSEDTTVWDRISQGDVMLHMPYQSFDPVVRFFQEAANDPQVISIKTALYRTGGAIPGSSMQASSSAFSPVVRALEQAALNGKHVTALVELKARFDEERNISWANRLEKAGVIVVYGLSRLKVHSKISMVMRRENDRVKRYVHLSTGNYNDRTAKYYEDICIFTCKEEIAYDAGILFNMLTGYSTVSQMMRLTSAPSGLKRRFLELIEREANRSRHKYPSKITAKMNSLTDIDIIKALYAASCAGSKNIPVAFAAFAPLIPGYPRGFPKYQRYQHYRSLP

SEQ ID NO: 39893 - DNA, 501 bp, Unknown
  Obtained from environmental sample
  misc_feature (1)..(501): n is a, c, g, or t
ttgtatgatgatatgaaatgtgcattcaaggttcatcaaggttatgaccagatagaagaaaccgaatgtgatcatggtcgaatagagacccggcgttgcagtattttggcggcaaaagattttttgttgccggaaaatctgcaggcgtggaaagatctcaccacgttagtgcgagtagaatcttgcagagaaataaagggtgttcacacggatgaaacacgctattatatcagtaatgaggatatgccgaaagcatcctattatcaggctttagtcagaggacattggggtatagaaaatcatttgcactggcatttggatgtaactttcaaggaagatgattgccgagcaagaagcggaaacgctcctcaaaatctagcaactgtaagaaagtttgcattgcaaattatttctcaggccaaagacaaactatctctaaaaaaaaggcaatacaaagctgcattagatttgggctatatgagaaaattgctggaattttga

SEQ ID NO: 39894 - protein, 166 aa, Unknown
  Obtained from environmental sample
  misc_feature (1)..(166): Xaa is any amino acid
MYDDMKCAFKVHQGYDQIEETECDHGRIETRRCSILAAKDFLLPENLQAWKDLTTLVRVESCREIKGVHTDETRYYISNEDMPKASYYQALVRGHWGIENHLHWHLDVTFKEDDCRARSGNAPQNLATVRKFALQIISQAKDKLSLKKRQYKAALDLGYMRKLLEF

SEQ ID NO: 39895 - DNA, 312 bp, Unknown
  Obtained from environmental sample
  misc_feature (1)..(312): n is a, c, g, or t
atgatttttgattttctgtttctaaaacggaaaaaagtttttgctcttgtcggggaaagcggtacaggtaaaagttttcgcgcgaaacttgtcgctcaaaaatacggaatagatctgattattgacgacgggctgttaatcaaagacaaccgcattttagcgggtcattcggcaaaaaaagaagtttcatttcttactgcggtaaaagtagccctggtcgacgataagcgcacagggacgaagtggcgcgcaggctccagaacgaaaaattcaaacgcattctggttttggggacttcggaaaagatggtga

SEQ ID NO: 39896 - protein, 103 aa, Unknown
  Obtained from environmental sample
  misc_feature (1)..(103): Xaa is any amino acid
MIFDFLFLKRKKVFALVGESGTGKSFRAKLVAQKYGIDLIIDDGLLIKDNRILAGHSAKKEVSFLTAVKVALVDDKRTGTKWRAGSRTKNSNAFWFWGLRKRW

SEQ ID NO: 39897 - DNA, 615 bp, Unknown
  Obtained from environmental sample
  misc_feature (1)..(615): n is a, c, g, or t
gtggcgcgcaggctccagaacgaaaaattcaaacgcattctggttttggggacttcggaaaagatggtgaataaaatcgccgcgcgccttcagcttaactctccgtcaaaaataattaagattgaggacatagcgtctcaggaagaaatagacaaagccataaggacaagaaggattgagggcaaacatgttattcctgttccgtccatagaaataaaaagaaattaccccggcattttttacgaagcgataaaaattttcaaaaagcgcatagctcccgcgggtttaggccccgtgccaatcttgcacgaaaaatcggtagtaaggccggagtattcaaaacgcggaaaggtaataatttcagaatcggcgttaagccagatggtgattcactgcgtagacgagtacaacaaagaaatcaaaattaaaaagattttagttaaagacgataaaatgggctacagattagttataacgatagacgtcccctacggcacccaacttggcggaaacatccacaatctgcaacaatacatcatcgaaaacatcgaacgctacacggggatactaatagaagaagtgaatataattattgataaaattactgagcaataa

SEQ ID NO: 39898 - protein, 204 aa, Unknown
  Obtained from environmental sample
  misc_feature (1)..(204): Xaa is any amino acid
MARRLQNEKFKRILVLGTSEKMVNKIAARLQLNSPSKIIKIEDIASQEEIDKAIRTRRIEGKHVIPVPSIEIKRNYPGIFYEAIKIFKKRIAPAGLGPVPILHEKSVVRPEYSKRGKVIISESALSQMVIHCVDEYNKEIKIKKILVKDDKMGYRLVITIDVPYGTQLGGNIHNLQQYIIENIERYTGILIEEVNIIIDKITEQ

SEQ ID NO: 39899 - DNA, 768 bp, Unknown
  Obtained from environmental sample
  misc_feature (1)..(768): n is a, c, g, or t
gtggatgccctaaagaaaaaactgcaagccattcaaagccccgaatccaagtggttgcaactgctggccgactactttgtaaagaagagcgtctggataatgggcggcgatggctgggcctacgacatcggctacggcggactagaccacgtcatagccgccgggcgaaatgtgaacttgctggtgctggacacggaagtttattccaacacgggcggccaagcttccaagtcaaccccgattggcgcgggcgctaagtttgccgttgccggcaagagccaacccaagaaagacctctgcatgatagccatggcatacggaaacgtatatgtggccaaggtggccatgggtgccaaggacgcgcagacagtcaaggcgttcattgaggccgaaagctatgacggacccagcatcatcgtcgcctacagtcactgccaactgcacggcatagacctcgtccacggctgcgagcagcagaagttggcggttgacagcgcccactggcccctataccgctttgacccccgcagggtcgaacaaggcctgccccctctccagttggattctccagaacccaaaatagacctagcgtcatacgtccacaacgaaacccgctaccgcatgatcgaacagcagaatcctgaacacttcaaagaactgatggccatggcccagcgcgaagtggcaaaccggtacgcaatttacaaaggcatgtccgagctggtttggccggtgaaaagcgtgggggaagacgccctagtgcaatga

SEQ ID NO: 39900 - protein, 255 aa, Unknown
  Obtained from environmental sample
  DOMAIN (16)...(141): Thiamine pyrophosphate enzyme, C-terminal TPP binding domain
  misc_feature (1)..(255): Xaa is any amino acid
MDALKKKLQAIQSPESKWLQLLADYFVKKSVWIMGGDGWAYDIGYGGLDHVIAAGRNVNLLVLDTEVYSNTGGQASKSTPIGAGAKFAVAGKSQPKKDLCMIAMAYGNVYVAKVAMGAKDAQTVKAFIEAESYDGPSIIVAYSHCQLHGIDLVHGCEQQKLAVDSAHWPLYRFDPRRVEQGLPPLQLDSPEPKIDLASYVHNETRYRMIEQQNPEHFKELMAMAQREVANRYAIYKGMSELVWPVKSVGEDALVQ

SEQ ID NO: 39901 - DNA, 822 bp, Unknown
  Obtained from environmental sample
  misc_feature (1)..(822): n is a, c, g, or t
ttgcaaaaattaattaaaacgactattactgacattgcctcacaaaattctgttattcaatccattgcactttctttggatcaaggctttgacaatctattaactgcaaataaagctgattggaacaactttgttgtctgcatgaaaaacctatccgatttggaatcttcattgtccgcgcagtttggaagttcatttgaacagtggcacgatgaacccaactggattccggcgatgtccgaaagagcttcacggtggagtgcgaacaccggcgggcttcgcgattactgcggctacttgcagctcaaatctgaactggacagcgaaggcctgccaactgtgtatctcgccatagaaaatggctctgtaaaggaaaatgagcttgttggcacatttatgaagtgcctatccaagaagtgcgctgtgcatgtcattgacactacgcccgcactcaattctttccgaggttcgctgttctcccaaaagattgaaaagttcaaggcaacgatcaagaaattcgaaacgctgactaggcaggaacttgccgcacgtctttccgcgcaggtacctgtgccaagccttggagcttcggactcttccgaaatagggatactgcaacgcgcaatcaaaagcgggggcaggatgacgcccgtgagaaagttgtttgaaagcatccccaaccttttgcgaaaactatgcccatgcatgttgatgagcccaatctctgtggcgcagtacttggaccccaagcggccaccattcgaccttgtggtgttcgatgaagcttcccaaaacagaccagcggcgcggtgggcgcaatag

SEQ ID NO: 39902 - protein, 273 aa, Unknown
  Obtained from environmental sample
  misc_feature (1)..(273): Xaa is any amino acid
MQKLIKTTITDIASQNSVIQSIALSLDQGFDNLLTANKADWNNFVVCMKNLSDLESSLSAQFGSSFEQWHDEPNWIPAMSERASRWSANTGGLRDYCGYLQLKSELDSEGLPTVYLAIENGSVKENELVGTFMKCLSKKCAVHVIDTTPALNSFRGSLFSQKIEKFKATIKKFETLTRQELAARLSAQVPVPSLGASDSSEIGILQRAIKSGGRMTPVRKLFESIPNLLRKLCPCMLMSPISVAQYLDPKRPPFDLVVFDEASQNRPAARWAQ

SEQ ID NO: 39903 - DNA, 831 bp, Unknown
  Obtained from environmental sample
  misc_feature (1)..(831): n is a, c, g, or t
atgtggattatattacacgacatgatacctgtaatattttataaagattttatcaatttagataatgatcgttttagtattattatgaaattattaaacaaagatacctattatttttgtaattccaatcataccaaaaacgattttataaaatatttcagcaaccaattagataaaaaaaaggttatagttatacatcatgcgacatctcaaaatttctatcctgattacgacaaaactaaacttgccgccgctcttaataaatataaaatcaaatacaaaaataataaatatatattttccctttgcaatctagaaccacgtaaaaatttattgtttactattaaatgctttattaaatttatttcaaagcacaatatagaagatttattcttctatataggtggatcacaatggaataaatttatttgtcaattagaaaaagaaatacataactttgataattacaaaaaaaaaataacgggacttggctatgtcaatgacattgatgtaaacattctttacagtaattcacttttttttacttttatctcaaaatatgaaggtttcggtgtacctgtgttagaagcaatgcaagcgggaactccagttatatcttccaatagttcttcccttcctgaagttacaggcgatgcggcaataatgatagatcctgacaacgaggaacaatttattaaagcctttgaagatttatattttaacgaagatttgcgcaaatactatataaaaaaaggaattgaacgggcaaaacttttttcatgggaaaaaaccgtaaataaaatgagcgaatgtatattaaattctttataa

SEQ ID NO: 39904 - protein, 276 aa, Unknown
  Obtained from environmental sample
  DOMAIN (83)...(255): Glycosyl transferases group 1
  misc_feature (1)..(276): Xaa is any amino acid
MWIILHDMIPVIFYKDFINLDNDRFSIIMKLLNKDTYYFCNSNHTKNDFIKYFSNQLDKKKVIVIHHATSQNFYPDYDKTKLAAALNKYKIKYKNNKYIFSLCNLEPRKNLLFTIKCFIKFISKHNIEDLFFYIGGSQWNKFICQLEKEIHNFDNYKKKITGLGYVNDIDVNILYSNSLFFTFISKYEGFGVPVLEAMQAGTPVISSNSSSLPEVTGDAAIMIDPDNEEQFIKAFEDLYFNEDLRKYYIKKGIERAKLFSWEKTVNKMSECILNSL

SEQ ID NO: 39905 - DNA, 360 bp, Unknown
  Obtained from environmental sample
  misc_feature (1)..(360): n is a, c, g, or t
atgtctaagataataataaaaacccccaaagaaatagaacgcataagagactgtggcgcgcttgtcgcagaaacccttgaaagaagcggcgaaatgtgcaaagcgggtgtctctacgcaagaaattgacgactttgtaaaggagtttacgctcaaaaacggtgcaatccccgcctgtttgggctatagaggctacccaaaaagcgtttgcacaagcgtaaatgaggttgtaactcatggaatcccaggcacttacgtgctaaaagatggtgatattataaacgtggacatcacctcgattttaaacggctaccacgcagacacaagtgcaactttttttgttggcaaaccccaagcctaa

SEQ ID NO: 39906 - protein, 119 aa, Unknown
  Obtained from environmental sample
  DOMAIN (13)...(119): metallopeptidase family M24
  misc_feature (1)..(119): Xaa is any amino acid
MSKIIIKTPKEIERIRDCGALVAETLERSGEMCKAGVSTQEIDDFVKEFTLKNGAIPACLGYRGYPKSVCTSVNEVVTHGIPGTYVLKDGDIINVDITSILNGYHADTSATFFVGKPQA

SEQ ID NO: 39907 - DNA, 357 bp, Unknown
  Obtained from environmental sample
  misc_feature (1)..(357): n is a, c, g, or t
atgccagtaacagacagtactattgataatatcggtgttattgacagcattgcctatggtaacggtaaatttgtagctctcggtgggatagtatattccgatgacggtgtaacatggacggaagcggacaccagaggttcttttggtattgtttacggaggtggtaaattttactcacttgatcgagaaaagataaaatattccgttaacggcgtaaactggacggagattgtagctgatgacatattaggaggttatgctatttatgcttttacctacggtggtgatattggttctgggcgactcgtggttggtacagctggcggcggtatatattattccaacgtgctggagtaa

SEQ ID NO: 39908 - protein, 118 aa, Unknown
  Obtained from environmental sample
  misc_feature (1)..(118): Xaa is any amino acid
MPVTDSTIDNIGVIDSIAYGNGKFVALGGIVYSDDGVTWTEADTRGSFGIVYGGGKFYSLDREKIKYSVNGVNWTEIVADDILGGYAIYAFTYGGDIGSGRLVVGTAGGGIYYSNVLE

SEQ ID NO: 39909 - DNA, 735 bp, Unknown
  Obtained from environmental sample
  misc_feature (1)..(735): n is a, c, g, or t
atgcgtaaactgacaaatattcttgtaacaggcggcgcgggatttataggcgttaattttattcgttttctttttgacgaaacggaggaaaaaccgaactttaaaggacggataataaatctggataaccttacttacgcgggaaacgcgggaagtttaaaggagataaatgaaaaattcggcggcagccgctacttctttgaacacggcgatatttgcgaccgtgcttttgttgaatcgctgtttaacaaataccaaattgatacggttgttcattttgccgctgaaagccatgtagaccgctcgatattagaaccggaagcttttataaaaaccaatgttatgggaacttttgccctgcttgatgttgcacataacgcgtggaaggacgcttgcgatacgttgtttcatcatgtcagcaccgacgaagtgtacggttctcttggagaaacgggatattttaccgagaatactccttacgatccccgttcgccgtattccgcaagcaaagcgtcaagcgatcatttggcaatggcgtatcatcacacatacggtttacccgttaccctttctaactgttccaacaattacggaccatatcagtttcccgaaaaactaatccctctgatgatcctcaatatgctggaaggaaaaccgcttcctgtttacggagacggaaaaaatatccgcgattggctgtatgtggaagatcataaccgcgcggtctgggaataa

SEQ ID NO: 39910 - protein, 244 aa, Unknown
  Obtained from environmental sample
  DOMAIN (7)...(228): Polysaccharide biosynthesis protein
  misc_feature (1)..(244): Xaa is any amino acid
MRKLTNILVTGGAGFIGVNFIRFLFDETEEKPNFKGRIINLDNLTYAGNAGSLKEINEKFGGSRYFFEHGDICDRAFVESLFNKYQIDTVVHFAAESHVDRSILEPEAFIKTNVMGTFALLDVAHNAWKDACDTLFHHVSTDEVYGSLGETGYFTENTPYDPRSPYSASKASSDHLAMAYHHTYGLPVTLSNCSNNYGPYQFPEKLIPLMILNMLEGKPLPVYGDGKNIRDWLYVEDHNRAVWE

SEQ ID NO: 39911 - DNA, 336 bp, Unknown
  Obtained from environmental sample
  misc_feature (1)..(336): n is a, c, g, or t
gtgcccggtacggcattgcttgttccgggtgaaggatttttctcgatggcaaagaaactgtatgtcggtaacctttcttacgaaactaccgaagatggtctgaaaaacctgttttcaaggtttggtactgtcgcttcagccaagatcattttcgatcgtgactccggcaaatctaaaggatttggatttatcgaaatgagcagcgaagatgaagcaaacgcggcaatcgccggcacaaacggccaggaatttgaaggacgccagctgcgcgtaaacgaagcgatggataaacctcgccgtgaacgcggcggcggtggcggaggcggtaactggtaa

SEQ ID NO: 39912 - protein, 111 aa, Unknown
  Obtained from environmental sample
  DOMAIN (20)...(91): RNA recognition motif. (a.k.a. RRM, RBD, or RNP domain)
  misc_feature (1)..(111): Xaa is any amino acid
MPGTALLVPGEGFFSMAKKLYVGNLSYETTEDGLKNLFSRFGTVASAKIIFDRDSGKSKGFGFIEMSSEDEANAAIAGTNGQEFEGRQLRVNEAMDKPRRERGGGGGGGNW

SEQ ID NO: 39913 - DNA, 753 bp, Unknown
  Obtained from environmental sample
  misc_feature (1)..(753): n is a, c, g, or t
gtggtaggctctttgcttttgccgggaagcagtcttgccggtatgaatcatcttgaagaacttttggaaaaagcggagtcggggaaggcgtgccttcttcttgtggaacattacagcaacatggatctttcgattgtttcactgttggcgcgaagggaaggtggcagaggcaaagcaataagcgacgcgcttattgcaatcgcgggaatgaaattaaatgaggataatcccattgtcgccgcctttgccggagcctacgataagattgtaatttatccaagccgttctttgcaggaattagaccctgaaaaagacaaggacgaaatcgcaaggggcaatgccattaaccgagccgcaatgaaatcgcttatcaggcataaatacaaaggaaagctcgtccttgtattcccgtccggaacacgttatcgaccgtgggatccgaataccaaaaaaggcgtacgagagatcgattcttatattcgctcttttgaatatatgtgctttgtcgcccttaacggcgagcttttgcatgtacaaaaaaccgatatgctgaatgatgttgtaagtaaagatgtttttagagttacagtgagtccggttgtaaaatgcaatgaattccgcgataaagcgctggctaagattaccaatgaggaagaagataaaaaacaaacggttgtaaacgaaataatgaatgaacttgaaagaatgcacactgccgcggaaacagaaagattaaaacttttaaataaataa

SEQ ID NO: 39914 - protein, 250 aa, Unknown
  Obtained from environmental sample
  misc_feature (1)..(250): Xaa is any amino acid
MVGSLLLPGSSLAGMNHLEELLEKAESGKACLLLVEHYSNMDLSIVSLLARREGGRGKAISDALIAIAGMKLNEDNPIVAAFAGAYDKIVIYPSRSLQELDPEKDKDEIARGNAINRAAMKSLIRHKYKGKLVLVFPSGTRYRPWDPNTKKGVREIDSYIRSFEYMCFVALNGELLHVQKTDMLNDVVSKDVFRVTVSPVVKCNEFRDKALAKITNEEEDKKQTVVNEIMNELERMHTAAETERLKLLNK

SEQ ID NO: 39915 - DNA, 1407 bp, Unknown
  Obtained from environmental sample
  misc_feature (1)..(1407): n is a, c, g, or t
atggccgagaccttgtcgcagtttctcaaactgccgccactcaaccttgaatcgcggctggagtatttaattaaatatcctcacggctgcgccgaacaaactacaagcggttccttccctcagctttatcttgacaaggttctttcactggacgacaaacaaaaagccgatatcaggacaaacgtaaacggcggaatagaacgcgttttgggaatgcagttaatgtcgggaggtttttcttactggcccggcgaatcggttgtaaacgactggtgttcttcttatataggtcacttccttttggaagcccggcgccttgggtatgaagtgcggacaaccgccattaaaagctgggttaactatcaaaagaacgccgcggctcagtggcaggcaagcgacagtaaattcaccgaacaggcgtaccgcctttacactttggctcttgccggagaaaccgatcttggatcgatgaaccgcctgcgaagccataaactgcctgttcaggcaagctggcgtcttgccgcggcatactggcttgcaggacagcgcgacacagcccgaaacatgataaagggattgactctgcctgaaggaaactaccgcgaactttccgcgacattcggctctaacctaagagacaaggcgatgattcttgaaactttaattttgttaaattctcctgatgaagtgggaagaaccaaacagctctttgaagaaataacaaacactctttctcaggacaaatggctttccactcaggagacggcatatgcccttatcgccttagttccgtacatgacaggtaacgcaggaagcggcgcgttgacattggattatacagcggccggaaaaacgggaaacatctctttcagttctcccgccgcggaacgccagcttggaaacgtaagcggaacaagctcggctttgtcggtgactaaccgctcgtcttttcctgtttatgtaaggttcacgactaaagggcttccggttgaaggaaaagagcccgcgctctccgaaggtctttcgcttaacgttgaataccgcgacgcccgcagcaatgtaatcgctcctgaaaatttaaaactgggcgaagacatggtaatctccgtcagtgtgcgcaatacatttactcagcctgtggaagaagccgcacttattgttccgcttcccgcgtcatgggaaattgtcaacacccgtgtaggcggaagttcctcttcgtcgaatttccgttatcaggacataagggacgacagggtgatgacttactttaaccttaaaaggggcgaagagagaacgatagatttcagggttaacaaagcctacgaaggctctttcttcaggccggcaattcatgtttacgcgatgtatgacgagtcgataagggcgttaattcccggctccagataa

SEQ ID NO: 39916 - protein, 468 aa, Unknown
  Obtained from environmental sample
  misc_feature (1)..(468): Xaa is any amino acid
MAETLSQFLKLPPLNLESRLEYLIKYPHGCAEQTTSGSFPQLYLDKVLSLDDKQKADIRTNVNGGIERVLGMQLMSGGFSYWPGESVVNDWCSSYIGHFLLEARRLGYEVRTTAIKSWVNYQKNAAAQWQASDSKFTEQAYRLYTLALAGETDLGSMNRLRSHKLPVQASWRLAAAYWLAGQRDTARNMIKGLTLPEGNYRELSATFGSNLRDKAMILETLILLNSPDEVGRTKQLFEEITNTLSQDKWLSTQETAYALIALVPYMTGNAGSGALTLDYTAAGKTGNISFSSPAAERQLGNVSGTSSALSVTNRSSFPVYVRFTTKGLPVEGKEPALSEGLSLNVEYRDARSNVIAPENLKLGEDMVISVSVRNTFTQPVEEAALIVPLPASWEIVNTRVGGSSSSSNFRYQDIRDDRVMTYFNLKRGEERTIDFRVNKAYEGSFFRPAIHVYAMYDESIRALIPGSR

SEQ ID NO: 39917 - DNA, 726 bp, Unknown
  Obtained from environmental sample
  misc_feature (1)..(726): n is a, c, g, or t
gtgctggaaagaattgagggagatgaatataacaaaagaccaattccgaaatggctgatgggttggcgagatattaccaatgcgacaaatgaaagaacaataattgtcagtatacttccaatagtcgctgtgaatcacacaatgccattattcatttttgaagataaaaaaactgcaatttattcatgttgcttatttggagatttaaattcattaactattgattatttagcacgacaaaaagttggaggtactcatttaacataccactatttgaagcaattccccgtccttctcccaaacgcctattctcaggacgacattgatttcatcgtccctcgtgtgcttgagcttacctataccgccgtagaccttatcccctttgcggaagacctctgggattgtgcagactcaaaaatgaggcgctattttctggaacagcgccacgggacacaagccgcagaatttgaagagtttaccaagtacgacaccgcccatctgccgaagaaggcagatggtcaaggcaagcagacaggattggcagactttctcccgccctttgtttttaaccccgaaagacgggcattgctccgtgccgacttagatgcccgctacgcccggctctacggactttcccgtgacgatctacgctacattctcgaccccgctgatttaatgggcgaggattatccttcggagactttccgtgttctccagaagaaatga

SEQ ID NO: 39918 - protein, 241 aa, Unknown
  Obtained from environmental sample
  misc_feature (1)..(241): Xaa is any amino acid
MLERIEGDEYNKRPIPKWLMGWRDITNATNERTIIVSILPIVAVNHTMPLFIFEDKKTAIYSCCLFGDLNSLTIDYLARQKVGGTHLTYHYLKQFPVLLPNAYSQDDIDFIVPRVLELTYTAVDLIPFAEDLWDCADSKMRRYFLEQRHGTQAAEFEEFTKYDTAHLPKKADGQGKQTGLADFLPPFVFNPERRALLRADLDARYARLYGLSRDDLRYILDPADLMGEDYPSETFRVLQKK

SEQ ID NO: 39919 - DNA, 450 bp, Unknown
  Obtained from environmental sample
  misc_feature (1)..(450): n is a, c, g, or t
gtgcgtgagattatcgacgcggtaaagccccggcggacctgttacacccttgagccgatgccgtggatgtatccgaacacggcagactcgtatctggacttgctgcaagcggtggacagggaggcttttgccgtgcatctggatccggtcaacatcataacgagccctgttgattactaccgcacgggcgaaatcatccgcgagtggttcggcaagctggggccgaggataaaaagctgccacgcgaaagatatcttactggaggggcagctcacggtgcatttaaatgaaaaacgcccgggtctcgggaacctggattacaaaacatatctggaatgtgcgggccgctatccagagcttccggttatgatggaacatatggacaggcacgaagacgccgtgctggctgccgaatacatacgcgggctggcgcagggctcgtgcagctga

SEQ ID NO: 39920 - protein, 149 aa, Unknown
  Obtained from environmental sample
  misc_feature (1)..(149): Xaa is any amino acid
MREIIDAVKPRRTCYTLEPMPWMYPNTADSYLDLLQAVDREAFAVHLDPVNIITSPVDYYRTGEIIREWFGKLGPRIKSCHAKDILLEGQLTVHLNEKRPGLGNLDYKTYLECAGRYPELPVMMEHMDRHEDAVLAAEYIRGLAQGSCS

SEQ ID NO: 39921 - DNA, 372 bp, Unknown
  Obtained from environmental sample
  misc_feature (1)..(372): n is a, c, g, or t
atgcttatgccggaccggctggaacacgccaggcagttgtacatgagacatggcgtagatgtggacgcggcgctcagggcgctggctggcgtgcggatatccgtgcattgctggcagggggacgacgtgacggggtttgagaaccgcgcggggctgtccggcggcatagccgtgaccggcgcgtatccgggccgcgcccgggatttcggtgagctgactgccgatttggacactgcgctcgcgctgataccgggcaagcaccgcgtcaacctgcatgccatctacgccgtaacgggggcgcggttccgcgcgacaggctgggacccgcgcattttgcggcgtgggtcggttacgcgcgggaacgcgggctag

SEQ ID NO: 39922 - protein, 123 aa, Unknown
  Obtained from environmental sample
  misc_feature (1)..(123): Xaa is any amino acid
MLMPDRLEHARQLYMRHGVDVDAALRALAGVRISVHCWQGDDVTGFENRAGLSGGIAVTGAYPGRARDFGELTADLDTALALIPGKHRVNLHAIYAVTGARFRATGWDPRILRRGSVTRGNAG

SEQ ID NO: 39923 - DNA, 345 bp, Unknown
  Obtained from environmental sample
  misc_feature (1)..(345): n is a, c, g, or t
atgagtaaagtaatacgcaaagaacataatgtgagtgtcataatgtaccacatagtatgtccggcaaaatatcgaagggcggtaataaatgctgaagtagataaaaaattgagagagatatgtgagggaatagaagcaagatatgaaataaaatttttggaaataggagcagaaaaagaccatgtacactttctggtacaatcggtgccaacaaacagcccggcaaagatagtgcaaacaataaagagcataacagcaaagaaaatatttgaggcgtgtcctgaggtaaagaaagcattatggggaggggaattctggacaaggggatattacgtggaacagtag

SEQ ID NO: 39924 - protein, 114 aa, Unknown
  Obtained from environmental sample
  DOMAIN (18)...(113): Transposase IS200 like
  misc_feature (1)..(114): Xaa is any amino acid
MSKVIRKEHNVSVIMYHIVCPAKYRRAVINAEVDKKLREICEGIEARYEIKFLEIGAEKDHVHFLVQSVPTNSPAKIVQTIKSITAKKIFEACPEVKKALWGGEFWTRGYYVEQ

SEQ ID NO: 39925 - DNA, 729 bp, Unknown
  Obtained from environmental sample
  misc_feature (1)..(729): n is a, c, g, or t
ttggcgagactcggcattgatttggatgaggccgaaaagcccctcgaaggttatgggagcctgcaagagtttttcacgcgcaggctgaaaccaggagttcgcccccaagaagaaatgtcgcttggcgcaataaattgcccagttgatgggcgaatcgtcgcctacgggcgcataaaggaaggaacgctgatacaggccaaggggctgtcttacagtttgcaggagctgctgacattcatgcctttgcccgagcgcttcgagggtgggcattatctcactatttacctgagtcccaaagactaccacagaatccatgtccccatcattggcgcggtgcaagcggctggcagggcgacgggcgagctatggccagtaaacgatgaaagcgtcaaacacatccccaagctgtacgaacgcaaccgccgtgctatgtggatggcggaagggaagggccacgacgaggggcttttggtcgcctgcgtactcgtaggcgccactcacgttggaagctgcattgttgacggacgctggctcgatggccgccgcctgccaaataatggagttttggaaatactggatctgccatgcgccccaggagacgatttggggctgtttcaatttggctccaccgtaatccttcttgttggaggctccagggcagatacttgggtgccagaaagaaatgaaggccaggtcaaagtgggccagtgccttggcaggtgcagatga

SEQ ID NO: 39926 - protein, 242 aa, Unknown
  Obtained from environmental sample
  DOMAIN (21)...(240): Phosphatidylserine decarboxylase
  misc_feature (1)..(242): Xaa is any amino acid
MARLGIDLDEAEKPLEGYGSLQEFFTRRLKPGVRPQEEMSLGAINCPVDGRIVAYGRIKEGTLIQAKGLSYSLQELLTFMPLPERFEGGHYLTIYLSPKDYHRIHVPIIGAVQAAGRATGELWPVNDESVKHIPKLYERNRRAMWMAEGKGHDEGLLVACVLVGATHVGSCIVDGRWLDGRRLPNNGVLEILDLPCAPGDDLGLFQFGSTVILLVGGSRADTWVPERNEGQVKVGQCLGRCR

SEQ ID NO: 39927 - DNA, 438 bp, Unknown
  Obtained from environmental sample
  misc_feature (1)..(438): n is a, c, g, or t
atgatacagttgtacttcttatcaattctatgtaacggtttaagcgggtatatcctgtttgccggaaacgaaggcgatgaatccgatgactcatcgccggactcattagaaaaaagtatacgtttttcattgaatacccctacctttcaccttgttttgggtgttttatgcgcggttacagggatgttaaaactcctttctccgacactggacggaattctcattttaggcgatcttattccgtcggttgcgggaattattgccggaattttattgatttttggaatataccgccaggatatttcagcggctcctgaaaaccccagcgctttagacaggtttggcgtaacccttttaagattccgcagaactgtcggatttgctttaattgtcgttgcctttttacatttccttttccctaagactttgtttctgtaa

SEQ ID NO: 39928 - protein, 145 aa, Unknown
  Obtained from environmental sample
  misc_feature (1)..(145): Xaa is any amino acid
MIQLYFLSILCNGLSGYILFAGNEGDESDDSSPDSLEKSIRFSLNTPTFHLVLGVLCAVTGMLKLLSPTLDGILILGDLIPSVAGIIAGILLIFGIYRQDISAAPENPSALDRFGVTLLRFRRTVGFALIVVAFLHFLFPKTLFL

SEQ ID NO: 39929 - DNA, 450 bp, Unknown
  Obtained from environmental sample
  misc_feature (1)..(450): n is a, c, g, or t
gtggaagcgcaaactcccgaaggagtaaatattaccgcgcaaaacccccgtcaactgcgggtattgcctattccccttcttcccgcgccgtcgaatcgtctgcctgccgaagggcacattattggcatcgaagaacttaaaaaaattactgtcaattttggatgctcagccgtaccgggcgccaacgcgtatatttttaccctgtatcaggaaaccgacaaagggcggaagcaaatcacgcaaacagggccggagaaccgcacctcatggacagcggatattaaaacactgggacggggaaattttatctggcaggtagaagcggtaaacgtgggacaaaacaatgttattgaacagcggggcagtccggcggaaaatcattttgttatagatattccccgtcccggtccggtacagataattgaggagccggaggataccgatgattaa

SEQ ID NO: 39930 - protein, 149 aa, Unknown
  Obtained from environmental sample
  misc_feature (1)..(149): Xaa is any amino acid
MEAQTPEGVNITAQNPRQLRVLPIPLLPAPSNRLPAEGHIIGIEELKKITVNFGCSAVPGANAYIFTLYQETDKGRKQITQTGPENRTSWTADIKTLGRGNFIWQVEAVNVGQNNVIEQRGSPAENHFVIDIPRPGPVQIIEEPEDTDD

SEQ ID NO: 39931 - DNA, 735 bp, Unknown
  Obtained from environmental sample
  misc_feature (1)..(735): n is a, c, g, or t
ttgacttttgtcaaagaagtgcggcaggaggggggaatcaacaaaaatgaagagcagatgatccgtcaggtcattgagtttgacgatattaccgtagcagagattgttaccccccgcgttgatgtcgcggcgattccggagaacagtccgcctgaggaaattgaccgggtatttgccgcgaccggattttcccgtctgccggtttaccatgagagtattgataacataaccggggttatactactgaaagattttcaccatgaagtaataaaaaaaggcaggccgcccgcggaaattatcaagcaggtggtctttgtaaccaagaccatgaaaatatccagcctgctgcggactctgcaaaaaaaacacgcgcatctggcggtgctggtggacgaatttggcggcaccttgggaatagccaccatagaagacattcttgaagaactggtcggtgaaatatgggacgaacatgacaaagtggtggaaccgttccggcaaaatgccgacgggagttttaccgttctgggcagcgtcaagtttcaggatatgcttgaatatattaaaataaattctcaggaagaaggggatattcccaataccacggtcggcaactggatactggaaaactcaggcagcctgccccgctcaggggatcgttttgtttggcgtaatgcgcacattaccgtgtcacggatgctgcggaaccgcataatggaagtaacggtaaccaaataa

SEQ ID NO: 39932 - protein, 244 aa, Unknown
  Obtained from environmental sample
  DOMAIN (36)...(150): CBS domain pair
  misc_feature (1)..(244): Xaa is any amino acid
MTFVKEVRQEGGINKNEEQMIRQVIEFDDITVAEIVTPRVDVAAIPENSPPEEIDRVFAATGFSRLPVYHESIDNITGVILLKDFHHEVIKKGRPPAEIIKQVVFVTKTMKISSLLRTLQKKHAHLAVLVDEFGGTLGIATIEDILEELVGEIWDEHDKVVEPFRQNADGSFTVLGSVKFQDMLEYIKINSQEEGDIPNTTVGNWILENSGSLPRSGDRFVWRNAHITVSRMLRNRIMEVTVTK

SEQ ID NO: 39933 - DNA, 786 bp, Unknown
  Obtained from environmental sample
  misc_feature (1)..(786): n is a, c, g, or t
atgacggctagggaagaactgctcaataaaaacgccctcgctgcggtaaaactttccggcgttctttgccggtaccgctcaggcgacaggcttcccagcgtttcggctctcgcccgtgagatgaatctttcggtcggtaccacgcagtacggtcttctctttctccgcgaaaaacgcgccgtttccgtaacggcaaaaggccatctgggtacgtttattgatgagatcaattacgaaaagctgagagaatacacggggaatacggccagggcctgcgtaatgcctataccctattctctccggtacgaagggcttgccacttcgttttccgaacttggcaacaaaagcggaaaattttatctggcctttatgaacggctctctgcgccggctcaaggcgctggcggagggtcgttacgactgcgcggtcctttccgcaaaggcggcgcaggaagctatttcgcacggatgggaaataaatgtcgcggttaattacggggagttttcatttttggaaacccatgcgcttgtgtacaggaccaaaaccaggggccggattaagaccatcggactggacagggaatcgctggatcagacgatgctgtttaaggcgttcgtggctaaacagcccggtgtaaaggtggtcaacgttccgtatactcatatcataaggcggcttttggcgggagaggtggacgcgactatatggaaccttgactatataaaagaacatcatcctaccctgcggttcagcctcttaatttgccttcgtttgagcggcagatga

SEQ ID NO: 39934 - protein, 261 aa, Unknown
  Obtained from environmental sample
  misc_feature (1)..(261): Xaa is any amino acid
MTAREELLNKNALAAVKLSGVLCRYRSGDRLPSVSALAREMNLSVGTTQYGLLFLREKRAVSVTAKGHLGTFIDEINYEKLREYTGNTARACVMPIPYSLRYEGLATSFSELGNKSGKFYLAFMNGSLRRLKALAEGRYDCAVLSAKAAQEAISHGWEINVAVNYGEFSFLETHALVYRTKTRGRIKTIGLDRESLDQTMLFKAFVAKQPGVKVVNVPYTHIIRRLLAGEVDATIWNLDYIKEHHPTLRFSLLICLRLSGR

SEQ ID NO: 39935 - DNA, 534 bp, Unknown
  Obtained from environmental sample
  misc_feature (1)..(534): n is a, c, g, or t
atgggcgtcaccgccggctcggagaaaaccgccgccgccgaaggccaggccgacatccgttacgatcccatggccatgctgcctttctgcggctataacatgggggactatttcgaacattggctgaacatgggacacaccgtgtccaaagcgcccaaaatcttccgcgtcaactggttccgcaaggacgcgcacggcaacttcatctggcccggctacagcgacaacttcagggttctcaaatggattgtggatcgggtgcgcggcaaggtcgccgcagtggaaagcccgattggactcatgccgtattacgaagacttgcccttgcagggactctcctttgatcgtgaactctacggcaagctcatggcggtggattccaaggaagcgcgcgctgaagccgaagggcagaaagaattcctcgcccagttcgcgcggagcggaaaactgcccgaagaaatccgcctggaacgggaacaactcctcaagcggctggaccgcgccccgaagcgctgggaaatgccgcgtaaataa

SEQ ID NO: 39936 - protein, 177 aa, Unknown
  Obtained from environmental sample
  DOMAIN (1)...(168): Phosphoenolpyruvate carboxykinase
  misc_feature (1)..(177): Xaa is any amino acid
MGVTAGSEKTAAAEGQADIRYDPMAMLPFCGYNMGDYFEHWLNMGHTVSKAPKIFRVNWFRKDAHGNFIWPGYSDNFRVLKWIVDRVRGKVAAVESPIGLMPYYEDLPLQGLSFDRELYGKLMAVDSKEARAEAEGQKEFLAQFARSGKLPEEIRLEREQLLKRLDRAPKRWEMPRK

SEQ ID NO: 39937 - DNA, 882 bp, Unknown
  Obtained from environmental sample
  misc_feature (1)..(882): n is a, c, g, or t
atggggggggatgagcatggccaggttcgtcttgccgcaggcgctggggaaggcgccggcaatgtaggtggtttccccttccgggctttccagaccgacgatcaacatatgctcggcaagccatccctggtcgcgcgccatggcggaagcgatgcgcagggcgtaacatttcttgcccagcagggcattgccgccgtatccgctgccgaaggaccagatttcacgggtttccgggaaatggacgatatgcacgtctttgggcatacagggccaagccgtatccttttcgcccggcgccagaggaacgcccacggaatggacacaggggacgaagaaaccgtcattgccgagtaccttcagtaccttgtcgccgatgcgggtggtgatgcgcatgctttgcacgacatagggcgaatcggtgatttcaatgccgatctgggcaatgggcgatcctaccggccccatgctgtacgggataatatacattacccggcccttcatgcagtctttgaaaaatccgtggagctttttgcgcatcctttgcggggccatccagttgttggtcgggccggcatcacgctttttggcggtacagataaaagtgcggtgttccaggcgggcgacgtcggccgggttggaacggctgagaaaacaaccggggcgtttccggggattcagggggatgaaggtgccgtttttcaccagcaaatcgttgagggcgtttttttcctcctcgctgccgtcacaccagtgaacggcatcaggacggcacaactgcgcgatttcattcacccaggcaatgagctttctatggttggtggggggcgcgtcacggtgcgttttcacaagcaggtctcctcgcgtttgttatggatatactga

SEQ ID NO: 39938 - protein, 293 aa, Unknown
  Obtained from environmental sample
  misc_feature (1)..(293): Xaa is any amino acid
MGGDEHGQVRLAAGAGEGAGNVGGFPFRAFQTDDQHMLGKPSLVARHGGSDAQGVTFLAQQGIAAVSAAEGPDFTGFREMDDMHVFGHTGPSRILFARRQRNAHGMDTGDEETVIAEYLQYLVADAGGDAHALHDIGRIGDFNADLGNGRSYRPHAVRDNIHYPALHAVFEKSVELFAHPLRGHPVVGRAGITLFGGTDKSAVFQAGDVGRVGTAEKTTGAFPGIQGDEGAVFHQQIVEGVFFLLAAVTPVNGIRTAQLRDFIHPGNELSMVGGGRVTVRFHKQVSSRLLWIY

SEQ ID NO: 39939 - DNA, 1266 bp, Unknown
  Obtained from environmental sample
  misc_feature (1)..(1266): n is a, c, g, or t
ttggcagtgttccaactgcggacacattatcgtcggaaagaaagctccggaagcatgcccggtgtgcaagcatcccaaggcgtatttccagattcgcgcttcaaattattaaaaatcggcttaacgctgttccttgacaatcatagattgtcaaggaattccgattataagcctgcccgcttacaagcggtcaggcaaaatctagagagtacaaatgagcgaaaaagcgataatccncatggtcggggcggcgttgacagttctgtcgccgccgccctcatgcttgagcaaggatatcaatgtgtcggcataacgctcaaactttacaagggcgaaagccgatgctgttctcttgccgatgtaaacgacgcaaggaacgtggctttcaacctcggcatggatcactatgttcttaattttaccgaagaatttgacaaacaggttatccgccatttcatagaaacctacgaacagggcgcgacgcccaatccctgcatagaatgtaaccgccatataaaatttaatctgctccttcttcgcgcgcgccagcttgattttgactatcttgttacaggtcactacgcacgtgtggcaaaggatgtaaacggcaggtatttgcttttgaaagcgttagacgaaaaaaaagatcaaagttatgtgctttactgtcttacccagaaacaactgcaatgttcgcgtttccctctcggcggactatccaaaaatgaagtgcgaaaaatcgccgaagacaaaaaatttgtaaacgcggcgaaagacgagagccaagacatctgctttgtgcctgacggcgattacggaagttttatcgaaaattacacaggtaaaacatacccgcacggagacattatcgacatggaaggaaaaaaaatcggcgtgcataaagggcttatccgctacactatcgggcagaggcgcggactcggcgtcgccgccaatgttcccatttatgtagcggataaatcaatagcggataataccgtaacgctgggaacggacgacgctctttttcgcaaatcgctctccgcaaaagacatcaatcttatttcctgcgaggagttaaaaaagcctatgcgcgtaacggtaaaaacccgctacttgcaggctgaacagagcgccacggcggaacaaacaggggagaacagcctgcacattgaatttgactcaccccagcgcgcaattacgccggggcaagcggttgttatgtatgacggagatattgtagtcggtggcgggacgatagagtag

SEQ ID NO: 39940 - protein, 421 aa, Unknown
  Obtained from environmental sample
  DOMAIN (83)...(420): tRNA methyl transferase
  misc_feature (1)..(421): Xaa is any amino acid
MAVFQLRTHYRRKESSGSMPGVQASQGVFPDSRFKLLKIGLTLFLDNHRLSRNSDYKPARLQAVRQNLESTNERKSDNPHGRGGVDSSVAAALMLEQGYQCVGITLKLYKGESRCCSLADVNDARNVAFNLGMDHYVLNFTEEFDKQVIRHFIETYEQGATPNPCIECNRHIKFNLLLLRARQLDFDYLVTGHYARVAKDVNGRYLLLKALDEKKDQSYVLYCLTQKQLQCSRFPLGGLSKNEVRKIAEDKKFVNAAKDESQDICFVPDGDYGSFIENYTGKTYPHGDIIDMEGKKIGVHKGLIRYTIGQRRGLGVAANVPIYVADKSIADNTVTLGTDDALFRKSLSAKDINLISCEELKKPMRVTVKTRYLQAEQSATAEQTGENSLHIEFDSPQRAITPGQAVVMYDGDIVVGGGTIE

SEQ ID NO: 39941 - DNA, 537 bp, Unknown
  Obtained from environmental sample
  misc_feature (1)..(537): n is a, c, g, or t
ttgttcccctttgtttatgtgttaggcgatgtgcttaccgaagtttacggtttcaaaacggcgcggcgcgttatcctgacgggcttcgcggtgatggttcttgccgcgctggttttcttcgtgctgggtctcttgccgccggaagcgggatgggaagcggagaccggcggaaacatggcgtttaacgcgatactcggcggaatgagctacggcggcattgtgcttgccagccttgcggcgtatcttgcgggagagttgtccaattcgcttattctttcaaaacttaaagtgataatgaaggggcgcttcctttgggtacgcaccataggttctactttagtgggagaattattggattctttgatttttattttgatttcctcagttgcgggagttttcccctgggaaattttttggtctcttgtgataacaaattatattttaaagtgcgccattgaagctattgtaacgccttttacatattggctttccgctttcttaaaacgaaaagaagggatagatgtctatgacgcgtaa

SEQ ID NO: 39942 - protein, 178 aa, Unknown
  Obtained from environmental sample
  DOMAIN (1)...(150): Uncharacterized ACR, YhhQ family COG1738
  misc_feature (1)..(178): Xaa is any amino acid
MFPFVYVLGDVLTEVYGFKTARRVILTGFAVMVLAALVFFVLGLLPPEAGWEAETGGNMAFNAILGGMSYGGIVLASLAAYLAGELSNSLILSKLKVIMKGRFLWVRTIGSTLVGELLDSLIFILISSVAGVFPWEIFWSLVITNYILKCAIEAIVTPFTYWLSAFLKRKEGIDVYDA

SEQ ID NO: 39943 - DNA, 903 bp, Unknown
  Obtained from environmental sample
  misc_feature (1)..(903): n is a, c, g, or t
ttgggaagcaaggtcggccgtgcttcgctttatcttttggacacgaatatcgaggaaaatgccccggactttagaaatattaccgcttctctttacggcggcgacaaagaaaccagaatgcagcaggaaatccttttaggcataggcggcatccgcgccttacgcgccctgggaatcaatcccgctgctacccacatgaacgaaggccacgcggcgtttttgggccttgagcgtatccgcgaaataatggaagaaaagggatttacttttgaggaagcgcgcgaggctgtttggccgtcaaatatctttacgacacacacgcctgttccggcgggaaatgagcgttttgaaattccgatgatggaaaaatatttccgctcatggccgcaggttctgggaatttcatggaaagatttcctgggactgggcaggatttatccgggcgacgagcgcgaaactttctgtatgaccgttctcgctcttaagatggcggcttacgccaacggagtcgcgaaattgcacggagtggtttcccgcgacatgtggaaagggatatggccgggattgccgttaaatgaaattccgattgggcacgtgacaaacggcgtacactcaagaacgtggatttccagcggcatgatagatcttttagacagatacttcggccccagttttctggacaaacccaccgatctgcaaatttgggagcgcatggaccgcatctccgacgaggaactgtggcgcacccacgagcgccgccgtgaaaaacttgtcgcctttgtgcgcgagcgcattaacgcgcaatatgttcgcacaggagccgcgcggcttaagcaggcggaagacgccctttctccctacgcgctcaccctttgttttgcccgccggtttgcccacttataa

SEQ ID NO: 39944 - protein, 300 aa, Unknown
  Obtained from environmental sample
  misc_feature (1)..(300): Xaa is any amino acid
MGSKVGRASLYLLDTNIEENAPDFRNITASLYGGDKETRMQQEILLGIGGIRALRALGINPAATHMNEGHAAFLGLERIREIMEEKGFTFEEAREAVWPSNIFTTHTPVPAGNERFEIPMMEKYFRSWPQVLGISWKDFLGLGRIYPGDERETFCMTVLALKMAAYANGVAKLHGVVSRDMWKGIWPGLPLNEIPIGHVTNGVHSRTWISSGMIDLLDRYFGPSFLDKPTDLQIWERMDRISDEELWRTHERRREKLVAFVRERINAQYVRTGAARLKQAEDALSPYALTLCFARRFAHL

SEQ ID NO: 39945 - DNA, 717 bp, Unknown
  Obtained from environmental sample
  misc_feature (1)..(717): n is a, c, g, or t
gtgatcagatggcagagatcctctttcccttatatgggctttttctctccggcctattccattatcaacttccaggttattaaagacgctccgtggttcgggcttccttcattccggcttccaaagtttaacatggttgcggttcttactttcataattgtatccctggcgaccatctgcgagcacctgggggacacgcttgttacaagcaaggttgttggccaggatttttataagaatccggggcttcacaggactttggctggtgacgggctggctaccgcgtgggcggcgttttggggcgggcctcctaacactacctatggtgaaaacatcggcgtcatggccattaccagggttttttccgtttgggtaataggcggggctgctgtaattgccgtactgctttcgttcttcagaaaattcggcgcgctgattcaaaccatccccactccggttctgggaggcatctcgatgctcctgttcggaataatcgcctcttccgggctcaggactctggcggaaagcggggtcgattacaaagacaagcggaacctgaccatttcctcggtgatcctggttatcggcatcgggggcggaaggcttgccttcgccattacaggcgggcttgagttccagttggccggagttgctctggctaccttggtgggaataattttgaaccttattttccccccaagcagggaagcgaagtag

SEQ ID NO: 39946 - protein, 238 aa, Unknown
  Obtained from environmental sample
  DOMAIN (1)...(205): Permease family
  misc_feature (1)..(238): Xaa is any amino acid
MIRWQRSSFPYMGFFSPAYSIINFQVIKDAPWFGLPSFRLPKFNMVAVLTFIIVSLATICEHLGDTLVTSKVVGQDFYKNPGLHRTLAGDGLATAWAAFWGGPPNTTYGENIGVMAITRVFSVWVIGGAAVIAVLLSFFRKFGALIQTIPTPVLGGISMLLFGIIASSGLRTLAESGVDYKDKRNLTISSVILVIGIGGGRLAFAITGGLEFQLAGVALATLVGIILNLIFPPSREAK

SEQ ID NO: 39947 - DNA, 654 bp, Unknown
  Obtained from environmental sample
  misc_feature (1)..(654): n is a, c, g, or t
atgaatataattgctattggtatattcttcatcgttatatggcttggaacaacactattaattgttcgctatgttaaaaagctaaaggatgatttgctagccaggttctccgataaggaaaaaccatcaaaaaaagaagaagataaagaaggggtttacaatccttttgattacgtcaaacgttttgaccctgcatacttgttgaacttaatccaaaaagaacacccacaaataatcgcccttgttttggcacacctggaacctgagaaggcctcggttattctgcagaacctcccccacgagttacaaagtgatgtgtcgcaacgtatcgctaccatggatcgngtcagccccgaagtaacgcgtgaaattgagcaggttatggagaagaaacttagcgcactgtccagcgaagctcttgccgtagccggcggcgttgaaagcatcgcaaaaatcctgaaccgtgtcgactgcgattcagggatcaaattaccgaggcaatcgaagatgaggaccccgactttgcatatttataaacgaagcaatagcgctaaaaaagccaaattaaaaatttaccacaaaccacaccaacctcacgaacttttaactcatatattgtcgttgttcgtgttagttagtgtggttcgtggttga

SEQ ID NO: 39948 - protein, 217 aa, Unknown
  Obtained from environmental sample
  misc_feature (1)..(217): Xaa is any amino acid
MNIIAIGIFFIVIWLGTTLLIVRYVKKLKDDLLARFSDKEKPSKKEEDKEGVYNPFDYVKRFDPAYLLNLIQKEHPQIIALVLAHLEPEKASVILQNLPHELQSDVSQRIATMDRVSPEVTREIEQVMEKKLSALSSEALAVAGGVESIAKILNRVDCDSGIKLPRQSKMRTPTLHIYKRSNSAKKAKLKIYHKPHQPHELLTHILSLFVLVSVVRG

SEQ ID NO: 39949 - DNA, 372 bp, Unknown
  Obtained from environmental sample
  misc_feature (1)..(372): n is a, c, g, or t
atggaaatggataaagttaacccgatcgtggcgggcgcattgtccagtgcgtttatgagggtttccgttgaactgggagccacatttaaaacagtaaaggaagtttatgcaattggcgaggggtcaattcttgagcttgataaacttgccggggaaccgctggacgtgatagtaaacggagtcctcattgccaaaggggaaccggtggtaatcgatgagaatttcggtataaggattatcgaaattaccggaaaccatgacgcttccgctcaatccgcgcctcagcagtctgcgccggaaccttccgccgaggcccgaacgggccgaggttcccctccggtaccgcctgagccaacaatcaaggatttataa

SEQ ID NO: 39950 - protein, 123 aa, Unknown
  Obtained from environmental sample
  DOMAIN (10)...(86): Surface presentation of antigens (SPOA) protein
  misc_feature (1)..(123): Xaa is any amino acid
MEMDKVNPIVAGALSSAFMRVSVELGATFKTVKEVYAIGEGSILELDKLAGEPLDVIVNGVLIAKGEPVVIDENFGIRIIEITGNHDASAQSAPQQSAPEPSAEARTGRGSPPVPPEPTIKDL

SEQ ID NO: 39951 - DNA, 702 bp, Unknown
  Obtained from environmental sample
  misc_feature (1)..(702): n is a, c, g, or t
ttgaggggtcacgcaatcaggaaacttcaacaagaggggcttttcggagacaagcccatctgccgccaacttataaaagagcaaacggaggaacgattgacggaaggacctgttgaaggagggtcgcgcggctactccgcttacaacatccgcgcgagaagggaggcggtagacgccgcacagaaaaaaaaactaggggccgttgtcacgaacccgctagggggaggcgcgacaccgcaacaacacgaactaataaaaccgacctgcacaaagggggaaagcaccggaaccaccccgctccacggccggtgggagcagcccgagggaacggacacactggtttgcttcgaaacccccgaagatacacccaaggcggaaggagcgatggaaggctataagccccgtacaaaggcggaacttgaagaaacaatagcaaaagcgcaaacctcatttgaaggcatctgcacgggctgcgcgtattgcgacaactgccccgtaaggattccaattccctattacatggacgcatacaaccagaaattactcgataaaaacaacaaagacccgattggagacaggttaaaatggcactggagtcttgacagggcgggggcggcaaaatgtatggattgcggattatgcgaacaaacctgcacccagcaccttaacattatcgaaagattaaaagaaatcgccggataa

SEQ ID NO: 39952 - protein, 233 aa, Unknown
  Obtained from environmental sample
  misc_feature (1)..(233): Xaa is any amino acid
MRGHAIRKLQQEGLFGDKPICRQLIKEQTEERLTEGPVEGGSRGYSAYNIRARREAVDAAQKKKLGAVVTNPLGGGATPQQHELIKPTCTKGESTGTTPLHGRWEQPEGTDTLVCFETPEDTPKAEGAMEGYKPRTKAELEETIAKAQTSFEGICTGCAYCDNCPVRIPIPYYMDAYNQKLLDKNNKDPIGDRLKWHWSLDRAGAAKCMDCGLCEQTCTQHLNIIERLKEIAG

SEQ ID NO: 39953 - DNA, 306 bp, Unknown
  Obtained from environmental sample
  misc_feature (1)..(306): n is a, c, g, or t
gtgggcaaaagaaaaaggtatgctgccgaagaaaaaattaagattctcagagaggtgcttgaggacgggaagcctataagccaggttgctgaacagtacggacttcacccgaataatatattcaactggcggaagcagttgtttgagggaggagtacagaccttccagatacagagaccagacatctcaggcaaagccgaggaacggagaataatggtacttgaagacaaaatcaaacagaaggacgaagtaatagcggagcttgccgaagagcttttggccttaaaaaaaagaactttggcctga

SEQ ID NO: 39954 - protein, 101 aa, Unknown
  Obtained from environmental sample
  DOMAIN (4)...(95): Transposase
  misc_feature (1)..(101): Xaa is any amino acid
MGKRKRYAAEEKIKILREVLEDGKPISQVAEQYGLHPNNIFNWRKQLFEGGVQTFQIQRPDISGKAEERRIMVLEDKIKQKDEVIAELAEELLALKKRTLA

SEQ ID NO: 39955 - DNA, 1152 bp, Unknown
  Obtained from environmental sample
  misc_feature (1)..(1152): n is a, c, g, or t
ttggccgcgtcggtggtctttttcggcgtggaggcggcattgttcccgattttggtgtgcatcgccgcggcggtggccacggagtgcgtcgccaaccttatactcaggaagaggcaatcgataggagacctcagcgcgatagttacggggatacttgtcgcgttcaacctcccccccgccctgccgttgtggatggcggctttgggttcggttttcgcgatagccgtggccaagatggttttcggcggcctcggctgcaacttcataaacccggccttggccggacgcgcgtttctggtggcaagttatccggctccaatgacaagctatccgcccacgttatacggcagcgtaaacgggctggcgataaaggcggcggacgcgtccggcacgctctccgacgccgtctcgtcggcgacgtccgcatcggtatcaacgccggcggttgcggattccgtgaagagcgccgtgggcgccgcggcggattccttggcggataccgcggccttggctgcaagcaagttcgcggcggcggcatcgtccgtcgcggacaccgtgtctaccgcggcggcctccgcggcttcggctatagacgccgtatcgtcggccacgccgctgtacgtgataaagcatgtgtttgccgtgaacgcctacagaccggacgatttttcgcccgctctaaaagacctcttcttcggcaacgtcggcggctgcatcggggaaacatccgcgctcgcgctgcttgtcggcggaatatttttgatatcgatacgggcaatagacttccgcatacctttcgcctacatattcacggtattcgcgctcttttggctggcaaacaggacgggcgggttcttcacggccgaatctctgatagcgccgacgctccacatattggcgggagggttattcttgggcgcgttcttcatggccaccgaccctgtaacctcccccatcacgccgacggggcgcctgctcttcggcatcgagtgcggcgcgctcacgtttacaataaggaaatacggcgggtaccccgaggaggcatctttttcgattctgctgatgaacctcgttgcgccgctcatagaccgttgcacgaggcccaaaatatacgggcgaggtgaaaaagcatggctgaaatggcaaaaatga

SEQ ID NO: 39956 - protein, 383 aa, Unknown
  Obtained from environmental sample
  DOMAIN (1)...(374): NQR2, RnfD, RnfE family
  misc_feature (1)..(383): Xaa is any amino acid
MAASVVFFGVEAALFPILVCIAAAVATECVANLILRKRQSIGDLSAIVTGILVAFNLPPALPLWMAALGSVFAIAVAKMVFGGLGCNFINPALAGRAFLVASYPAPMTSYPPTLYGSVNGLAIKAADASGTLSDAVSSATSASVSTPAVADSVKSAVGAAADSLADTAALAASKFAAAASSVADTVSTAAASAASAIDAVSSATPLYVIKHVFAVNAYRPDDFSPALKDLFFGNVGGCIGETSALALLVGGIFLISIRAIDFRIPFAYIFTVFALFWLANRTGGFFTAESLIAPTLHILAGGLFLGAFFMATDPVTSPITPTGRLLFGIECGALTFTIRKYGGYPEEASFSILLMNLVAPLIDRCTRPKIYGRGEKAWLKWQK

SEQ ID NO: 39957 - DNA, 549 bp, Unknown
  Obtained from environmental sample
  misc_feature (1)..(549): n is a, c, g, or t
ttgagcctcaggcgcataggcactatgaacctcccccttttttttaccgaaacggacgaagttgttatctgcaatctttgtcccaactcctgccgcattcaaagcggccgcttcggctcatgcggagtcaggggcaacaagggcggcaagggaataattcccttttacggatttatctccgctctggcgatggacccgatagaaaaaaagccactctatcattttaagcccggctcgaagatactgtcgcttggttttgccggttgtaatctccactgccctttctgccagaactggcacatctcccaaaacaccgacattcccggcaaatggatggaagcaaacgaagttatatccgccgccttacataacgattctccgtccattgcctacacatactcagaaccgttaatccacgcggaatacattattgactgcatggtccttgcccgcaaacacggcatagcaaacgtgcttgtaaccaacggctgtatcaacaccgagcccgccgcgaaaatcctcgccccttaccgacgccgccaacattga

SEQ ID NO: 39958 - protein, 182 aa, Unknown
  Obtained from environmental sample
  misc_feature (1)..(182): Xaa is any amino acid
MSLRRIGTMNLPLFFTETDEVVICNLCPNSCRIQSGRFGSCGVRGNKGGKGIIPFYGFISALAMDPIEKKPLYHFKPGSKILSLGFAGCNLHCPFCQNWHISQNTDIPGKWMEANEVISAALHNDSPSIAYTYSEPLIHAEYIIDCMVLARKHGIANVLVTNGCINTEPAAKILAPYRRRQH

SEQ ID NO: 39959 - DNA, 336 bp, Unknown
  Obtained from environmental sample
  misc_feature (1)..(336): n is a, c, g, or t
atgcctgatccagatatcttttcagaacggctcaaaagtgcccgagaaatgagaaaaatgacccaaaatgagcttggaaccaaggcaaacttgccttctacctccatagcccactttgagtctggttcaaggaaaccttcttttgataacctgagaaaacttgccgaagccttggaagtaacaaccgattaccttcttgggcgggtggaagaaccttctatggcagaagccggagacgtactttttagagatattggtaaattaaccgagtatgatcgtaggattgcggaaaatttcctaaaaatgctgactaaaaaggactcccaaaatgagtaa

SEQ ID NO: 39960 - protein, 111 aa, Unknown
  Obtained from environmental sample
  DOMAIN (11)...(65): Helix-turn-helix
  misc_feature (1)..(111): Xaa is any amino acid
MPDPDIFSERLKSAREMRKMTQNELGTKANLPSTSIAHFESGSRKPSFDNLRKLAEALEVTTDYLLGRVEEPSMAEAGDVLFRDIGKLTEYDRRIAENFLKMLTKKDSQNE

SEQ ID NO: 39961 - DNA, 552 bp, Unknown
  Obtained from environmental sample
  misc_feature (1)..(552): n is a, c, g, or t
ttgtacccagccgccacggccacccaatcctttgccgcgcccaccctgacggggcttttcttgtttgtcttggtgccgtcgccgagttggccggagctattatatccccaagtccagagactgccgtcgttcctgatgactgccgaatgccactcgcccgcggccaccgtagccaagttgttgggcaccaccgtcaccgtgcattttgccgttttgccgccgtcctgcgcggtggccgttatctccgccgcgcccacggccacggccgtgaccagaccgcccgccgacaccgacgctatgccgctgctgctgctcgaccacgcgatgttctggttcgtcgcgttgcttggctggattgtaggcgtaagctgctgtctgccccctgcaaccaagaacatggtcgttttgttcaggtccaagcccgtcacatttatcgcgaccggcaccaccgtaaccgtgcattttgccgttttgttgccgtcctgcgtcgtcacacttatgtcggccgtgcccacgctgacgcccgtcaccaagccggtgcgcgacacatag

SEQ ID NO: 39962 - protein, 183 aa, Unknown
  Obtained from environmental sample
  misc_feature (1)..(183): Xaa is any amino acid
MYPAATATQSFAAPTLTGLFLFVLVPSPSWPELLYPQVQRLPSFLMTAECHSPAATVAKLLGTTVTVHFAVLPPSCAVAVISAAPTATAVTRPPADTDAMPLLLLDHAMFWFVALLGWIVGVSCCLPPATKNMVVLFRSKPVTFIATGTTVTVHFAVLLPSCVVTLMSAVPTLTPVTKPVRDT

SEQ ID NO: 39963 - DNA, 1434 bp, Unknown
  Obtained from environmental sample
  misc_feature (1)..(1434): n is a, c, g, or t
gtgggcaatgacaatgactggaagtccgtgcaggccgaaagccgcaccacgatggccctcaagacggacggcagtctatggacttttggggacgactcctacgacgaccttggctacagtgccgacaaaaaagccttcatatcccctggtcaggtgggcggcgccaaggactgggtggccatatcggcgagttctttcggccataccagaagcgccctcaagagcgacggcagcctatggatgtgggggacaggcactgacggtcagctgggcaacggcacaacgaaaagcagtgccaccccccgcagggtgacggcatccttgacgtccattgcggcgagcggcgtgagcctggacaaaacggcggtcacaatcaaggacggcgacgaagtgcagctcacggccgccatccagccttacaacgccacgaaccaaggcggcacttggtcaagcagcaacagcgccgtggccactgtcacggccaggggtctggtcaagggcgtcaccagaggcacggcggttataacgcttacgacctacgacggcgccaaaaaggcgacgtgcaacgtcacagtggaatcggacagggtggctgttacgggcgtgagccttgacaaaacggccatggcgctcaccaccggcggctcggaacaactgaccccgacggttcagccaagcgacgccacaaacaagaatgtaacgtggtcaagcagcaacacagccgtggccaccgtgtcggcaagcggtctggtgacgggcgtgagcgccgggcacggcggacataacggtgacgacgcaggacggcaacaagaccgccaaatgcgtggtgacggtggcttccgtggctgtgacgggcgtgagcctgaacaagcctgcgaccaacttggaggttggaaaccaggaactgctgatggccacaatccagcccagcaacgtgacaaaccagaccatcacgtggtccagcagcaacagcgccgtagcctatgtgtcgcgcaccggcttggtgacgggcgtcagcgtgggcacggccgacataagtgtgacgacgcaggacggcaacaaaacggcaaaatgcacggttacggtggtgccggtcgcgataaatgtgacgggcttggacctgaacaaaacgaccatgttcttggttgcagggggcagacagcagcttacgcctacaatccagccaagcaacgcgacgaaccagaacatcgcgtggtcgagcagcagcagcggcatagcgtcggtgtcggcgggcggtctggtcacggccgtggccgtgggcgcggcggagataacggccaccgcgcaggacggcggcaaaacggcaaaatgcacggtgacggtggtgcccaacaacttggctacggtggccgcgggcgagtggcattcggcagtcatcaggaacgacggcagtctctggacttggggatataa

SEQ ID NO: 39964 - protein, 477 aa, Unknown
  Obtained from environmental sample
  DOMAIN (198)...(276): Bacterial Ig-like domain (group 2)
  misc_feature (1)..(477): Xaa is any amino acid
MGNDNDWKSVQAESRTTMALKTDGSLWTFGDDSYDDLGYSADKKAFISPGQVGGAKDWVAISASSFGHTRSALKSDGSLWMWGTGTDGQLGNGTTKSSATPRRVTASLTSIAASGVSLDKTAVTIKDGDEVQLTAAIQPYNATNQGGTWSSSNSAVATVTARGLVKGVTRGTAVITLTTYDGAKKATCNVTVESDRVAVTGVSLDKTAMALTTGGSEQLTPTVQPSDATNKNVTWSSSNTAVATVSASGLVTGVSAGHGGHNGDDAGRQQDRQMRGDGGFRGCDGREPEQACDQLGGWKPGTADGHNPAQQRDKPDHHVVQQQQRRSLCVAHRLGDGRQRGHGRHKCDDAGRQQNGKMHGYGGAGRDKCDGLGPEQNDHVLGCRGQTAAYAYNPAKQRDEPEHRVVEQQQRHSVGVGGRSGHGRGRGRGGDNGHRAGRRQNGKMHGDGGAQQLGYGGRGRVAFGSHQERRQSLDLGI

SEQ ID NO: 39965 - DNA, 390 bp, Unknown
  Obtained from environmental sample
  misc_feature (1)..(390): n is a, c, g, or t
atgggagccccggcctcgcgccgtcaatcaccacccccaccgccgccccgtggctctcgccaaaagtcagcacccgaatattcctgccgaatgtgttgggggaagcgtggagcatggggaattatagcagtgtgtggtggcgagaagcgagcgatggggtaccctttcattggaggtttcgtgaaggtagtcgttgccaggacggccggtttctgctggggggtaaggcgggccatggacgccgcgctggaggcgtccgccagcaaaagggggcgcgtatggacgctggggccgctgatacacaacccccaggcgctctcgctgcttgaaaagcgcggtataagcgcggtggagtcgcccgacggcgcgttggggggcaccatcgtgtaa

SEQ ID NO: 39966 - protein, 129 aa, Unknown
  Obtained from environmental sample
  misc_feature (1)..(129): Xaa is any amino acid
MGAPASRRQSPPPPPPRGSRQKSAPEYSCRMCWGKRGAWGIIAVCGGEKRAMGYPFIGGFVKVVVARTAGFCWGVRRAMDAALEASASKRGRVWTLGPLIHNPQALSLLEKRGISAVESPDGALGGTIV

SEQ ID NO: 39967 - DNA, 915 bp, Unknown
  Obtained from environmental sample
  misc_feature (1)..(915): n is a, c, g, or t
ttggaggccagggtgcagaatttgtgcatggtgacgttcggcgaggactcctctggggatgtcttttggcccggcgatatggatgacgacggtgccccccgatgttttgctggccgtcgcgaaaaagggcacgggccacaaacgcctgctgctctccggcaaagccaagtcgcgcaacctggtggggccttgccggggaacacagctattcattcgggaattaaaattcctcttgcactaagcgaaaataaagcgaacaatggaggcatgacgctttcactgttccctccggagttggagcccggcgttttccgcggggcaaaggtgctgcccgaagaggccaggagcatcctgcgcccccagagggacgagcgttacggctttggcttcgcgctcagtccatacaggggctgcacgcactcgtgccgctactgtttcgtgcgcgagtacccaaacgcgctgcacggcccgggcgaatggggaggctggtgcgcgcccaagctgaacgccccggaactcctatgggcgcagaggcgccgcctgcacgaccagtcggtcttcatggcgaccgcgaccgacccgtaccagccgatagaaagcgagtacaggctgaccaggcgctgcctgaaggtcctgctggaatgtcccaccacggcggtgctggtgcatacccgcagcccactggtgctgcatgaccttgatctgctgaaggagttcggcccgcgcctgcacgtcggaatctcgatacccacggacgacgacaccatccgccaggtgattgagccgagggcaagcccaatcccgctccgctggagcaccgcggagcgcttgtcggcggctggtgtccgcgtgaacatcgcggccacccccatgttcccgatgcagaacgtggccgctttcgtaaaaggtgcgtga

SEQ ID NO: 39968 - protein, 304 aa, Unknown
  Obtained from environmental sample
  DOMAIN (132)...(304): Radical SAM superfamily
  misc_feature (1)..(304): Xaa is any amino acid
MEARVQNLCMVTFGEDSSGDVFWPGDMDDDGAPRCFAGRREKGHGPQTPAALRQSQVAQPGGALPGNTAIHSGIKIPLALSENKANNGGMTLSLFPPELEPGVFRGAKVLPEEARSILRPQRDERYGFGFALSPYRGCTHSCRYCFVREYPNALHGPGEWGGWCAPKLNAPELLWAQRRRLHDQSVFMATATDPYQPIESEYRLTRRCLKVLLECPTTAVLVHTRSPLVLHDLDLLKEFGPRLHVGISIPTDDDTIRQVIEPRASPIPLRWSTAERLSAAGVRVNIAATPMFPMQNVAAFVKGA

SEQ ID NO: 39969 - DNA, 657 bp, Unknown
  Obtained from environmental sample
  misc_feature (1)..(657): n is a, c, g, or t
gtgatcaaggtagagactactacggaaacaattgaaagtaaaggcggactgatccttgccgggaaaatcgcgaagaaagccgggcttggggccataaaaagcctgattgtaaaaaacgcaggaattattatagccggcatgttcggcctattggtggaaggaaaaagcgattttgaaagcatgggagaaaagcgcggaaacctgtttttcaaagaggcgcttggattgccgtatgtgtacgcgaaagaaacggtaaggctttacctggggaagatggcggaagacgccgacgggattgtcgaacagttaagggaaagctccgcgaagataataagccaggcgccgctgcacgggctttggatacaggggaggcactaccttcctgtggacatcgacactacagcaatggacaactcgaagacaaagaaagaaggggtgggccggacgtaccaggggttcgacgggtttcactgtttaatccgttcaaactggtacagcgatccggctttatccgaccaacgaatccggaaacatccggccaaaggatccggctttatccgggcaaagcccggcgcctctttgctgaatataaaagccggctcttgttttgtcaagaaaaatttttctcaggctctttttcagcaccaaatctcatag

SEQ ID NO: 39970 - protein, 218 aa, Unknown
  Obtained from environmental sample
  misc_feature (1)..(218): Xaa is any amino acid
MIKVETTTETIESKGGLILAGKIAKKAGLGAIKSLIVKNAGIIIAGMFGLLVEGKSDFESMGEKRGNLFFKEALGLPYVYAKETVRLYLGKMAEDADGIVEQLRESSAKIISQAPLHGLWIQGRHYLPVDIDTTAMDNSKTKKEGVGRTYQGFDGFHCLIRSNWYSDPALSDQRIRKHPAKGSGFIRAKPGASLLNIKAGSCFVKKNFSQALFQHQIS

SEQ ID NO: 39971 - DNA, 969 bp, Unknown
  Obtained from environmental sample
  misc_feature (1)..(969): n is a, c, g, or t
atgatgctgttcaatttctttgtcatggtcaaatcgggttttttgccgccctcaaccccgcgctttaaccgacttaattcgatcataaagcagtgcggcaagcctaagggcgtccgtttgtacgagccgtataacgccgacggtgaggatcaggtggtcaactaccttggcatgatcggcattccttttgagccgtcaccggattttgacgaaaaggattcctcggattctgcggaatccgaggaatccgcagaatccgttgtatttcttccgctcagcgcggcaaaagacgcacacataatgcaaaaacttgaaaaatttgtgcggaacggaaataccgccataatcaccgcaggtttcctgaaggagtgccttgaacgcggtttgaaggacatgacatcagtgcgccctaccggacgaaccgtcaacggaaacgagtattcggttcagccttacgacgaaaggcggctggtctcttcgggggcaaaaaaaattcagctcgaggcactggactacaaaaccaacgcgagctggtgcgaggttgccatgatgactgagtataacagcttcccgatattgaccgttgatttttacggaaaggggaatttgtttatattcaacgtgccgaatgatttcggcgatttgtattcgcttcccaaagaagttacggggtatatcaacaaggttttcgccaatggcgggccgtatataaaaagcagtcccaggacgtgcatgttcatgtacgataacgatgttataggaatatactctcaaaaaccctatgcggatgacgtagagattatcctgctcgcgaaatactccacagtacgcgatattgaatcaggcgaggagattacgctaatctcagattcaataaagaaaaaattcattggcgagaaaaccacgccgttaaaaactgcgcgggtatacattcccggcggcacttaccggtttttcaagttaacgtag

SEQ ID NO: 39972 - protein, 322 aa, Unknown
  Obtained from environmental sample
  misc_feature (1)..(322): Xaa is any amino acid
MMLFNFFVMVKSGFLPPSTPRFNRLNSIIKQCGKPKGVRLYEPYNADGEDQVVNYLGMIGIPFEPSPDFDEKDSSDSAESEESAESVVFLPLSAAKDAHIMQKLEKFVRNGNTAIITAGFLKECLERGLKDMTSVRPTGRTVNGNEYSVQPYDERRLVSSGAKKIQLEALDYKTNASWCEVAMMTEYNSFPILTVDFYGKGNLFIFNVPNDFGDLYSLPKEVTGYINKVFANGGPYIKSSPRTCMFMYDNDVIGIYSQKPYADDVEIILLAKYSTVRDIESGEEITLISDSIKKKFIGEKTTPLKTARVYIPGGTYRFFKLT

SEQ ID NO: 39973 - DNA, 684 bp, Unknown
  Obtained from environmental sample
  misc_feature (1)..(684): n is a, c, g, or t
atgcgcgtgttattactttgtgacgattattggcatcctgggcagataccaattgatggcgttgccccacttgccggccatggatttctattcgacataatcaaagacgcgaaagatttcaagcctgatatgctttcagactaccctgtcgtcctgatggccaaaagcgatcaaaccagccaaaaggacgagacaaaatggaaaacctatgcagtacaacaggcttttattgcgtatgtggagaatggcggcggactgctggttgttcatagcggtgccgtgacgggtaaggaaacagaagccctggatagtatgattggctgccgttttatctctcacccaaacgcctgtccggttacagtccagcccattaagtcccatcccgttaccgagagcgtagggatgttttgcgaaaccgacgagcattaccgcattgaaatcacggcgcaagacgcggatgttttaatagcgtcatattctccgccccagggggaggagaataaatatcaggaggatccctaccacaacactcangcgtggatctgccctgccgggtttgtgcgaacccaaggcaaggggcggatctgtgccctgacacctgggcatctgttgcctgtttgggctcacccnacataccaacgcacccttgctaacgctttgaaatggtgcggcgggtcaatatag

SEQ ID NO: 39974 - protein, 227 aa, Unknown
  Obtained from environmental sample
  misc_feature (1)..(227): Xaa is any amino acid
MRVLLLCDDYWHPGQIPIDGVAPLAGHGFLFDIIKDAKDFKPDMLSDYPVVLMAKSDQTSQKDETKWKTYAVQQAFIAYVENGGGLLVVHSGAVTGKETEALDSMIGCRFISHPNACPVTVQPIKSHPVTESVGMFCETDEHYRIEITAQDADVLIASYSPPQGEENKYQEDPYHNTXAWICPAGFVRTQGKGRICALTPGHLLPVWAHPTYQRTLANALKWCGGSI

SEQ ID NO: 39975 - DNA, 654 bp, Unknown
  Obtained from environmental sample
  misc_feature (1)..(654): n is a, c, g, or t
atggaattccgtaaggtcgacttcggaaaaaccagggaggtatctatgatttcttttattcttggagttgcagcgttaatactgggctatctgatttacggaaaaatcgcggaaaaaatttttgcgatcaggccgggactgaaaacaccggcggtcaggttgaatgacggagttgattttgtgccgatgccgccatggaagactacgctcattgagcttctcaacattgccggcacagggcctattttcggcgccattgccggcgctctttttggcccggcggcttttgcatggattgtctttggctgcatctttgccggagccgttcatgattacatggtgggtatgctttcggtacggaacaacggagccaacatttctgaaattgtcgggaaatacctgggcaaagtacccctctacattatgagggttttctcaattgttttactgatctttgtgggagttgtgtttgtaaccacccccgcacaggttctaaagaccttgttcgcacccgacagcaattcgttttattacattgtcatcgttgccatcatcatttattacatcctggcgacgcttctgcccatcgacaaattgatcggcaggatttaccccttttcggcgcgtgtctgtttatcatggccgttggtataa

SEQ ID NO: 39976 - protein, 217 aa, Unknown
  Obtained from environmental sample
  DOMAIN (13)...(217): Carbon starvation protein CstA
  misc_feature (1)..(217): Xaa is any amino acid
MEFRKVDFGKTREVSMISFILGVAALILGYLIYGKIAEKIFAIRPGLKTPAVRLNDGVDFVPMPPWKTTLIELLNIAGTGPIFGAIAGALFGPAAFAWIVFGCIFAGAVHDYMVGMLSVRNNGANISEIVGKYLGKVPLYIMRVFSIVLLIFVGVVFVTTPAQVLKTLFAPDSNSFYYIVIVAIIIYYILATLLPIDKLIGRIYPFSARVCLSWPLV

SEQ ID NO: 39977 - DNA, 591 bp, Unknown
  Obtained from environmental sample
  misc_feature (1)..(591): n is a, c, g, or t
atggctacagcgactagaaaaaagaaaaagttatcacaaaaagcagtccccaacgggaaaaaaccgacttttgaaacggtatgggcatcattacaggaactatctgcggatttaaaaaaaaccgaacggatagtaaaacgaaacggcaaacagatggnggaactgcaccgccgttttgggcagttggcggaacatcttgttgcgcccggtatcttcaagcgttttaacgaattagggtatcattttggttcaatgttacctaaaggacaaaaaatatttgatgaaaaaaccgggaagataaaaacggaaattgatttaatattggaaaacggcgatacagtaatggcggtagaagtaaaaacaagacctgtaattcaggatgtggaacaccatatcaagcggttggaaatattacgggatcaccggcgcagttttaacgatcagcgaaaagtacagggagcggtagcgggagcaatttacgaagacaacgtaaaagaagccgtccgggaagcagggttgtatgtgatagaacaatcaggcgacacgatgaagattgacgtacccgacggatttattccgcgcgagtggtaa

SEQ ID NO: 39978 - protein, 196 aa, Unknown
  Obtained from environmental sample
  misc_feature (1)..(196): Xaa is any amino acid
MATATRKKKKLSQKAVPNGKKPTFETVWASLQELSADLKKTERIVKRNGKQMXELHRRFGQLAEHLVAPGIFKRFNELGYHFGSMLPKGQKIFDEKTGKIKTEIDLILENGDTVMAVEVKTRPVIQDVEHHIKRLEILRDHRRSFNDQRKVQGAVAGAIYEDNVKEAVREAGLYVIEQSGDTMKIDVPDGFIPREW

SEQ ID NO: 39979 - DNA, 984 bp, Unknown
  Obtained from environmental sample
  misc_feature (1)..(984): n is a, c, g, or t
atgattgaagtttttaaagttgaatgtataggcgattatctttcaaaggtaaaagagctccaattcacattatcgaatacaaatgaagagattccacatatttggtttcgtggtcaagcttctgtagaacaagaagacggaagctggaagttagttcccaaagtacaacgatttatatcgacttgtgatgaaaaagatttctacaagatggaaagcaacctgaataatgattttcaaagcagagccagtatttttttggaatcgaagccagatatggatgatttttcaagttggctaaccataatgcaacattatgggtttccaaccagattattggattggtcacgttctccgttatacgcgctttattttgctacctcagagcgaaatgaaaacattgacaaaatggattcctgtatttggatgttaaatcctggcttactaaacgaatatgcaaatcctgagtccagagactgtgaattttgcgattgttctgatgaatgtgataagcgtgacagtgaaaaggaaaaatgcaaaaaaccaggaacatatttatatcacatgggtcataatgtagtgaaacaaatattatggccagcgtttagagttactgactacgaccttgctaaaaatgcccaatggagaatttacagggataagattattgcagcttatgcaacacaaagagatatgagagtgtttaaccaacagtcagtatttacggtgcataattctgttaaaacgctggaacatatccatgaagaaattttgaaagatagccgtttcgagaagcaagaacttctacgaaaaataattataccagcttcaaagaagcatagtgtcttcgaagaactatacacgagcggaatcacgcatagtgttgtgtacccagacttagagcatgttggaaaagatgtgcaaaagctttatggtgtagaagaagatttattaactcgaaaaaagcgaaaggataccacggtttga

SEQ ID NO: 39980 - protein, 327 aa, Unknown
  Obtained from environmental sample
  misc_feature (1)..(327): Xaa is any amino acid
MIEVFKVECIGDYLSKVKELQFTLSNTNEEIPHIWFRGQASVEQEDGSWKLVPKVQRFISTCDEKDFYKMESNLNNDFQSRASIFLESKPDMDDFSSWLTIMQHYGFPTRLLDWSRSPLYALYFATSERNENIDKMDSCIWMLNPGLLNEYANPESRDCEFCDCSDECDKRDSEKEKCKKPGTYLYHMGHNVVKQILWPAFRVTDYDLAKNAQWRIYRDKIIAAYATQRDMRVFNQQSVFTVHNSVKTLEHIHEEILKDSRFEKQELLRKIIIPASKKHSVFEELYTSGITHSVVYPDLEHVGKDVQKLYGVEEDLLTRKKRKDTTV

SEQ ID NO: 39981 - DNA, 570 bp, Unknown
  Obtained from environmental sample
  misc_feature (1)..(570): n is a, c, g, or t
atgaaaaacgcttatcaagttgaaaatctcgattttaatttaagcccatacacggcgatgtccaggaagcactatataagctgcgccaaatatcttctggagagggctttcagccatgttgattcgatggataccccgttgagctttcccactgttccggggaagacctaccctcagccgaatgatccggactggcggaagcgatcccaggaatttgaagctctggaaagaaccatgacacttgctggccccctaatgcatgtggaacccaataccactataaaaggcatcaagttaaaagattattactgtttgattctttacaatgcgttgacgccgggacatcccaattcactgccccttccggaagagctacccgactctacttaccaattaacctgcgaattcgggggtttgttcaaaacgctgcttcttttacctgatattgtctggccacactatacgcaaaagcaaaaagacgaaatggcggtaaccatttccaaatgggcacatcatcgcactacccagaacaactggagaatttttaacataatcgcgctgtcattttaa

SEQ ID NO: 39982 - protein, 189 aa, Unknown
  Obtained from environmental sample
  misc_feature (1)..(189): Xaa is any amino acid
MKNAYQVENLDFNLSPYTAMSRKHYISCAKYLLERAFSHVDSMDTPLSFPTVPGKTYPQPNDPDWRKRSQEFEALERTMTLAGPLMHVEPNTTIKGIKLKDYYCLILYNALTPGHPNSLPLPEELPDSTYQLTCEFGGLFKTLLLLPDIVWPHYTQKQKDEMAVTISKWAHHRTTQNNWRIFNIIALSF

SEQ ID NO: 39983 - DNA, 690 bp, Unknown
  Obtained from environmental sample
  misc_feature (1)..(690): n is a, c, g, or t
atgaaccgcgcccacgcttacaaagacaaggtggcaaaaaaccaagcggctggcacagaccccgatgacggcgttaatatggggctttacagctatccgtgccttatggacgcggatattcttatgtttaaatccgatattgttccagttggcaaagaccaaaagcagcacgttgaatttagccgcgacattgcggagcgtttcaacaagcattacggcaagaatgtttttgttttgccagaagcggtaatgcaagcagacaccgatataatcccaggtttggatggccgcaagatgagcaaatcttatggcaataccatagaaatttttttagaaccaaaggaattgaaaaacaaaatcgggaaaatagtcacaaatagccaaccgatagaagagccaaaagagcctgagaaatgcaatgtgttcgcattgtataaactttttgcgagcgaagagcgagcagatgctttggcagctcgctatcgtgctggcggcatgggctggggtcacgctaaggatgctttgagggaacttttggaagagcgttttgcaaaaccgagggaacaatacaaagcccttttagcagacaccgcacagatagataaaatcctcgtttatggcgcggaaaaagcaagggcaatagccaagccttttatgcaggaaattagggacaccgtaggggtggtttaa

SEQ ID NO: 39984 - protein, 229 aa, Unknown
  Obtained from environmental sample
  DOMAIN (1)...(184): tRNA synthetases class I (W and Y)
  misc_feature (1)..(229): Xaa is any amino acid
MNRAHAYKDKVAKNQAAGTDPDDGVNMGLYSYPCLMDADILMFKSDIVPVGKDQKQHVEFSRDIAERFNKHYGKNVFVLPEAVMQADTDIIPGLDGRKMSKSYGNTIEIFLEPKELKNKIGKIVTNSQPIEEPKEPEKCNVFALYKLFASEERADALAARYRAGGMGWGHAKDALRELLEERFAKPREQYKALLADTAQIDKILVYGAEKARAIAKPFMQEIRDTVGVV

SEQ ID NO: 39985 - DNA, 732 bp, Unknown
  Obtained from environmental sample
  misc_feature (1)..(732): n is a, c, g, or t
ttgctggggaagaaagaagagaagctcaaagataacggtaatagtggagagttgagaatggagagtggagaatatattgaaaaaagtaattctcaactctcaactctcaactctcaactaaccaagaatgaagaaaataaagttcaatacgaagaataccgcattccgttccctgcggaaattttggctcctgtaccagaccaaaccgtagattactcggagcaagaactccacgaaataggaatggatatagaatccaagctggacaattttaaggttaaaggcaaggtaactggcattatgactggccctgtggtgatacgctttgaaatagaacctggccctggcataaaagtctccagattcgagagcttggcagacgacttggctttgctgctcaaaactgcttccgtaagggttatctcttctatacctggcaaatccgccgttggcatagaaatccccaaccgaaagccgcaaacggttttttgcagagaaattctggaatcttcaaaattcgtcaaagacccaaaaagactccaagttgtgctaggcaaagatataatgggagacgcctttgtaacggatttgacaaaagcaccgcacttgctcatagcagggcaaacaggtgcgggaaaatccgtttgcataaatgttcttttggcaagtattttattcagcanaacaccctatgaagttcgccttatcttggttgacccaaaggttgtgtag

SEQ ID NO: 39986 - protein, 243 aa, Unknown
  Obtained from environmental sample
  misc_feature (1)..(243): Xaa is any amino acid
MLGKKEEKLKDNGNSGELRMESGEYIEKSNSQLSTLNSQLTKNEENKVQYEEYRIPFPAEILAPVPDQTVDYSEQELHEIGMDIESKLDNFKVKGKVTGIMTGPVVIRFEIEPGPGIKVSRFESLADDLALLLKTASVRVISSIPGKSAVGIEIPNRKPQTVFCREILESSKFVKDPKRLQVVLGKDIMGDAFVTDLTKAPHLLIAGQTGAGKSVCINVLLASILFSXTPYEVRLILVDPKVV

SEQ ID NO: 39987 - DNA, 438 bp, Unknown
  Obtained from environmental sample
  misc_feature (1)..(438): n is a, c, g, or t
atgcaaacggattttcccgcacctgtttgccctgctatgagcaagtgcggtgcttttgtcaaatccgttacaaaggcgtctcccattatatctttgcctagcacaacttggagtctttttgggtctttgacgaattttgaagattccagaatttctctgcaaaaaaccgtttgcggctttcggttggggatttctatgccaacggcggatttgccaggtatagaagagataacccttacggaagcagttttgagcagcaaagccaagtcgtctgccaagctctcgaatctggagacttttatgccagggccaggttctatttcaaagcgtatcaccacagggccagtcataatgccagttaccttgcctttaaccttaaaattgtccagcttggattctatatccattcctatttcgtggagttcttgctccgagtaa

SEQ ID NO: 39988 - protein, 145 aa, Unknown
  Obtained from environmental sample
  misc_feature (1)..(145): Xaa is any amino acid
MQTDFPAPVCPAMSKCGAFVKSVTKASPIISLPSTTWSLFGSLTNFEDSRISLQKTVCGFRLGISMPTADLPGIEEITLTEAVLSSKAKSSAKLSNLETFMPGPGSISKRITTGPVIMPVTLPLTLKLSSLDSISIPISWSSCSE

SEQ ID NO: 39989 - DNA, 669 bp, Unknown
  Obtained from environmental sample
  misc_feature (1)..(669): n is a, c, g, or t
atgagttacgcgatgttactgcttatcggccttcttaccagcgctcactgtatcgccatgtgcggaggaataaacctttcacaaactttacggaagaccgaaaaatccgcgcccgcgaatacctattccatgttactgcccggtattctgtacaacggcgggcgattggcggcgtatacggcggttggcgttattgtcggcgcgttaggttcggtgattaccctgtcggggtattttcagggactggtacaactcgttgccggagtcttcatggtgatcatggggatcaatatgctggggctgtttccggttttgcggcgtttcagtttgagtatgccgaaaatttttacccaaaaaatagatgaacaaaaaaccggacgggggccgctgattgtcggtttcctgaacggttttatgccctgcggccctttacaggccatgcagttgtacgccctctccaccggaaacccggttcgcggcggcgttgccatgtttatgttctgcgccgggacaattcccctgatgttcgcgctgggggcggcaagttccgctttaagcggcgttaagggtcaagtattctccccccgcgttatgcgaattggagcggttatggtcgcggcgctgggcctggtcatgttttccaacggctggactgtttcagggttctag

SEQ ID NO: 39990 - protein, 222 aa, Unknown
  Obtained from environmental sample
  SIGNAL (1)...(27)
  DOMAIN (6)...(213): Cytochrome C biogenesis protein transmembrane region
  misc_feature (1)..(222): Xaa is any amino acid
MSYAMLLLIGLLTSAHCIAMCGGINLSQTLRKTEKSAPANTYSMLLPGILYNGGRLAAYTAVGVIVGALGSVITLSGYFQGLVQLVAGVFMVIMGINMLGLFPVLRRFSLSMPKIFTQKIDEQKTGRGPLIVGFLNGFMPCGPLQAMQLYALSTGNPVRGGVAMFMFCAGTIPLMFALGAASSALSGVKGQVFSPRVMRIGAVMVAALGLVMFSNGWTVSGF

SEQ ID NO: 39991 - DNA, 837 bp, Unknown
  Obtained from environmental sample
  misc_feature (1)..(837): n is a, c, g, or t
atggaggtttcaaaaatgacggaagtcaaagtcaaccgtaatcacaaggccagcgttttctcgctgctgttcggcgagccacctgccgcgctggaactctacaacgccgtgacggggcaaaactacccaccagatacgaaaatagagatagtgacgctttcagatgccctattcaaagggcaattgaacgatgtggctttcgtggtgaacgataggctggtcgtcctcatagagcaccagtggagcataaataacaacataccgctcagaatgcttatgtatttgggaagggaatacgagcgaataacaaaaggcaaagatttgtatagggagaagctgataaaaattcctacgccggagttcatagttctgtacaacggcagggacgagtttcccgatttcaaagagcttaggctttccgattcttttaaatccaaaggcaagggcaatcttgagcttgtggcaaatgtttataatatcaacaaggggcgcaatgcggatatagccagtaagagtcctgttttaaacggctacaatgagcttatagcggaagtaaacaaaaatcgtgagacgatggaaccagcagaagccatagtagcagcaataaagagctgtgtggagcgcaatattttagtatatttcttggagaagtacgcttcggaggttttgaatatgctttttacggaatggaatttggacgatgctattgcggttgctagggaagaggccttggaagatggcattgaaaaaggtcgcgaagagttatttgccctttgggaaagcggagtttctttggaggaagccaagaaaaggctcaatcttaaaagcaatttttga

SEQ ID NO: 39992 - protein, 278 aa, Unknown
  Obtained from environmental sample
  misc_feature (1)..(278): Xaa is any amino acid
MEVSKMTEVKVNRNHKASVFSLLFGEPPAALELYNAVTGQNYPPDTKIEIVTLSDALFKGQLNDVAFVVNDRLVVLIEHQWSINNNIPLRMLMYLGREYERITKGKDLYREKLIKIPTPEFIVLYNGRDEFPDFKELRLSDSFKSKGKGNLELVANVYNINKGRNADIASKSPVLNGYNELIAEVNKNRETMEPAEAIVAAIKSCVERNILVYFLEKYASEVLNMLFTEWNLDDAIAVAREEALEDGIEKGREELFALWESGVSLEEAKKRLNLKSNF

SEQ ID NO: 39993 - DNA, 888 bp, Unknown
  Obtained from environmental sample
  misc_feature (1)..(888): n is a, c, g, or t
atgctggctttttcggaatttgcccgcgccgtgcttccccggggcactacggccgtggcttccgatctgatggaaatagccatcgtgtcggggccggaaggcataaaggagattttccgcgaagccgaggggctgccccttacgttgctgcacacagtgccttcattcatgggcgaagaaacggatatgcagaccatcggcgccgccctcggcccacagttagttgaagaattgcttaagaagccgcaggccgtgggcttggctgaggtgatggtggagccgatactggctaaaagcaaggaaagcgaagccttgcttgcattggccggcgggttggggaaaacggccgaaggccatgccccggaattgtacggggcggcgttgaacgcgtattcgggagccggcgtgcgaagcgatcatgaaagcaccaaccgcgccgaggccctggaaaaagcgcggcatggcatacgggtgcagatgcgggagggcagcgccgccgccgatctgctgccatgccttgatataatcaccagggatcatatcgatccccggtactgctccatggtcagcgatgacattgatatgctccacatttttgaaaaggggcatcttgaccataaggtgcgtatggctgtagccaacggggtagaccccgtagtcgccatacagatgataacgattaaccccgccgaaagcctncaggtggacggaacgcgcggcagcataagtccggggaagaccgcgnatatagttttgctttccagcctggagcagtgtacggtcgagagcgttatagccaaaaggcagatagtagtggatcagaggaagacggtttttagcaagcctcctttaagtacgcgacctgtatgctggacactgtccatctga

SEQ ID NO: 39994 - protein, 295 aa, Unknown
  Obtained from environmental sample
  DOMAIN (1)...(254): Amidohydrolase family
  misc_feature (1)..(295): Xaa is any amino acid
MLAFSEFARAVLPRGTTAVASDLMEIAIVSGPEGIKEIFREAEGLPLTLLHTVPSFMGEETDMQTIGAALGPQLVEELLKKPQAVGLAEVMVEPILAKSKESEALLALAGGLGKTAEGHAPELYGAALNAYSGAGVRSDHESTNRAEALEKARHGIRVQMREGSAAADLLPCLDIITRDHIDPRYCSMVSDDIDMLHIFEKGHLDHKVRMAVANGVDPVVAIQMITINPAESLQVDGTRGSISPGKTAXIVLLSSLEQCTVESVIAKRQIVVDQRKTVFSKPPLSTRPVCWTLSI

SEQ ID NO: 39995 - DNA, 1320 bp, Unknown
  Obtained from environmental sample
  misc_feature (1)..(1320): n is a, c, g, or t
gtggacgggattttaacggcggatcccaggcaggttcaaaacgcgttcaggatcgacagcatctcttatattgaagcaattgaactgtcgcacttcggggccaaggtcatctatcctccaaccatcaggccggcgctggaaaaagggatacccatcaggataaaaaacacctttaatccctccagccccggaaccactgtcataaatgacgcggaggaaggggatttcccgatccgcggcattagttccattagcggcatcgccctggtttgcgtagaaggctccggcatggcgggggttacgggtttctccgccaggttattcggcgcgttggccaggcgggggatcaacatcattttgatctcacaaagttccagcgaatactctatctgctttgccatactgccttcagacaccgaagccgcaagcgaagccattaaagaggagtatgcccaggaaatagccacaggaaccatcgaagagccaaccatcgaaaaagatctttccattgtcgccgtggttggcgccaagatgaaaaagatatccggcatttcgggcagattttttcacgccctgggaaggaacggcattaatgtggtagctattgcccagggttcctcggaaatgaacatttccgcagtgatagcgcggcaggatgagaccaaagcccttaacgccattcacgaagctttcttcctttcgggcgttcgttcggtaaaccttttccttctgggaacaggcttaataggcgggaccctgctggatcaaatagcggcgcacaaggaaattctcgcgaaagagtacaagattaaaattaaccttgcgggcgtcggagatttcaaccggatgatcctgcggcctgaaggccttgacccaaaaacagccaaggctactttaaaagacgcagcaaaaaatgacgaaactgccgctctggatcttgccgcttttgtttcggcaatgaaagcgatgaatcttcccaatacctgtttctgcgattgtacggcaagcaacaaagtggccggcttgtatgcggagatactgcaatcttcaattcctgtggtaactcccaataaacgcgccaattccggttctctggattactataaaaccctcacgggattttccagagccaggggcattccctatctgtacgaaaccacagtctgcgccggccttccggtaatatcaaccttaagggatctttttctttccggtgacaaggtaaggcgcattgaagccgtgctttcaggaactttgagctatatcttcaacaattttgacggctcaaaatctttttccgccntgctgcgaaggcactaa

SEQ ID NO: 39996 - protein, 439 aa, Unknown
  Obtained from environmental sample
  DOMAIN (245)...(385): Homoserine dehydrogenase, NAD binding domain
  misc_feature (1)..(439): Xaa is any amino acid
MDGILTADPRQVQNAFRIDSISYIEAIELSHFGAKVIYPPTIRPALEKGIPIRIKNTFNPSSPGTTVINDAEEGDFPIRGISSISGIALVCVEGSGMAGVTGFSARLFGALARRGINIILISQSSSEYSICFAILPSDTEAASEAIKEEYAQEIATGTIEEPTIEKDLSIVAVVGAKMKKISGISGRFFHALGRNGINVVAIAQGSSEMNISAVIARQDETKALNAIHEAFFLSGVRSVNLFLLGTGLIGGTLLDQIAAHKEILAKEYKIKINLAGVGDFNRMILRPEGLDPKTAKATLKDAAKNDETAALDLAAFVSAMKAMNLPNTCFCDCTASNKVAGLYAEILQSSIPVVTPNKRANSGSLDYYKTLTGFSRARGIPYLYETTVCAGLPVISTLRDLFLSGDKVRRIEAVLSGTLSYIFNNFDGSKSFSAXLRRH

SEQ ID NO: 39997 - DNA, 861 bp, Unknown
  Obtained from environmental sample
  misc_feature (1)..(861): n is a, c, g, or t
atgaaaagtgaattcgcaaaactcgcaatctcggcaactttcgggcttgccttggcattcacacttagttgctcggacttgccagactttgaagaagcaccagcgggcagcaacagttctgtaaagagcagctcgtcttctctagacaacgacaacgatagcagcggttctgtagcaagcggttcatcttctagtcgtagcagcagttctgtaacaagcggttcatcttctagtcgcagcagcagttctgtagcaagcggttcatcttctagtcgcagcagcggttctgtagtgagcagttcgtctggcggttcgtctgctgatttgtgcgcagactttgtagatggtacgccaagacaacattacggaagaagcaaagcccaattttgtgattcccgcgatggcaaaaaatatgtttatacaaccataggttcacaaacgtggatggcggaaaatttgaactacaatgctcccggcagcttatgctacggaaagacaactagcaactgcacgacttatggcaggttatataattggacaacggctactacggcttgccctgccggttggcatttgccaaatgcagcagagtgggagactatgttatattccgtagatccaagaacttgtggtctagctctagaagactatgaaagctatgaatattgtttctacgcaggaaatgccttaaagactgagagcggttgggctgataacaatggagaagatggcaatggatatgacgaagttggcttttccgccctgcctggcggtatcggtgatagctacgataattcttttgaaggtttaggcgttgctacctattggtggggttccgaccgttgngcgctcccccgataa

SEQ ID NO: 39998 - protein, 286 aa, Unknown
  Obtained from environmental sample
  SIGNAL (1)...(19)
  misc_feature (1)..(286): Xaa is any amino acid
MKSEFAKLAISATFGLALAFTLSCSDLPDFEEAPAGSNSSVKSSSSSLDNDNDSSGSVASGSSSSRSSSSVTSGSSSSRSSSSVASGSSSSRSSGSVVSSSSGGSSADLCADFVDGTPRQHYGRSKAQFCDSRDGKKYVYTTIGSQTWMAENLNYNAPGSLCYGKTTSNCTTYGRLYNWTTATTACPAGWHLPNAAEWETMLYSVDPRTCGLALEDYESYEYCFYAGNALKTESGWADNNGEDGNGYDEVGFSALPGGIGDSYDNSFEGLGVATYWWGSDRXALPR

SEQ ID NO: 39999 - DNA, 759 bp, Unknown
  Obtained from environmental sample
  misc_feature (1)..(759): n is a, c, g, or t
ttgatatgtccgattatatggaaaaacacaatgcctcaaggcttacaggggctccgccccggctatatcggatacgaagagggcggaatgttaccgaaaaaaatcaggcgtaacccgtaccgggttgtgctgtttgatgaaatggaaaaagcccaccaggatgttttcaacctgctcctgcaggtgctggaagaaggggaattgcgcgacaacctgggtcatactgtaagcttccgcaataccgttatcataatgaccagcaacgcgggcgtcagggaaatttcccgcgaatccaggcttggcttcggatcaggttcaggtttgttaagccagagtgaaattgaatcccaggcaaccggcgaactaaagcgcctgttccccccggaattcctgaaccgtgtggacgacgtagttgttttccatcccctgagtattgagcagatagataatattctggagattgaactggccgaactgtccggccggcttgccgagcagaattacagcattgacatacagcccgatgccagggagtatcttatcaagaaaggctgggatcccaaattcggcggaaggcccctgcgccgtaccctgcagaaagaactcgaagatcccctcgcccgcctcctgatggaacatgactggccgaaaggaactgtttttacggcaaacctctgcgatgaaaagatagagcttacaggcaatataccatacacggaagaattaggaattagagacgaggaattggtttacagttaa

SEQ ID NO: 40000 - protein, 252 aa, Unknown
  Obtained from environmental sample
  DOMAIN (3)...(137): ATPase family associated with various cellular activities (AAA)
  misc_feature (1)..(252): Xaa is any amino acid
MICPIIWKNTMPQGLQGLRPGYIGYEEGGMLPKKIRRNPYRVVLFDEMEKAHQDVFNLLLQVLEEGELRDNLGHTVSFRNTVIIMTSNAGVREISRESRLGFGSGSGLLSQSEIESQATGELKRLFPPEFLNRVDDVVVFHPLSIEQIDNILEIELAELSGRLAEQNYSIDIQPDAREYLIKKGWDPKFGGRPLRRTLQKELEDPLARLLMEHDWPKGTVFTANLCDEKIELTGNIPYTEELGIRDEELVYS

SEQ ID NO: 40001 - DNA, 858 bp, Unknown
  Obtained from environmental sample
  misc_feature (1)..(858): n is a, c, g, or t
gtgtacggcgttaaagctgaaatttccgacataaagattttttacaataacgaaaaagtctgggaagaccctgcggtaaaggatgcaactccggaaacggtagtggctaaaagggttgatattacaattgcaaataaaacaacgcttcctggagacagcgaaaatgattattcggtgatgggagatgatttcccatcaggtggcgtgactgtaaccgccgatgtagtgccttggacgctttccaacaatactgttagctgggatgttacaggcaccggtcctctggtttttgatgagggagcggtgtggagaaccaatcctgcaaacgggtacggaaaaaacacagttacagctacggcggaagtgggcggcatttctggaaacgttaaattctaccttatggatcctgccgatgtgaagcctcccgaaaccgttacaatcaatactccatccctggatacccttaattacggccataacgcgaagagtaaaataacgctgaccgctcttatcactcctcctgaagcggtaactggcggcgttacatgggcgataacttcaggcgatagtggcgcaaccattgatgcggctacaggcgttgtaaaggcaaaatcagtatcatcggatactacggttacgataaccgccacatcgaaagaagatagcgcggccggaagtaaagttacatccgccccaataagcatcacagtgaaaagggatgacggcacacgggtatggacattcggtaaagagttggaaggtacgcctggtgaggttaccgctcccaccgccaccaacaacactgcaaatacaggctgggttgattcatcaagtaatacgttaatgggactgcgctga

SEQ ID NO: 40002 - protein, 285 aa, Unknown
  Obtained from environmental sample
  misc_feature (1)..(285): Xaa is any amino acid
MYGVKAEISDIKIFYNNEKVWEDPAVKDATPETVVAKRVDITIANKTTLPGDSENDYSVMGDDFPSGGVTVTADVVPWTLSNNTVSWDVTGTGPLVFDEGAVWRTNPANGYGKNTVTATAEVGGISGNVKFYLMDPADVKPPETVTINTPSLDTLNYGHNAKSKITLTALITPPEAVTGGVTWAITSGDSGATIDAATGVVKAKSVSSDTTVTITATSKEDSAAGSKVTSAPISITVKRDDGTRVWTFGKELEGTPGEVTAPTATNNTANTGWVDSSSNTLMGLR

SEQ ID NO: 40003 - DNA, 324 bp, Unknown
  Obtained from environmental sample
  misc_feature (1)..(324): n is a, c, g, or t
atggacattgaggaaaaaatcagtattctggcaggagcggcaaaatacgacgcctcctgcgcttcatcgggcagtggtactgccaaaggcagtaatggcaagggggcattgggcgaaaaaaaattcggtgtcagtcttcccgccggagtttgccacagctggactgaagacggacgctgtgtcagcctgctcaaggtgctgttttccaatgtttgccgctatgactgcgcctattgcgtcaatcgcgcttcggcggatataccgcgcagcagcttcaccgtgcaggaacttgttgggggggaccagcgaattctaccggcgtaa

SEQ ID NO: 40004 - protein, 107 aa, Unknown
  Obtained from environmental sample
  misc_feature (1)..(107): Xaa is any amino acid
MDIEEKISILAGAAKYDASCASSGSGTAKGSNGKGALGEKKFGVSLPAGVCHSWTEDGRCVSLLKVLFSNVCRYDCAYCVNRASADIPRSSFTVQELVGGDQRILPA

SEQ ID NO: 40005 - DNA, 468 bp, Unknown
  Obtained from environmental sample
  misc_feature (1)..(468): n is a, c, g, or t
ttgcgtcaatcgcgcttcggcggatataccgcgcagcagcttcaccgtgcaggaacttgttgggggggaccagcgaattctaccggcgtaatatatattgagggactgtttctctcttcggggattttcgccgatcccgacattgtaatggaaaaacttatagaaaccgcgcggaccatgcggaagcaggcgggctatggcggctatatacacttaaagataattcccggcacaggcgatcgccttatcaaagaggcgggtctttgggcggacaggctcagcgttaatattgaattacctacagaaaaaagcctggtacatcttgcgccggacaagtcagggcagtcgattctgggtgcgatgggagacttttcgaatatcaattgtgagtttgaggaagaaagcggcaacccgcgttttctccgcgggggaagatgtcaaaaccgcctttcgctatggcattcctga

SEQ ID NO: 40006 - protein, 155 aa, Unknown
  Obtained from environmental sample
  misc_feature (1)..(155): Xaa is any amino acid
MRQSRFGGYTAQQLHRAGTCWGGPANSTGVIYIEGLFLSSGIFADPDIVMEKLIETARTMRKQAGYGGYIHLKIIPGTGDRLIKEAGLWADRLSVNIELPTEKSLVHLAPDKSGQSILGAMGDFSNINCEFEEESGNPRFLRGGRCQNRLSLWHS

SEQ ID NO: 40007 - DNA, 462 bp, Unknown
  Obtained from environmental sample
  misc_feature (1)..(462): n is a, c, g, or t
gtgccttatgtcttttattccccttacggtgatacaggtttctgctgggagccttttgaccgtcataaccgcgcgacaagcagaggccggatagtagtccctatgtacccaagaaatttgttttacgcggtacttaccgctgtagccgatctgcgttggcaggtagcgaaagagaaagcttctttttactggatggaagaagggcttacaggcaactactaccagtggtttcaagcgcaaaaactaaaaggcgatattaaagaatattttatccaggattatattctgtggatgacaaaagaagcggaagggattcaaaaacttgataaagaagtacgcggaactttctggcgttatatgccatttacaagagaagtaaaagaaaaactgaaaacccgcagctttgtatatcaggaactatatcagcgcgatgttaaccgttcaatgtcggacgggtattga

SEQ ID NO: 40008 - protein, 153 aa, Unknown
  Obtained from environmental sample
  misc_feature (1)..(153): Xaa is any amino acid
MPYVFYSPYGDTGFCWEPFDRHNRATSRGRIVVPMYPRNLFYAVLTAVADLRWQVAKEKASFYWMEEGLTGNYYQWFQAQKLKGDIKEYFIQDYILWMTKEAEGIQKLDKEVRGTFWRYMPFTREVKEKLKTRSFVYQELYQRDVNRSMSDGY

SEQ ID NO: 40009 - DNA, 681 bp, Unknown
  Obtained from environmental sample
  misc_feature (1)..(681): n is a, c, g, or t
atggcaaccctttacattatcggcacgcctattggaaatttgggcgatatcagtttccgcgccgtggaaatacttaaaagcgccgatcttgtggcgtgcgaagatacgcggcgtacccttaaactcttaagccacctgggaattaaggttaaaatgctgtcctgccgctcccaaaacgaagaatttgccgcggaaaaagtgctggaagccctaaaacaggggctgaccgtggcctatgccagcgacgcgggcacccccgccctgagcgatcccggcgcggctctggcaagggcggcttccgaggccggccacgacgtgattcccgtacccgggccgtcggcttttgcggctcttttaagcgtcgccggcggcagggataaaaccgtcgtttttgaggggtttttgtcgcccaaaccgggccgcagaaagagccgtttgcgggaacttatggcgatggacgcggcctgcgttatttacgaatcccctttccgggtgctaaagctgttgggagacattgccgaaatagacagcaagcgttatatttgtatagggcgcgaaatgaccaaggttcatgaggagtatcttcgcggcacagcggcggaaattcttgagattttaggccgaaaaaaggagcagcttggcgaattttctctttatatctctggaatttattttaaatag

SEQ ID NO: 40010 - protein, 226 aa, Unknown
  Obtained from environmental sample
  DOMAIN (3)...(203): Tetrapyrrole (Corrin/Porphyrin) Methylases
  misc_feature (1)..(226): Xaa is any amino acid
MATLYIIGTPIGNLGDISFRAVEILKSADLVACEDTRRTLKLLSHLGIKVKMLSCRSQNEEFAAEKVLEALKQGLTVAYASDAGTPALSDPGAALARAASEAGHDVIPVPGPSAFAALLSVAGGRDKTVVFEGFLSPKPGRRKSRLRELMAMDAACVIYESPFRVLKLLGDIAEIDSKRYICIGREMTKVHEEYLRGTAAEILEILGRKKEQLGEFSLYISGIYFK

SEQ ID NO: 40011 - DNA, 576 bp, Unknown
  Obtained from environmental sample
  misc_feature (1)..(576): n is a, c, g, or t
atgatagagcttgcggcgttcctggggaatccagggaaagaatattcccggaaccggcataacgccggatttttactggcagaaaagccaaaaataaattctaacctcaagtggcaaaaaaaattcaacgggttttacgctgtttttgacgcgcgcgttcattttatcaaacccctgactttcatgaacctttcgggtcaatcggtatcacaggccgcttcgttttttaaaataaaaacggacgctgtcatcgtggttcatgacgagttggaattgcccctgggagttgtttcgctaaaattcggcggaggcctcggcggtcataacgggcttcgttccatgaaagcgtcgctgggcaacgcggacttctggcgcctcagaatcggcatcggcaggcccgttcctgacagcagagaagttatcgactgggtgctttcagacttcgacgccggcgaaaaagaaattctggacaaggttcttgatgccgccgccgagcttctcgtaaatgttcttgccggtaatcccgaagattttcttcccgaatgggcaaagaaaaaggttacgctggatgggtga

SEQ ID NO: 40012 - protein, 191 aa, Unknown
  Obtained from environmental sample
  DOMAIN (4)...(184): Peptidyl-tRNA hydrolase
  misc_feature (1)..(191): Xaa is any amino acid
MIELAAFLGNPGKEYSRNRHNAGFLLAEKPKINSNLKWQKKFNGFYAVFDARVHFIKPLTFMNLSGQSVSQAASFFKIKTDAVIVVHDELELPLGVVSLKFGGGLGGHNGLRSMKASLGNADFWRLRIGIGRPVPDSREVIDWVLSDFDAGEKEILDKVLDAAAELLVNVLAGNPEDFLPEWAKKKVTLDG

SEQ ID NO: 40013 - DNA, 984 bp, Unknown
  Obtained from environmental sample
  misc_feature (1)..(984): n is a, c, g, or t
atgccgcctaataggaaccaaaaccaaacgcactatgccatcgtaaaactggaggaggccgcgagaataattaaccaggcgatcaatgagcttgcatcgctgcggaagaagctggacaaattaaaaaataacaagccaaaagcacaagaagcctacgctgatctgcaacagcagattactaagctcaaaaattcgcttgatacttcaacattggctctattggagatggaattgccggacatagctggctactctgcaaagcttaaccacgctgttaaagattttgacttgatgacggctgactacagtaagctgtgcgcggcgttaacggaatttctggttaaactccccctttctgataacatggcaaaaaccaccaatgccgcaatcatcggcaggctgatggcaagcgtcaagatgggttattaccccacggagacggaacacgtaaagttaattgcaaggggcattgagttccccgatggcataaccgttaaccttctggatccctgttgtggctgcgggattgctttacggacattggcttgcgaacacgagtgcaatacctacgggatcgagcttgaccgccaccgtgcagaggaagccattgcacggcttaaccgggtaggattcggctcttacttccactcccgcataagtcaagaagcgtttcacctaatgctgctcaatccaccatatttgtcagtaatgaccgaaggcgggagcaacgcaagaagcgaaaagcggttcttgatagattgctacagacaccttatgcacggcggcataatcatttacatcattccatattacaggctgaccgctgatgtatgccgtgtgttgtgcgataacttcgaggacttaaccgtgtggaagttcatgggcggcgagtttgagaaatacaaacagatagccgtcatgggggttcggcgtaaacggcgggacggttccaaaatgcttctggatcttgcatcgctggcttga

SEQ ID NO: 40014 - protein, 327 aa, Unknown
  Obtained from environmental sample
  misc_feature (1)..(327): Xaa is any amino acid
MPPNRNQNQTHYAIVKLEEAARIINQAINELASLRKKLDKLKNNKPKAQEAYADLQQQITKLKNSLDTSTLALLEMELPDIAGYSAKLNHAVKDFDLMTADYSKLCAALTEFLVKLPLSDNMAKTTNAAIIGRLMASVKMGYYPTETEHVKLIARGIEFPDGITVNLLDPCCGCGIALRTLACEHECNTYGIELDRHRAEEAIARLNRVGFGSYFHSRISQEAFHLMLLNPPYLSVMTEGGSNARSEKRFLIDCYRHLMHGGIIIYIIPYYRLTADVCRVLCDNFEDLTVWKFMGGEFEKYKQIAVMGVRRKRRDGSKMLLDLASLA

SEQ ID NO: 40015 - DNA, 858 bp, Unknown
  Obtained from environmental sample
  misc_feature (1)..(858): n is a, c, g, or t
gtgcctgacacccaaaatatcagcggggaggcaatgacgcctgaaggcacggtaaaccgcgcagcgcttccggcgatttttaaccccgatgacctttacgccctggaagcggctttgcagataaaggacgccaatcctgaaaccaaagtgaatgtaataaccatggggcctccggctgccgcggctgtgttaaaggagtgcctgtaccggggcgcggattttaccgctctggtttccgacaggggcttcgccggcgccgatacgctcgccacttcatacgcgttgaaatgcgcgataaataaaatcggtaattatgacctggtgctatgcggacggcaggctattgacggggacaccgcgcaggtaggccctcagaccgccgagaaactgggcatcaaccagatcacctgcgtctccaaaatcgaagctatcaattcagcgaaaaaagagattaccgcgattcgttctatagaaggcggctgggagaaagtgaaggcgaaactgcccgtcctggttacgtttaacgctgagggcgaactaccccggcccgcgtccgccattaagacaatgactttcaaacggacggttcccgtttcggatgccggttccccgaatgaccccgcgggtttcgtggaaaactctgacgatggaaacaagtcagcgaaggcaatggccctgtggaatattcccgccatcaacgccgaccctctccagtgcgggcttgccggttctccgacaaaggtgaagaatatcaattccgtggtgcttactgccgcggacatcaggtacatcgacccgggcgaagccggcataacggaattgatccacggccttatcgcggatcatacttttggttaa

SEQ ID NO: 40016 - protein, 285 aa, Unknown
  Obtained from environmental sample
  DOMAIN (15)...(212): Electron transfer flavoprotein domain
  misc_feature (1)..(285): Xaa is any amino acid
MPDTQNISGEAMTPEGTVNRAALPAIFNPDDLYALEAALQIKDANPETKVNVITMGPPAAAAVLKECLYRGADFTALVSDRGFAGADTLATSYALKCAINKIGNYDLVLCGRQAIDGDTAQVGPQTAEKLGINQITCVSKIEAINSAKKEITAIRSIEGGWEKVKAKLPVLVTFNAEGELPRPASAIKTMTFKRTVPVSDAGSPNDPAGFVENSDDGNKSAKAMALWNIPAINADPLQCGLAGSPTKVKNINSVVLTAADIRYIDPGEAGITELIHGLIADHTFG

SEQ ID NO: 40017 - DNA, 1485 bp, Unknown
  Obtained from environmental sample
  misc_feature (1)..(1485): n is a, c, g, or t
atggcgaggaatactccgctttccggacagcgggggatgtgggccggatactgtggggaccacttaattccccggctcaacggttttgagattctcatggcgagttacgcgatggcccatttcaaactggacatgacgctcagggaaacgggctttcactggaataacgagcagaacggagaaaacaagcgcctgcatatctaccttaccaacacactggaagaagcgccggatcgcgtgccggaactgttcatggcccaatggctggcgcgggaagctgaagatgcgcgtaacgtaaagcgggatgttccggtgatggtggtgatgggaaatccaccttacaatgtaagtacccaaaacaagaatgactggatagacgccttgattggggagtataaaaataacctggacgaaagaaacattcagccgctttctgacgattacataaagtttatacgttatgggcagtatcttattgagaagaacacaaacggcatcctggcatatatatcgaataatagtttcattgacggattaatccatcggcaaatgcgaaaaaaactgcttgaatgttttgataagatatatatttttgacttgcatggcagttctaaaaaaagagagaccgcgccggatggcaaaagcgacgggaatgtttttgatatacagcaaggggtgagcataaatatttttataaaaacctcggaaaagactgatccggctaaagtatatcattgcgatttattcggcaaacgggaagaaaagtaccgttttcttatagaacatgaattttcatctttgaaatggcgggaactctatcccatccccccttattatttctttgtgcctaaaaattttgataaccagcttgggtatgaaaaaggattttcggtaacggaattattcaccttgtataataacgccataaaaacagacagggatacgctttttgttgatatggacagggatattcttgaaaaaaggatacagaagctgttgtcagggaaatatgatgaaaaatttatagaaaaatacaatgttaatgacagtagcagttataaacttacaaaagtaatttcaaagaaccaatttgaaaaaagtaatattaatatcattcaataccggccttttgattatcaatatatttattacaaacagggattaacaagccgtccggcgttcaatgtaataaaacatctaaaacatgataatatttcactcttaacgtgcaggcaacagagtacctttgattttcagcatgtattcatagctaaaactttttccgaagtttgtaccgtttcagcgcagggcaaagaaacaacgtatgtctttcccctctacctctaccctgaaaaagacgctttagacaaaacagaaaaccgccgcccgaatctcaatgctgaaataatcaaccaaatagcggataaaacaaccttgcgctttaccgaagaaaaaacacaagaaaacggaaccttgcccccatga

SEQ ID NO: 40018 - protein, 494 aa, Unknown
  Obtained from environmental sample
  misc_feature (1)..(494): Xaa is any amino acid
MARNTPLSGQRGMWAGYCGDHLIPRLNGFEILMASYAMAHFKLDMTLRETGFHWNNEQNGENKRLHIYLTNTLEEAPDRVPELFMAQWLAREAEDARNVKRDVPVMVVMGNPPYNVSTQNKNDWIDALIGEYKNNLDERNIQPLSDDYIKFIRYGQYLIEKNTNGILAYISNNSFIDGLIHRQMRKKLLECFDKIYIFDLHGSSKKRETAPDGKSDGNVFDIQQGVSINIFIKTSEKTDPAKVYHCDLFGKREEKYRFLIEHEFSSLKWRELYPIPPYYFFVPKNFDNQLGYEKGFSVTELFTLYNNAIKTDRDTLFVDMDRDILEKRIQKLLSGKYDEKFIEKYNVNDSSSYKLTKVISKNQFEKSNINIIQYRPFDYQYIYYKQGLTSRPAFNVIKHLKHDNISLLTCRQQSTFDFQHVFIAKTFSEVCTVSAQGKETTYVFPLYLYPEKDALDKTENRRPNLNAEIINQIADKTTLRFTEEKTQENGTLPP

SEQ ID NO: 40019 - DNA, 780 bp, Unknown
  Obtained from environmental sample
  misc_feature (1)..(780): n is a, c, g, or t
ttggggataatattccatctcagcgaacgccttgcagaatacgatctgcttgttacgcatttcggtattggtgctttcgaggccatatatgccaggcttcctgttattattgtttctcccagctcgtaccacgaaaagctaagccgcaaagccggtttcttctcactagggatcggggttggagcagccgaccgccttggaaaattggcctgtaattttggcgatacaggcaagccagacatagtaaaaacccttgaacagaaaagcaaggagatcgcggatcgctacggcctatgtgaagatcaaaaagaaaccatcgctacttttttgtgtcgcgtttctccatattcgccgctagtctgcccggtctgcaaaaaaccccgcaatgttcccgttttggctcgtttcactgaagaaagctaccgccaatgccctcactgcggaattatctaccttgcccgtcttggggagccgccgattgaatacgaaaaagattattttttcggagattacaaaaagcagtacggcaaaacttacctggaggattttcccggccttgtggaaacaggcaagcgacggctggagcatatagttaaattaatccaaagagatttaccacggagttacacggagattcacggcttagaaccgaaggtagtaagaagccaaaattttatgaaaactctgtgtaactctgtgtcctctgtggttaatattttttttcatctaactaataagtcctttcttgatagaaagaatggaagagagagaaattactga

SEQ ID NO: 40020 - protein, 259 aa, Unknown
  Obtained from environmental sample
  misc_feature (1)..(259): Xaa is any amino acid
MGIIFHLSERLAEYDLLVTHFGIGAFEAIYARLPVIIVSPSSYHEKLSRKAGFFSLGIGVGAADRLGKLACNFGDTGKPDIVKTLEQKSKEIADRYGLCEDQKETIATFLCRVSPYSPLVCPVCKKPRNVPVLARFTEESYRQCPHCGIIYLARLGEPPIEYEKDYFFGDYKKQYGKTYLEDFPGLVETGKRRLEHIVKLIQRDLPRSYTEIHGLEPKVVRSQNFMKTLCNSVSSVVNIFFHLTNKSFLDRKNGRERNY

SEQ ID NO: 40021 - DNA, 636 bp, Unknown
  Obtained from environmental sample
  misc_feature (1)..(636): n is a, c, g, or t
atgaattgtaaggtttattctaaagaaggaaaagaaatcagaacaattgaattggcggatgaggttttcggccttccggcaaacgaagctttgatctggtacgcgatcaacaacgagcttgccaacaaaaggcagggcaacgcctgcaccaagggacgcgccgaggtgcacggctccaacgccaaaccctataagcagaaaggcaccgggcgcgcgagacggggcgacaagaaatcgccggtcctggtcggcggcggcgttattttcgggcccaagccaaaggattattcctacgctattccaaaaaaggcgaagcgcaaggcgctgaaaacgattttaagccttaaagtccaaaacgacatgttaaaaattatcgaggatttttccatagaaacagggaagacaaaagacctcgccctcctgctggacaattttaatccgggaacgcggaccgtgcttgtcctgaaagacgacgaccccaaacttaaacgggccgccgccaatatcccctggctgtcctacctttcctataaccgcctgcgcgctcatgaccttttctacggacgccaggtgcttatgctggaaaccgcggcgaagaacctcaatgagttctacggttccaaggaggaagcatga

SEQ ID NO: 40022 - protein, 211 aa, Unknown
  Obtained from environmental sample
  DOMAIN (15)...(204): Ribosomal protein L4/L1 family
  misc_feature (1)..(211): Xaa is any amino acid
MNCKVYSKEGKEIRTIELADEVFGLPANEALIWYAINNELANKRQGNACTKGRAEVHGSNAKPYKQKGTGRARRGDKKSPVLVGGGVIFGPKPKDYSYAIPKKAKRKALKTILSLKVQNDMLKIIEDFSIETGKTKDLALLLDNFNPGTRTVLVLKDDDPKLKRAAANIPWLSYLSYNRLRAHDLFYGRQVLMLETAAKNLNEFYGSKEEA

SEQ ID NO: 40023 - DNA, 822 bp, Unknown
  Obtained from environmental sample
  misc_feature (1)..(822): n is a, c, g, or t
ttggcaaatatacccaacagatcatacaccgtcctttcagcggggactgcgggcgcggactggacaatttctggtgaaattattgataccgccgaaggcgcagtccggttctatacccggttgatccgcacagcagaccaggctgttgaggcaagtttccagtttgactttgagcgaaatgaacagatagtagcgttgcttgcttcggggagcagccagggcggccgttcatcatcatcagtcgcgccggatgccctggagcccgacagttttgatcatcccgtatcctatgaaatcggcgctgacgctaacgcgcaggttgtaaatcgtaccctgcacagcggggacgaagactttttccttctcctccctgccaatgacgggcagcttacaatggaaacaacgggcgacactgacacctacatggaattttacaatgcagagacacaggagaaactgggacaaaacgacgacggaggcagcggcagcaacgcgcggatcagatacaacgtacaggcgggaaaacgctatatcgcgaaagtaagaggctatgacagaagcaccgggtcttacggtttccgcgcatggatgaccatacggacgtcttccaacggttttaataaccccttgtcttatgaaataggctcagacgaaaatgccccggtcatgaaccgcactcttgacaatgacagcgaagactatttcctcctccttccggccaatgacggacagcttacaatggaaacaacgggcagcactgacacctacatggaattttacaatgccgagacacgggaaaaactggggcaaaacgacgactga

SEQ ID NO: 40024 - protein, 273 aa, Unknown
  Obtained from environmental sample
  DOMAIN (115)...(195): Bacterial pre-peptidase C-terminal domain
  misc_feature (1)..(273): Xaa is any amino acid
MANIPNRSYTVLSAGTAGADWTISGEIIDTAEGAVRFYTRLIRTADQAVEASFQFDFERNEQIVALLASGSSQGGRSSSSVAPDALEPDSFDHPVSYEIGADANAQVVNRTLHSGDEDFFLLLPANDGQLTMETTGDTDTYMEFYNAETQEKLGQNDDGGSGSNARIRYNVQAGKRYIAKVRGYDRSTGSYGFRAWMTIRTSSNGFNNPLSYEIGSDENAPVMNRTLDNDSEDYFLLLPANDGQLTMETTGSTDTYMEFYNAETREKLGQNDD

SEQ ID NO: 40025 - DNA, 1134 bp, Unknown
  Obtained from environmental sample
  misc_feature (1)..(1134): n is a, c, g, or t
ttggaggcgatacgtcagacctttctcgaaaaatcccggcggaactgcctattcatacacgtgacgcttgtcccgtatctcaaatgctccggcgagcacaagtcgaagccgacgcagcactcggtgaaggagctgcgggcgatgggtatttccccggacgtgatcatagcccgcgccgacgaaccgctcagcaagggcatcaaggataaaatagcgctcttctgcaacgtcaagcccgactgcgtcatagagaacatgaccctgccgacgctctacgaggcgccgctcatgctccataggaacgggctcgacggcgtggtgtgccgggggctttcgctcgacgtccccgaaccggatttgagggagtggcagtcgatgacgggcaggatcggttcgcgggagcgggcggtgaacatcgcaatcgtgggcaagtacataaaactgcgcgacgcttacctctccgtgatagagagtttgaaccacgccgggttcgagaccgccgcgaacgtcaatatcaaatggatagacagcgagaaccagataggccaaaacgcggccgacgcgctcggcgggattgacgggatgataatccccggcggtttcggcgacaggggcatagaggggaagatcgccgcctgccgctacgcgagggagaacgacgtcccgtatttaggcatctgtttagggatgcaggtcgcggtcatagagtacgccagaaacgtgtgcggtctggagggcgcgaattcgagcgaattcgacgtttcgccgcacccggtgatagattttatgtccggtcagacgggcaagatggggagcggcggcacgatgcgtcttggggcgtacccgtgcaagatcgcgccggattcgctaatgagcaagctttatggcgagggcgagatcagcgagcgccaccgccatcgctttgaggtcaacgacagctaccgcgaggtgttgcggcgaaacggtctcgcgatctgcgggacgtcgccggacgactccctcgtggaggcggtagagctgccgaacaggcgcttcttcataggcgtccagttccacccggagttcaagagccgtccaaacaagccgcacccgctcttcttgggtctgctgaaagcggcgcttcgggagtcttga

SEQ ID NO: 40026 - protein, 377 aa, Unknown
  Obtained from environmental sample
  DOMAIN (139)...(354): Peptidase C26
  misc_feature (1)..(377): Xaa is any amino acid
MEAIRQTFLEKSRRNCLFIHVTLVPYLKCSGEHKSKPTQHSVKELRAMGISPDVIIARADEPLSKGIKDKIALFCNVKPDCVIENMTLPTLYEAPLMLHRNGLDGVVCRGLSLDVPEPDLREWQSMTGRIGSRERAVNIAIVGKYIKLRDAYLSVIESLNHAGFETAANVNIKWIDSENQIGQNAADALGGIDGMIIPGGFGDRGIEGKIAACRYARENDVPYLGICLGMQVAVIEYARNVCGLEGANSSEFDVSPHPVIDFMSGQTGKMGSGGTMRLGAYPCKIAPDSLMSKLYGEGEISERHRHRFEVNDSYREVLRRNGLAICGTSPDDSLVEAVELPNRRFFIGVQFHPEFKSRPNKPHPLFLGLLKAALRES

SEQ ID NO: 40027 - DNA, 1023 bp, Unknown
  Obtained from environmental sample
  misc_feature (1)..(1023): n is a, c, g, or t
atggcatttgtaaaagcggaacgtacccagctttatttaaggtgtgcgttattcgggccaagcggaagcggcaagacaatgaccgccctgcggatggcgaaggggatagccgaaaagatgggcgttcctgtcgccgttatcgacaccgaggcacggtcggcttccaaatatgccgacaggtttgcttttgaagttgataacttaaaagagaaaaccatcgaccattaccttgcttcaatggaagaagcggcgaaagcgggctacaaggttttggtcattgattcgctctcccacgcatggcgcgaactgacggaggaagtagaccgtatcagtctcaaaagcagcagcagaaacacttttacgccctgggcccaagtcagcccgaaacagaaacggtttatcaacgctatcttgaattatccgggccatattatcgcaacaatgagaagtaaaacagagtgggttatcggggcgaacaaagacggtaaaaccgtgcctgagaaaatcggtcttgcccctgagcaggggaaaggaattgaatttgagtttgatttgttgatagagatgaatcaggctcacaacgcgactgtaacaaaagacagaacaggcaagtatcaggatgcggttattgagaaacctgatgaagatttcggtattgcgctttatgaatggcttgcgagtggcaaagcggtaatacctgcggcaccggtaaaaacagcaaaacctgcggtaaaaaatactttaaaatccgaaaaagttaaagccgcgccttcgataccgcaaacagggaaacagactgtagcaaccaaagtactgtcctttagagagcagggcagtcaattaatgaaggaaatcggggctataatcacctccgccaatcacggcgaaccgttctttacagaagaagaaaaggaaggtgcgcgccaaattatcaaagaaatcaagccggatgaaaaaggtatttcgactgagagaattcaaaactttctgtcagacgagcttctcggccgatctgatcattga

SEQ ID NO: 40028 - protein, 340 aa, Unknown
  Obtained from environmental sample
  misc_feature (1)..(340): Xaa is any amino acid
MAFVKAERTQLYLRCALFGPSGSGKTMTALRMAKGIAEKMGVPVAVIDTEARSASKYADRFAFEVDNLKEKTIDHYLASMEEAAKAGYKVLVIDSLSHAWRELTEEVDRISLKSSSRNTFTPWAQVSPKQKRFINAILNYPGHIIATMRSKTEWVIGANKDGKTVPEKIGLAPEQGKGIEFEFDLLIEMNQAHNATVTKDRTGKYQDAVIEKPDEDFGIALYEWLASGKAVIPAAPVKTAKPAVKNTLKSEKVKAAPSIPQTGKQTVATKVLSFREQGSQLMKEIGAIITSANHGEPFFTEEEKEGARQIIKEIKPDEKGISTERIQNFLSDELLGRSDH

SEQ ID NO: 40029 - DNA, 495 bp, Unknown
  Obtained from environmental sample
  misc_feature (1)..(495): n is a, c, g, or t
atgacagaatggccgagatctttcgcgcttccgccgaccctgaacgtgccgttgttatacactccgccgccgttacccccagccctgttgccgcttatgtcgccgccatacatgctgaatgtgccgtctgaaacatacacgccgccgccgttgttgttggttccatttgccgtattgccgcttattgttccgctatccatgatgaacccgccgccggaaacactaactccggctcctgaacctgttatggtatggttctttatctcgccgccgttcatggtgaatgtttcgccagttaaactcacaccgccgcctgaattaccgcttatctccccgccgctcatggtaaatgcacatctaacagtcacaccacggcctgaattaccgcttatctcaccgccgctcatggtgaatataccgttactaagggtactaaaagacaccccgcctgaattaccgcttatctcgccgccattcatggcgaatgtaatataa

SEQ ID NO: 40030 - protein, 164 aa, Unknown
  Obtained from environmental sample
  misc_feature (1)..(164): Xaa is any amino acid
MTEWPRSFALPPTLNVPLLYTPPPLPPALLPLMSPPYMLNVPSETYTPPPLLLVPFAVLPLIVPLSMMNPPPETLTPAPEPVMVWFFISPPFMVNVSPVKLTPPPELPLISPPLMVNAHLTVTPRPELPLISPPLMVNIPLLRVLKDTPPELPLISPPFMANVI

SEQ ID NO: 40031 - DNA, 1023 bp, Unknown
  Obtained from environmental sample
  misc_feature (1)..(1023): n is a, c, g, or t
atgttaacaatccctccaaaacgaccagttcgcttttttaacactacaggcccctgttttccctgggatcattatatgctgccgcctgcggatcgccttgttggcgcgcaactggccaggtacataagggacaaactttactgggtgcttcacgcgccacggcagacaggaaagactacgtttctgcaaaattgggcccgcgagataaactcccgtgacgaagcggttgcttgttatgtgagcattgaacgctgccagaaattacctgaacctgaacgctgtatgcntgaattatgcaaagcaattcaggaatacgcaggattttcaaatttgcctgttcccgaattaaggacaaatgcgccgaacagtatgctgagcgatgttttgatacatttctcggcccttgccgctccaaagccgcttgtacttttatttgatgaaaccgatgccctggaaggggatgcgatgatcagcttcttgcgtcaactgcgcggcgggtttatggagcgcggtattgggaaatttccggtatccatcgcgcttgtaggcatgagggatttgaaggactatataaccgccgctaaagacggtgttccgccaagcccgttgtctccgttcaatataaaagaggactccgcaaggattggcaacttgagcagaaatgacatagggcggctttttgcccagaggaccgaagaaacagggcaaaacatcaccgaagaagccctgaattatacatgggatcagtctcgtggtcagccatggattgtaaattctcttttcaaaaaggctaccatgtgtattcttgatgaagagagtcatgaaaccgtaacacgtgaacatatcgttgaagcccgtgaacagatgatccttgcccgggaaacgcacctggattctcttgctgtcagaatacaggaaccggctattcgtaaagtgatggaaaaccttataacaggaacaccagaccctgaacttactgcaagcgaaggttttcgtatttgtatagatttagggcttgaataa

SEQ ID NO: 40032 - protein, 340 aa, Unknown
  Obtained from environmental sample
  misc_feature (1)..(340): Xaa is any amino acid
MLTIPPKRPVRFFNTTGPCFPWDHYMLPPADRLVGAQLARYIRDKLYWVLHAPRQTGKTTFLQNWAREINSRDEAVACYVSIERCQKLPEPERCMXELCKAIQEYAGFSNLPVPELRTNAPNSMLSDVLIHFSALAAPKPLVLLFDETDALEGDAMISFLRQLRGGFMERGIGKFPVSIALVGMRDLKDYITAAKDGVPPSPLSPFNIKEDSARIGNLSRNDIGRLFAQRTEETGQNITEEALNYTWDQSRGQPWIVNSLFKKATMCILDEESHETVTREHIVEAREQMILARETHLDSLAVRIQEPAIRKVMENLITGTPDPELTASEGFRICIDLGLE

SEQ ID NO: 40033 - DNA, 450 bp, Unknown
  Obtained from environmental sample
  misc_feature (1)..(450): n is a, c, g, or t
ttggagagaaaaccgcatttggcaaaatataaaaaaagtgaatttttcaatgtttattacgaagaaatatttaaagatttaaatgcgtctcaaatgataattgccgttattatttttcgtatgtgtgatactaatcgaaaaaaatattcttacgatcaagatattcaatcacaacgccgttacagtcattacctcattgcagctattattggaaaaaatattttaaatcatttttcaaaagatattcggcagataacgcatatcaatttcaatgaaataaaaaattattttgaagttaatagagaagttctttatgataatgcagagcagtatttattaaaacatctaaaacatttttttggcgaagactcattagaagatattgatggtcggagtatggctgcagtttttcgtagatttgattttgttgaaaatgttctaaaaatatag

SEQ ID NO: 40034 - protein, 149 aa, Unknown
  Obtained from environmental sample
  misc_feature (1)..(149): Xaa is any amino acid
MERKPHLAKYKKSEFFNVYYEEIFKDLNASQMIIAVIIFRMCDTNRKKYSYDQDIQSQRRYSHYLIAAIIGKNILNHFSKDIRQITHINFNEIKNYFEVNREVLYDNAEQYLLKHLKHFFGEDSLEDIDGRSMAAVFRRFDFVENVLKI

SEQ ID NO: 40035 - DNA, 1272 bp, Unknown
  Obtained from environmental sample
  misc_feature (1)..(1272): n is a, c, g, or t
gtgtttcccgctacaaccgaagagacagccgcggtcgtaaaactcgccaaccgcgaacgcgtgcccattaccccaagaggcgcgggttcgggcctttcaggcggagccatccccgaatacggaggcatcgtcgtttcccttgaaaggatgaaccgcctcatcgaaattgaccgggacaatatggccgccgtggtggaagcaggcatggttacaaacgatttcgccaaggcggtcgaggcgcagggccttttcttcgccggctaccctatgagtcttcagacctgcgtcataggcggcaacatcgccgaaaacgccggcggcggcaaggcggtaaaatacggggttaccgggcgctatgtcctgggcctgaccctggttactccgttaggcgaaattgtagaacttggcggcaagcttgcgaaggatgtttcaggctacgaccttaaatcccttgttgtaggctcagagggtactctgggcatcgtgacccgcgccataatccggcttataggttacccctcgtcaaagtcggatctccttgcgcttttcaggactccaaaagacgccatcgacctggtgcctgaaattctctgccggggagttacgcctacaagcatcgaattcatggacagcctttcagtacagacgagctgncagtacctcaacgaaactctcccctacgaaaattgcggggccatgctgctcatagagcttgacggttccgatcctaaccaggttgagactgacctcattgaaacaggcaaactctgcgaaagccggggcgctttggaagtgtatgtcgccgaagatcggaacaacatcgagcgtatttggaacgttaggcgaaacatcgccgaggcttttaaggtattcagtcccgttcaaagtctggaagacatcgtggtaccggtttcccgaatccccgccatcattccggagctagaacgcctgggggaaaaatacaacatgcagattccctgctacggccatgccggagacggcaacctccacgcaacgcttgtcaaagaccctgacatgagcatggatgactggaagaaaaacgaaaaagcctgccagggggaactctacgcgatcaccaaagaagccggagggaaaatttccggggagcacggcataggaatcaagcgccgggaattctttaaggatctggttgcccctggcgaactggaactgatgaaggcgttaaaacgggcctgggatcccaacaacatcatgaatcccgggaagatatttaaaattgatgcgcgctaa

SEQ ID NO: 40036 - protein, 423 aa, Unknown
  Obtained from environmental sample
  DOMAIN (1)...(136): FAD binding domain
  misc_feature (1)..(423): Xaa is any amino acid
MFPATTEETAAVVKLANRERVPITPRGAGSGLSGGAIPEYGGIVVSLERMNRLIEIDRDNMAAVVEAGMVTNDFAKAVEAQGLFFAGYPMSLQTCVIGGNIAENAGGGKAVKYGVTGRYVLGLTLVTPLGEIVELGGKLAKDVSGYDLKSLVVGSEGTLGIVTRAIIRLIGYPSSKSDLLALFRTPKDAIDLVPEILCRGVTPTSIEFMDSLSVQTSXQYLNETLPYENCGAMLLIELDGSDPNQVETDLIETGKLCESRGALEVYVAEDRNNIERIWNVRRNIAEAFKVFSPVQSLEDIVVPVSRIPAIIPELERLGEKYNMQIPCYGHAGDGNLHATLVKDPDMSMDDWKKNEKACQGELYAITKEAGGKISGEHGIGIKRREFFKDLVAPGELELMKALKRAWDPNNIMNPGKIFKIDAR

SEQ ID NO: 40037 - DNA, 675 bp, Unknown
  Obtained from environmental sample
  misc_feature (1)..(675): n is a, c, g, or t
ttggatattctttctcattatataaataaatcggtcagcttaaaattccgcggcgttgttttttcattcgatttatcacacggcctgttcagttccgccggagttgacgcggggacgcaattattattaaaggttttttcacgaattctggatgaggatgttgcggcgacaaggccgcttccacgggcggtacttgacgcgggctgcggtacgggcgttatcgggatatgcgcggcagcggcaatcaaagcgctggcgggagaggagggattgtacgtgcgctgtcaggacagggacgaactcgcccggcttgtaacatcgcataacgttgctaaaaacaatatctcccaaggtatgcttgaagcctgtaccgagccgctgcttgccgcagcggcaaacgaaaagtgggatctgatactgacaaacattcccgcaaaagccggaaaccccgtgctggaagattttgtcaggcgttcaggttttttgttgaatcccggaggccgcgttctcatggttgcggttaacacgctggcggacttttttcaaggaggctattgccgcatccggcgcgcagttgctttcagaggaaaaaggtccgggccataccgtttttgtatacaggggagaagccggaagttcagcactccctgtcaacttggacactggctttcttga

SEQ ID NO: 40038 - protein, 224 aa, Unknown
  Obtained from environmental sample
  DOMAIN (20)...(189): Methyltransferase small domain
  misc_feature (1)..(224): Xaa is any amino acid
MDILSHYINKSVSLKFRGVVFSFDLSHGLFSSAGVDAGTQLLLKVFSRILDEDVAATRPLPRAVLDAGCGTGVIGICAAAAIKALAGEEGLYVRCQDRDELARLVTSHNVAKNNISQGMLEACTEPLLAAAANEKWDLILTNIPAKAGNPVLEDFVRRSGFLLNPGGRVLMVAVNTLADFFQGGYCRIRRAVAFRGKRSGPYRFCIQGRSRKFSTPCQLGHWLS

SEQ ID NO: 40039 - DNA, 555 bp, Unknown
  Obtained from environmental sample
  misc_feature (1)..(555): n is a, c, g, or t
ttgggcgatttcttagaccaatcgcaggtttccggtgcgcttaggcacgcaaacgaacagcttgcaaaaataaaatctccattcgaaattgtggcggtagcaggtggttatcgctttagaacaaaaaacgcatattatccctatatccgcaaacttttcccagaaaacaatgcccgaagattatctgctgccgctttggaaactcttgccattgtagcctacaaacaacccataacaaaagctggcatagaggcggttcgcggcgtttcttgcgatggtcctttacacagccttttggataaaaaattcatagctttaggggaacgtgcatattcagttggcaacccatatacgtatataaccacaacggaatttttaaaatatttcggcataaaccgtattcccgacgacctgccccgcttaacggaattcagcgatatattgaacagcgattttttaattccgcaatatccattgcaaaggcaaagcgaaccggaacccattcactctcaggaatcaacggaacagttggaaattcctttggagagcgattag

SEQ ID NO: 40040 - protein, 184 aa, Unknown
  Obtained from environmental sample
  DOMAIN (2)...(141): Putative transcriptional regulators (Ypuh-like)
  misc_feature (1)..(184): Xaa is any amino acid
MGDFLDQSQVSGALRHANEQLAKIKSPFEIVAVAGGYRFRTKNAYYPYIRKLFPENNARRLSAAALETLAIVAYKQPITKAGIEAVRGVSCDGPLHSLLDKKFIALGERAYSVGNPYTYITTTEFLKYFGINRIPDDLPRLTEFSDILNSDFLIPQYPLQRQSEPEPIHSQESTEQLEIPLESD

SEQ ID NO: 40041 - DNA, 339 bp, Unknown
  Obtained from environmental sample
  misc_feature (1)..(339): n is a, c, g, or t
gtgcgagacggtcaaaacctgttttgcaaagtttcggttcccgtttatcgtttggctttgggtggagagcagagagttccaactttatacggcgaagtaaaagtaaaaatctccgcaggcctccaacccggaactcagctaagagttaggggtcaaggtttgccaggatacaattccgattacaaaggcgatctttttgtgcaaattgaggcacacattcccgaaaacttgtggtcaaaagagaaatccctttacgatgaattgagcaaattgggttcagatagagatgaacgcagggaaagcgggttgctggataggataaaggagttttttagttag

SEQ ID NO: 40042 - protein, 112 aa, Unknown
  Obtained from environmental sample
  DOMAIN (2)...(89): DnaJ C terminal region
  misc_feature (1)..(112): Xaa is any amino acid
MRDGQNLFCKVSVPVYRLALGGEQRVPTLYGEVKVKISAGLQPGTQLRVRGQGLPGYNSDYKGDLFVQIEAHIPENLWSKEKSLYDELSKLGSDRDERRESGLLDRIKEFFS

SEQ ID NO: 40043 - DNA, 312 bp, Unknown
  Obtained from environmental sample
  misc_feature (1)..(312): n is a, c, g, or t
gtgataggtgtaataaattacggcgcgggaaatctcggctcggtgatgaatgccttaaaacgactttcagccccggcgcgttttgtctgtggcgtggacgagcttgctctgggaacaacgccctttgacaggatcatctttcccggcgacggccattttgcgtccgcaatggcttctcttgtaaaatccggttatgatcaggcgatcagggaatggatacaggctgacaggccttttctgggaatatgcataggtctgcaattgcttttcgagtcgtctgatgaagctccgcctgtagacggcgtgaagtga

SEQ ID NO: 40044 - protein, 103 aa, Unknown
  Obtained from environmental sample
  misc_feature (1)..(103): Xaa is any amino acid
MIGVINYGAGNLGSVMNALKRLSAPARFVCGVDELALGTTPFDRIIFPGDGHFASAMASLVKSGYDQAIREWIQADRPFLGICIGLQLLFESSDEAPPVDGVK

SEQ ID NO: 40045 - DNA, 582 bp, Unknown
  Obtained from environmental sample
  misc_feature (1)..(582): n is a, c, g, or t
ttgacggaaaagggaatgcgaatcttgtttcccgatagggttatgtctcatatgctgaatacatttgcgcgtcacgggctttttgatctggaaattgtcgcaaagggcgatcttgaagttgaccagcaccatctggtggaggatacgggaatcgttttgggccagtgtttcgcgaaagccttaggtgaaaaaagggggatacggcggaacgggagctgccattatcccatggacgagacccttgcccgcgcggcggttgatatttcaggacgcagttttttattttttgacggaaagcttggcgctgcgcccttaatcgccgccgatgataaagacaagccttcccagttccagaccgataccattgaggatttttggcagggctttacaggcgcggcgggctgtaatctgcatctggaaatcatccggggcaggagcgaccaccacaagattgaagccatgtttaaggcagcagcccgggctttgcgctgtgcctgcgaacttgacgagcgcgcgcgtgatgcaatcccctcgacaaaaggctcattgccgcgatttgacgcgccgggggtgcttgtgtga

SEQ ID NO: 40046 - protein, 193 aa, Unknown
  Obtained from environmental sample
  DOMAIN (17)...(163): Imidazoleglycerol-phosphate dehydratase
  misc_feature (1)..(193): Xaa is any amino acid
MTEKGMRILFPDRVMSHMLNTFARHGLFDLEIVAKGDLEVDQHHLVEDTGIVLGQCFAKALGEKRGIRRNGSCHYPMDETLARAAVDISGRSFLFFDGKLGAAPLIAADDKDKPSQFQTDTIEDFWQGFTGAAGCNLHLEIIRGRSDHHKIEAMFKAAARALRCACELDERARDAIPSTKGSLPRFDAPGVLV

SEQ ID NO: 40047 - DNA, 708 bp, Unknown
  Obtained from environmental sample
  misc_feature (1)..(708): n is a, c, g, or t
atgaagccccaaaacgtgggggagcttcttgaacttggcagccatgatgcgggttttaccggcatagactggataaaggaaagcggagcggatgttgaggaaatactcgatcttggttttgacaaggttcgcattgtcgccgcagttccgcaggattacgatgagacaaaactgcgctcaaaaaaacttgtagtagcaaccgaatatgtaaaccttgcggaaacgtggctcaaatcctccggctatgagtaccgtattctgcgcacttacggagcgacggaagttttcccgccggacgacgctgatatgattatcgacaacacttcttcaggccagacacttcgagacaacgggcttaaaattatcggaacgatacttgaatcttccacacgttttgcggcatcgcattccgcccttgccgatcccgaaaaacgccgccgtattgaagagcttgctatgcttttccgcgccgttcttgacgggcacgagcgtgtaatgcttgaaatgaacattcccaaagaacagtttgaatcgcttgcgagccttccggcgatgcgaagcccgacagtcgctccgctttacggagacgcgggctacgctgtaaaaatcgccgtcaaaaaacacgaagtccccgatattattccaaagttaaaaaacctcggcgctctggatattgtcgaatacgatttgcggaaagtggtgctgtga

SEQ ID NO: 40048 - protein, 235 aa, Unknown
  Obtained from environmental sample
  DOMAIN (160)...(233): HisG, C-terminal domain
  misc_feature (1)..(235): Xaa is any amino acid
MKPQNVGELLELGSHDAGFTGIDWIKESGADVEEILDLGFDKVRIVAAVPQDYDETKLRSKKLVVATEYVNLAETWLKSSGYEYRILRTYGATEVFPPDDADMIIDNTSSGQTLRDNGLKIIGTILESSTRFAASHSALADPEKRRRIEELAMLFRAVLDGHERVMLEMNIPKEQFESLASLPAMRSPTVAPLYGDAGYAVKIAVKKHEVPDIIPKLKNLGALDIVEYDLRKVVL

SEQ ID NO: 40049 - DNA, 318 bp, Unknown
  Obtained from environmental sample
  misc_feature (1)..(318): n is a, c, g, or t
ttgttccaccagctccgccagcttcttcttgtccttcatgccctgcatccgcctgccgtaagcaacgttgtcaaagacgctcatgttaaaggggttcggtttttgaaacaccatgccaacccgcgtccgcagttcgcttacgtcgatgtcgccgtaaatgttttcgccgtccagaatcacctctccggtaatacggcaggaagggatgagatcgttcatcctgtttatgactctgatgaaggtcgatttcccgcagccggacggaccgatgagagccgccgcttcgttgttgcctatatcaaaattaatatttattag

SEQ ID NO: 40050 - protein, 105 aa, Unknown
  Obtained from environmental sample
  misc_feature (1)..(105): Xaa is any amino acid
MFHQLRQLLLVLHALHPPAVSNVVKDAHVKGVRFLKHHANPRPQFAYVDVAVNVFAVQNHLSGNTAGRDEIVHPVYDSDEGRFPAAGRTDESRRFVVAYIKINIY

SEQ ID NO: 40051 - DNA, 300 bp, Unknown
  Obtained from environmental sample
  misc_feature (1)..(300): n is a, c, g, or t
atggaatgtgtgacaattatgatactgaaatcccgttttagttcgccgataagctcctcgattcttcctgtggcgatgggatccagcgcgctggtcggttcgtccattaggatgatctccggtgccatggagatgcttcgcgctatgcagagcctttgctgttggccgcctgaaaggctgtgcgctggtcttntcaggcgatcctttacctcatcccacagcgccgcttttatcagtgattgttccaccagctccgccagcttcttcttgtccttcatgccctgcatccgcctgccgtaa

SEQ ID NO: 40052 - protein, 99 aa, Unknown
  Obtained from environmental sample
  misc_feature (1)..(99): Xaa is any amino acid
MECVTIMILKSRFSSPISSSILPVAMGSSALVGSSIRMISGAMEMLRAMQSLCCWPPERLCAGLXRRSFTSSHSAAFISDCSTSSASFFLSFMPCIRLP

SEQ ID NO: 40053 - DNA, 357 bp, Unknown
  Obtained from environmental sample
  misc_feature (1)..(357): n is a, c, g, or t
ttgtcgacaattacggacataccggccacttacgcgagcatgattaacattgacaataccaatcctgaaattgcccttgacagccccgccgacggttctctttcaataggaaggctctcccttatggggcgcgttattgacgcgaatcttgacaatgtaaatatagaaatccgcagccttgaaggcgcaaccgtaaccccgaccgtaaggacgcgcaaactcggcgccacagataccataaagcaggattatgaacttaccggaatgaaggacggcctttataacatagaaatcgtgtctacggacaaggccggcaacctttcgcgtaattcgcgtaacttcgcgcttgcccgataa

SEQ ID NO: 40054 - protein, 118 aa, Unknown
  Obtained from environmental sample
  misc_feature (1)..(118): Xaa is any amino acid
MSTITDIPATYASMINIDNTNPEIALDSPADGSLSIGRLSLMGRVIDANLDNVNIEIRSLEGATVTPTVRTRKLGATDTIKQDYELTGMKDGLYNIEIVSTDKAGNLSRNSRNFALAR

SEQ ID NO: 40055 - DNA, 930 bp, Unknown
  Obtained from environmental sample
  misc_feature (1)..(930): n is a, c, g, or t
atgatagggcgattaacgacgccggaccggatcaatatcgaatttacggtttataaggacacaatcgcgccggattcgtttctgattatgcctatggccgaatcaaaagttaacggtactatgctccttggtttctcaataaaagaagccggcgcgctgaaaaccgtaacttacaacaggccctcctcggcaggcgttcaggcgttaaccgtggaagtttttaacgctaactcatgggacaaagaatacgcccccgtatttttgccggtcatgatggatcagagtaaaaacctctttattgacggccgtatgcggtttatctttgaggacaaggcgggcaacagaagcgaaataaactcatgggaatttgtacttgatcaggaatatgacattcctgtcgtgcagattgtccttccgcaggataacgaagtaatcacaacgaattttatcgcgtccggcgttatgttcgacgatgacggaataaaaaatattaaatggaaactggataacggaacggaacagcaaattgacgcgaaatacggattctccatcccgataccgatttcctcccttactgataatgaccattcagtaaccgttacggcggaagacatctacggagtaaagagcgcgcctgttacgcgcaaattcagggtatcgctcgcagaacctacggcgcaggtaaccttcccgaaatttgacacagtattaaaggacgtaattcaaataaccgggacggcggccgacaagaacggcataaaagaaatatttgtttccgcggataacgccaatacatacaacagggcgcagggaacagaaagctggtcttacaggtttaattcaagaatcctgaaagacggcccccatgtagtgtttatccgcgttgtcgacaattacggacataccggccacttacgcgagcatgattaa

SEQ ID NO: 40056 - protein, 309 aa, Unknown
  Obtained from environmental sample
  misc_feature (1)..(309): Xaa is any amino acid
MIGRLTTPDRINIEFTVYKDTIAPDSFLIMPMAESKVNGTMLLGFSIKEAGALKTVTYNRPSSAGVQALTVEVFNANSWDKEYAPVFLPVMMDQSKNLFIDGRMRFIFEDKAGNRSEINSWEFVLDQEYDIPVVQIVLPQDNEVITTNFIASGVMFDDDGIKNIKWKLDNGTEQQIDAKYGFSIPIPISSLTDNDHSVTVTAEDIYGVKSAPVTRKFRVSLAEPTAQVTFPKFDTVLKDVIQITGTAADKNGIKEIFVSADNANTYNRAQGTESWSYRFNSRILKDGPHVVFIRVVDNYGHTGHLREHD

SEQ ID NO: 40057 - DNA, 1230 bp, Unknown
  Obtained from environmental sample
  misc_feature (1)..(1230): n is a, c, g, or t
gtgacaagcattgatgacgtaccgagcaccggcacggtcggcacgcctgtcacgctttccggcacgatcgatcctccgaacgcgacgaaacagacaatcgtatggacattgggcacgggttcgaccgcccccggagccgcagtttcaggaggttctgcgacagcgaccggagctggaaccgtagtagtcaccgcgacgataacggacggaactgcggtgggcacggatttcacggatgattttacaataacgttcagcgcattcgttcccgtgacaagcattgatgacgtaccgagcaccggcacggtcggcacgcctgtcacgctttccggcacgatcgatcctccgaacgcgacgaaacagacaatcgtatggacattgggcacgggttcgaccgcccccggagccgcagtttcaggaggttctgcgacagcgaccggagctggaaccgtagtagtcaccgcgacaatagaagacggaactgcggtgggcacggatttcacggatgattttacaataacgttcagcgcattcgttcccgtgacaagcattgatgacgtaccgagcaccggcacggtcggcacacctgtcacgctttccggcacgatcgatcctccgaacgcgacgaaacagacaatcgtatggacattgggcaccggttcgaccgcccccggagccgcagtttcaggaggttctgcgacagcgaccggagctggaaccgtagtagtcaccgcgacgataacggacggaactgcggtgggcacggatttcacggatgattttacgataacgttcagcgcgtcgtcgttcgtagcagtgacaagcatagatgacgtaccaagcaccggcacggtcggcatacctgtcacgctttccggcacgatcgatcctccgaacgcaacgaaacagacaatcgtatggacattgggcaccggttcgaccgcccccggagccgcagtttcaggaggtgtcgcgagcgcgaccggagttggaaccgttgtagttacggcgacaatagaagacggaactgcggtgggcacggatttcacggatgattttacaataacgttcagcgcattcgttcccgtgacaagcattgatgacgtaccgagcaccggcacggtcggcacgcctgtcacgctttccggcacgatcgatcctccgaacgcgacgaaacagacaatcgtatggacattgggcaccggtcgaccgcccccgagcccgcgataa

SEQ ID NO: 40058 - protein, 409 aa, Unknown
  Obtained from environmental sample
  misc_feature (1)..(409): Xaa is any amino acid
MTSIDDVPSTGTVGTPVTLSGTIDPPNATKQTIVWTLGTGSTAPGAAVSGGSATATGAGTVVVTATITDGTAVGTDFTDDFTITFSAFVPVTSIDDVPSTGTVGTPVTLSGTIDPPNATKQTIVWTLGTGSTAPGAAVSGGSATATGAGTVVVTATIEDGTAVGTDFTDDFTITFSAFVPVTSIDDVPSTGTVGTPVTLSGTIDPPNATKQTIVWTLGTGSTAPGAAVSGGSATATGAGTVVVTATITDGTAVGTDFTDDFTITFSASSFVAVTSIDDVPSTGTVGIPVTLSGTIDPPNATKQTIVWTLGTGSTAPGAAVSGGVASATGVGTVVVTATIEDGTAVGTDFTDDFTITFSAFVPVTSIDDVPSTGTVGTPVTLSGTIDPPNATKQTIVWTLGTGRPPPSPR

SEQ ID NO: 40059 - DNA, 1230 bp, Unknown
  Obtained from environmental sample
  misc_feature (1)..(1230): n is a, c, g, or t
gtgcccaatgtccatacgattgtctgtttcgtcgcgttcggaggatcgatcgtgccggaaagcgtgacaggcgtgccgaccgtgccggtgctcggtacgtcatcaatgcttgtcacgggaacgaatgcgctgaacgttattgtaaaatcatccgtgaaatccgtgcccaccgcagttccgtcttctattgtcgccgtaactacaacggttccaactccggtcgcgctcgcgacacctcctgaaactgcggctccgggggcggtcgaaccggtgcccaatgtccatacgattgtctgtttcgttgcgttcggaggatcgatcgtgccggaaagcgtgacaggtatgccgaccgtgccggtgcttggtacgtcatctatgcttgtcactgctacgaacgacgacgcgctgaacgttatcgtaaaatcatccgtgaaatccgtgcccaccgcagttccgtccgttatcgtcgcggtgactactacggttccagctccggtcgctgtcgcagaacctcctgaaactgcggctccgggggcggtcgaaccggtgcccaatgtccatacgattgtctgtttcgtcgcgttcggaggatcgatcgtgccggaaagcgtgacaggtgtgccgaccgtgccggtgctcggtacgtcatcaatgcttgtcacgggaacgaatgcgctgaacgttattgtaaaatcatccgtgaaatccgtgcccaccgcagttccgtcttctattgtcgcggtgactactacggttccagctccggtcgctgtcgcagaacctcctgaaactgcggctccgggggcggtcgaacccgtgcccaatgtccatacgattgtctgtttcgtcgcgttcggaggatcgatcgtgccggaaagcgtgacaggcgtgccgaccgtgccggtgctcggtacgtcatcaatgcttgtcacgggaacgaatgcgctgaacgttattgtaaaatcatccgtgaaatccgtgcccaccgcagttccgtccgttatcgtcgcggtgactactacggttccagctccggtcgctgtcgcagaacctcctgaaactgcggctccgggggcggtcgaacccgtgcccaatgtccatacgattgtctgtttcgtcgcgttcggaggatcgatcgtgccggaaagcgtgacaggcgtgccgaccgtgccggtgctcggtacgtcatcaatgcttgtcacgggaacgaatgcgctgaacgttatgtaa

SEQ ID NO: 40060 - protein, 409 aa, Unknown
  Obtained from environmental sample
  misc_feature (1)..(409): Xaa is any amino acid
MPNVHTIVCFVAFGGSIVPESVTGVPTVPVLGTSSMLVTGTNALNVIVKSSVKSVPTAVPSSIVAVTTTVPTPVALATPPETAAPGAVEPVPNVHTIVCFVAFGGSIVPESVTGMPTVPVLGTSSMLVTATNDDALNVIVKSSVKSVPTAVPSVIVAVTTTVPAPVAVAEPPETAAPGAVEPVPNVHTIVCFVAFGGSIVPESVTGVPTVPVLGTSSMLVTGTNALNVIVKSSVKSVPTAVPSSIVAVTTTVPAPVAVAEPPETAAPGAVEPVPNVHTIVCFVAFGGSIVPESVTGVPTVPVLGTSSMLVTGTNALNVIVKSSVKSVPTAVPSVIVAVTTTVPAPVAVAEPPETAAPGAVEPVPNVHTIVCFVAFGGSIVPESVTGVPTVPVLGTSSMLVTGTNALNVM

SEQ ID NO: 40061 - DNA, 1074 bp, Unknown
  Obtained from environmental sample
  misc_feature (1)..(1074): n is a, c, g, or t
atgtctaaaaaagtagcaagcaaagagaacaaaagttcgctttctccagaaaaagcaaaggctgtggaagccgctgttgcacagattgaaaaaaatcacggcaaaggtgccattatgacccttggcaaggagcctgtagtagaaattcccgttatatcaacaggttgcattcagcttgatatagcgcttggagttggcggaattccaagggggagaataattgaaatttttgggccagaatcttctggtaaaacaacgttaaccctgcattgcatagcagaggctcaaaaagcaggcggggtagccgcatttatagatgcagaacatgcctttgacgcaagctacgcccgcaagctcggtgtggatatagaggctctgctcgtttcgcagccagatacaggtgagcaagctcttgatatatgcgaaacccttgttcgctccggtgcaatagaccttatagtggtagattccgttgcagcccttgtaccccaagcagaaatcaacggtgaaatgggcgatagccacatgggtctccaagcccgccttatgagccaagccctccgcaaactaacgggcttgttgaataagtcaaataccgctctcattttcataaaccaacttcgcatgaaaataggtgttatgtttggcaatccagaaaccaccaccggaggcaatgcgctaaaattctacgcctctcaacgcatagatattcgccgcgtgagcaccataaaagaaggcgaaaattccgttggcaaccgcaccagggtaaaggttgtgaaaaacaaagttgcaccgccattcacgcagtgcgaatttgatattctctatgggcaaggaatttcaaaagaagcctccatactagaccttgcagtggatttggagctaattcaaaaaagcggttcttggttctcttacaatggcgagagaatagggcagggcaggcctaatgctcttcaatacttaaaagagaatgcggaaatttccaaagaaattgaaaagaaaattcgcgagcacggaaaagaaattgaagtgtttcaaacatcatctagagaagactctaatagtgaggagtag

SEQ ID NO: 40062 - protein, 357 aa, Unknown
  Obtained from environmental sample
  DOMAIN (20)...(341): recA bacterial DNA recombination protein
  misc_feature (1)..(357): Xaa is any amino acid
MSKKVASKENKSSLSPEKAKAVEAAVAQIEKNHGKGAIMTLGKEPVVEIPVISTGCIQLDIALGVGGIPRGRIIEIFGPESSGKTTLTLHCIAEAQKAGGVAAFIDAEHAFDASYARKLGVDIEALLVSQPDTGEQALDICETLVRSGAIDLIVVDSVAALVPQAEINGEMGDSHMGLQARLMSQALRKLTGLLNKSNTALIFINQLRMKIGVMFGNPETTTGGNALKFYASQRIDIRRVSTIKEGENSVGNRTRVKVVKNKVAPPFTQCEFDILYGQGISKEASILDLAVDLELIQKSGSWFSYNGERIGQGRPNALQYLKENAEISKEIEKKIREHGKEIEVFQTSSREDSNSEE

SEQ ID NO: 40063 - DNA, 351 bp, Unknown
  Obtained from environmental sample
  misc_feature (1)..(351): n is a, c, g, or t
atggagaattgctgtttgccggatttgctggacgagctttcggtagccaggggtgaaggtattttccagaaggttatgcatggctataaaaaaattgacctgcttatcttggacgaatggcttctaagccctctcaccaattctgaaagccgcgaccttttagaaattgtggaaaccagatatagccgttgttctaccattttttcttcccaatttaaccccgcaggctggcaggaaaggataggagaaggtcctctcgcggaagctatccttgaccgaattatttatgattcctacacaatactaattggcggtgaagaatcaatgcgtaaacacaagggtattagctaa

SEQ ID NO: 40064 - protein, 116 aa, Unknown
  Obtained from environmental sample
  DOMAIN (1)...(101): IstB-like ATP binding protein
  misc_feature (1)..(116): Xaa is any amino acid
MENCCLPDLLDELSVARGEGIFQKVMHGYKKIDLLILDEWLLSPLTNSESRDLLEIVETRYSRCSTIFSSQFNPAGWQERIGEGPLAEAILDRIIYDSYTILIGGEESMRKHKGIS

SEQ ID NO: 40065 - DNA, 1356 bp, Unknown
  Obtained from environmental sample
  misc_feature (1)..(1356): n is a, c, g, or t
atgaaaaattcttcaacagcgattaacgatccggctctagacgggaaagagcgactttcggcgttatctgaactggaagccgggcgcagcaatacagaaaaccgaaagaacgaagaaataaacaaccatattcacacgatttatagtttcagcccctacagcccgagcatggcggccctgcttgcaaggaatgcggggcttggcgcagcgggttcggtggatcacgattccatcgccgccgctgaggagatgcttgcagcctgcgcgattttgaacataggaggctgcgtcggcgcggagattcgcgtcagtttcagaaccggcgcggacggaaaacccggcgctttcgcttccagaaagcttaacaaccccgattcagccggttacgcttacacgaccatacagggcgttccaaagcagtcgattcaaaagatggcggactttctcgcgcctgtcagagcggaacggctcaagcggactcgggcaatggcagtgtcggctaacgccctgctgtcggaggcaggtttttccgtgattgattttgaaagcgatattatcgcaaagtcaaagtacaatgagggagggggaatcaccgagcggcacctgttggcagcgatgtcagaaaagataatttcaaaattcgggaaagggccgggcctcgccgaagggctcaagctaaaactggggatggatatttcgccaaagttaacagccctgctttccgattcaaacaacccccattatctgtacgaccttttgggcgtgttgaaaacggaattcctgccgcgcatttacattcagcccgatgaaagcgaatgtatccctgcggggcgggtaacggcatttgccgagtccatcggcgcggtttccgcttacgcctacctcggcgacgtgggcgaatctcccaccggcgacaaaaaagccgaaaagtttgaggatgattatattgaagaactttttgcggaattgtcccgcctgggctaccgggctgtcgcctatatgccgccccggaacacggcggaacagctccgcagggtgcggcggctctgcgccgaatggggctttatggaaatctccggcgtggacattaacagttcccggcaatcctttaactgccccgaagttctgcgggatgaatgccgccacctgctggacaccacctgggcgcttattgcccatgagcggctttcgtcggcagatgcccgtttcggccttttttcgccggacaatcccctcgcgggggagggtctttcgcggcggcttgccgcctatgccgcagcgggcaaaaaactcgacctgtttcaccccgatgagtctgctgcggaaattgtgtgtaaaataggcactggngattaa

SEQ ID NO: 40066 - protein, 451 aa, Unknown
  Obtained from environmental sample
  misc_feature (1)..(451): Xaa is any amino acid
MKNSSTAINDPALDGKERLSALSELEAGRSNTENRKNEEINNHIHTIYSFSPYSPSMAALLARNAGLGAAGSVDHDSIAAAEEMLAACAILNIGGCVGAEIRVSFRTGADGKPGAFASRKLNNPDSAGYAYTTIQGVPKQSIQKMADFLAPVRAERLKRTRAMAVSANALLSEAGFSVIDFESDIIAKSKYNEGGGITERHLLAAMSEKIISKFGKGPGLAEGLKLKLGMDISPKLTALLSDSNNPHYLYDLLGVLKTEFLPRIYIQPDESECIPAGRVTAFAESIGAVSAYAYLGDVGESPTGDKKAEKFEDDYIEELFAELSRLGYRAVAYMPPRNTAEQLRRVRRLCAEWGFMEISGVDINSSRQSFNCPEVLRDECRHLLDTTWALIAHERLSSADARFGLFSPDNPLAGEGLSRRLAAYAAAGKKLDLFHPDESAAEIVCKIGTGD

SEQ ID NO: 40067 - DNA, 492 bp, Unknown
  Obtained from environmental sample
  misc_feature (1)..(492): n is a, c, g, or t
atgctttcgcgtcagcggatgcggtcgtcgttcattgaaagctcttatgtgcaatgcccgtactgcaagggaagcggcatcgttccaagcatccagaccgccgccgtaataatgttccggcatcttcaggacaaaattgcggtgcggtcggcgcaaaagttcattatgaacgttccgtcggacgtggccatatatcttcttaaccaaaagcgggcggaaatcgcggcgcttgaagaagagtttgacaccgaaatcgcaatcgtcggcgacgattccattatgaacatcgcggactatacgattcagcgcactgcaaaggacaaacccgaaacggaagagcttcttgacgcgcacaagccgtcaagcgacgcgaaaaaaacgaacgagttcaaaaaggacgcaagaaaaacgacgaccgaggcgcgcgggcgccgccaccgccgccggccgccaaagaaaaaatccctttggcagaagattgtgggggcatga

SEQ ID NO: 40068 - protein, 163 aa, Unknown
  Obtained from environmental sample
  misc_feature (1)..(163): Xaa is any amino acid
MLSRQRMRSSFIESSYVQCPYCKGSGIVPSIQTAAVIMFRHLQDKIAVRSAQKFIMNVPSDVAIYLLNQKRAEIAALEEEFDTEIAIVGDDSIMNIADYTIQRTAKDKPETEELLDAHKPSSDAKKTNEFKKDARKTTTEARGRRHRRRPPKKKSLWQKIVGA

SEQ ID NO: 40069 - DNA, 444 bp, Unknown
  Obtained from environmental sample
  misc_feature (1)..(444): n is a, c, g, or t
atggacaggaggaaaaaaagaaaagacttgggaaaaataataaaaacatggcggaagccctttatctcttgcgaacgggattgtgaatatttcaccaagagaaggatttttttgaaagaccaaagcggcgaattcggtaaaatgattcaagccattttcggtaaaggcgatttttccaaagtattggtgatcgttatgtcagtttgcgctcttgcggcgggtgtctttctgttgttacagctttttagagttcaaatcggcattaccgatttaattctattcatctttgtaattgtttgggctgctttcatcgtaatcgtagatattatcgctccgatgcaggacaaagacaaagtaaaattcttaccgtacattgtgcagttatcatcgcatcttatggttttgggagctcttatttcatctacaaaaagaatttctaattag

SEQ ID NO: 40070 - protein, 147 aa, Unknown
  Obtained from environmental sample
  misc_feature (1)..(147): Xaa is any amino acid
MDRRKKRKDLGKIIKTWRKPFISCERDCEYFTKRRIFLKDQSGEFGKMIQAIFGKGDFSKVLVIVMSVCALAAGVFLLLQLFRVQIGITDLILFIFVIVWAAFIVIVDIIAPMQDKDKVKFLPYIVQLSSHLMVLGALISSTKRISN

SEQ ID NO: 40071 - DNA, 510 bp, Unknown
  Obtained from environmental sample
  misc_feature (1)..(510): n is a, c, g, or t
atgataaaagacttaaatacagcgtggaaaaatgatcctctttatgacggcaggaatttaattgaatgtatgggaatacaggggcatgaaagagttacttccgtagcagccggtcaaaatcaacagtctttgttattgtttatcggcttgatagatgaggggcttttagacagcgttgcttattcggaaattgacattaaacaaacctgcgactctcccggcggtgaagctcttgcgcccgcggcgcttaatcaaaaacaagctgacgctatcggatatcaatatgcccttttttttaagttgttcgataaatataaaaagtatattgatcatgttattatatggagtcaatacggagccagtttcttaaacagttatgtgctctttgatcatgaaaaaaaggcaagtcaggcatattacgccgtaatggatcccgataaatttattgcgggtcattcataccttgacggtttctttagcggcgaataccaaaaaattaagggtgaataa

SEQ ID NO: 40072 - protein, 169 aa, Unknown
  Obtained from environmental sample
  misc_feature (1)..(169): Xaa is any amino acid
MIKDLNTAWKNDPLYDGRNLIECMGIQGHERVTSVAAGQNQQSLLLFIGLIDEGLLDSVAYSEIDIKQTCDSPGGEALAPAALNQKQADAIGYQYALFFKLFDKYKKYIDHVIIWSQYGASFLNSYVLFDHEKKASQAYYAVMDPDKFIAGHSYLDGFFSGEYQKIKGE

SEQ ID NO: 40073 - DNA, 1020 bp, Unknown
  Obtained from environmental sample
  misc_feature (1)..(1020): n is a, c, g, or t
atgaaaaaagttctattcttgctatttctgtcattcatcgcaggcgatgaggcttgggctaagggaaactcagccatttggaacggcaaggcagatacgaagtggtatagcgattcgaaaaccgagttcacaataacaacgccagagcagcttgcggggcttgcaaagctcgtgaatggcgggaaagatttctatggcaaaaccgtcaagcttggcgcgaacattatgctaaacgacacaatggactggcagaactgggcaaacaagccgcccaaaaacaagtgggagccaataggaacttatatttacgaaattgacgaaagaacgcctagattccttcaaaatcctattggagattatttgatatattggtttgtacctgaattcattcagaaggcattgaggatggagtccacggatttaagtttcaagggaacctttgatggctgcggctttgttatcagcggggtgtatatcaacaataatctgaaagtttaccaaggcttatttgggtatgttgatggagagttaagaaatcttggggttcgtgcttcttatataaaaggcggcaatgttgtaggtggcctcgtgggaactagtagcagtatagtgaactgttattcctttgttgtggtgagagcaggaataagtgttggcgggctggcaggagtggctgacattataaggggcagttattccatcgctttggtgtcgggcaatggctacgttggcgggctggcaggagtaggtgacactataagcggcagttattccacaggaaaagtcattggaaagggagtaatcggcgggctggtgggaagtgtacagactatagaagacagttattccactagcgccgtgctgggtgataccattgtcggagggttggtagggttagggtatggcaaccgccaccgccccgaaataatcaacagttattccattggagcagttactggaagaaatgagataggcgggcttgtgggaagcatgaagaacctcttatactatgcattttaa

SEQ ID NO: 40074 - protein, 339 aa, Unknown
  Obtained from environmental sample
  SIGNAL (1)...(20)
  misc_feature (1)..(339): Xaa is any amino acid
MKKVLFLLFLSFIAGDEAWAKGNSAIWNGKADTKWYSDSKTEFTITTPEQLAGLAKLVNGGKDFYGKTVKLGANIMLNDTMDWQNWANKPPKNKWEPIGTYIYEIDERTPRFLQNPIGDYLIYWFVPEFIQKALRMESTDLSFKGTFDGCGFVISGVYINNNLKVYQGLFGYVDGELRNLGVRASYIKGGNVVGGLVGTSSSIVNCYSFVVVRAGISVGGLAGVADIIRGSYSIALVSGNGYVGGLAGVGDTISGSYSTGKVIGKGVIGGLVGSVQTIEDSYSTSAVLGDTIVGGLVGLGYGNRHRPEIINSYSIGAVTGRNEIGGLVGSMKNLLYYAF

SEQ ID NO: 40075 - DNA, 741 bp, Unknown
  Obtained from environmental sample
  misc_feature (1)..(741): n is a, c, g, or t
gtgcctgatgaaggggacgtgataaccagggattttgagatttccggcctcgcatataccgatgtcggcgtatccgccgtgatgtggcgcatcctcagccccaagaatccctgggatccccctgaagtcacgcttgcctacggcggggatattgaattcaagagaatcgataccccgcaaaactacctggtcgaagtttccctgtccgaggtgcgcgacggggaaaatattcttgagatatacgccgaggatatctacggcgtgcccggcgagatggtcacaaaagtattcggcgttagcaccgccgtgccggtaacggcggtagttgagccttcgagggacatctggaacaagggcaatataattatccatggcacttcctttgaccgtaacggcatcgatgagataaagatatcaatggacaacgggatcagttaccaaagagcggatgttatagataaccaggacaggccaagtttatggactatcagtcttaatacaagggtatatatggacgggcaatactccataataataagggctacggacggatacggggtgcagtcttttacaagcaccactatcaatattgacaataccgctcccatgattgacttgagcgcccctaaaaacggcgcccctataggccgcacgcttgaagttaacggccagatatatgacaatctcaaagtcaaactaatttcaatcctgcttacggatacaaactcgtgccgaatctga

SEQ ID NO: 40076 - protein, 246 aa, Unknown
  Obtained from environmental sample
  misc_feature (1)..(246): Xaa is any amino acid
MPDEGDVITRDFEISGLAYTDVGVSAVMWRILSPKNPWDPPEVTLAYGGDIEFKRIDTPQNYLVEVSLSEVRDGENILEIYAEDIYGVPGEMVTKVFGVSTAVPVTAVVEPSRDIWNKGNIIIHGTSFDRNGIDEIKISMDNGISYQRADVIDNQDRPSLWTISLNTRVYMDGQYSIIIRATDGYGVQSFTSTTINIDNTAPMIDLSAPKNGAPIGRTLEVNGQIYDNLKVKLISILLTDTNSCRI

SEQ ID NO: 40077 - DNA, 876 bp, Unknown
  Obtained from environmental sample
  misc_feature (1)..(876): n is a, c, g, or t
atgttggagataaaaaacatagaaatcacgcctcaaatgctttccattatatcggaattggatatttttaagactaattggactggatttagctctatgcagcctgaacaactcaaaaaattgaaaaaaatttccactatagaatccgttggttcttcaaatagaatagaaggtaataaactttctgataaagaagtggaagagttgatgtctcgcattcaaaaaaagtctttcaaaaatagagacgaagaagaggttgctggttataccgaacttatgaatttgatttttgacagctatgaagttatccccttaacggaaaattatataaagtacttgcacaaaattttgttgcaattttgcgaaaccgatgccgcgcataggggtgaatacaaaaaactctcaaattccgtttcagcatttgatgcaaacggcaaagaaataggcatagtatttgaaactgcttcgccttttgaaactccaattcttatggaagagcttgttgaatgggcaagaaaaaatcttgacgataatttttaccacccattgttttcaataggtatttttatagtccattttttggctatacacccatttcaagacgggaatggtcgtttgtcaagggcattaaccactatgttattgttaaaaaaaggctatggttatgttccttatagttccatagaatccattatagaagccaataaagacggctattacagggcacttaggcatacccaaaaaacgctcagaacagaaaaggctctttatgaaccttggcttaatttctttttaacaactctgcaaaaacaaaaaaggcatttggaagaaaaaataaagtctttcaaaaatacgatatcggtctctccaaactag

SEQ ID NO: 40078 - protein, 291 aa, Unknown
  Obtained from environmental sample
  DOMAIN (110)...(249): Fic protein family
  misc_feature (1)..(291): Xaa is any amino acid
MLEIKNIEITPQMLSIISELDIFKTNWTGFSSMQPEQLKKLKKISTIESVGSSNRIEGNKLSDKEVEELMSRIQKKSFKNRDEEEVAGYTELMNLIFDSYEVIPLTENYIKYLHKILLQFCETDAAHRGEYKKLSNSVSAFDANGKEIGIVFETASPFETPILMEELVEWARKNLDDNFYHPLFSIGIFIVHFLAIHPFQDGNGRLSRALTTMLLLKKGYGYVPYSSIESIIEANKDGYYRALRHTQKTLRTEKALYEPWLNFFLTTLQKQKRHLEEKIKSFKNTISVSPN

SEQ ID NO: 40079 - DNA, 882 bp, Unknown
  Obtained from environmental sample
  misc_feature (1)..(882): n is a, c, g, or t
ttgatttttatgaattctctttactacgaagttaatacaaaagatctggaaaatacgactaaagtccttatgaacttaatcggagaggatcgcataaaacaaatattaaaaaatgccgcagacgcgcctgtggaaattgaattgcccgtaaaagctaatcaggcatatcgcctaacgctgattgattcaggcggtaatgtactgtgggattctcatgtaccgaatgagcttgtaaaccatatcgaccgcgaagaaattacgacggctcttgagggaaaggaagcaagcgcgcggcgcaactccataagtacacaaattaagcgtatttactacgcgcttcctgtttttgacgacaataatgttcccatcggcgtattcagattatcgctttccgttccgggattctggacgaggatttcgcatgttatttttccgtttgtggttttcacctgtttaataattattatcgttttctcggcaatttacgcgtattcgcgctcgttgtccgcgtctcttggacagcttgtcaacatcgcgcagacaagcgctccgcttctgtcctctcgtgaaacaatggaacctatcgcgcaggaattcagaagtttggaaaaagccatgcgcgctatgactgtggagcttaatctccgttttgaacaggcaaagtcggaaggaaaccgtcttgaggcgatacttaacggaatgtcggaagcgctctttgctatggataacagcttgaaactacatctgattaacccaaaagcgagagaactttttgctattgaaaaaaatgaaataaattcaatgactttactggaagctacacgttctacggagttagttgaaatcgcaaaaaaagcgattaacgggcggcgttccgcttga

SEQ ID NO: 40080 - protein, 293 aa, Unknown
  Obtained from environmental sample
  DOMAIN (146)...(215): HAMP domain
  misc_feature (1)..(293): Xaa is any amino acid
MIFMNSLYYEVNTKDLENTTKVLMNLIGEDRIKQILKNAADAPVEIELPVKANQAYRLTLIDSGGNVLWDSHVPNELVNHIDREEITTALEGKEASARRNSISTQIKRIYYALPVFDDNNVPIGVFRLSLSVPGFWTRISHVIFPFVVFTCLIIIIVFSAIYAYSRSLSASLGQLVNIAQTSAPLLSSRETMEPIAQEFRSLEKAMRAMTVELNLRFEQAKSEGNRLEAILNGMSEALFAMDNSLKLHLINPKARELFAIEKNEINSMTLLEATRSTELVEIAKKAINGRRSA

SEQ ID NO: 40081 - DNA, 513 bp, Unknown
  Obtained from environmental sample
  misc_feature (1)..(513): n is a, c, g, or t
ttgtcgccaacgtatcgcatgaaacttcgcactcctattcagcttataaaagggttttcggaaaccttgcttgattcaatatcagataaaaaagacagtcactttatagaaataattcacaagaacgccggaactatggaaaacctgaccaatgatcttttaatacttgccgacttggaagacaataccgtaaataaccgggatttggaagaattaaaaatcgctctattaattaaagaagctgtttcttctatggaaaatcaagccaagaaaaaacaaatagaaataattgccgattgcgataaagatttaaacgcgaaattatacggttcttttattattcaggcgctaattaatttgatagaaaacggaataaagtattctccttctaaatccaaaatttgggtaagcgcgtttacggaaaatgaagagctggtatttgaagtacgcgataaaggaatggggattccttctgagcataaagaacgaatatttgaaagatttacagagtag

SEQ ID NO: 40082 - protein, 170 aa, Unknown
  Obtained from environmental sample
  DOMAIN (108)...(170): Histidine kinase-, DNA gyrase B-, and HSP90-like ATPase
  misc_feature (1)..(170): Xaa is any amino acid
MSPTYRMKLRTPIQLIKGFSETLLDSISDKKDSHFIEIIHKNAGTMENLTNDLLILADLEDNTVNNRDLEELKIALLIKEAVSSMENQAKKKQIEIIADCDKDLNAKLYGSFIIQALINLIENGIKYSPSKSKIWVSAFTENEELVFEVRDKGMGIPSEHKERIFERFTE

SEQ ID NO: 40083 - DNA, 1614 bp, Unknown
  Obtained from environmental sample
  misc_feature (1)..(1614): n is a, c, g, or t
atgtatgaacgctacggcagcgcgttcaccgccggaatgggcgcggaagcaataagcaccctgcttgagaacctcgaccttgatcaaatggcggcggatctccgcgccaagatgattgaaaaggggcccaagagcgacaagcgtctcttaaagcgaatcgacatcgtggaaaatttccgcaattcggaaaacaagccccactggatgatcctcacggtgatacccgttatcccgccggaactgcgtcctatggttcagcttgacggcgggcgttttgccacaagcgaccttaacgatctttaccgcagggtaattaacaggaacaaccgccttaaaagacttcaggcccttaacgcgccggaaatcattatccgcaacgaaaagcgtatgctgcaggaagcggtagacgcgttattcgacaattccaagaaaaagaaagtggtaaaaggctcgtccaacaggccgcttaaatcgatcagcgacatgctcaagggcaagcaggggcgtttccgccagaacctgctcggaaagcgcgttgactattccgggcgctcggtaattaccgtagggccggatctgcgaatgtggcagtgcggcattcccacaaagatggctcttgaattgtttaagccctttataatgaaaaaacttgtagacaaggacgttgtcttcaatattaaaaaagcaaagatgcttgtagagcaggaaacgcccgaagttttcgccattcttgacgaggttgtaaaagaacaccccgtgcttctcaaccgcgccccaaccctccacaggcttggtattcaggcttttgaacccgtgctggtagaggggaaagcgataaaactgcacccgcttgtctgtcacgcttttaacgcggactttgacggcgaccagatggcggttcacgttccgctgactcaagcggcccagatggaatgttggacgctcatgctttcggctcgaaaccttcttaaccccgctaacggcaagacaatcgtgttcccgtctcaggacatggttttgggcatcaacttccttacaagaattaaacagaacgcgaaacgtcccggctcttcaaaacctgaaaccggcaatagaatcccctattattcatctattgaagaagcgcaaatggccgtggagaacaaggctttggattggggcgcggcgattaaagttaaaacaccccgtaagattgtttgggacaaagtaggccacgctgtggaaacggacgcgaaagggataatagtaacatccgcgggcaggcttatttttaacggcgagatgcctgaggatcttccctatattaactacgaattaaaggacaaggaattacgcgcgcttattgagcatgtgttcaaggaaaaaggctcatgggttacggtacagatgctggacgcgataaaagcgacaggctatcgttatgcgacagtattcggcgcgactatcggcatagatgatattgtaattccgaaagaaaaacatgaaatgatagaacaggcaaacaaggttgttgagggaatacaaaaagaccagcggaaaggacttatgacctcggacgaacgttatgacaaggttgtgcaagttggacaaaaacaaacgaagagcttccaatag

SEQ ID NO: 40084 - protein, 537 aa, Unknown
  Obtained from environmental sample
  DOMAIN (1)...(174): RNA polymerase Rpb1, domain 1
  misc_feature (1)..(537): Xaa is any amino acid
MYERYGSAFTAGMGAEAISTLLENLDLDQMAADLRAKMIEKGPKSDKRLLKRIDIVENFRNSENKPHWMILTVIPVIPPELRPMVQLDGGRFATSDLNDLYRRVINRNNRLKRLQALNAPEIIIRNEKRMLQEAVDALFDNSKKKKVVKGSSNRPLKSISDMLKGKQGRFRQNLLGKRVDYSGRSVITVGPDLRMWQCGIPTKMALELFKPFIMKKLVDKDVVFNIKKAKMLVEQETPEVFAILDEVVKEHPVLLNRAPTLHRLGIQAFEPVLVEGKAIKLHPLVCHAFNADFDGDQMAVHVPLTQAAQMECWTLMLSARNLLNPANGKTIVFPSQDMVLGINFLTRIKQNAKRPGSSKPETGNRIPYYSSIEEAQMAVENKALDWGAAIKVKTPRKIVWDKVGHAVETDAKGIIVTSAGRLIFNGEMPEDLPYINYELKDKELRALIEHVFKEKGSWVTVQMLDAIKATGYRYATVFGATIGIDDIVIPKEKHEMIEQANKVVEGIQKDQRKGLMTSDERYDKVVQVGQKQTKSFQ

SEQ ID NO: 40085 - DNA, 921 bp, Unknown
  Obtained from environmental sample
  misc_feature (1)..(921): n is a, c, g, or t
gtgcgagcaaatgggcaccagccgggaagacttaaaaaaaaacaacgccataaggcttgcggacgtgcgaagatgataggggatgcaacgaagcggcatacaagcataagcgccttggcagtgaagctcggcatgagcaggcagaacttttacaaaggacggagggcaagggtgaaagcggaagcggacgccgaccttgtggaacagcttgtaagaggcgaacgctcactgcagcccaggcttggcggacgaaaattattcaaaatccttgttccgttgcttgaaaatgaaggaataaagcttggcagagacaggtttttcactattttgcgcgaaaaagggctgttagtgcccccgctgccgaaaagccccagaacaaccaggttcgagcccagcctgccggcattccataacctggcagccgggcttgaattgaccgggccgaaccaggcatgggctgctgatataacgtatatccggactgatgaaggatttctctatttgagcctgattaccgatatgtggtcacggaagattgtagggtttcatgttggagacagccttgaaacggaaggcgcgttagcggcattagccatggcgttagcgtcagtaagaagcggcgcaaagccggtgcatcattctgaccgcggctgccagtatgcgtcgcatctgtatgtcggtaaattgcaggaggcagggctgcaaatcagcatgactgaagaattgcattgttatgaaaatgcaatggctgaacgggtaaatgggatattgaaacaggaatattacattggttcttgttttaggaataaaaatcaggcgaaggcagcggtaaaagaggctgtgtatttatacaatatacggcgtccgcacatctcgcttgattatgagacaccggaaaaaatgcatgggggtgcggcataa

SEQ ID NO: 40086 - protein, 306 aa, Unknown
  Obtained from environmental sample
  DOMAIN (144)...(303): Integrase core domain
  misc_feature (1)..(306): Xaa is any amino acid
MRANGHQPGRLKKKQRHKACGRAKMIGDATKRHTSISALAVKLGMSRQNFYKGRRARVKAEADADLVEQLVRGERSLQPRLGGRKLFKILVPLLENEGIKLGRDRFFTILREKGLLVPPLPKSPRTTRFEPSLPAFHNLAAGLELTGPNQAWAADITYIRTDEGFLYLSLITDMWSRKIVGFHVGDSLETEGALAALAMALASVRSGAKPVHHSDRGCQYASHLYVGKLQEAGLQISMTEELHCYENAMAERVNGILKQEYYIGSCFRNKNQAKAAVKEAVYLYNIRRPHISLDYETPEKMHGGAA

SEQ ID NO: 40087 - DNA, 528 bp, Unknown
  Obtained from environmental sample
  misc_feature (1)..(528): n is a, c, g, or t
ttggtcagattcggccgaggcaaactggtttccgctttcggcgtgcatgtggaaccgtttgggctttactcgacaaaatacaaaaatgttaacgacttgccaaatggcgctagtatcgccataccaaacgatccgtccaacggcggacgcgctctgcttctgcttcaggcaaaagggcttatcactcttaaagccggcgcgggtttaactgccacctcccgcgacgttacagacaatcctaaaaatttccgctttcaggaacttgaagccgctcagcttccccgctctttgcaggacgtggacgccgccgcgataaacggcaactatgcgcttgaagcaggtttaaatcccgttaatgattcccttatcattgaaggcgcggattccccctatgtcaacatcgtggtagtgcagagaggcaagcaaaatgatcccggcatcatcgccctgaaaaacgcacttctcagccaaaaggtaaaggattatatcgacagccattacgacggcggagttgtggcgattttctaa

SEQ ID NO: 40088 - protein, 175 aa, Unknown
  Obtained from environmental sample
  DOMAIN (1)...(175): NLPA lipoprotein
  misc_feature (1)..(175): Xaa is any amino acid
MVRFGRGKLVSAFGVHVEPFGLYSTKYKNVNDLPNGASIAIPNDPSNGGRALLLLQAKGLITLKAGAGLTATSRDVTDNPKNFRFQELEAAQLPRSLQDVDAAAINGNYALEAGLNPVNDSLIIEGADSPYVNIVVVQRGKQNDPGIIALKNALLSQKVKDYIDSHYDGGVVAIF

SEQ ID NO: 40089 - DNA, 1248 bp, Unknown
  Obtained from environmental sample
  misc_feature (1)..(1248): n is a, c, g, or t
atgagaagggtttcaacggatatggcaaatacggatatgcagtactaccttagaagacaggaagacagtctgcataatcttactactcagataggtaccggaaacaagctgaaccagctaaggaacgatcccctggcggcttcccacgccgtgcgctacgaatcgtatctggcaaggcttgaacgttttgagtctaataccctttacgccagggatcactacaaccagatagacatttatcttcaacgcgccgtggatgttatgcagaggataagggaaatttcggtaacaggcgcaaacggtatatataccaaagacgacagccgggcaatggctattgaggtaaacgagcttcttaaagagctggtctcaatttccaacacgataggccccgacggaaaacagctctttgctggtgacaaagcttttaccgagccctttaggattgtggaaggcacggtcgaggggggaggagaaacgctggtggtaaatgtggagtaccggggttccgggccgggaagaaaggccgaaataagcgacggtacctatacggaactggatattgggggaggggaggcgttctgggccgaaaagatgcagatcttttcctcggttgacgcatccgcctggcgggcactggaagacggtgctttttacgtggacggctacgaaatagccgtaagggcgggcgatacgcttccggcgatagtggcgaaaataaacgaatcgggcgcggcagttaaagcgtcggttgatcctgaaacaaggggcttgatgcttacaggcacaaatccccatcttatcagaatggaagacaggcagggttcaaggacgcttgaagagttggggataattcagtttaacaacgatccttccgcgcctaactggtctccatcggcaagggtcgcgggcggctctgttttcgatatggtaataaggctccgggatgcgcttttcagggcggacaagatgtttatcggcggccttggaattagcggtatagacctggccctgcaaaacatggaaggccacctgaccgaaataggaagccgccatgaaagggccgtagcgacctggaacaggctaaaccaggaaatcccgaacgttacgtcaatgcttgccagggaatcgtctgtcaatatgattgacgcggcgacggatttggggatgatggattttgcccacaaggcggccctgcaaacggcggcaaagatcctaccgactaccctgcttgattttttgaaataa

SEQ ID NO: 40090 - protein, 415 aa, Unknown
  Obtained from environmental sample
  DOMAIN (28)...(163): Bacterial flagellin N-terminus
  misc_feature (1)..(415): Xaa is any amino acid
MRRVSTDMANTDMQYYLRRQEDSLHNLTTQIGTGNKLNQLRNDPLAASHAVRYESYLARLERFESNTLYARDHYNQIDIYLQRAVDVMQRIREISVTGANGIYTKDDSRAMAIEVNELLKELVSISNTIGPDGKQLFAGDKAFTEPFRIVEGTVEGGGETLVVNVEYRGSGPGRKAEISDGTYTELDIGGGEAFWAEKMQIFSSVDASAWRALEDGAFYVDGYEIAVRAGDTLPAIVAKINESGAAVKASVDPETRGLMLTGTNPHLIRMEDRQGSRTLEELGIIQFNNDPSAPNWSPSARVAGGSVFDMVIRLRDALFRADKMFIGGLGISGIDLALQNMEGHLTEIGSRHERAVATWNRLNQEIPNVTSMLARESSVNMIDAATDLGMMDFAHKAALQTAAKILPTTLLDFLK

SEQ ID NO: 40091 - DNA, 702 bp, Unknown
  Obtained from environmental sample
  misc_feature (1)..(702): n is a, c, g, or t
atgaattatagcgatttggataaaacttctgcctacaagcggcttttggaaagagcgtctgcgggaaaagattttaatttcaaggagatgcttaccgccgaaagggtaaagcagtgcgaggttccccttgccgaggggcttgtttttaactgggccgccaaagcggtggacgaaaaaaccctggacgcgcttcaggccctcgccgacgagcaagagctaatcgccaagtaccgcgcccttttggaaggcgaaaccatgaacaccggcgaaggcagaaaggttctgcaccagcttttgcggagcccggatggaaaagccgccaccggaaaaaccgtcagtcacgacggcagggatttgggcgaattctaccataacgagtttaagcgtttctcagccttcgccgaaaaagtccgttcaggggaaatcggccctgcccccggcaagcgcttttctgcctttgcccaaattggcatcggcggttccgacctggggcctcgggcgctgtacctggcccttgacaactgggcggcaggcgaaggaaggaaagcccttcgtgcggaattcatttcaacgtggatcccgatgacgcttccaaatagccgcttcccttccccttgccgaaaccctttttgtgctggtttcaaaaagcggcattaccctggaaacccttacaaacgagctttttgtaaaaaacaagcttaa

SEQ ID NO: 40092 - protein, 233 aa, Unknown
  Obtained from environmental sample
  misc_feature (1)..(233): Xaa is any amino acid
MNYSDLDKTSAYKRLLERASAGKDFNFKEMLTAERVKQCEVPLAEGLVFNWAAKAVDEKTLDALQALADEQELIAKYRALLEGETMNTGEGRKVLHQLLRSPDGKAATGKTVSHDGRDLGEFYHNEFKRFSAFAEKVRSGEIGPAPGKRFSAFAQIGIGGSDLGPRALYLALDNWAAGEGRKALRAEFISTWIPMTLPNSRFPSPCRNPFCAGFKKRHYPGNPYKRAFCKKQA

SEQ ID NO: 40093 - DNA, 645 bp, Unknown
  Obtained from environmental sample
  misc_feature (1)..(645): n is a, c, g, or t
atgaaagtatctaaaattatgactcggaatcccatttttacccatcccgatctttcgctcagcgacgcgcgttcgttaatggacagggaaaaagtcggccatataccggtactcaataaaaataatgagcttgtgggccttatcacaaaggtcgatctattgaaagccggcccgtcacccgcgaccagccttgacgtgtacgagatcagctacctgctttcaaaaatcacggtagaaaaggtgatggttaaaaaagtgatcaccgttcaggaaaacgaagttgtggaagaggcggcgaggatcatggcggacaacgggattggctgcctgcctgtgttgaacaattcccttttgaagggcattattacagacactgatattttccatttttttattaacgcttacggggcgcgccacaagggtattcgcataacgattaatttcaaagataaactcggccagtttgccgcgtttgccggcgcgttagccgcaaggggaggtaatatcgtcgcctttgtcacctccgagggtgatgatgtcgcccaccgccgcgcgaccatcaagattactggtatcaaccgcgccgccgttgaggaaatcgccggcactttggacggcgcggaaattgaggatattcgggaataa

SEQ ID NO: 40094 - protein, 214 aa, Unknown
  Obtained from environmental sample
  DOMAIN (5)...(132): CBS domain pair
  misc_feature (1)..(214): Xaa is any amino acid
MKVSKIMTRNPIFTHPDLSLSDARSLMDREKVGHIPVLNKNNELVGLITKVDLLKAGPSPATSLDVYEISYLLSKITVEKVMVKKVITVQENEVVEEAARIMADNGIGCLPVLNNSLLKGIITDTDIFHFFINAYGARHKGIRITINFKDKLGQFAAFAGALAARGGNIVAFVTSEGDDVAHRRATIKITGINRAAVEEIAGTLDGAEIEDIRE

SEQ ID NO: 40095 - DNA, 768 bp, Unknown
  Obtained from environmental sample
  misc_feature (1)..(768): n is a, c, g, or t
atgacgcgaanagtctacgttgattataatgccaccactcccctcagaccggaagttaaagcctccattacagaagatctggatatcttcgggaacgcttccagtatgcactcttccggacggctcgcccattcgcgggtggaggaagccagaagctgtgtggaaaaacttatgggagcgggaccccataccgtcttttttacatcaggtggctcggaatcaaataacgccgttttccagacaatgagacagcttgcctcagacccgtccggcgtcccgctgaaagagggccgccgcgagtttatcacaagctccatagagcatccctgcgtgcttaactcggctaagtatctgcaaggccttggctttaaggtcagctttctgcctgttgacgaatacggcaaaataaacatggacgctttcaaaaaagcgttaagcgataaaacacttcttgtatcaataatgatggctaataacgaaataggaactatacaggacattaaggaaatttgttcgcttgcgaaagcagccggcgcgtggatacacaccgacgcggtgcaggcgcttggcaagatacccgtcaatgttgacgattttggcatagattaccttaccgtgtcggcgcacaaaatttacgggccaaaagggattggcgccctgtacgcgcgcaaaggctcgccgctgttccccctgatccacggcgggcatcaagaggacggcctgagagccggaacctacaacaacatcggtatacttggttttggctag

SEQ ID NO: 40096 - protein, 255 aa, Unknown
  Obtained from environmental sample
  DOMAIN (5)...(255): Aminotransferase class-V
  misc_feature (1)..(255): Xaa is any amino acid
MTRXVYVDYNATTPLRPEVKASITEDLDIFGNASSMHSSGRLAHSRVEEARSCVEKLMGAGPHTVFFTSGGSESNNAVFQTMRQLASDPSGVPLKEGRREFITSSIEHPCVLNSAKYLQGLGFKVSFLPVDEYGKINMDAFKKALSDKTLLVSIMMANNEIGTIQDIKEICSLAKAAGAWIHTDAVQALGKIPVNVDDFGIDYLTVSAHKIYGPKGIGALYARKGSPLFPLIHGGHQEDGLRAGTYNNIGILGFG

SEQ ID NO: 40097 - DNA, 618 bp, Unknown
  Obtained from environmental sample
  misc_feature (1)..(618): n is a, c, g, or t
ttgcttacaggcggcgaaacgccgcagccaaaaaaaacaaagaccggtcttttgggaagggcatcggaaatagtcaaggaaatagaagaaaccgagccggttgaggagcttgaggaactggaagagttcgaagaagtagaagagctcgaagaacttgaagagtttgacagcaaggaaagcgccgaagggccgcctgctcccccaagcgtggatattgacgccctggcaagtgaaattgaatttggctctgaaccggccgcagaattaacatcggacgattcggcggatgattccatcgaacatgatttggaaatagtatctcccttcgcggccatgctcgatggttttacggacaccgtggattatgatattgcgtctattggcgatgaaaccctggaacacatcttcggcccggcggatgaaaaagatgataaacctctgaatggtgattccgcgcaagctcttaatgggaatcaaagccggaaaggcaaggccaatgttataaaagaaaaggaaggcctgccttttgtcagcccggacgcccttaacccgaacgaagaagatgaatttattaaccaggactttaagaaccttgtggactcggttatcaaagattag

SEQ ID NO: 40098 - protein, 205 aa, Unknown
  Obtained from environmental sample
  misc_feature (1)..(205): Xaa is any amino acid
MLTGGETPQPKKTKTGLLGRASEIVKEIEETEPVEELEELEEFEEVEELEELEEFDSKESAEGPPAPPSVDIDALASEIEFGSEPAAELTSDDSADDSIEHDLEIVSPFAAMLDGFTDTVDYDIASIGDETLEHIFGPADEKDDKPLNGDSAQALNGNQSRKGKANVIKEKEGLPFVSPDALNPNEEDEFINQDFKNLVDSVIKD

SEQ ID NO: 40099 - DNA, 399 bp, Unknown
  Obtained from environmental sample
  misc_feature (1)..(399): n is a, c, g, or t
gtgtccgtaaaaccatcgagcatggccgcgaagggagatactatttccaaatcatgttcgatggaatcatccgccgaatcgtccgatgttaattctgcggccggttcagagccaaattcaatttcacttgccagggcgtcaatatccacgcttgggggagcaggcggcccttcggcgctttccttgctgtcaaactcttcaagttcttcgagctcttctacttcttcgaactcttccagttcctcaagctcctcaaccggctcggtttcttctatttccttgactatttccgatgcccttcccaaaagaccggtctttgttttttttggctgcggcgtttcgccgcctgtaagcaaatctttgcctgctttttgggagagcggccaacatgctgtttaa

SEQ ID NO: 40100 - protein, 132 aa, Unknown
  Obtained from environmental sample
  misc_feature (1)..(132): Xaa is any amino acid
MSVKPSSMAAKGDTISKSCSMESSAESSDVNSAAGSEPNSISLARASISTLGGAGGPSALSLLSNSSSSSSSSTSSNSSSSSSSSTGSVSSISLTISDALPKRPVFVFFGCGVSPPVSKSLPAFWESGQHAV

SEQ ID NO: 40101 - DNA, 486 bp, Unknown
  Obtained from environmental sample
  misc_feature (1)..(486): n is a, c, g, or t
ttgaaggtcacgcgcagagcgcggcggcgcggtagcattatgagaaaaattgtaatttttgacagaaaattttttaagtttgtttttgtcgggataatcaacacgattgttagtttgataataatgtttttattgtataacgtggcgcatttgaattactggctttcctcagcctgtaattacttcgttatcagcatttttagttttttcatgaataaatatttcaccttcagagtcaggcattggtcggcgtttattattatttcattcatcatgacgattgcgctctcgtatctgattgcttacggcatttcaaaacccctcatgaattatttgttaagtggcagtccgcaaaagatccgcgaaaatgtggccctgttaaccgggatgtgtttgtttatgggattgaattatacgggacaaaggctggttgtgtttagacaacagagattatccatcctgaagttttggataaataaggaatga

SEQ ID NO: 40102 - protein, 161 aa, Unknown
  Obtained from environmental sample
  DOMAIN (26)...(146): GtrA-like protein
  misc_feature (1)..(161): Xaa is any amino acid
MKVTRRARRRGSIMRKIVIFDRKFFKFVFVGIINTIVSLIIMFLLYNVAHLNYWLSSACNYFVISIFSFFMNKYFTFRVRHWSAFIIISFIMTIALSYLIAYGISKPLMNYLLSGSPQKIRENVALLTGMCLFMGLNYTGQRLVVFRQQRLSILKFWINKE

SEQ ID NO: 40103 - DNA, 372 bp, Unknown
  Obtained from environmental sample
  misc_feature (1)..(372): n is a, c, g, or t
atgattattaaccccatacaaaaccaccgccagcgcgaaaaaggcgttcttgtttaccccgtgtattcacggcgttccggcggcctctcgattggaatcaacctttttcccgatcaaaagagctgtccctttgactgtccatattgcgaggtgtttccattttctactaacgctgttttttccattgaacagcttgaaaatgatttacgcactgtcattgccgatgccaggggaaggaatattccggttaaggatatatgtttttccggtaacggagaaccgtcgctgtcgccggattttccccaagcgctggaactagcgggccgtatacgcggcgaactggctccatccgcaaaaactggtattgattag

SEQ ID NO: 40104 - protein, 123 aa, Unknown
  Obtained from environmental sample
  misc_feature (1)..(123): Xaa is any amino acid
MIINPIQNHRQREKGVLVYPVYSRRSGGLSIGINLFPDQKSCPFDCPYCEVFPFSTNAVFSIEQLENDLRTVIADARGRNIPVKDICFSGNGEPSLSPDFPQALELAGRIRGELAPSAKTGID

SEQ ID NO: 40105 - DNA, 462 bp, Unknown
  Obtained from environmental sample
  misc_feature (1)..(462): n is a, c, g, or t
ttgattagcaatggcgcagggcttcaggatcaaaaaattttttccctgcttgttgaatcggctgcaggtgatcttgccctggatatttggctgaaacttgacgctggtactactcaatggtaccaactgataaaccgctcagaaattccccatgacaaaattatcgcaaagataaaggaatttgccgcccttgcgccgtttacgattcagaccatgctctgcgcggtagacggcgaaaccccatctcccgatgaagcgcaagcctgggaaaatttagtgattgagttagccgcaatcgctgtgggtaaaatccgcaaaatacaaatctacggaaaggcccgcccctcgccggatgatccaaaagcgcaggcgctgcctgtagcataccttgaagaacgcgccgcctcgctaaaacaagcccttagtaactcaacacacattccagtagagatatacccttaa

SEQ ID NO: 40106 - protein, 153 aa, Unknown
  Obtained from environmental sample
  misc_feature (1)..(153): Xaa is any amino acid
MISNGAGLQDQKIFSLLVESAAGDLALDIWLKLDAGTTQWYQLINRSEIPHDKIIAKIKEFAALAPFTIQTMLCAVDGETPSPDEAQAWENLVIELAAIAVGKIRKIQIYGKARPSPDDPKAQALPVAYLEERAASLKQALSNSTHIPVEIYP

SEQ ID NO: 40107 - DNA, 993 bp, Unknown
  Obtained from environmental sample
  misc_feature (1)..(993): n is a, c, g, or t
gtgaggctaaaaatgaagccgacgaagaaaagtcgtctttttactgcggcgttattgctagcgctctgcacggtgttctcgtttgcgaatgacccgccgaatgtcgccgtctgcatcttaggcaatccccccaaccacaccatacttaaggtggcgttcaacgacgcgctggtgaacagcgggaagtacaacgtgatcgccgtggatgctatcgaggccattatgaaagagcatatgaggcagatggacggcacggtgcgctccagtgagatcgcccagttgggcgaggacgccggagccgcctacatgctagtagttgagcgcgccgacgacggcatgaacacctactacataagcgctaggatggtcagcgtggagcggaagatcgccatcctctccaaactgtcggagaagttgagccccgggagcgacgtcgccggcgtggtaggcgcgcaggtggccgcgctgctcaacctacagcccccgccccccaaattcaccacccccggcgacggcaatacgtaccgcaccgtcaccatcgacggccaagtgtggatggccgaaaacttgaacctcaaggcaggcaaatcgtggtgctacggcgacgacgagaacaactgccggaaatacggacggctctacgactggcatacggccaaaaccgcctgcccgtccggctggcgcctgccgatccgccgcgagtgggatatgatggcgcgcagcattggcggcgaggaggacgccggaaggaaactcaaatcgaaaagcaagtggaacggcaccgacgagtacgagtggggagcgctccccggaggagccagacacccagacggcggattccactccgccggagatgtcggcacgtggtggtcggccagcgagagcaccggagaaaaagcctacggccgctacatcaacgccggccgcggcagtatgtacgaaaacaactcaaaaaaggaaaccggatacagcgtgcgttgcgttgcggagtaa

SEQ ID NO: 40108 - protein, 330 aa, Unknown
  Obtained from environmental sample
  SIGNAL (1)...(27)
  misc_feature (1)..(330): Xaa is any amino acid
MRLKMKPTKKSRLFTAALLLALCTVFSFANDPPNVAVCILGNPPNHTILKVAFNDALVNSGKYNVIAVDAIEAIMKEHMRQMDGTVRSSEIAQLGEDAGAAYMLVVERADDGMNTYYISARMVSVERKIAILSKLSEKLSPGSDVAGVVGAQVAALLNLQPPPPKFTTPGDGNTYRTVTIDGQVWMAENLNLKAGKSWCYGDDENNCRKYGRLYDWHTAKTACPSGWRLPIRREWDMMARSIGGEEDAGRKLKSKSKWNGTDEYEWGALPGGARHPDGGFHSAGDVGTWWSASESTGEKAYGRYINAGRGSMYENNSKKETGYSVRCVAE

SEQ ID NO: 40109 - DNA, 696 bp, Unknown
  Obtained from environmental sample
  misc_feature (1)..(696): n is a, c, g, or t
gtgtaccttcacaaaaaagtttttcatagaacaagaaaaggtatcattatgactaaaacaatacagtcttgttctgaaccttcattagccaaatcggaaaaggatataatcatacgcaacggaaatgaagaaaacaaaacaataaatatcgcttcaataataaaagtgtcggctgttaccattgtttttgttcttttggcgaatattgccatttcaattttcggtatacattccatgaaaacgacaagccttaaacctgctatcagcattgggttagataaagtaaaaaacgatatggcttttttcgaaaacagactatcaaatgaatacggacaattagaacttatagacggcgacctggtaggacaggaaggcgtttccttgaaaaacaattacaaactggtagacgaaataagttccgattacgatattgtggtagccgtctttgcccgtaacggtaatggctactggccgataagtaccagtattgcagacaacgccggaaaacgtgcggttgatacctttttggtatcagacaatgccgcatatccttacatacaatccggcaacagttacacaggaaaacatgtcattctcggtaaaaattacctttcagaatatcttccgattttttcagaaaacagaaaagaagtcatagggagcattatttgtcggaaaacaccctcccgcctttag

SEQ ID NO: 40110 - protein, 231 aa, Unknown
  Obtained from environmental sample
  misc_feature (1)..(231): Xaa is any amino acid
MYLHKKVFHRTRKGIIMTKTIQSCSEPSLAKSEKDIIIRNGNEENKTINIASIIKVSAVTIVFVLLANIAISIFGIHSMKTTSLKPAISIGLDKVKNDMAFFENRLSNEYGQLELIDGDLVGQEGVSLKNNYKLVDEISSDYDIVVAVFARNGNGYWPISTSIADNAGKRAVDTFLVSDNAAYPYIQSGNSYTGKHVILGKNYLSEYLPIFSENRKEVIGSIICRKTPSRL

SEQ ID NO: 40111 - DNA, 654 bp, Unknown
  Obtained from environmental sample
  misc_feature (1)..(654): n is a, c, g, or t
atgaatacactgctgaaatacctgtgcgtttcgctcgtcaccgccggcggcgctattatgctgtacagcatagtaacgttctttaaatccctagtcagcttcaaggtgcaggcaaacgagcagaagatattcgcggattggatttacacggcttctatgctcctcatgctgttcttttttgtatgctatgtcgcggttgacattatgtttgttattgacggcgcgggtacgttttcaatgaccgaactgattatagccgcggtctttgtttttggggcggttttcgtttacacgatgattacaatgctaaagcggatgtccgccgccatctccaaaaagaccggcgagattattacgaccctcgtgaacgccatagaggcgaaggaccggtatacgcgggggcattcggttcatgtcgcggacgttacaaagctcatatatgaccaccttcccgacggggtgaaaaagaaaatcagccgggcgatattaatggacgccgctatcctgcacgacatcggaaaaatcggaattcctgacagcgtcctcaataaaatcgaacagcttacgccggaagagcggcatttgatagagcagcacgcgatgctggggaagaaaattctgaacagacnagctaccagtccatcggggagatag

SEQ ID NO: 40112 - protein, 217 aa, Unknown
  Obtained from environmental sample
  misc_feature (1)..(217): Xaa is any amino acid
MNTLLKYLCVSLVTAGGAIMLYSIVTFFKSLVSFKVQANEQKIFADWIYTASMLLMLFFFVCYVAVDIMFVIDGAGTFSMTELIIAAVFVFGAVFVYTMITMLKRMSAAISKKTGEIITTLVNAIEAKDRYTRGHSVHVADVTKLIYDHLPDGVKKKISRAILMDAAILHDIGKIGIPDSVLNKIEQLTPEERHLIEQHAMLGKKILNRXATSPSGR

SEQ ID NO: 40113 - DNA, 1035 bp, Unknown
  Obtained from environmental sample
  misc_feature (1)..(1035): n is a, c, g, or t
atggatattaaagacataaattcttttttagattttgccacgaaccaacagaacctgaccactcatgagtggtcaggcgaactcgtaccttcggtactgacgctaacaaaaaataacggtacaacccttgcgaacttaatcaactcgttttctgtacagattaaccgccgctgccctgtttgcgggaaagaggcaaacaaccgcagtcttgtccgctttcccgatcgcacttaccgacgctgcagccattgcggaataatcttcatggacaggacatgcccgccgccaatcgaatatgaaagggagtatttttttgaagcatacaaaaaacagtacggaaaaacatatctggaggatttcccaaatcttattgcaatggcaaaacgccgcctaaagattatttcaggaatatcatccggtaaaggcgcaaagatggagaaaagcggctattctcctctccttcttgacataggctgcgcttacggtccgtttcttgccgccgcaaaagaagagggtttttctcctgcgggaatcgaccccgcacaggatgcggtgcgctatgtgcaagaaacacttggcattaagaccgttcaaggttttttccctgattgccaacttccagcttcctaccacctacaatacgatgtcattacattatggtatgtcatcgaacattttacagactgctttaccgtattagccgaaataaaaaaactgttaaaaccacgcggtattctcgcattttcaacgccttctttttcaggcatcagcgggcgtaaatcactttgcaattttctggaaaaaagccccgccgatcattttacaatctggtcgccgaaaatgtgtaaaaaagcgcttgccctcgccggtttcaaagtaaaaaaaatagtgataagcggctgccaccccgagcgtttccccttttttggaaatttcgcaagaagcaaaaaaagccccttgtattggctgcttcttgcagtcggcaaaatcttcggtatgggcgacacttttgaggtttacgcggaactgttttaa

SEQ ID NO: 40114 - protein, 344 aa, Unknown
  Obtained from environmental sample
  DOMAIN (155)...(248): Methyltransferase domain
  misc_feature (1)..(344): Xaa is any amino acid
MDIKDINSFLDFATNQQNLTTHEWSGELVPSVLTLTKNNGTTLANLINSFSVQINRRCPVCGKEANNRSLVRFPDRTYRRCSHCGIIFMDRTCPPPIEYEREYFFEAYKKQYGKTYLEDFPNLIAMAKRRLKIISGISSGKGAKMEKSGYSPLLLDIGCAYGPFLAAAKEEGFSPAGIDPAQDAVRYVQETLGIKTVQGFFPDCQLPASYHLQYDVITLWYVIEHFTDCFTVLAEIKKLLKPRGILAFSTPSFSGISGRKSLCNFLEKSPADHFTIWSPKMCKKALALAGFKVKKIVISGCHPERFPFFGNFARSKKSPLYWLLLAVGKIFGMGDTFEVYAELF

SEQ ID NO: 40115 - DNA, 561 bp, Unknown
  Obtained from environmental sample
  misc_feature (1)..(561): n is a, c, g, or t
ttggaaggggttacgattaatacgcttcgcgcaagacccgccggtcccagatcgttttcgataaagtcgtttacttcccgcccgcgctcgcctataagagcgacaacgttaacatcggcacttgtgttacgcgcaatcatgcccagaagcgttgatttgcctacgcctgaacctgaaaaaatgccgaggcgctgtcccttgcctaccgcaaggagtccgtctatggcgcgcactcccgttgttatgcgttccgttatccgtcttcgttttaacggatcaggagggcttgcaagagccggatacatggcaacggcatcaatatcgcccttgccgtcaacggggcttccaaacgcatccagtaccctgcccaaaagtttatttgatacgggcacttcaaggcggctgccgagagcgataaccctgtctcctacttccagcccgtccgtttcctcaaacgccataagctgtactatttcgtctctaagtcctacaacttcggctcttatctggcctttgccgcgcggggcgataattctgcaaatctccccgataatggcctga

SEQ ID NO: 40116 - protein, 186 aa, Unknown
  Obtained from environmental sample
  misc_feature (1)..(186): Xaa is any amino acid
MEGVTINTLRARPAGPRSFSIKSFTSRPRSPIRATTLTSALVLRAIMPRSVDLPTPEPEKMPRRCPLPTARSPSMARTPVVMRSVIRLRFNGSGGLARAGYMATASISPLPSTGLPNASSTLPKSLFDTGTSRRLPRAITLSPTSSPSVSSNAISCTISSLSPTTSALIWPLPRGAIILQISPIMA

SEQ ID NO: 40117 - DNA, 708 bp, Unknown
  Obtained from environmental sample
  misc_feature (1)..(708): n is a, c, g, or t
gtgagttttccatgtgatcataccgtgctgcacaatgccgtcatccccctccttcccatgtacatatgcggaaccttcgtcaacatgacggtaagcggcgaaactttcgtcatactgggtattttgtggaaagtcttcctgacggttatcatcctgcatcttatctacatcacgatcatgtttttggccagcagcgccgtgaccaaaaagaatccatttgtcatgatgaagaaccagatacccggctatctctcggccataggaacacaatcctcggcggcaaccattccggtcaacctgacatgcgccgaaagtgacggcgtgtccaaagagatccgcaattttgtcgttcccctttgctccaatatccacatgcccggctctatgatcaccatcacctgctgcgtgacggccgtactcctgatgaacggtatgccgcatagcctcgccataatcgtgcctttcatcctgacgctgggcatcgccatgatggcttccccgggggcgcccggcggatccatcatgtcggcgctgcctttccttccgcttgtcgggatcgcgtcggatagcgctttggcgagcctgctcatcgcgctgtatatcacgcaggacagctttggcacggcctgtaacgtttccggcgataatgccatagctttagcggtggatacaatctatgaaaaatacatcaaaaaaacagcaggctaa

SEQ ID NO: 40118 - protein, 235 aa, Unknown
  Obtained from environmental sample
  misc_feature (1)..(235): Xaa is any amino acid
MSFPCDHTVLHNAVIPLLPMYICGTFVNMTVSGETFVILGILWKVFLTVIILHLIYITIMFLASSAVTKKNPFVMMKNQIPGYLSAIGTQSSAATIPVNLTCAESDGVSKEIRNFVVPLCSNIHMPGSMITITCCVTAVLLMNGMPHSLAIIVPFILTLGIAMMASPGAPGGSIMSALPFLPLVGIASDSALASLLIALYITQDSFGTACNVSGDNAIALAVDTIYEKYIKKTAG

SEQ ID NO: 40119 - DNA, 1062 bp, Unknown
  Obtained from environmental sample
  misc_feature (1)..(1062): n is a, c, g, or t
ttgagaacaatacccgtttacgccaaggatcactttaaccagatagacgtttaccttcagcgggacgttgatgtaatgcagcggataaaggaactcgaggtaactggggcgaacggcgtctataccgaggatgacacccgcgcaatgggcgtggaagtgaacgagctgcttaaagagctggtttcaatcgcgaatgctgatgggcccgactgcagacagctctttgcgggggacaaagcgtttaccgagcccttcagggttgtggaaggtacggttgaaaagggaggggaaacgctggtggttaatgtggagtaccgcggatacgggccggggagaaaggccgaaatcagccacggtacctatacggaactggatattgggggaggggaggcgttctgggccgaaaggatgccgacattttctcaagttgatgcttccgcctggcgggcattacaagacggcgctttttatgtggacggctacgaaatacaggggagggctggaaatacgcttccggcaatagtggccaagattaacgaatccggcgcgtctgttaaatcgtccgttgatcctgaaacaaggggcttaatgcttacgggtactaacccccatcttatcagaatggaagacaagcagggttcaagtacccttgaacagcttgggataattcagtttaacaacgatccttccgcgcctaactggtctccgtccgcgagggtttcaggcggctccgcttttgacatggtgataaggctccgaaacgcgctttttaggggggacaagatgttcataggcggcctgggaataagcggcatagatatggccctgcaaaacatggaagcccgccttaccgatataggaagccgccaggaaagggcaatgtcgacctggaacaggctgaaccaggaaatcccgaatgttacggctatgctggcaagggaatcttcggttaacatgattgacgcggctacggatttgggaatgatggattttgcccacaaggcggccctccaaacggcggcaaaggtattgccgactaccctgcttgattttttgcgataa

SEQ ID NO: 40120 - protein, 353 aa, Unknown
  Obtained from environmental sample
  DOMAIN (155)...(202): Flagellin hook IN motif
  misc_feature (1)..(353): Xaa is any amino acid
MRTIPVYAKDHFNQIDVYLQRDVDVMQRIKELEVTGANGVYTEDDTRAMGVEVNELLKELVSIANADGPDCRQLFAGDKAFTEPFRVVEGTVEKGGETLVVNVEYRGYGPGRKAEISHGTYTELDIGGGEAFWAERMPTFSQVDASAWRALQDGAFYVDGYEIQGRAGNTLPAIVAKINESGASVKSSVDPETRGLMLTGTNPHLIRMEDKQGSSTLEQLGIIQFNNDPSAPNWSPSARVSGGSAFDMVIRLRNALFRGDKMFIGGLGISGIDMALQNMEARLTDIGSRQERAMSTWNRLNQEIPNVTAMLARESSVNMIDAATDLGMMDFAHKAALQTAAKVLPTTLLDFLR

SEQ ID NO: 40121 - DNA, 423 bp, Unknown
  Obtained from environmental sample
  misc_feature (1)..(423): n is a, c, g, or t
gtgattacccaaaacgaattttacaagatgaaggacggcgccattctctgcaatgccggccatttcgatgttgaggtggatgtgaaaaccctgaaaaatatcgctgtggaggttaaagagcaaaagacgaacatcatgggttacaagctctccaacggcaggcggctctcggtattggccgaaggacgcctggtcaacctggcctccggggacgggcaccccgcggaaatcatggacatgagcttctcgattcaggccctttgcgccaggtacctcgtggaaaacaaggtgacccaaaagatcaaccctgtaccggcggaaatcgaccgggaagtggccctgcgaaaactcaactttgaaggctaccggatcgaccgccttacggacgcccaaagagaatacctggccagctggaacgtgtaa

SEQ ID NO: 40122 - protein, 140 aa, Unknown
  Obtained from environmental sample
  misc_feature (1)..(140): Xaa is any amino acid
MITQNEFYKMKDGAILCNAGHFDVEVDVKTLKNIAVEVKEQKTNIMGYKLSNGRRLSVLAEGRLVNLASGDGHPAEIMDMSFSIQALCARYLVENKVTQKINPVPAEIDREVALRKLNFEGYRIDRLTDAQREYLASWNV

SEQ ID NO: 40123 - DNA, 648 bp, Unknown
  Obtained from environmental sample
  misc_feature (1)..(648): n is a, c, g, or t
atgttcgaatcaatgaatgagattcacgacggcggttggggttggagcagtagttttcaatctttcccgaaatttcagaccgatataatcaataaatggaatcaggtttttacagacagggtaagagcgtcaggcggtaacaatacagagcgttatctgattttacccgcctattgcactcagccgcagcagacaattgccggtacttttgtactgcccaaagacattaccgccggcaagcagattgttaccttccattactatgatccttatgaattcagcatagcggggaaacagttctcgtggggttcggaaggcgacaagaaaaaagtagataacgattttgcgccttttaaaaagatttttatagataatgatattccggtaattatcggggaaacaggcgcggcgttgcaactgtttccaaacaacaaaggagctgaaacacaatctcagcagggaagaataagttacattacaagcgtgtttactactgcaaaaaaatacgggcttgttccgatttattgggacaatggggttaccagcggtaatggggaaaaattcggtctttttgatcgaaggacgggtcagccgaattcggcggacagttccacccttatcaacattatgataaatagtgtaaaatag

SEQ ID NO: 40124 - protein, 215 aa, Unknown
  Obtained from environmental sample
  DOMAIN (1)...(186): Cellulase (glycosyl hydrolase family 5)
  misc_feature (1)..(215): Xaa is any amino acid
MFESMNEIHDGGWGWSSSFQSFPKFQTDIINKWNQVFTDRVRASGGNNTERYLILPAYCTQPQQTIAGTFVLPKDITAGKQIVTFHYYDPYEFSIAGKQFSWGSEGDKKKVDNDFAPFKKIFIDNDIPVIIGETGAALQLFPNNKGAETQSQQGRISYITSVFTTAKKYGLVPIYWDNGVTSGNGEKFGLFDRRTGQPNSADSSTLINIMINSVK

SEQ ID NO: 40125 - DNA, 753 bp, Unknown
  Obtained from environmental sample
  misc_feature (1)..(753): n is a, c, g, or t
gtgtttttctcggtgtttcacgccataagcgcattctgcaatgctggtttttcgctgatggataactccatgcaaaatttttctacaaacgtagtagtgaatataacactgatatttttaataatctgcgggggttttggttttttggctttgtctgaacttgtatcatctaaaaaaaataaaatccccggcaaatatttgactttgcacacaaaactagttttgcttatgacaattacgctgataatctttggaacgcttttgatgttaaaaatggaatgggatggagttttgaaaggttattcttttttcaataaagttttgataagcctttttcaatctgtgaccgctcgttccggtggttatagcacggtgaatttcgcgctccttggtgcccctctgcttttctccatgattttgcttatgttcataggagcaagccccggaagctgtggtggaggcataaaaacaacaacagcagcgataatagtgctgcttggcataaataggtttttggggcgcaaaaaaacgcaggttttcaatcgcacaataccagaagaaaccgtatctcgcgctgtgcgaatttttgttctctctgttatctttatagccattgcctgtattttgcttttgaattttgaaacagcaaatttgtctgtgcaggcggggcaagaccgttttttggaattattgtttgaaactgtaagtgcgttttcaacttgtggtttgagcatgggaataacggaatattaa

SEQ ID NO: 40126 - protein, 250 aa, Unknown
  Obtained from environmental sample
  DOMAIN (1)...(250): Cation transport protein
  misc_feature (1)..(250): Xaa is any amino acid
MFFSVFHAISAFCNAGFSLMDNSMQNFSTNVVVNITLIFLIICGGFGFLALSELVSSKKNKIPGKYLTLHTKLVLLMTITLIIFGTLLMLKMEWDGVLKGYSFFNKVLISLFQSVTARSGGYSTVNFALLGAPLLFSMILLMFIGASPGSCGGGIKTTTAAIIVLLGINRFLGRKKTQVFNRTIPEETVSRAVRIFVLSVIFIAIACILLLNFETANLSVQAGQDRFLELLFETVSAFSTCGLSMGITEY

SEQ ID NO: 40127 - DNA, 309 bp, Unknown
  Obtained from environmental sample
  misc_feature (1)..(309): n is a, c, g, or t
gtgatgaaagagatgaatcttcatgaaggctgcattcaacagattacgcggctgtaccgcgaccgcctgtacgccgcggaaagcggcgatccggaaatggtgcctgttgaccgcaaggggcgcatccgcattgacgactgggaaatgcgcgaagacgtacaaaaagcgactatggaaaaaatgaaaaacgtaacgccggaaaatgttttcactcaaaccgatgtcgcggggttcaaacacgattttcttgaagcgcatggttttgatgttgagggcgttgattataacgcggatgttgatataggctga

SEQ ID NO: 40128 - protein, 102 aa, Unknown
  Obtained from environmental sample
  misc_feature (1)..(102): Xaa is any amino acid
MMKEMNLHEGCIQQITRLYRDRLYAAESGDPEMVPVDRKGRIRIDDWEMREDVQKATMEKMKNVTPENVFTQTDVAGFKHDFLEAHGFDVEGVDYNADVDIG

SEQ ID NO: 40129 - DNA, 621 bp, Unknown
  Obtained from environmental sample
  misc_feature (1)..(621): n is a, c, g, or t
ttggacataaacggcaaaatgcgtgatgccgtgccggtggaaaaagcgagagcaacggaggtttttgaggagatagagcagagacgagtggatcccggcttgctggaaaaggtggagggcaacaatttccgcactcgcatctatccaattcccgcgggtggaacacgcacaatttcaatcggctatgaagaggaattatcttatgaaaaagggttgatgtattaccgcctgccaatggcttattcagattcgcttgaaaacttcgcggtaaaagcaactgttttgaaaggcaacaaaaaaccgcttgtgcctgaatatgaaaatgaacttagctttgacatagcaggcgaaaactatgttgcctcgctttcccgcaaaaattaccgcccttccagagcgttgaattttgcattgcctgcgccagccaacattgcgcaggttattatgcagtcggcgcaggggagccattatttctttgcatcggttgcaccgagaatgcaagcccaaaaaaagcaatgggataatgatttggcaattatttgggatgtttcgctaagcggctcgcaagcgcgatttgcaacgcgaaatggaaatgctggatattatttttgccgaatataa

SEQ ID NO: 40130 - protein, 206 aa, Unknown
  Obtained from environmental sample
  misc_feature (1)..(206): Xaa is any amino acid
MDINGKMRDAVPVEKARATEVFEEIEQRRVDPGLLEKVEGNNFRTRIYPIPAGGTRTISIGYEEELSYEKGLMYYRLPMAYSDSLENFAVKATVLKGNKKPLVPEYENELSFDIAGENYVASLSRKNYRPSRALNFALPAPANIAQVIMQSAQGSHYFFASVAPRMQAQKKQWDNDLAIIWDVSLSGSQARFATRNGNAGYYFCRI

SEQ ID NO: 40131 - DNA, 615 bp, Unknown
  Obtained from environmental sample
  misc_feature (1)..(615): n is a, c, g, or t
atggcccgggagaggttcgagcttcttaaccttccggaaaaagtattgaaccagtacgcggtggaactttccggtggtatgaaacaaaggacagttattgccatttcaactatattaaaacccaaggtactgattgccgatgagccttcatccgctcttgatgtatcttcacaaaagatagtaatcaggctgcttcacgacttaatggaaaaaggttttgtcagggcgatgctttttatcacccatgaactgcccctgcttttcaatgttaccgacgacatcatggtaatgtacgcgggagaaatcgtggaacggggaaccgcgaaggaactggtctttgatcccattatgccttactccaaaggtctaatgaattcaattatcgtccccgaggaaggcacccgcgggcatgtactccaggccattccgggtgcgccgcctaatttgaaattgaaacttgaaggatgccgtttccaggataggtgtaaatactccgaacattgcaagaatcttcccctggaagataagtccgcaggtccgggcaggacctaccggtgcaggctttcacatgagaaactgcaggaattgtacaaaaatagcgaggcggcggtatga

SEQ ID NO: 40132 - protein, 204 aa, Unknown
  Obtained from environmental sample
  DOMAIN (1)...(100): ABC transporter
  misc_feature (1)..(204): Xaa is any amino acid
MARERFELLNLPEKVLNQYAVELSGGMKQRTVIAISTILKPKVLIADEPSSALDVSSQKIVIRLLHDLMEKGFVRAMLFITHELPLLFNVTDDIMVMYAGEIVERGTAKELVFDPIMPYSKGLMNSIIVPEEGTRGHVLQAIPGAPPNLKLKLEGCRFQDRCKYSEHCKNLPLEDKSAGPGRTYRCRLSHEKLQELYKNSEAAV

SEQ ID NO: 40133 - DNA, 756 bp, Unknown
  Obtained from environmental sample
  misc_feature (1)..(756): n is a, c, g, or t
ttgcacctgggaggcgccgttaatagccgcgagctggggatagaagcgcaccaccccggggtaagtgaaacaaaaagcggcaggagcgtggcaatttccggtgaagtgatggaacgcagttccaaaatcggcgttatcgaagacgtgatgacatcaattaagctcctgccgggcgttgggtattccgggatgtttaacgctctgccttccattaggggcggggatcccggagacctgatggctgcccttgacggattttatatagaaaacccataccactggggcggcggattttcaatttttgatccccacatggtatcaagcgcccaactgtcccatggaattttttctacccgctacgggcacacaatttccgggctgcttgaagtaagctcaagaagggcggcgaccgattatgcggaactggaactgggtatttctaccagcgccgtaaacctgaacgccgcgcttcccgttggttccggcggcggccttatgctcatgggaaaagttacctactgggatcccttcgtttggtcgctaaaacagttaagcaccgtctgggataacgaaacgctccaaatggtgaatgcggtaaccacagccccatatatacgcagcagcgcggcgtcattcttctaccgcttaaatcccgatctggaaataagtcttaacgcctttgtcggcgccgacggcgttggtgcggcattatctgaacgaaagccccaacgtgttttcaaccaccgccctggatga

SEQ ID NO: 40134 - protein, 251 aa, Unknown
  Obtained from environmental sample
  DOMAIN (20)...(127): TonB-dependent Receptor Plug Domain
  misc_feature (1)..(251): Xaa is any amino acid
MHLGGAVNSRELGIEAHHPGVSETKSGRSVAISGEVMERSSKIGVIEDVMTSIKLLPGVGYSGMFNALPSIRGGDPGDLMAALDGFYIENPYHWGGGFSIFDPHMVSSAQLSHGIFSTRYGHTISGLLEVSSRRAATDYAELELGISTSAVNLNAALPVGSGGGLMLMGKVTYWDPFVWSLKQLSTVWDNETLQMVNAVTTAPYIRSSAASFFYRLNPDLEISLNAFVGADGVGAALSERKPQRVFNHRPG

SEQ ID NO: 40135 - DNA, 888 bp, Unknown
  Obtained from environmental sample
  misc_feature (1)..(888): n is a, c, g, or t
gtgggctatgcttctgccacgcttgccataaccaacagctacgcaagtggaaatgtcagcagctatgtcagccataacggtgacaataatagtggcggtcttgttggctatgccaatgctgcaagcaccatatccaccagctacgcaagcggaaatatatcggcgagcagtaatggtaattatagttattatataggtggcatattcggcaggtatgcaagtggaacgaacacgtatgtgtattacaacaatgagggagcaagcgcggcagcaggttcaggttcgcctactggtatcttgtcagtgtccagcgcaacgctgaaaaaacagggaacttacaattgggatttcaacgaaatatggggcattgttgagaatgtcagctacccctacctaaaaaccaccccaacaaaagtaacaatccccctcttagacaccgtagaagcagaatacttcacaggtcaaacttacacaggttctaaaataacacccgaacccacagtcaaactaaaagcagacggcacaatcctaaccaaaggcacagactatgccctaacttacggaacaaacataaacgcaggcaaaggcacagtcaccatagtaggcattgacggcgattatctcggcttggaaaaagccatagaattcgacataatacccaaaaccctaaccatatcaaacgccaccgcccaaaacaaagtatatgacggcaccaccaccgcaaccataacaggcactctggaaagcatcgcggcaggagataatgtaaccactggcagcggagtgttcgcaagcaaaaatgccggaacgggaatagccgtttccaacgtatcaatcagcggaacatcagcagccaactacaaactagccccagccagcaaaatttaa

SEQ ID NO: 40136 - protein, 295 aa, Unknown
  Obtained from environmental sample
  misc_feature (1)..(295): Xaa is any amino acid
MGYASATLAITNSYASGNVSSYVSHNGDNNSGGLVGYANAASTISTSYASGNISASSNGNYSYYIGGIFGRYASGTNTYVYYNNEGASAAAGSGSPTGILSVSSATLKKQGTYNWDFNEIWGIVENVSYPYLKTTPTKVTIPLLDTVEAEYFTGQTYTGSKITPEPTVKLKADGTILTKGTDYALTYGTNINAGKGTVTIVGIDGDYLGLEKAIEFDIIPKTLTISNATAQNKVYDGTTTATITGTLESIAAGDNVTTGSGVFASKNAGTGIAVSNVSISGTSAANYKLAPASKI

SEQ ID NO: 40137 - DNA, 318 bp, Unknown
  Obtained from environmental sample
  misc_feature (1)..(318): n is a, c, g, or t
atggacggaaaggcgttaaaagccgttttaggggaaaatgttaagtttttacgcttaaggaaggggctgactcaagcggttttagccgaaaaagcggacatttctgtcatttttttaagcagtattgaacgtggaactaaataccctaaagccgatactgtggcacgtctggcaaaagttttgggtgttgaggtttttgaactgtttttaagaaaagatgtccctgccaataaagccatatttgaccacctttcaagcgatattaagaaaaatgtaataaacacgttggatagcatatttaaacagtattcaaaataa

SEQ ID NO: 40138 - protein, 105 aa, Unknown
  Obtained from environmental sample
  DOMAIN (14)...(68): Helix-turn-helix
  misc_feature (1)..(105): Xaa is any amino acid
MDGKALKAVLGENVKFLRLRKGLTQAVLAEKADISVIFLSSIERGTKYPKADTVARLAKVLGVEVFELFLRKDVPANKAIFDHLSSDIKKNVINTLDSIFKQYSK

SEQ ID NO: 40139 - DNA, 360 bp, Unknown
  Obtained from environmental sample
  misc_feature (1)..(360): n is a, c, g, or t
gtgatagcccgcaaggcctacggcggtgcctacatcggggtggccagcaagcacatccgctctgacttcaactttgcctacccgaccgccgaaatagccgtcatgggggccgagggggcggcgaacatcctctacgccaaggagatttccaaggcagaggaccctgcggccaagcgggcccaggtgatagccgagtacaacgacaggctggtgaacccctacgtggcggccggccacggctacatagacgaagtgataatgccccgcgagacgcgcaaaaagctggtgcgcgcactgggactgctggagaccaagcgcgaccaagtgccggccaagaagcacggcaacattccgctttga

SEQ ID NO: 40140 - protein, 119 aa, Unknown
  Obtained from environmental sample
  misc_feature (1)..(119): Xaa is any amino acid
MIARKAYGGAYIGVASKHIRSDFNFAYPTAEIAVMGAEGAANILYAKEISKAEDPAAKRAQVIAEYNDRLVNPYVAAGHGYIDEVIMPRETRKKLVRALGLLETKRDQVPAKKHGNIPL

SEQ ID NO: 40141 - DNA, 384 bp, Unknown
  Obtained from environmental sample
  misc_feature (1)..(384): n is a, c, g, or t
atgaacaatcttaatagtgtacttatagaagggaacctaacccgtgaccctcagattcgtacaacaacaaacggtacggcggtatgcacttttccaatcgcaagcaaccgtttttacaagaagggcgaacagtttgaaaaagaagtgggcttctttgatgtggaggcatggtcaaagcttgccgaaaactgcggtaatttaggtcataaaggacggggtgtccgtgttgtgggccggttaaaacaggaacgctggaatgaccctgcgggaaactctcgttcaaaagttattatagtcgcggaacatgtcgagttcaggccggtaatgaaacaagccgaacaaactgaggaagtaccggaagaaaagtttgcggctaacttctag

SEQ ID NO: 40142 - protein, 127 aa, Unknown
  Obtained from environmental sample
  DOMAIN (4)...(106): Single-strand binding protein family
  misc_feature (1)..(127): Xaa is any amino acid
MNNLNSVLIEGNLTRDPQIRTTTNGTAVCTFPIASNRFYKKGEQFEKEVGFFDVEAWSKLAENCGNLGHKGRGVRVVGRLKQERWNDPAGNSRSKVIIVAEHVEFRPVMKQAEQTEEVPEEKFAANF

SEQ ID NO: 40143 - DNA, 360 bp, Unknown
  Obtained from environmental sample
  misc_feature (1)..(360): n is a, c, g, or t
atggagccccggaaggcccttgaagccatcttttatgtattgcgtaccggcatccagtggaaggctttgccagtttcctttggctcttccagtgccgtccaccgccatttcgtgttttggtcggaggccggcttctttaaggccatgtgggcttgcggattgcggaagtacgacgaagtcaaaggcataaactgggcatggctaagcggggacggctgcatgaccaaggccccgttggccaaagaaacagtcggggccaatccgaccgaccggggaaaaaaaaggaagcaagcggcacatgctcgtagacggcatcggggtgcctgttgccatggtaataaccggggcaaacaggcatga

SEQ ID NO: 40144 - protein, 119 aa, Unknown
  Obtained from environmental sample
  misc_feature (1)..(119): Xaa is any amino acid
MEPRKALEAIFYVLRTGIQWKALPVSFGSSSAVHRHFVFWSEAGFFKAMWACGLRKYDEVKGINWAWLSGDGCMTKAPLAKETVGANPTDRGKKRKQAAHARRRHRGACCHGNNRGKQA

SEQ ID NO: 40145 - DNA, 411 bp, Unknown
  Obtained from environmental sample
  misc_feature (1)..(411): n is a, c, g, or t
atgctcgtagacggcatcggggtgcctgttgccatggtaataaccggggcaaacaggcatgatgtttcccggcttgaaacgcttttggattccatcgtcatagaaaggcccgacccgttcgggcaacctcaaaacctctgccttgacaaagggtattccggcgagccggctttggaagcggtcgtattaaggggttttataccgcacataaaaagtcggggggaggagaaaagcggcaaggaacaaaacccggcatacaaagcccgccgatgggtagttgaagttacccactcgtggatgaacagattccgaaaacttctgatccgatatgagaaattggacaagacatataagggactgcttatgctgtcgtgtgcttttatcgctcttcgtaaggcagatgttatttag

SEQ ID NO: 40146 - protein, 136 aa, Unknown
  Obtained from environmental sample
  misc_feature (1)..(136): Xaa is any amino acid
MLVDGIGVPVAMVITGANRHDVSRLETLLDSIVIERPDPFGQPQNLCLDKGYSGEPALEAVVLRGFIPHIKSRGEEKSGKEQNPAYKARRWVVEVTHSWMNRFRKLLIRYEKLDKTYKGLLMLSCAFIALRKADVI

SEQ ID NO: 40147 - DNA, 753 bp, Unknown
  Obtained from environmental sample
  misc_feature (1)..(753): n is a, c, g, or t
gtggtgctttgccttgcaatgattggagtttgtggcactggtgggcaaggcagcttgcatggtggcccacagatattttggcaagggcaacatttttctagcatggagaaagtttttgaaaattccggcttgcggctcgctttgctcacaggctctgttcccacagcacagcgcagggaaattttggctggtttaataagtggcgaaattaatgctgttgttggaacacatgctctgttttccaaagatgttgaatttaaaaatttgagttttgtgattatagatgagcagcatcgttttggggtaaatcagagagaggctcttcttgcaaaaggcaataagccagatttgctggttatgagtgcaactccaattccacgtagtttggcaatgactttttatggagatttggaaccattgattttacacgaaaaaccgccgggcagattgcctgtttctacggaactcagagggcggagtagccgtgagaaaatgaaggattatctctacaaaaaatcttttgttgataatcgctgctattgggttgtgagcagggttcaagaagacgaattcggagaagcggcgtgcgttgatgatatatacaaggaattgaaaagttttaaagaagactggaaaatagccgttgtacatggacaaatgccagaagtggagcgtaacgcaaacttaaacgcttttgcaaacggcaatgtttcattgcttgtttgtacaacaggtggtagaagtgggcgttaa

SEQ ID NO: 40148 - protein, 250 aa, Unknown
  Obtained from environmental sample
  SIGNAL (1)...(21)
  DOMAIN (1)...(132): DEAD/DEAH box helicase
  misc_feature (1)..(250): Xaa is any amino acid
MVLCLAMIGVCGTGGQGSLHGGPQIFWQGQHFSSMEKVFENSGLRLALLTGSVPTAQRREILAGLISGEINAVVGTHALFSKDVEFKNLSFVIIDEQHRFGVNQREALLAKGNKPDLLVMSATPIPRSLAMTFYGDLEPLILHEKPPGRLPVSTELRGRSSREKMKDYLYKKSFVDNRCYWVVSRVQEDEFGEAACVDDIYKELKSFKEDWKIAVVHGQMPEVERNANLNAFANGNVSLLVCTTGGRSGR

SEQ ID NO: 40149 - DNA, 372 bp, Unknown
  Obtained from environmental sample
  misc_feature (1)..(372): n is a, c, g, or t
ttgatgggtacgatgacgatgacgatcgcccagccgcatacgggcccggcggtgcctgcagcgttaagcggggatcacggggtagtccgcattgaagatgacgtagcgcgtggccgttacgttgcttataacgatgatgacgtacccatgggctggcttggttaccgggtggaaaacggtgtgctggtgatctggactacccacaccgaaccccaataccggggccggggcgtggctagcgcgctcaccgaacatgccctggacttggcagtacaaaacgggcaggtggtgcaaccagattgttggtatgcgtcggagtggattcataagcatccccggtatgcccgttatgtcaccgaccctgggttttag

SEQ ID NO: 40150 - protein, 123 aa, Unknown
  Obtained from environmental sample
  DOMAIN (41)...(108): Acetyltransferase (GNAT) family
  misc_feature (1)..(123): Xaa is any amino acid
MMGTMTMTIAQPHTGPAVPAALSGDHGVVRIEDDVARGRYVAYNDDDVPMGWLGYRVENGVLVIWTTHTEPQYRGRGVASALTEHALDLAVQNGQVVQPDCWYASEWIHKHPRYARYVTDPGF

SEQ ID NO: 40151 - DNA, 525 bp, Unknown
  Obtained from environmental sample
  misc_feature (1)..(525): n is a, c, g, or t
ttgacgaggtataacgtacaaaaaaaactcaaggtaaaagattttccgtttttaatggggcagaaactgtaccttgacagtgagggactgtctgtctatgatacgatcgaaaaggcaatccgtcatggaacgctcagtgtcggatttataggtctggcggaatgtcttaccgcgttgatggacaaacatcatggggaaagtgccgaggcccaggcccttggcgttgccatcgtcagccacataaggcgcaggtgtgatgaggcgacgaaaaaaaacagcctcaatttttcgctgcttgctacgcccgctgaacagttaagcggaaaatttacccagcttgatgttgaacggtatggcgtaattaagggcataacagacaagaagtggtacacaaattcttttcatgtgcctgtagaatacaacattacagcgctggacaaaataaaaattgaaggggcgtatcacaagtattgcaacgcggggcatatatcctatgttgaattaaaattcggcgccggaacataa

SEQ ID NO: 40152 - protein, 174 aa, Unknown
  Obtained from environmental sample
  misc_feature (1)..(174): Xaa is any amino acid
MTRYNVQKKLKVKDFPFLMGQKLYLDSEGLSVYDTIEKAIRHGTLSVGFIGLAECLTALMDKHHGESAEAQALGVAIVSHIRRRCDEATKKNSLNFSLLATPAEQLSGKFTQLDVERYGVIKGITDKKWYTNSFHVPVEYNITALDKIKIEGAYHKYCNAGHISYVELKFGAGT

SEQ ID NO: 40153 - DNA, 780 bp, Unknown
  Obtained from environmental sample
  misc_feature (1)..(780): n is a, c, g, or t
atggccacctttgatcccgcggggcaatatcatcaccatcggcggcatcggcaatgtcagcgacaacgggttcatgggcggcaggatcggcggcggggacaggctttcgctcgtctatctgaacaactacgccataaacagcctgaaggtcgccctcgggctcgccgccgccatgctgacctttctctacacgcaggagtggtggtttctggcatggttcggcgccatcatctggttcgccatcacggcgttgcgcaacatcatccaatccgtgctcagcggcggggtattccgccgcacgcttctgcgctggagcgattacgtcagcgtcggcagggtgtgcgattccctcatgtatacaggcttttccgtgcccctgctggaactgggcatgcgctatctgctgctggacaaaggcctgggcgtcacgctgaaaaccaaccctgttctggcctttaccgtcatggctgtggtcaacggcctgtatatcgccgcgcacaacgtctaccgcggctttccccgcgcagcggtcgtcggcaatctcttccgcagcgtggcggccgttccgtgctccgtcctgtaccacgctctgctgctggcgcttttgcacgccctgaatgcgccggagccggagatgtacctgcaactgggcgcggccatcatttccaagaccgcctcggacaccgtggccggactcatcgaaagcgtggccgaccggcagcgcaatctgcgcttgcgaggaatggactacacggacaagatcggccagttggtcaataa

SEQ ID NO: 40154 - protein, 259 aa, Unknown
  Obtained from environmental sample
  misc_feature (1)..(259): Xaa is any amino acid
MATFDPAGQYHHHRRHRQCQRQRVHGRQDRRRGQAFARLSEQLRHKQPEGRPRARRRHADLSLHAGVVVSGMVRRHHLVRHHGVAQHHPIRAQRRGIPPHASALERLRQRRQGVRFPHVYRLFRAPAGTGHALSAAGQRPGRHAENQPCSGLYRHGCGQRPVYRRAQRLPRLSPRSGRRQSLPQRGGRSVLRPVPRSAAGAFARPECAGAGDVPATGRGHHFQDRLGHRGRTHRKRGRPAAQSALARNGLHGQDRPVGQ

SEQ ID NO: 40155 - DNA, 495 bp, Unknown
  Obtained from environmental sample
  misc_feature (1)..(495): n is a, c, g, or t
atgcttgacggcaaaccggttatcatccacggcgacggctcaagcctgtggacgctgacgcataacagcgactttgcgcgcgcctttgtgcccttaatggcgaatatccacgctatcggcgaagcggtgcagataaccacggacgaaagcgtgacatggaaccagatttaccaaataatcgccgacgcgctgaatgtaaaacttaacgccgtacatatcgcgacagattttctcgcggcggcttctcaaggcctttatgattttaccggaggtcttacaggcgataaatccaacacggtagtttttgacaacacaaagttgaaacgccttgtccccggtttttcccaacaggtatcaacaagcgaaggaatcagatccaccgtcgccaacgtgctcgcaaaccccgaactgcaaaaagaagaccgggaattcgacgaatggtgcgacaaagtaatagcagcgcaagaagacgcgcttaaggcattgaaacaataa

SEQ ID NO: 40156 - protein, 164 aa, Unknown
  Obtained from environmental sample
  misc_feature (1)..(164): Xaa is any amino acid
MLDGKPVIIHGDGSSLWTLTHNSDFARAFVPLMANIHAIGEAVQITTDESVTWNQIYQIIADALNVKLNAVHIATDFLAAASQGLYDFTGGLTGDKSNTVVFDNTKLKRLVPGFSQQVSTSEGIRSTVANVLANPELQKEDREFDEWCDKVIAAQEDALKALKQ

SEQ ID NO: 40157 - DNA, 501 bp, Unknown
  Obtained from environmental sample
  misc_feature (1)..(501): n is a, c, g, or t
ttggcggagtttctggatgaatttaaaaacaaccacgcgcttgccgcgaaattttataaacttttgacggtatgccttttattcatgtttgccgcgaatactgtgacagcctgttccgaaaaaaaattgccaatcagggtactgacatttgagcgcaacgggacagtattggttacaataaaagcggaaaccgcaataactcccgaggaacgctcaaggggacttatggaaaggaaaaagcttaaagacggcgatgggatgatttttatttttgaaaggaacgaggttctttcattctggatgaaagacacgtatattcccctttccatagcgttcatcgcgtcggacggaagaataatcgacataagggatatgtatccgcttgatctcagccctgtcatatcaagcagggcggtgcgttacgcgctggaagtgcctcagggctggttcagccgcgctggaatacggacgggcgatattataaccggaatttccttttga

SEQ ID NO: 40158 - protein, 166 aa, Unknown
  Obtained from environmental sample
  DOMAIN (47)...(165): Uncharacterized ACR, COG1430
  misc_feature (1)..(166): Xaa is any amino acid
MAEFLDEFKNNHALAAKFYKLLTVCLLFMFAANTVTACSEKKLPIRVLTFERNGTVLVTIKAETAITPEERSRGLMERKKLKDGDGMIFIFERNEVLSFWMKDTYIPLSIAFIASDGRIIDIRDMYPLDLSPVISSRAVRYALEVPQGWFSRAGIRTGDIITGISF

SEQ ID NO: 40159 - DNA, 321 bp, Unknown
  Obtained from environmental sample
  misc_feature (1)..(321): n is a, c, g, or t
gtgataccctttaataaaccatatttaacgggaaaagaaatagaatatatagaagaggcagtatgctttgggaaactgtccggaaatggcgaattcacgaaaaagtgtcaaaaattttttgaagaaacatatggttttaataaaagccttcttaccacttcttgcacagatgcccttgaaatgtgcgctattcttgctgacattcaacctgagaatgaagtaattgtaccaagctacacatttgtatccacagcgctgggatttgtcccccagggggcgaaaattgtgtggtgtctagccagaatgacaatcctaatatga

SEQ ID NO: 40160 - protein, 106 aa, Unknown
  Obtained from environmental sample
  misc_feature (1)..(106): Xaa is any amino acid
MIPFNKPYLTGKEIEYIEEAVCFGKLSGNGEFTKKCQKFFEETYGFNKSLLTTSCTDALEMCAILADIQPENEVIVPSYTFVSTALGFVPQGAKIVWCLARMTILI

SEQ ID NO: 40161 - DNA, 522 bp, Unknown
  Obtained from environmental sample
  misc_feature (1)..(522): n is a, c, g, or t
atgaattctgaacaacaagcaaagctaatacacaacgaattaagctcattgtttttgcggtatcttaaattcattcgtatttattcgtttaaatcactgtttcttgttttttgtttgtgttttcctgtatcctgctcatcgcaaaagctggcagtaggggggctgccgattgaaagggacggacagcaggttgttgttgttaaagcggaaatagcccgtaccggagatgagcgcagcaaggggttgatgtaccgtaaaaaactgcctgacggcgaaggaatgctatttgtttttgaaagggacgaagtactgtctttttggatgaagaatacttatattcccctgtctatcgcgtttattgcgtctgacggtaaaattattgatattaaagatatgtatccgcaagatgagacttccgtagtatcgagccgttcagtccgttatgcgcttgaagtgcctatgggctggttttcacgagcgggagttcgtacaggtgatacgcttttatcggggaagctgtaa

SEQ ID NO: 40162 - protein, 173 aa, Unknown
  Obtained from environmental sample
  DOMAIN (55)...(172): Uncharacterized ACR, COG1430
  misc_feature (1)..(173): Xaa is any amino acid
MNSEQQAKLIHNELSSLFLRYLKFIRIYSFKSLFLVFCLCFPVSCSSQKLAVGGLPIERDGQQVVVVKAEIARTGDERSKGLMYRKKLPDGEGMLFVFERDEVLSFWMKNTYIPLSIAFIASDGKIIDIKDMYPQDETSVVSSRSVRYALEVPMGWFSRAGVRTGDTLLSGKL

SEQ ID NO: 40163 - DNA, 459 bp, Unknown
  Obtained from environmental sample
  misc_feature (1)..(459): n is a, c, g, or t
ttgcgtttgctaagagaaggctccttaaagcatttaatttatctctccctttccataatttggatgataacatcttcgcacatacagctaacatatttctctttgtggggtgctgggctttttgttctgtttgagattttttcaaacaaactctctgcaaaaattcgcacaattcgcttggggcttgcagcccttgcacttaccattggtttaatgataagtgcatttcaagttattccaccttatctatacacaacaacttcctctgtcaggggaagctcagagaaaacaaccatagaacattccgcaagctggagcttgcacggcgaggaactcttggctatgattttacctggatttttgggaaccgatgttggagataggaattgcaattcatattgggggcaaaatccttttaagctaaatgcagacggagccggaactcttttaacattttag

SEQ ID NO: 40164 - protein, 152 aa, Unknown
  Obtained from environmental sample
  misc_feature (1)..(152): Xaa is any amino acid
MRLLREGSLKHLIYLSLSIIWMITSSHIQLTYFSLWGAGLFVLFEIFSNKLSAKIRTIRLGLAALALTIGLMISAFQVIPPYLYTTTSSVRGSSEKTTIEHSASWSLHGEELLAMILPGFLGTDVGDRNCNSYWGQNPFKLNADGAGTLLTF

SEQ ID NO: 40165 - DNA, 870 bp, Unknown
  Obtained from environmental sample
  misc_feature (1)..(870): n is a, c, g, or t
ttgcagttgaaaagcataaatgtggccagcgcaaaattggagatacaagaagttttgccacaaaatttaatattctttttgcaaaccaacgacttgcgttcatctaatagatggttatctgatattgagagaacagcgaaaagagtttatagctccgatattaaatttgaaaacccaaagagaaatgaatggctaaaaacagaaattgatatttctaaatacataacgaaaaaagccggagctgcatatattgtaaatttaaatttcaataatgaaaatctcattgccacttgcaaaactacaaaccaagaatacggagaaaacgatttggtttacgaaggcgattcttattacgaaaatccgtgcaatagttattattattacgatgcgaatagagatttggaaaaaattctgattgcctcttccattgcattaacggcaaaaaaagagagcgggggcattcacgtttgggcagttgatgttgaaagttccaaaccaatttcgggtttgtctttggaactatatggcaaaataaatgatgttttggctacgcaaagaacaaattcaaatggctatgtatttttcaaagcagcgccacaggagagttatgttgtaaaagggcatggagttagagggcttgctttattaaagctggaccagagtaattgggaaatcagccgttttgacgttggcggggttttggaagaaagcaataaggcgagattatttggctacacggagagaggcgttcacagaccaggcgataccattcatttcgcgggcattgtgcgcgaaatcggtggaaaagccattagcaaacgtgcagatgtccgttgctgtgaaaaatccaatgggttccgttgtttttga

SEQ ID NO: 40166 - protein, 289 aa, Unknown
  Obtained from environmental sample
  misc_feature (1)..(289): Xaa is any amino acid
MQLKSINVASAKLEIQEVLPQNLIFFLQTNDLRSSNRWLSDIERTAKRVYSSDIKFENPKRNEWLKTEIDISKYITKKAGAAYIVNLNFNNENLIATCKTTNQEYGENDLVYEGDSYYENPCNSYYYYDANRDLEKILIASSIALTAKKESGGIHVWAVDVESSKPISGLSLELYGKINDVLATQRTNSNGYVFFKAAPQESYVVKGHGVRGLALLKLDQSNWEISRFDVGGVLEESNKARLFGYTERGVHRPGDTIHFAGIVREIGGKAISKRADVRCCEKSNGFRCF

SEQ ID NO: 40167 - DNA, 819 bp, Unknown
  Obtained from environmental sample
  misc_feature (1)..(819): n is a, c, g, or t
atgaatttaatacaatatataattaaattatgcaagtgggcgcgaggagcagttgtttttgctttgcttgtaggactgtctctttatatgctgtttgtgcaggttaagcataagcaaaacatagcagattttcttttgtccaatgttttttatctgccgcagtccgcgctttcttatgttttgcacataagcaacctcagcgaaaaaaatgcaaaattaaaaaaagaaaacgcaaaactaaaattggaaatagatttagccaaagaatatgccattgaaaacgaaaggctaaaaaaacttttgctgtttgagaatcaatggaactatcctatttttttaacccaaataatagggcataaccctggtgcatatatgacaacagttgtaataaacaacggagaatcggattctattttttacggaatgcccgtattcactacagacggtttggttggcaaggtttcaaaagtttttccgcatcattcaatggtgcagctcctttcagacccaaactcaagaacatctgttatttcccagcgttcaagagtgctgggaatggtgttttcaagaaatagcggcgatatgcaaattcagggtncaagttctgcagatttaatgccaggcgatactattgtaacttccggacttggcggcatttatccaaaaggaattcctgttggcgttattagcaaattggataaaaataactctgaggttttaaacacaggaagcattaaattattgcaacatattttttctttggaagaagtttttgttcttagaaaaaatatggactggattgtatgggacgagaattag

SEQ ID NO: 40168 - protein, 272 aa, Unknown
  Obtained from environmental sample
  DOMAIN (114)...(264): rod shape-determining protein MreC
  misc_feature (1)..(272): Xaa is any amino acid
MNLIQYIIKLCKWARGAVVFALLVGLSLYMLFVQVKHKQNIADFLLSNVFYLPQSALSYVLHISNLSEKNAKLKKENAKLKLEIDLAKEYAIENERLKKLLLFENQWNYPIFLTQIIGHNPGAYMTTVVINNGESDSIFYGMPVFTTDGLVGKVSKVFPHHSMVQLLSDPNSRTSVISQRSRVLGMVFSRNSGDMQIQGXSSADLMPGDTIVTSGLGGIYPKGIPVGVISKLDKNNSEVLNTGSIKLLQHIFSLEEVFVLRKNMDWIVWDEN

SEQ ID NO: 40169 - DNA, 480 bp, Unknown
  Obtained from environmental sample
  misc_feature (1)..(480): n is a, c, g, or t
atggacaatgcgattaaagacgagcgcgctgttgacgaatgctggattgttgaaagagagaaacttgtagaggtagtaaaatcccttgattatgacgttttgatagacatcgttggggtggattaccttggaatggaaaaccacaaggtcaaacgctttgcggttatttattgccttaaaaacaccaaaaacatggcacgtgtgcgtataaaggttcaggtggaagagcaggagaaaatccccactttgagcaaaatttacccaattgcagactggcaagaacgcgaagtttgggaccagttcggcattgtatttgatgagcatcctaatttgaaaagaatattgaatcacgtagattttgaagggcaccccttgcgcaaagactatccagccaaaaaacgacaatggctatctgaaagcgaccaaatgcaagaccaattagaaaaacgcttagaaaccttagggtacagggtcttataa

SEQ ID NO: 40170 - protein, 159 aa, Unknown
  Obtained from environmental sample
  DOMAIN (70)...(137): Respiratory-chain NADH dehydrogenase, 30 Kd subunit
  misc_feature (1)..(159): Xaa is any amino acid
MDNAIKDERAVDECWIVEREKLVEVVKSLDYDVLIDIVGVDYLGMENHKVKRFAVIYCLKNTKNMARVRIKVQVEEQEKIPTLSKIYPIADWQEREVWDQFGIVFDEHPNLKRILNHVDFEGHPLRKDYPAKKRQWLSESDQMQDQLEKRLETLGYRVL

SEQ ID NO: 40171 - DNA, 537 bp, Unknown
  Obtained from environmental sample
  misc_feature (1)..(537): n is a, c, g, or t
atgcaaaacagaaattcgggattttttgccggtaagctagacgaacttgttagctggggtcgtctgcattcgctttggcccttcccctatggaacggcttgctgcgccattgaatttatgtccaccgaatctgctcgctacgacctttcgcgcctcggttccgaatttgtgcgctttaccccaaggcaggcagatgtgctggctgtttctggaacaataaccttcaaacaagcacccatactaaaacgcatttacgaacagatgatggaacccaaatgggtgatttcaatgggagcctgtgcctgctccggcggtttttacgactgctattgcaccgtgccgggcatagaccgcattattcccgtggacatttacataggaggctgcccaagccgccccgaagccttttttgacgcaatgctggatttacaagctaaaataaaaaaccagtcttatatggaagagagaaaaaagaaattaaaggaacaattggaaaatatcaaaaactggagaaatagctatggacaatgcgattaa

SEQ ID NO: 40172 - protein, 178 aa, Unknown
  Obtained from environmental sample
  DOMAIN (37)...(144): NADH ubiquinone oxidoreductase, 20 Kd subunit
  misc_feature (1)..(178): Xaa is any amino acid
MQNRNSGFFAGKLDELVSWGRLHSLWPFPYGTACCAIEFMSTESARYDLSRLGSEFVRFTPRQADVLAVSGTITFKQAPILKRIYEQMMEPKWVISMGACACSGGFYDCYCTVPGIDRIIPVDIYIGGCPSRPEAFFDAMLDLQAKIKNQSYMEERKKKLKEQLENIKNWRNSYGQCD

SEQ ID NO: 40173 - DNA, 360 bp, Unknown
  Obtained from environmental sample
  misc_feature (1)..(360): n is a, c, g, or t
gtgaatacgcttcttgttgaagccgccaaacacttgaaaggccaatgccatgcggggatcgtccaagcaaggattccttttacgggcaacaatgatcccgagagtatgcccgcagggcacgaggtaatgaacaagtgggacgcctggataaaagccggctgtcttgcctcggagatggaaagcgccgccctgttcatcgtgagccagatccttggagcaagggcgggttgtgtacttaacgtggtgtggaaccaggaaagggaacgcgccggtatgagcaacccccagagccacgatacaagtcttgccattaaaacggctgtggaagcaattagaatcctgattgggaaagatacttaa

SEQ ID NO: 40174 - protein, 119 aa, Unknown
  Obtained from environmental sample
  misc_feature (1)..(119): Xaa is any amino acid
MNTLLVEAAKHLKGQCHAGIVQARIPFTGNNDPESMPAGHEVMNKWDAWIKAGCLASEMESAALFIVSQILGARAGCVLNVVWNQERERAGMSNPQSHDTSLAIKTAVEAIRILIGKDT

SEQ ID NO: 40175 - DNA, 711 bp, Unknown
  Obtained from environmental sample
  misc_feature (1)..(711): n is a, c, g, or t
gtgtatatagacagcttattggtttcccaaccggactccggcgagcaagcccttgatatatgtgaaaccctagtgcgttccagcgcctttgaccttatagtgatagattccgttgcagcgttggtacctgaagcagaaataaaaggcgaaatgggagatagccacatgggcttgcaggcaaggcttatgagccaagctctgagaaagttgactggcatactcaataaatcgaacacagctttgattttcataaaccaaattcgcatgaaaataggcgttatgttcggcaatccggaaactacaaccggcggcaacgccttgaagttctacgcctctcagcgtatggatatccgccgcgttagtaccataaaagaaggggaaaattccattggcaaccgcacaagggttaaggttgtgaaaaacaaggttgctccaccgttcacccaatgcgaatttgatattctttacgggcagggaatttcaagggaagcctccatcctagacttggctgttgatttggagttcattcaaaagagcggttcgtggttctcctacaacggcgaaagaatagggcagggacgtccaaacgcccttcaatatttaaaagaaaacgcagaggtctctaaagaaattgaaaagaaaatccgcgagcataggaaagagattgagatgttccggggcaacagcgaggattcaaaagttgagaattga

SEQ ID NO: 40176 - protein, 236 aa, Unknown
  Obtained from environmental sample
  DOMAIN (1)...(221): recA bacterial DNA recombination protein
  misc_feature (1)..(236): Xaa is any amino acid
MYIDSLLVSQPDSGEQALDICETLVRSSAFDLIVIDSVAALVPEAEIKGEMGDSHMGLQARLMSQALRKLTGILNKSNTALIFINQIRMKIGVMFGNPETTTGGNALKFYASQRMDIRRVSTIKEGENSIGNRTRVKVVKNKVAPPFTQCEFDILYGQGISREASILDLAVDLEFIQKSGSWFSYNGERIGQGRPNALQYLKENAEVSKEIEKKIREHRKEIEMFRGNSEDSKVEN

SEQ ID NO: 40177 - DNA, 378 bp, Unknown
  Obtained from environmental sample
  misc_feature (1)..(378): n is a, c, g, or t
ttgggtgaacggtggagcaaccttgtttttcacaaccttaacccttgtgcggttgccaatggaattttccccttcttttatggtactaacgcggcggatatccatacgctgagaggcgtagaacttcaaggcgttgccgccggttgtagtttccggattgccgaacataacgcctattttcatgcgaatttggtttatgaaaatcaaagctgtgttcgatttattgagtatgccagtcaactttctcagagcttggctcataagccttgcctgcaagcccatgtggctatctcccatttcgccttttatttctgcttcaggtaccaacgctgcaacggaatctatcactataaggtcaaaggcgctggaacgcactag

SEQ ID NO: 40178 - protein, 125 aa, Unknown
  Obtained from environmental sample
  misc_feature (1)..(125): Xaa is any amino acid
MGERWSNLVFHNLNPCAVANGIFPFFYGTNAADIHTLRGVELQGVAAGCSFRIAEHNAYFHANLVYENQSCVRFIEYASQLSQSLAHKPCLQAHVAISHFAFYFCFRYQRCNGIYHYKVKGAGTH

SEQ ID NO: 40179 - DNA, 372 bp, Unknown
  Obtained from environmental sample
  misc_feature (1)..(372): n is a, c, g, or t
atgatttcgtccatggatcacaaacgcgcctatgaaggcaacgaaggccccaacacaggcggcatgggagtaatcgcgccaaatccccattacacggaagaaatcgcaagcgtatgcgaaaaaacaatttttttaccaagcattaaggcgatgagggaagaaggctgtccgtttaaaggatgtctgtacttcgggcttatgctcacttccagaggcccctttgtaattgagtacaattgccgcttcggagacccggaagcgcaggcggtacttcccctgcttgaaacaagcctgttggaagtgatggaagccgtaacggacgaaaggctttccgatacggaaattcgctggaaagacgctcattgcgcctga

SEQ ID NO: 40180 - protein, 123 aa, Unknown
  Obtained from environmental sample
  DOMAIN (3)...(87): Phosphoribosylglycinamide synthetase, ATP-grasp (A) domain
  misc_feature (1)..(123): Xaa is any amino acid
MISSMDHKRAYEGNEGPNTGGMGVIAPNPHYTEEIASVCEKTIFLPSIKAMREEGCPFKGCLYFGLMLTSRGPFVIEYNCRFGDPEAQAVLPLLETSLLEVMEAVTDERLSDTEIRWKDAHCA

SEQ ID NO: 40181 - DNA, 747 bp, Unknown
  Obtained from environmental sample
  misc_feature (1)..(747): n is a, c, g, or t
atgttgttgaatttgcattggggtgagaatatagttaagtttgaggcattttttttttcaaaggggcagagggaaaattttttttatacaaaagttttttctatatttacttcaaagaaaattttttactttttgggaaaaaatatgaaaattctgccttttttttcaattcccctcgcggagatggtttgtattttgtcgcttttctctggtgcgtccgtggacggggataccgaggtatattcatattgcgtttatccagaaagcaagacgtgtttgatcggtactttttcttcctgccaaaaaggtgggcaactaggcgatgtgtgtccgtttacgatttcaaacgcatcaagttcaagccttagtagaagtagtagcagcagtagcagtagtagtagcagtagtagcagtggtagcagcagcagcagcagcagcagtagtagcagtagcagtagtagtagcagcagtagtagcagtagcagtagtagtagcagcagtagtagcagtagcagcagtagtagcagtagcagcagtagtagcagcagtagtattagaagcagtagcagtgtcgcaacatcaacaggttctggttattcttgctatatatataattctgcatatccaaatggttattactgtttagattatacagcttatgtcactagtggtacttataccgtagcgactattcaagcggcatgtactaatgcggggtacacttttacatactcaaagtgcccctga

SEQ ID NO: 40182 - protein, 248 aa, Unknown
  Obtained from environmental sample
  misc_feature (1)..(248): Xaa is any amino acid
MLLNLHWGENIVKFEAFFFSKGQRENFFYTKVFSIFTSKKIFYFLGKNMKILPFFSIPLAEMVCILSLFSGASVDGDTEVYSYCVYPESKTCLIGTFSSCQKGGQLGDVCPFTISNASSSSLSRSSSSSSSSSSSSSSGSSSSSSSSSSSSSSSSSSSSSSSSSSSSSSSSSSSSSSSSSSSSSIRSSSSVATSTGSGYSCYIYNSAYPNGYYCLDYTAYVTSGTYTVATIQAACTNAGYTFTYSKCP

SEQ ID NO: 40183 - DNA, 324 bp, Unknown
  Obtained from environmental sample
  misc_feature (1)..(324): n is a, c, g, or t
atgtgtgtccgtttacgatttcaaacgcatcaagttcaagccttagtagaagtagtagcagcagtagcagtagtagtagcagtagtagcagtggtagcagcagcagcagcagcagcagtagtagcagtagcagtagtagtagcagcagtagtagcagtagcagtagtagtagcagcagtagtagcagtagcagcagtagtagcagtagcagcagtagtagcagcagtagtattagaagcagtagcagtgtcgcaacatcaacaggttctggttattcttgctatatatataattctgcatatccaaatggttattactgtttag

SEQ ID NO: 40184 - protein, 107 aa, Unknown
  Obtained from environmental sample
  misc_feature (1)..(107): Xaa is any amino acid
MCVRLRFQTHQVQALVEVVAAVAVVVAVVAVVAAAAAAAVVAVAVVVAAVVAVAVVVAAVVAVAAVVAVAAVVAAVVLEAVAVSQHQQVLVILAIYIILHIQMVITV

SEQ ID NO: 40185 - DNA, 684 bp, Unknown
  Obtained from environmental sample
  misc_feature (1)..(684): n is a, c, g, or t
atgctcttaagtcctctttacgatcaaaaattatgtatgatcaaagttaacgctcccatcgcgtcagcaggtcaggatattggccgtatcactgtcttttcgcgcggctggcttgaaaacgaatccatttggctgcacatggaatacaaatacctgcttgagcttttacgtaacggtcttgcggaagaatttttcagtattgcgaaaacagcgcttattcccttcattgatcccaatatatacggacgcagtatttttgaaaattcctcgtttttggcaagttcggcacaccctgatgaaactattcacggtcaaggttttaccgctcgtctttcaggcgctaccgcagaattcatctcaatgtggatagcgatgacaagcggccttaagccgttttccatgcatgacggcgaactgcgtctcagcttggatccatgtcttcccgccgattttttcaacgcggacgatacttttacctttaattttcttggtaactgtgaagtggtctatcacaatgaatcacgcgccaataccttcggtacaaatggtgtaaaaacgcaaaagtatttaataacatacgctgatggcggcgttgatacaattaccggagattatatcaaagggaaaaacgctcttgccatccgcgaaggaaaagcacgccgcattgatgtcagtctaagttaa

SEQ ID NO: 40186 - protein, 227 aa, Unknown
  Obtained from environmental sample
  misc_feature (1)..(227): Xaa is any amino acid
MLLSPLYDQKLCMIKVNAPIASAGQDIGRITVFSRGWLENESIWLHMEYKYLLELLRNGLAEEFFSIAKTALIPFIDPNIYGRSIFENSSFLASSAHPDETIHGQGFTARLSGATAEFISMWIAMTSGLKPFSMHDGELRLSLDPCLPADFFNADDTFTFNFLGNCEVVYHNESRANTFGTNGVKTQKYLITYADGGVDTITGDYIKGKNALAIREGKARRIDVSLS

SEQ ID NO: 40187 - DNA, 612 bp, Unknown
  Obtained from environmental sample
  misc_feature (1)..(612): n is a, c, g, or t
gtgctgaaagaaggcgggaatgggccgaacagcggagcagcgggtcccgacaccacaggcgctggcgtagtcgtcaccgggacaggagttgccgttacggggccaggcgtcgcggctggcgccggagctgccgtaaccggcgtcggttcgggactcggagccgcgtccgcaaccgaggccggggtcgggcgagcgccgggttttaccgtcggtgatttcgggctcgcggctttggtcgccgtcccttcgggggcagccgcttttgtcgtcgctgcgggcgatggctccggcgacgcagcaggcgccgccgtctcgggcggcgtttccactttcagtttttcgcgcatcgcgcgttcgacgggtggctcgagcgtcgatgatgcggatcgaacgaactccccggattcctcaagtgctttgagcaggtctttgctcttcatgccgagctctttcgccagctcgtgcacgcgaatctttgccaacttctctcctgtctgggcggccctgcccggacaggctgtggccgctggttactgctgcgtactcatcgcacgggactcatcgaactaccatcgtctgctattgcctcctcggcctttcggccgaaactag

SEQ ID NO: 40188 - protein, 203 aa, Unknown
  Obtained from environmental sample
  misc_feature (1)..(203): Xaa is any amino acid
MLKEGGNGPNSGAAGPDTTGAGVVVTGTGVAVTGPGVAAGAGAAVTGVGSGLGAASATEAGVGRAPGFTVGDFGLAALVAVPSGAAAFVVAAGDGSGDAAGAAVSGGVSTFSFSRIARSTGGSSVDDADRTNSPDSSSALSRSLLFMPSSFASSCTRIFANFSPVWAALPGQAVAAGYCCVLIARDSSNYHRLLLPPRPFGRN

SEQ ID NO: 40189 - DNA, 540 bp, Unknown
  Obtained from environmental sample
  misc_feature (1)..(540): n is a, c, g, or t
ttggcaaagattcgcgtgcacgagctggcgaaagagctcggcatgaagagcaaagacctgctcaaagcacttgaggaatccggggagttcgttcgatccgcatcatcgacgctcgagccacccgtcgaacgcgcgatgcgcgaaaaactgaaagtggaaacgccgcccgagacggcggcgcctgctgcgtcgccggagccatcgcccgcagcgacgacaaaagcggctgcccccgaagggacggcgaccaaagccgcgagcccgaaatcaccgacggtaaaacccggcgctcgcccgaccccggcctcggttgcggacgcggctccgagtcccgaaccgacgccggttacggcagctccggcgccagccgcgacgcctggccccgtaacggcaactcctgtcccggtgacgactacgccagcgcctgtggtgtcgggacccgctgctccgctgttcggcccattcccgccttctttcagcactcgcgtgtcagcaactgcttctagctctccgaagccagtgatgcgcagtgccttatag

SEQ ID NO: 40190 - protein, 179 aa, Unknown
  Obtained from environmental sample
  DOMAIN (1)...(53): Translation initiation factor IF-2, N-terminal region
  misc_feature (1)..(179): Xaa is any amino acid
MAKIRVHELAKELGMKSKDLLKALEESGEFVRSASSTLEPPVERAMREKLKVETPPETAAPAASPEPSPAATTKAAAPEGTATKAASPKSPTVKPGARPTPASVADAAPSPEPTPVTAAPAPAATPGPVTATPVPVTTTPAPVVSGPAAPLFGPFPPSFSTRVSATASSSPKPVMRSAL

SEQ ID NO: 40191 - DNA, 756 bp, Unknown
  Obtained from environmental sample
  misc_feature (1)..(756): n is a, c, g, or t
gtgggggttatcgacaatgagttctttgaccggggttacgccctgttagccgacgaagtcctgaatctcacagaattctctgaaaccaaaatttcaggcaatataactgtcatgaaagacggcctgctttatacatctatcccaaataataaaagctgggccgccagagttgatggcattaatgccccgattattgggattgacggctgcatgatcgccttacggttgagcgaaggaacgcacgacatagaattgcggtattacaacaaggatctacagaccggaattatcataagcctcctttctcttgccgtatttgccgcgttgatcgtgtggaaaagaatacccagggaaatgctttattacctgttttttggcgcggcaaccacttttgtcaactggtgtgtttacggccttaccgtaaggttcgcgggcttttcaataacagcaggcaacgtgatcgcctgggccgcggctgttattttcgcttttataacgaacaaaatgtgggtcttccgaagccgctcctggcagccgctcctggtactgcgcgaggggagcgcttttctcggcgcccgaatcttttccggccttgtagaaatcgccggcgttcctcctctttaccgcatcggccttaattattccctccttggtatagagggcttcgccgcaaaagtatcggtaagcgtaattgtaatcgtattgaattattttttcagtaaactgcttatttttcgccgcgttaaagccgggtga

SEQ ID NO: 40192 - protein, 251 aa, Unknown
  Obtained from environmental sample
  DOMAIN (121)...(245): GtrA-like protein
  misc_feature (1)..(251): Xaa is any amino acid
MGVIDNEFFDRGYALLADEVLNLTEFSETKISGNITVMKDGLLYTSIPNNKSWAARVDGINAPIIGIDGCMIALRLSEGTHDIELRYYNKDLQTGIIISLLSLAVFAALIVWKRIPREMLYYLFFGAATTFVNWCVYGLTVRFAGFSITAGNVIAWAAAVIFAFITNKMWVFRSRSWQPLLVLREGSAFLGARIFSGLVEIAGVPPLYRIGLNYSLLGIEGFAAKVSVSVIVIVLNYFFSKLLIFRRVKAG

SEQ ID NO: 40193 - DNA, 531 bp, Unknown
  Obtained from environmental sample
  misc_feature (1)..(531): n is a, c, g, or t
atgggtaggttccggatatgcgctatctcgtccgggaacggctgttggacatcaaagaggatttgtggatcagggatcatcacgggaaccaggcgttctaggtcaacgcccggctccagtccctgcatcacacgtctggtgctggaagacgcctccggccgcaagctcgcctcgatcaagcacaagctggtgaccgtcgctgacgccatgacgattgagcacgagggagagaaggtcgccaccgtgcatcgggcgatcatctcgtcagctgcaccaccgggcgcacatcgatcctgcagtacgacgggggctcggctggaggcggtcggcaacatcatcgacaaggactttgagatccggggcgggcaccacgtgctggcccatatctcccggaagtggttccggctccgggacacttacggcgaggacatctcccgggggcagaacgacgcgttcatcctcgccatagcgatcggcctggacgtgggatcctctagagtcgacccgcaggcacgcaagcatgatatgtaa

SEQ ID NO: 40194 - protein, 176 aa, Unknown
  Obtained from environmental sample
  misc_feature (1)..(176): Xaa is any amino acid
MGRFRICAISSGNGCWTSKRICGSGIITGTRRSRSTPGSSPCITRLVLEDASGRKLASIKHKLVTVADAMTIEHEGEKVATVHRAIISSAAPPGAHRSCSTTGARLEAVGNIIDKDFEIRGGHHVLAHISRKWFRLRDTYGEDISRGQNDAFILAIAIGLDVGSSRVDPQARKHDM

SEQ ID NO: 40195 - DNA, 402 bp, Unknown
  Obtained from environmental sample
  misc_feature (1)..(402): n is a, c, g, or t
ttgactgccggctctattgccagaattatcattacttttaccattatttgtgcgataattatgggtattgggctgggtttttctctggcggaaacgaccaatatcaaaaatcaggaaaattttgttgaatttgcccccgcattgcctaccaaaatactggatattaacgggacgctgataaccgaattctcggcggatgaaaaacgggagttggtttcattgagtgtactgccccgtcaccttattcacgcggtgttggcgcgggaagacccccagttttactcccaccggggctttagcatcaagggtataatccgcgccgcgttcgggcagcttatcgggagatccctcggcggcggctcgaccatcacccaacaagtggcgggaacccctgtacactga

SEQ ID NO: 40196 - protein, 133 aa, Unknown
  Obtained from environmental sample
  DOMAIN (50)...(131): Transglycosylase
  misc_feature (1)..(133): Xaa is any amino acid
MTAGSIARIIITFTIICAIIMGIGLGFSLAETTNIKNQENFVEFAPALPTKILDINGTLITEFSADEKRELVSLSVLPRHLIHAVLAREDPQFYSHRGFSIKGIIRAAFGQLIGRSLGGGSTITQQVAGTPVH

SEQ ID NO: 40197 - DNA, 624 bp, Unknown
  Obtained from environmental sample
  misc_feature (1)..(624): n is a, c, g, or t
gtgtttatgttgtcctgccaatcaaaatcttctttagaagataacgtctttttgaatatgacaacagaagaattagcacaaaaatgtttatctttccctctatttgggttaatgcatgcttacaacagtcctgtgagcggttttgcaattatgatgaatgagtatgatggatttcaagaacttttcaaacgggacgatgctgcaaacgaattgttaaaagcatattgcaaacttgatccgcttgccgttgatgcgaattggacagacctccaaaagggacagtttgcatttgagtttacaaaaattgaaatgttttttaattattcggtaatgattgataaattagacgaaacaggtttacgaaaattgaaggaagcagttatttcaaactatacaaagaaaaaaacgcttcctgaaatatattatgaatccgatttatctgcaaccgttggagcatgcttatgcataatcaaaaaggtaaacgctgaactcatagaagaagacaaacgtgctgaggttaattatttcagttattttttaatgccgcctgctaataaaactataagtgaaggtatggcgtttttggattatattgtcgaacttttaaaaaccattgatttatga

SEQ ID NO: 40198 - protein, 207 aa, Unknown
  Obtained from environmental sample
  misc_feature (1)..(207): Xaa is any amino acid
MFMLSCQSKSSLEDNVFLNMTTEELAQKCLSFPLFGLMHAYNSPVSGFAIMMNEYDGFQELFKRDDAANELLKAYCKLDPLAVDANWTDLQKGQFAFEFTKIEMFFNYSVMIDKLDETGLRKLKEAVISNYTKKKTLPEIYYESDLSATVGACLCIIKKVNAELIEEDKRAEVNYFSYFLMPPANKTISEGMAFLDYIVELLKTIDL

SEQ ID NO: 40199 - DNA, 525 bp, Unknown
  Obtained from environmental sample
  misc_feature (1)..(525): n is a, c, g, or t
gtgtatgtagaaggtatcttcaccatgcagggaaacgccacagtatccaataatacttcctccaatggtggaggggtgtatgttagatctaccttcaccatgcaagataatgccacggtgtccggtaatcaatcctcttccaacggcggcggggtgtatgtagaaggtatcttcaccatgaaggataatacctcagtgtccggtaaccgatcctcctcctccggcggtggggtgtatgaagattatggtagcttcacaatgaaaaataatgccacggtgtccggtaatcaatcctcctctgggggtggggtatatgtcaaccgcagtactgccgttggcggtttcactatggaaggtggtacggtgtatggccttgtgggtatgccaatgggaaacaactgcagtagcacaggtgtggcactgtatgtagcaaatagcgccactgctaaatatggtgatggtagtaatattttaccccacacggatggtcaagccaattatacagacaataccatccagaggtag

SEQ ID NO: 40200 - protein, 174 aa, Unknown
  Obtained from environmental sample
  misc_feature (1)..(174): Xaa is any amino acid
MYVEGIFTMQGNATVSNNTSSNGGGVYVRSTFTMQDNATVSGNQSSSNGGGVYVEGIFTMKDNTSVSGNRSSSSGGGVYEDYGSFTMKNNATVSGNQSSSGGGVYVNRSTAVGGFTMEGGTVYGLVGMPMGNNCSSTGVALYVANSATAKYGDGSNILPHTDGQANYTDNTIQR

SEQ ID NO: 40201 - DNA, 624 bp, Unknown
  Obtained from environmental sample
  misc_feature (1)..(624): n is a, c, g, or t
atgtcggtgatactttcaaagttgctggtgacgttgctcaatccggttggattgacgctggtgtttttgttttgcgggttgctatttatgctcatttggcgtaagacgaaactgtcggcgatatttttcatcggcggttttgcggtgcttctcgcgtccagtttgcctgtcaccgcgcattatctcatgcgcgggcttgaggggcgttacgcgccgcaaaacgaatacgggccggcgtccgcggtggtgcttttgggagggttcacgaagggcaaggctccgccgcgtcaatatgtcgagacgactatggacgccaaccgcgctttcggcgctatgcgtatgtggaggcaggggttggtgtccaagatagtgctgaccggcgggcttctggagtggacgaccaacgaggcggttcctgaggccaagagtatgtttgaactgctgaacgagcatttcggcgtggacagcaccgatgtgatcctagagagtatggcgcagaatacaagggataacgccaggtatacgcagaaggcgtcaacggaggccggacttgatcttgatatcataaaggtaacgagcgtcttgtgggatcctctagagtcgacgtgcaggcacgcaagctga

SEQ ID NO: 40202 - protein, 207 aa, Unknown
  Obtained from environmental sample
  DOMAIN (78)...(205): DUF218 domain
  misc_feature (1)..(207): Xaa is any amino acid
MSVILSKLLVTLLNPVGLTLVFLFCGLLFMLIWRKTKLSAIFFIGGFAVLLASSLPVTAHYLMRGLEGRYAPQNEYGPASAVVLLGGFTKGKAPPRQYVETTMDANRAFGAMRMWRQGLVSKIVLTGGLLEWTTNEAVPEAKSMFELLNEHFGVDSTDVILESMAQNTRDNARYTQKASTEAGLDLDIIKVTSVLWDPLESTCRHAS

SEQ ID NO: 40203 - DNA, 507 bp, Unknown
  Obtained from environmental sample
  misc_feature (1)..(507): n is a, c, g, or t
gtgccgccgtgcctgagtatttttatagacttgccagaaatgtccaaaacggtagattccaccccaatcttagaaggtccgccatcaagaatcatttcgatcttatcgccgagtttatccctcacatgttccgccctcgtcggactcaacgagccaaaagggttcgcgctcggagcagccaccgccccgccggaaagcgaaatcaacgtcctcgccgcctcgtgcgccgggaagcgtattgccgcagtcggaagccccgcagtcgcgatgccgggtaacttttcgctcttgggcagaacaagcgaaagagggccgggccagaatttctcggcgagcgaaaaaagttttcgttttgtctcctcgcttaacagtgacatatccgttactttttcgagagtatcaagagcggcaatgtggataatgaggggatcaaaacgagggcggtttttcacttcaaatattttagcgagagactcggcgttaaaagcgtccgcccccagaccgtag

SEQ ID NO: 40204 - protein, 168 aa, Unknown
  Obtained from environmental sample
  misc_feature (1)..(168): Xaa is any amino acid
MPPCLSIFIDLPEMSKTVDSTPILEGPPSRIISILSPSLSLTCSALVGLNEPKGFALGAATAPPESEINVLAASCAGKRIAAVGSPAVAMPGNFSLLGRTSERGPGQNFSASEKSFRFVSSLNSDISVTFSRVSRAAMWIMRGSKRGRFFTSNILARDSALKASAPRP

SEQ ID NO: 40205 - DNA, 708 bp, Unknown
  Obtained from environmental sample
  misc_feature (1)..(708): n is a, c, g, or t
gtgaaaaaccgccctcgttttgatcccctcattatccacattgccgctcttgatactctcgaaaaagtaacggatatgtcactgttaagcgaggagacaaaacgaaaacttttttcgctcgccgagaaattctggcccggccctctttcgcttgttctgcccaagagcgaaaagttacccggcatcgcgactgcggggcttccgactgcggcaatacgcttcccggcgcacgaggcggcgaggacgttgatttcgctttccggcggggcggtggctgctccgagcgcgaacccttttggctcgttgagtccgacgagggcggaacatgtgagggataaactcggcgataagatcgaaatgattcttgatggcggaccttctaagattggggtggaatctaccgttttggacatttctggcaagtctataaaaatactcaggcacggcggcacgccgaaagaggaaatcgaaaaattgataggcggagtagaggaaaatgtttctaatgccgactcgtcgagcgctcttgcttctccaggtcagttgaaaagccattattcgccgcagaagcctttgtctgttttttcgagggaggaaatgctgcgcctgccttatgagggtgacgccgcctatttgttttttgaccgctccacgagggacgcttggcttgaagggcaggggcggcttaagactcagcggcagttctga

SEQ ID NO: 40206 - protein, 235 aa, Unknown
  Obtained from environmental sample
  DOMAIN (1)...(149): yrdC domain
  misc_feature (1)..(235): Xaa is any amino acid
MKNRPRFDPLIIHIAALDTLEKVTDMSLLSEETKRKLFSLAEKFWPGPLSLVLPKSEKLPGIATAGLPTAAIRFPAHEAARTLISLSGGAVAAPSANPFGSLSPTRAEHVRDKLGDKIEMILDGGPSKIGVESTVLDISGKSIKILRHGGTPKEEIEKLIGGVEENVSNADSSSALASPGQLKSHYSPQKPLSVFSREEMLRLPYEGDAAYLFFDRSTRDAWLEGQGRLKTQRQF

SEQ ID NO: 40207 - DNA, 678 bp, Unknown
  Obtained from environmental sample
  misc_feature (1)..(678): n is a, c, g, or t
atgttttttataagggaatttaccacaacctataaacagaccatattgggcccgctgtggcacatcataagcccgctttgctcaacccttatttacgcctttactttcggtaatatagccggagtcagcacggaaggcataccggccctccttttctactttggcggaaccatactctggaattttttttcaactaccctgaacaccgcctcatgcatcttccttaacaacgtcggcgtattcgggaaagtatattttccccggctcgcggttcccatcgcaaccactttcagcgcaatattaaaattgctgatccagtttgtcatacttatggcgtttctggcgttttttatacttaatggcagttccgtccgtccgggcccgatggcgttgcttttcccggttatgatactctggctggcggcgctcggcacgggcttctgcatggttttttccgcccttaccaccaagtaccgcgatcttaaccacgttctggggcttgccctgcagcttgccatgttcgtcacaccggtggtatatcctctgtcccaggtgccgcaaagattcaagctcttcttttatataaacccccttagtgtccctatggaattgttcagaatctggttttacggcgttggaaaagtcccctcctcgatgatatttaacagccattgttaa

SEQ ID NO: 40208 - protein, 225 aa, Unknown
  Obtained from environmental sample
  DOMAIN (1)...(210): ABC-2 type transporter
  misc_feature (1)..(225): Xaa is any amino acid
MFFIREFTTTYKQTILGPLWHIISPLCSTLIYAFTFGNIAGVSTEGIPALLFYFGGTILWNFFSTTLNTASCIFLNNVGVFGKVYFPRLAVPIATTFSAILKLLIQFVILMAFLAFFILNGSSVRPGPMALLFPVMILWLAALGTGFCMVFSALTTKYRDLNHVLGLALQLAMFVTPVVYPLSQVPQRFKLFFYINPLSVPMELFRIWFYGVGKVPSSMIFNSHC

SEQ ID NO: 40209 - DNA, 576 bp, Unknown
  Obtained from environmental sample
  misc_feature (1)..(576): n is a, c, g, or t
atgatgaaactcctttacctctttgtcacctttttccggattggccttttcgccataggaggaggacttgccactctgccttttatttttgaactcgcggataaagccgttgctgttgacggcgcggatgcctggctgacccgcgaaatggtgggaaacatgctggctgtagcccagtcttcaccgggagcaataggcgcgaatctgtcatcctacactggtatgcgctatgccggtatcgcaggcggctacgcggcggttctgggtttagtcgccccttccatcatcatcattattattgtggccaggatgctaaaggcgtttaaagaaaacacggtggtcaaaaacctcttttcaggattccgcccggcagcgacagggctgctttccgccgcaggccttggggccatagccctttcactttggaacgcggccgcaccggtttggtacatgtttatacgctggaaggaaacgttgatcttcgccgtaattttctttctgatttttaaatttaaaaaacacccaatgatttacatcattgccgcgggaataacagggatagttcttggattgtaa

SEQ ID NO: 40210 - protein, 191 aa, Unknown
  Obtained from environmental sample
  DOMAIN (2)...(177): Chromate transporter
  misc_feature (1)..(191): Xaa is any amino acid
MMKLLYLFVTFFRIGLFAIGGGLATLPFIFELADKAVAVDGADAWLTREMVGNMLAVAQSSPGAIGANLSSYTGMRYAGIAGGYAAVLGLVAPSIIIIIIVARMLKAFKENTVVKNLFSGFRPAATGLLSAAGLGAIALSLWNAAAPVWYMFIRWKETLIFAVIFFLIFKFKKHPMIYIIAAGITGIVLGL

SEQ ID NO: 40211 - DNA, 405 bp, Unknown
  Obtained from environmental sample
  misc_feature (1)..(405): n is a, c, g, or t
atgaacgagttatgccccgtatgcaatgcggaatatacacaaaacgtgacaaaatgtgagttgtgcggttttgccgatgaaaacggcataaataggaaatggaccattgccgaggacgcggaagactggcgtaatacggtagtaaagccgtatcgtatggaatggcataagcaaataaaaacacttcaaaaatgggatatgcggttacagaaaaatcaaactcctgatgaattaggcgaaaaacgtaaagaaatagccgtgtttcaaagatatatttccgcaggtaacagtcatatcgtaggtttgagatcggatggcactgttgtaacggttgggaacaaccagcaaggccagtgcgataccgcaggttggttggatattgggcgacccgttaaaaaaatataa

SEQ ID NO: 40212 - protein, 134 aa, Unknown
  Obtained from environmental sample
  misc_feature (1)..(134): Xaa is any amino acid
MNELCPVCNAEYTQNVTKCELCGFADENGINRKWTIAEDAEDWRNTVVKPYRMEWHKQIKTLQKWDMRLQKNQTPDELGEKRKEIAVFQRYISAGNSHIVGLRSDGTVVTVGNNQQGQCDTAGWLDIGRPVKKI

SEQ ID NO: 40213 - DNA, 381 bp, Unknown
  Obtained from environmental sample
  misc_feature (1)..(381): n is a, c, g, or t
gtgggctatacgaccttgcgcgcctgtgtggcggatttggagcgtacgggccggctggtgcggattgacgcggagttggatccctttctggaactggcctcggtgcagcgtcgggcgttccgtgtcggggcgcccgccttgctcttcacgcgggtcaaagggacacgctttccgatgctggctaacctgttcggaacgcgcgagcgcttgcatttcgtgtttcgggacagcgtgcgcgccttggaggcgcttttccggctcaaggccgacccggcggaactgcggcatttccggcgctatggcggcgtaccgcgccttttgtggaatgcgcgcccgcgaaggtccctgacggcccggcgcttgccggcacatgcagtttga

SEQ ID NO: 40214 - protein, 126 aa, Unknown
  Obtained from environmental sample
  misc_feature (1)..(126): Xaa is any amino acid
MGYTTLRACVADLERTGRLVRIDAELDPFLELASVQRRAFRVGAPALLFTRVKGTRFPMLANLFGTRERLHFVFRDSVRALEALFRLKADPAELRHFRRYGGVPRLLWNARPRRSLTARRLPAHAV

SEQ ID NO: 40215 - DNA, 525 bp, Unknown
  Obtained from environmental sample
  misc_feature (1)..(525): n is a, c, g, or t
ttgcagggccaataccgttccttgcgggaaggagttcccgtgcatgccacggctgtttttgtccccgttccgggggaaaagggtgcaagaattcggcaacccctgccccgacggttgatgttgtcatcccatgacccgcagcggggcgtggtgctgattgaacgcgcgaacctgccccacggtttcgaccttatcccgggcgggttcgtggacctgggtgagagcgtggaagatgccgccgtgcgcgaagcgcgcgaagaaaccggcctggacgtggaactgaccggcctcttgggcgtctattcgcgtcaggatcgcgacccgcgcgggcataccatctccacggtgtttaccgggcgcgcagaagacccgtccgtcctccgatccggggacgatgccaaacgcgtggccttccatcctctgaacgccttgcccgaaacaatggccttcgaccatgccgagatcgtgcgggacttcgtgcaaacgcaggccgggttgcgaagcttggcgcccgtgcgaaaataa

SEQ ID NO: 40216 - protein, 174 aa, Unknown
  Obtained from environmental sample
  DOMAIN (15)...(162): NUDIX domain
  misc_feature (1)..(174): Xaa is any amino acid
MQGQYRSLREGVPVHATAVFVPVPGEKGARIRQPLPRRLMLSSHDPQRGVVLIERANLPHGFDLIPGGFVDLGESVEDAAVREAREETGLDVELTGLLGVYSRQDRDPRGHTISTVFTGRAEDPSVLRSGDDAKRVAFHPLNALPETMAFDHAEIVRDFVQTQAGLRSLAPVRK

SEQ ID NO: 40217 - DNA, 942 bp, Unknown
  Obtained from environmental sample
  misc_feature (1)..(942): n is a, c, g, or t
atgagaattctattctctaaaatcgcactaactgcttttgcagttaattccgcattatcaatggcttttgctagcataccaggaaattgcacggaagagataacaactctttcgaaaagcagcggttttgatatgcaaacatttacgactaatttgccagttgctgtggcgaaagcaaaattgcaggcaaaagctccttttggcaagccaaaagatagcgataaaacggatataggaataacttttggttgccttaaggtttttcccgaatctcctgttgaaattgcatctttgcttaaagatataagcctgaaaacggcaagcggtaccatagcagccgcatcatcacaaatacaacctcaatatgcacagccgcaatacgcacaaccacaggtgcaaccacaatacacgcccccgccggcacagccacaatatgctcaacaacaggtgcaacagcaatgccagtgccagtgcccgaaacagaaagaatataagtatcaataccagtatcaatatccccctcagcaacagcagcagcaacaacggcaggtttctaatatggaatcacgaataagaattcaaaggttaattaaaggtggtcttgaaaaaaataaattcaagattatggaggaatcttcttatctggaaccttatgatatagatgttttgtacagggaaaatgaacggagtgcttttggttacgcattgctgaatgccagtgtaggcttaggaataggtagttatatacaaggaaatgtaaaatttggagctatgcaatctgctttggatgtagctagtgctgcactacttctagcagcagccagagaatcctggatctgccaaagatttgcgggggtttgcccgccttgctgtctattgccaaacgtgttactggctttatattcgcaatttagtattataataaatataatagaactttga

SEQ ID NO: 40218 - protein, 313 aa, Unknown
  Obtained from environmental sample
  SIGNAL (1)...(24)
  misc_feature (1)..(313): Xaa is any amino acid
MRILFSKIALTAFAVNSALSMAFASIPGNCTEEITTLSKSSGFDMQTFTTNLPVAVAKAKLQAKAPFGKPKDSDKTDIGITFGCLKVFPESPVEIASLLKDISLKTASGTIAAASSQIQPQYAQPQYAQPQVQPQYTPPPAQPQYAQQQVQQQCQCQCPKQKEYKYQYQYQYPPQQQQQQQRQVSNMESRIRIQRLIKGGLEKNKFKIMEESSYLEPYDIDVLYRENERSAFGYALLNASVGLGIGSYIQGNVKFGAMQSALDVASAALLLAAARESWICQRFAGVCPPCCLLPNVLLALYSQFSIIINIIEL

SEQ ID NO: 40219 - DNA, 522 bp, Unknown
  Obtained from environmental sample
  misc_feature (1)..(522): n is a, c, g, or t
gtggcagacccccttcgacaccgaccactccgtgcccgtagccagctacatagcccgctacaccgacgtcgccaccaacttctccggcaccatgggctacgtcaacgcggtgaagaagatcggcgaggacggcatcaaggtgcccacgggcttcgcccccgtctccaatctcaagatcaccggcctggccgatgctggcactgccggcgaggccatcgagcggaacgccacagccgccaacaaccgccagaccaaccgcggcaccagcgccagccagttcatagccaactcctacaacgcgagcaacgcgctggtcgccgcgcccgagacggtttacgtcaaggccttcaacgaccagcagaacgccgccggccccaaggtcaacgacaacaactacaaagtctggctgacctgggagaacccagccaaaggtacatggtccaagtcgccgtccgacggcaaggagaacgagtacgcgcccaacatctccggcaacatcatcgagttctacaacgccgctga

SEQ ID NO: 40220 - protein, 173 aa, Unknown
  Obtained from environmental sample
  misc_feature (1)..(173): Xaa is any amino acid
MADPLRHRPLRARSQLHSPLHRRRHQLLRHHGLRQRGEEDRRGRHQGAHGLRPRLQSQDHRPGRCWHCRRGHRAERHSRQQPPDQPRHQRQPVHSQLLQREQRAGRRARDGLRQGLQRPAERRRPQGQRQQLQSLADLGEPSQRYMVQVAVRRQGERVRAQHLRQHHRVLQRR

SEQ ID NO: 40221 - DNA, 801 bp, Unknown
  Obtained from environmental sample
  misc_feature (1)..(801): n is a, c, g, or t
atgaaagaaattttaggcttcaagacagtatcttttaacacaaacggcggcggttatattcccagtcaggatttgatcatggatgatactgtaaaaagaccgcccgacccgtcaaaagaaggctttgtttttagcgattggtacacggataactatacttttgaactgccttgggactttgataccgcgcctaatggttccatgactctgcacgcgaaatgggatatgtctgttccggcagtaaagacctttaccgtatcttttaacacaaacggcggcggttatattcccagtcaggatttgatcatggaagagactgtaaaaagaccgcccgacccgtcaaaagaaggctttgtttttagcggttggtacacggataacgatacttttaaactgccttggaactttgataccgcgcctaatgtttccatgactctgcacgcgaaatgggatatgtctgttccggcagtaaatacctttaccgtaacttttgactcaggcggcggaagcggggtcagtcccattacagttgaatcaggaagcgtaatcgacaaaccggcagacccggctaaaacaggatacgacattatttttacaggctggtacgaggatggccagacagatacttttgattttaacgctcccataacggctaatgtaactttatacgctaaatggcggccgtacgaattaggcgataccggtcccggcggcggtataatcttctaccgaagcgaagcagaactttatcatgacagagtgggatcctctagagtcgacgtgcaggcacgcaagctgtaa

SEQ ID NO: 40222 - protein, 266 aa, Unknown
  Obtained from environmental sample
  misc_feature (1)..(266): Xaa is any amino acid
MKEILGFKTVSFNTNGGGYIPSQDLIMDDTVKRPPDPSKEGFVFSDWYTDNYTFELPWDFDTAPNGSMTLHAKWDMSVPAVKTFTVSFNTNGGGYIPSQDLIMEETVKRPPDPSKEGFVFSGWYTDNDTFKLPWNFDTAPNVSMTLHAKWDMSVPAVNTFTVTFDSGGGSGVSPITVESGSVIDKPADPAKTGYDIIFTGWYEDGQTDTFDFNAPITANVTLYAKWRPYELGDTGPGGGIIFYRSEAELYHDRVGSSRVDVQARKL

SEQ ID NO: 40223 - DNA, 648 bp, Unknown
  Obtained from environmental sample
  misc_feature (1)..(648): n is a, c, g, or t
gtgttaagaaaaccaaaatcaaaaaaggaagtaaacaacattttaactaaatatccagattctctgtgtttgaagctccctaaaggttcagatgttcaaacagtctctgaattatttaataataaacaattggctgaactttcattattaaagacaatcattaaaagagaaaatgataaaaatattcaaaatactctattattaatgttttcaggtttattaacaaaaaagaatttaacatatcatccatctaccagtagagctgaaggtggaggtgatgcaagcgccatgcgttattaccgttatcgtatagcgccgaatccgattgacgtagatactatgacatattttgatttacgatataaaaaaatatttgccgcaaaaaaggagattgaagctgaatgtttactttatcaaaaaacagtggaacaaataaatcaagatgcaaaaataataaaaggcagtgcaaccaatctttcatttattccaaatgaaagcgttgattatatatatactgatcccccctatggaaaaaaaataccatatttagatttatctgttatgtggaatgcttggcttgatttagaagtaacagaagacgattttgcaaaagaagccattgaaggcggcgaacataacaaatcataa

SEQ ID NO: 40224 - protein, 215 aa, Unknown
  Obtained from environmental sample
  misc_feature (1)..(215): Xaa is any amino acid
MLRKPKSKKEVNNILTKYPDSLCLKLPKGSDVQTVSELFNNKQLAELSLLKTIIKRENDKNIQNTLLLMFSGLLTKKNLTYHPSTSRAEGGGDASAMRYYRYRIAPNPIDVDTMTYFDLRYKKIFAAKKEIEAECLLYQKTVEQINQDAKIIKGSATNLSFIPNESVDYIYTDPPYGKKIPYLDLSVMWNAWLDLEVTEDDFAKEAIEGGEHNKS

SEQ ID NO: 40225 - DNA, 615 bp, Unknown
  Obtained from environmental sample
  misc_feature (1)..(615): n is a, c, g, or t
gtgctgaatgcgggcaagcccatatttgcaagcgaatatggcactgttatggcaaacggcgacggtacccatgatgctcaagcaactaatgattggtatcaatttatggatgctaatggaatttcttcttgtgcttggcaagtgagctataaaaacgaaacttctgcgctctttgcaaccacattcagaacccccagcaccagttcccttgcagatttctctaataaaagcaatatgaaagaatctgggcagtttatttatgatatgctgattgccaacgagaaaactgcaccctggattcactctccacttttgccgagcagttcaagcgaagcagaaccttcttctagcagtagcagcgatgaaggaacgcctattgttttgccacaactcgtacataacaacgctcttaatccaatgctgggcagcgtgaacttgaaagccatgagcaacgccacaattcaaattttcgatttgaaaggcaatgcagttcgttctttgaagtttaagccgggcaactatgttgtgcagttagcagacttgccacgaggtttgtatgttgttaaagcaactagtgcgtcttggaagcaaacggttaaagtgatggtgagataa

SEQ ID NO: 40226 - protein, 204 aa, Unknown
  Obtained from environmental sample
  misc_feature (1)..(204): Xaa is any amino acid
MLNAGKPIFASEYGTVMANGDGTHDAQATNDWYQFMDANGISSCAWQVSYKNETSALFATTFRTPSTSSLADFSNKSNMKESGQFIYDMLIANEKTAPWIHSPLLPSSSSEAEPSSSSSSDEGTPIVLPQLVHNNALNPMLGSVNLKAMSNATIQIFDLKGNAVRSLKFKPGNYVVQLADLPRGLYVVKATSASWKQTVKVMVR

SEQ ID NO: 40227 - DNA, 846 bp, Unknown
  Obtained from environmental sample
  misc_feature (1)..(846): n is a, c, g, or t
ttggcgagcgttcatggaactccggacattattgccctggaatccgagtttgtccgcaaatatgttgaatccggccttcttttggacatcaccgatatttacgaaatcaacaagagtaagcttcttgccttcccggtggaaattggcacctataacggcagagtatatgccatgtcatggcaggcagctcccggcgccatgttctatcgcagaagtcttgctaaaaaatatcttggcactgatgatcccaaagccgtacaggcctattttgccaacttcaacaaattccttgagaccgcaagacagctcaaggataaatccaacggttcctgtgtagtcgtttcctctctgggcgatttacgaaattctttcctgtacgcaagaagaaatccctggatcgtgaatggcagagtggaaatcgatccggttatggagcagtacatggatacttgtaaggccctgtacgacgagcgtctggaaggcagagttggccagtggtcagaaggctggtttgcaggcctgagaggcgaacttagagatgaaaaaagaagaccgttagaagtattttcatactttttccccacctggggcctcctctatgtactcaagaccaatgctcccagtacagccggtgactgggctatggtccagggtccctctccctaccgctggggcggtacctggattggcgcctacaaagacaccaggaatgtagctgtggttaaagaatttatccgttttacaaccaccgatgacgctttccttgaagcatgggcaaaagaaaccggcgatatggtgagcaatattaacgtcattgaaaaagttaaaggcggcttagagaggtga

SEQ ID NO: 40228 - protein, 281 aa, Unknown
  Obtained from environmental sample
  misc_feature (1)..(281): Xaa is any amino acid
MASVHGTPDIIALESEFVRKYVESGLLLDITDIYEINKSKLLAFPVEIGTYNGRVYAMSWQAAPGAMFYRRSLAKKYLGTDDPKAVQAYFANFNKFLETARQLKDKSNGSCVVVSSLGDLRNSFLYARRNPWIVNGRVEIDPVMEQYMDTCKALYDERLEGRVGQWSEGWFAGLRGELRDEKRRPLEVFSYFFPTWGLLYVLKTNAPSTAGDWAMVQGPSPYRWGGTWIGAYKDTRNVAVVKEFIRFTTTDDAFLEAWAKETGDMVSNINVIEKVKGGLER

SEQ ID NO: 40229 - DNA, 840 bp, Unknown
  Obtained from environmental sample
  misc_feature (1)..(840): n is a, c, g, or t
ttgggggaggcacgtcggaggataacagtttcggcacgcatgaatttccttgatctttgttcgcttttggattgcgagccttatatatgcggaaatgtcggctctggcacagtccaggaactttcgcaatgggttgagtactgcaattttgacggagttagtccgatggctgaacttcgcaaaaaaaacggcagaagcgacccatacacagtgcgctactggggaataggcaacgagaattggggctgcggcggcaacatgactcccgaattttatgcggataattaccgccgttacgcgacatacgcccggagttacggagacgcgaagctgtacaaaatcgcctgcggttctcccggagaagatttcaactggacaagggttttaatggaaaaggccggaaggcatatggacgggctttcccttcacaattatacggtaaccggcgactggagtcataagggatcggcgactgagtttgccgaatcggaatggctggtaaccatgaagaaagcgggcagaatggaagaactcgtgcaaaaacacagcaaaataatggatgaattcgatcctgaaaagaaggtagggcttatagttgacgaatgggggacatggttcgatgtggagccggggacaaatcccggtttcctttaccagcagaacaccgtgcgggatgcattggtagcgggcattcatttcaatatatttaacaaccacgcggaaagggtacacatggcgaatatagcccagactattaacgttttacagtccgttattcttaccgaagggccgagcatggttctgacgccgacctaccatgtctttggtgggatcctctag

SEQ ID NO: 40230 - protein, 279 aa, Unknown
  Obtained from environmental sample
  DOMAIN (200)...(278): Alpha-L-arabinofuranosidase C-terminus
  misc_feature (1)..(279): Xaa is any amino acid
MGEARRRITVSARMNFLDLCSLLDCEPYICGNVGSGTVQELSQWVEYCNFDGVSPMAELRKKNGRSDPYTVRYWGIGNENWGCGGNMTPEFYADNYRRYATYARSYGDAKLYKIACGSPGEDFNWTRVLMEKAGRHMDGLSLHNYTVTGDWSHKGSATEFAESEWLVTMKKAGRMEELVQKHSKIMDEFDPEKKVGLIVDEWGTWFDVEPGTNPGFLYQQNTVRDALVAGIHFNIFNNHAERVHMANIAQTINVLQSVILTEGPSMVLTPTYHVFGGIL

SEQ ID NO: 40231 - DNA, 333 bp, Unknown
  Obtained from environmental sample
  misc_feature (1)..(333): n is a, c, g, or t
atggaagagaccttagtggaacaaaaaagagaaattatctctaacctggtagttgggaacgaggattttaagcaaataatggaagctatggatccaaaggatctggcggatgtggcttccgatgatatagatcgaaaaatgatagaagccatcggttcccaggatttaaaaaaacttagaatgattgagtctgccctcacaaggattcagcagggtaagtacggcctctgtatgaagtgcggaaagaaaattccccatgaacggctggaagagattccctatgccctgatgtgcatagaatgcaagacagcggaagaaaagcgaaacaggtaa

SEQ ID NO: 40232 - protein, 110 aa, Unknown
  Obtained from environmental sample
  DOMAIN (39)...(109): Prokaryotic dksA/traR C4-type zinc finger
  misc_feature (1)..(110): Xaa is any amino acid
MEETLVEQKREIISNLVVGNEDFKQIMEAMDPKDLADVASDDIDRKMIEAIGSQDLKKLRMIESALTRIQQGKYGLCMKCGKKIPHERLEEIPYALMCIECKTAEEKRNR

SEQ ID NO: 40233 - DNA, 357 bp, Unknown
  Obtained from environmental sample
  misc_feature (1)..(357): n is a, c, g, or t
ttgggcagtatcgacgaagtaataaaatcctccggctaccgcttcgggccgttcgaagtagaaagcgtccttctgaagcatcccgccgtcaccgaatgcgcagtaaccggcgtaccggacagcgaacgcggctttgctgtaaaggcttccatcgtactttcgcagggctataccggctcggcggaactgacaaaagagctgcaggatcacgtaaaaaagatcactgcgccctataaatacccgcgtattatcgagtatgttgacgccttgcccaagaccatatcgggtaaaatccgccgcgttgaaatacgcgaaaaagatcagggtaataccaaagagccggaaggaagggattaa

SEQ ID NO: 40234 - protein, 118 aa, Unknown
  Obtained from environmental sample
  misc_feature (1)..(118): Xaa is any amino acid
MGSIDEVIKSSGYRFGPFEVESVLLKHPAVTECAVTGVPDSERGFAVKASIVLSQGYTGSAELTKELQDHVKKITAPYKYPRIIEYVDALPKTISGKIRRVEIREKDQGNTKEPEGRD

SEQ ID NO: 40235 - DNA, 390 bp, Unknown
  Obtained from environmental sample
  misc_feature (1)..(390): n is a, c, g, or t
atgaagaaggtcatcacatctctgctcatctcagccgctcttgcaacagtggcttttgccggcgaatccgaaactttcggagggcttggcatatctgtttggactggcaaagacggcgtgaaaattgccggagttattccaaactcccctgccgaaagcattgggctgcaagccggagacttaatagtttctgcaaacggaaccgagctttctgccattgaaccagaaaaccaagttagccacctgcgtggcgaggctggaacttccattagcttggttgtaagccgagacggcgatgtattttccgtttccacaaaaagagctggtttgtctgtgcaaagcctagacacaaaagatatttcagactggcctgaaaaaaccaaggcttaa

SEQ ID NO: 40236 - protein, 129 aa, Unknown
  Obtained from environmental sample
  SIGNAL (1)...(20)
  DOMAIN (16)...(95): PDZ domain (Also known as DHR or GLGF)
  misc_feature (1)..(129): Xaa is any amino acid
MKKVITSLLISAALATVAFAGESETFGGLGISVWTGKDGVKIAGVIPNSPAESIGLQAGDLIVSANGTELSAIEPENQVSHLRGEAGTSISLVVSRDGDVFSVSTKRAGLSVQSLDTKDISDWPEKTKA

SEQ ID NO: 40237 - DNA, 336 bp, Unknown
  Obtained from environmental sample
  misc_feature (1)..(336): n is a, c, g, or t
gtggatagcaattcctcttatgcagaatccctgccagatgccaccgccgcagacccggaatccagttctgaaattcaagccatagaagatggcattagagatatattgaaagccttgcctgcaagagagtacagtgttttagctggcatatacggcattggcttaaatgctccgcaaacgcttagagaagttggcgaaacaatgaacatatctcacgaaagggttaggcagcttagggatcaggctctaaagcgaataacccacactgtgacaaaagaatttttaaaagagaaccttgaggctttagcgaaagccaaacagaatcacaaacactaa

SEQ ID NO: 40238 - protein, 111 aa, Unknown
  Obtained from environmental sample
  DOMAIN (35)...(88): Sigma-70, region 4
  misc_feature (1)..(111): Xaa is any amino acid
MDSNSSYAESLPDATAADPESSSEIQAIEDGIRDILKALPAREYSVLAGIYGIGLNAPQTLREVGETMNISHERVRQLRDQALKRITHTVTKEFLKENLEALAKAKQNHKH

SEQ ID NO: 40239 - DNA, 744 bp, Unknown
  Obtained from environmental sample
  misc_feature (1)..(744): n is a, c, g, or t
atggcacgggcttcggaaattgccgctgcaaaagaaatgatgagttccagaaactttcaaaacaccaatctagattttttatatgcaatgccagacagtttgagaatggcttttcttgatgtactggattcgacttttagggattcaagcctattcgggaaaaaattcatgcgctacgaaaacataattttctctcaaagcctgccaaccgcattttatgaagttcaaggcttgattccagcggattatccattgaagcacggcgataatctggagctttctctttggggcgcagtggaaaagcaattcgcattgtctgtgaataatcagggaaatgtatttgtggaaggtgctggtttggtaaatgttgcgaatttaaaccttggcgaagcagaaaaactgataacaaaaaaattgcaaaatgtgtattctggcattgttcagggcagaatttctgtaaatttacgacccacaaggctttcgcccaccaaggtattcattatgggtgctgtcaaaagaccgggcggctatgatttgccagggaattccaatgtgtttttggctctttacaaagccggaggctcagatgactacggttctgttagaaacataattattcgcagggcaaacggagattccgcaaaaatagatttatacgattttcttttaagaggaaaaaaatcaggcgagggtctccttgatacggagatatggttttgtcccaaaagcgcaaaaatcggttaa

SEQ ID NO: 40240 - protein, 247 aa, Unknown
  Obtained from environmental sample
  DOMAIN (72)...(196): Polysaccharide biosynthesis/export protein
  misc_feature (1)..(247): Xaa is any amino acid
MARASEIAAAKEMMSSRNFQNTNLDFLYAMPDSLRMAFLDVLDSTFRDSSLFGKKFMRYENIIFSQSLPTAFYEVQGLIPADYPLKHGDNLELSLWGAVEKQFALSVNNQGNVFVEGAGLVNVANLNLGEAEKLITKKLQNVYSGIVQGRISVNLRPTRLSPTKVFIMGAVKRPGGYDLPGNSNVFLALYKAGGSDDYGSVRNIIIRRANGDSAKIDLYDFLLRGKKSGEGLLDTEIWFCPKSAKIG

SEQ ID NO: 40241 - DNA, 576 bp, Unknown
  Obtained from environmental sample
  misc_feature (1)..(576): n is a, c, g, or t
ttggtgcctggccgtccctccaggacgatcgcacttgataagctctcgtgtgtgtgtagtaaattacttgaagcccttacaaccgatggcagctatggacttgaagaatggggccttgatgaattcggcggctatgaaaggcttcaccgtttcgccgtaacacagcgtaacctttttcgcgatatggagcctattaaagacgcgcctgccatcttacgaaagctttcaaacatgaatattagaattcgtatcattacccataggctttttctgaaatacaaccacaaagccaccatcacacagactgtggattggctagattcctgggacattccctattgggatctttgttttatggccgataagggcgccgtgggggctcatacttatatcgacgattccccggacaacattgtacgcctgagggatcatggctgtaacacaattatattttccaattccacaaacctggatttggaaggccccagagctgataattggcaggatgtggaacgccttatcatggaagccttaaaagaatgggaaaccggtactagaaatatgtttgctccctga

SEQ ID NO: 40242 - protein, 191 aa, Unknown
  Obtained from environmental sample
  misc_feature (1)..(191): Xaa is any amino acid
MVPGRPSRTIALDKLSCVCSKLLEALTTDGSYGLEEWGLDEFGGYERLHRFAVTQRNLFRDMEPIKDAPAILRKLSNMNIRIRIITHRLFLKYNHKATITQTVDWLDSWDIPYWDLCFMADKGAVGAHTYIDDSPDNIVRLRDHGCNTIIFSNSTNLDLEGPRADNWQDVERLIMEALKEWETGTRNMFAP

SEQ ID NO: 40243 - DNA, 348 bp, Unknown
  Obtained from environmental sample
  misc_feature (1)..(348): n is a, c, g, or t
ttgctccctgatatgagcgcaatagtccttgctacaatcaacgcaaagtggatacatccttcactggctttaaggcttttaaaagcaaatcttggcagctttgaaactcactgcacaattctggaatttgccctaaggcagcccttaaaagaaaaaaccgttcccataattgcggagaagccacaacttttaggcctttctgtttcaatatggaaccacattgctaccctggagctgctcaaggttcttgaagcggaatgggaatatgaaaacgccaaaccctttctttatccttggcgggcccggaggttttcctgggcttcaggaaagaacacgaagaatttttag

SEQ ID NO: 40244 - protein, 115 aa, Unknown
  Obtained from environmental sample
  misc_feature (1)..(115): Xaa is any amino acid
MLPDMSAIVLATINAKWIHPSLALRLLKANLGSFETHCTILEFALRQPLKEKTVPIIAEKPQLLGLSVSIWNHIATLELLKVLEAEWEYENAKPFLYPWRARRFSWASGKNTKNF

SEQ ID NO: 40245 - DNA, 912 bp, Unknown
  Obtained from environmental sample
  misc_feature (1)..(912): n is a, c, g, or t
atggcacttggcgaaacagacgaagccgttgttgaggctcgccgcgctcttttggcaattcaaagcctgcaagaaaaagaagaagacaagctaaacgaaagcggtaccttgcaatacctaatagccctagcttacgaatggcaaaaatccgaagacgatgctcgcattgcctacgacaacgcaaaaaaaaattttgaaaattcgggcttaaccccaaaactcgcaagtcaaattccacaaaacgaacaggaaatcatagttgttggctatgctggtttaagccctattttaggagaaaacagattttggggaacttatgcgccagatggagcattgtttttgaactataaagatgcaaacgggcaaagccaaacgatattgctcgccgccgtgaatttgggcggacctggttttagcggacaaacgatgaccattcagtttgccattcccaaaatggtggaaagaccgtctcaaaattctgctttttccgtaaatgtaaatggggaatcaaaaacaacagaagttttttcaaacacaaaaaattccattcaaaaagatttggaaaacaatcaaacaacaatgctgataaaaaccgctagcagggtaattttgcgcaccatagcggcaaaccaagcaaaatcagcaatgagaaccggaaacggctgggcagatttggctctgaatataagcacggatattgccaccggcgcaatagaaagcgcagatttgcgcctaggctctgccctgccagaaaccattcaaattttgcgcattcccgttgaaccagggagacattcggtaaaaattgacatcttagacaaatacggcagaaaaacagactattttgatgaacaaatagtaaatgtgaaaaaaggcggaaaagcgtttatctttgtgcctgcgctgaggtag

SEQ ID NO: 40246 - protein, 303 aa, Unknown
  Obtained from environmental sample
  misc_feature (1)..(303): Xaa is any amino acid
MALGETDEAVVEARRALLAIQSLQEKEEDKLNESGTLQYLIALAYEWQKSEDDARIAYDNAKKNFENSGLTPKLASQIPQNEQEIIVVGYAGLSPILGENRFWGTYAPDGALFLNYKDANGQSQTILLAAVNLGGPGFSGQTMTIQFAIPKMVERPSQNSAFSVNVNGESKTTEVFSNTKNSIQKDLENNQTTMLIKTASRVILRTIAANQAKSAMRTGNGWADLALNISTDIATGAIESADLRLGSALPETIQILRIPVEPGRHSVKIDILDKYGRKTDYFDEQIVNVKKGGKAFIFVPALR

SEQ ID NO: 40247 - DNA, 999 bp, Unknown
  Obtained from environmental sample
  misc_feature (1)..(999): n is a, c, g, or t
atgatcagattggccgagcggcacgagacttggggcgactggtcagtaaccccagccacttgcgaatcggcaggttcaaaaacaagggcttgcattggcaatgcttctcaaactgaaacagagacaatagctaaactttcttggggcgactggtcggtaaccccagccacttgcgaatcggcaggttcaaaaacaagggcttgcattggcaatgcttctcaaaccgaaacacagccgataacccagctaacttggggcgactggtcggtgacaactccagcaacctgcgtagcaacaggttctaaaacaagggcttgcattggcaatgcttctcaaaccgaaacagagacaatagctaaacttccatacgacaacgcaacgcagatatgtgatgtccgtgacggaaagatatacaagttcgcagtaataggcacccagacttggatggctgagaatttgaactatgctgtaggcgggaagtgctacgccgaaggcgttgacggcgtttctgctgatagcattgctaagaattgcgctacctacggtaggctttacgattggtcaacagcaatgggcatagattcaagatacaatagcgaagtatggggcggaagcgatgtaaagcatcgtggcgtttgccccgcaggctggcacttgcccagcgatgcggaatgggatgcgttgatgacagcagttggcggttcatcaactgcaggcaatcatttgaaggcaaaagacggctggaatagttgtggtccttcaggttctgtcaagagttattcgtgcgaggatacgcatggattttcggctctgccgggcggctacgactattcagatggctatttcagcagtgtcggctactacggctactggtggagtagctcggagaacagtgctaactacgcctactaccgggacatggactacggctacgagggtgtctattggagcatcgtcagtaagtcttactcgcagagtgtccgttgtttgcaggattga

SEQ ID NO: 40248 - protein, 332 aa, Unknown
  Obtained from environmental sample
  misc_feature (1)..(332): Xaa is any amino acid
MIRLAERHETWGDWSVTPATCESAGSKTRACIGNASQTETETIAKLSWGDWSVTPATCESAGSKTRACIGNASQTETQPITQLTWGDWSVTTPATCVATGSKTRACIGNASQTETETIAKLPYDNATQICDVRDGKIYKFAVIGTQTWMAENLNYAVGGKCYAEGVDGVSADSIAKNCATYGRLYDWSTAMGIDSRYNSEVWGGSDVKHRGVCPAGWHLPSDAEWDALMTAVGGSSTAGNHLKAKDGWNSCGPSGSVKSYSCEDTHGFSALPGGYDYSDGYFSSVGYYGYWWSSSENSANYAYYRDMDYGYEGVYWSIVSKSYSQSVRCLQD

SEQ ID NO: 40249 - DNA, 444 bp, Unknown
  Obtained from environmental sample
  misc_feature (1)..(444): n is a, c, g, or t
gtgcgaggttcaggaattgcttcttttattttgcctattatgtgcagcctaccctgccttgcttgttcaagagctttacccaccccctctggagttattccctttattttaatatccatctggaacgcggtaattcccgcctccgttccggtcactttaaaatccatatcgccaaggtggtcttctgtgccggttatgtcggagagaatttcaattttcccgccttcattaacagaacctttttcagatattaagcccattgcaatgccagcaaccggactgcttattggaactccagcatccatcagcgaaaggctgcctccgcaaacagaagccattgaagaagaaccgttagattccataatttccgacacaacacgaattgtgtatggaaaaccctctggcgttggaagcaccgcattgagcgagcgttctgccaagtga

SEQ ID NO: 40250 - protein, 147 aa, Unknown
  Obtained from environmental sample
  SIGNAL (1)...(21)
  misc_feature (1)..(147): Xaa is any amino acid
MRGSGIASFILPIMCSLPCLACSRALPTPSGVIPFILISIWNAVIPASVPVTLKSISPRWSSVPVMSERISIFPPSLTEPFSDIKPIAMPATGLLIGTPASISERLPPQTEAIEEEPLDSIISDTTRIVYGKPSGVGSTALSERSAK

SEQ ID NO: 40251 - DNA, 396 bp, Unknown
  Obtained from environmental sample
  misc_feature (1)..(396): n is a, c, g, or t
ttgctagatgcaatgaacagcaaaaacatcagcgtttacagagatgccagaggtacaatcctctccatgagcgatattctgtttgaaactggaaaagcagatttaaaacaggaattgaaagagaatttggcggcaataggcgcaattctccagagcttgctaaccgactccaaagttattgtagaagggcacaccgataatgtaggcactgccgacttcaaccaaaaactcagcgagcaaagagctaaagccgttatgcaatatctaattgaaagaggtattgacactaatcgtttgcaatccattggctatggattgacaaaacccgttgcagacaacaaaaccgaagaaggccgtgccaaaaatcgcagggttgaacttgtgataaaagactaa

SEQ ID NO: 40252 - protein, 131 aa, Unknown
  Obtained from environmental sample
  DOMAIN (27)...(123): OmpA family
  misc_feature (1)..(131): Xaa is any amino acid
MLDAMNSKNISVYRDARGTILSMSDILFETGKADLKQELKENLAAIGAILQSLLTDSKVIVEGHTDNVGTADFNQKLSEQRAKAVMQYLIERGIDTNRLQSIGYGLTKPVADNKTEEGRAKNRRVELVIKD

SEQ ID NO: 40253 - DNA, 426 bp, Unknown
  Obtained from environmental sample
  misc_feature (1)..(426): n is a, c, g, or t
atgttttatgcggagtttaaaagcataagcggcagtgacaaataccctttgtcgcaggttgtttataggggcgaagatggttctcttttggaagtgagccataatcgcgatgcttggaaaactcgctcgccggaagagtggaaaaatttgttcagcaaacgccgtgctagctttgcgcctgaagatttaagcggggtgtggagcaagcgcgaacttgttttgccagaacttccagcccaagatatagtaacgcttcaagagggttttacccctcttttcaatgcgcaaaaactcgcgcaagaaataaaggtgaaaagcctgcacgtgaagttgtgcggaaattcgcacactggcagtttcaaagatttgggcatgaccgttttggttagccaagttaatcatttaataaaaacaaggctaaaataa

SEQ ID NO: 40254 - protein, 141 aa, Unknown
  Obtained from environmental sample
  misc_feature (1)..(141): Xaa is any amino acid
MFYAEFKSISGSDKYPLSQVVYRGEDGSLLEVSHNRDAWKTRSPEEWKNLFSKRRASFAPEDLSGVWSKRELVLPELPAQDIVTLQEGFTPLFNAQKLAQEIKVKSLHVKLCGNSHTGSFKDLGMTVLVSQVNHLIKTRLK

SEQ ID NO: 40255 - DNA, 837 bp, Unknown
  Obtained from environmental sample
  misc_feature (1)..(837): n is a, c, g, or t
ttgcgccagggctgggattcttgcattgtgtttttgcccgctggaaaaatttccgttgcgcatctcgtgcaaccaatttcaaacggtagccttgttttagccttagacacagattttgacggttgcatgaaaattgttcaagaagtgacagcagacaaaagcatctacttggcaaattcaatgaacagcctccgcattgaggggcaaaaaaccatcagctacgaactttgccaagaaatgggctggcagcttcccgatgttttgattattccgggtggcaatttgggcaatgtaagtgctctcgcaaaaggcatagacgatttgctggaacttggtttaataaacaaaaagccccgcataatagttgcacaggcagagaatgccaatccattttacctagcatataaaaaagatttcaataaacttgagcctatacatgccaaaaaaactttggcaagcgcaattcaaataggcaaccctgttagctatccaaaagcagagcaagctataaaaagctacaatggaattgttgaacaagtttccgagcaagaactatccgatgcagcccaccgagcagataaaatcggtctttattcttgcccacacacaggcgttgccttgggtgcattgtttaagttgcgagaaaaaaacattatctcaagcgaagaaagcgttgttgttatcagcaccgcccacggcttgaaattctccgaattcaaatctggctatcacgaacaaaaactggagggcatttccccaaagtacgcaaacgcaatacaccgacttccggctaatgcaagtgctgtacaagatgttataagcaattatgtttcttaa

SEQ ID NO: 40256 - protein, 278 aa, Unknown
  Obtained from environmental sample
  DOMAIN (1)...(232): Pyridoxal-phosphate dependent enzyme
  misc_feature (1)..(278): Xaa is any amino acid
MRQGWDSCIVFLPAGKISVAHLVQPISNGSLVLALDTDFDGCMKIVQEVTADKSIYLANSMNSLRIEGQKTISYELCQEMGWQLPDVLIIPGGNLGNVSALAKGIDDLLELGLINKKPRIIVAQAENANPFYLAYKKDFNKLEPIHAKKTLASAIQIGNPVSYPKAEQAIKSYNGIVEQVSEQELSDAAHRADKIGLYSCPHTGVALGALFKLREKNIISSEESVVVISTAHGLKFSEFKSGYHEQKLEGISPKYANAIHRLPANASAVQDVISNYVS

SEQ ID NO: 40257 - DNA, 684 bp, Unknown
  Obtained from environmental sample
  misc_feature (1)..(684): n is a, c, g, or t
ttgggaacaattacccctgttcacgagatgattcaaatcgcgcacggcaacggagtacgtatccttgttgacggggcacagtcggtggctcacacaccgctgaatgtaagtgcaatggacgcagatttttttgttttctccggtcataaaatttttggacccacaggtataggtgctttgtatgggaaatcagatgttttggaagaagctcagccctatcaaggcggtggcaatatgataaaagacgtgacctttgaacacaccgtatataatcctccgccttccaaatttgaagcaggcactggaaacattgccgatgccgttggtcttggagcagctttggattatgtttcttgcgtggggattgcaaacataggtgcttacgaacacgaattgctgaattatgcaacaggtgaattaaaacgcataaacggtttgcacctcataggcacagcaacagaaaaagcaagcgttttgtcttttatactagacggagcaagcgtggaacaagttggcaaacaccttgcgagccaaggaattgccgtgcgtgctggtcaccactgcgcccagcctattttgcgccgctttgggctagaagcaaccgtacgcccaaccatagccttttacaacacatccgaagaaattgataaacttgtaagtgcaataagagaacttgcagtttag

SEQ ID NO: 40258 - protein, 227 aa, Unknown
  Obtained from environmental sample
  DOMAIN (1)...(218): Aminotransferase class-V
  misc_feature (1)..(227): Xaa is any amino acid
MGTITPVHEMIQIAHGNGVRILVDGAQSVAHTPLNVSAMDADFFVFSGHKIFGPTGIGALYGKSDVLEEAQPYQGGGNMIKDVTFEHTVYNPPPSKFEAGTGNIADAVGLGAALDYVSCVGIANIGAYEHELLNYATGELKRINGLHLIGTATEKASVLSFILDGASVEQVGKHLASQGIAVRAGHHCAQPILRRFGLEATVRPTIAFYNTSEEIDKLVSAIRELAV

SEQ ID NO: 40259 - DNA, 978 bp, Unknown
  Obtained from environmental sample
  misc_feature (1)..(978): n is a, c, g, or t
atggtcaagcaggaaaacagtacaaacgaagccggcaaagcggtaaacactattgaggaaaacattgacaacctaaaagaaatgatagcggcgcaaaccgacagcgtaaacgtatcgtcttcagccattgaacagatgacggcaaatattaactcggtaaccaaaaccctttctgagaacagcaaaaacgtcgaagccttaaccgaagcgtcggaaaacggcaagacgggcgttcagacagtggcgcagatgatacaggaaatatcgaaggactccgaagggctgttggaaataaacgccgtaatggacaatatcgccagccagaccaacctgctttctatgaacgccgctattgaggcggcgcacgccggagaagcgggcaagggctttgccgtagtcgccgatgaaatccgcaagcttgccgaatcatcaagcgagcagtcaaaaactaccgcgactatgcttaaaaaaataaaaggctccatagacggcatcaccaaatcatccgacgaagtcctggagcgtttcggggcgatagatacaggcgtaaaaacagtttccgaacatgagcaaaatatcttaaacgcgatggaagagcaggaagtgggcggaaagcaaatactggaatccataggccgcctgagggacataacctcctcggttaagaacgggtctgataacatggcgaaatcgggagagacccttgtcagggagacggatggatttatacaaaccagtaaagaaactgtagaaggcatgaacgagatactgaacgggattaaccagataaatgtatcggtgagccacgtcaacgaaatgagtctggaaaacaacaaaaactttgaatcgctaaagcatgaaacggaaaagtttaacgatactgtcggcaatgagaagcgaaagatcgtgatagtggaagacgacagtatccatcatgaaaaggggaatgaggagatgtcaggagagtaccccgaatag

SEQ ID NO: 40260 - protein, 325 aa, Unknown
  Obtained from environmental sample
  DOMAIN (30)...(245): Methyl-accepting chemotaxis protein (MCP) signaling domain
  misc_feature (1)..(325): Xaa is any amino acid
MVKQENSTNEAGKAVNTIEENIDNLKEMIAAQTDSVNVSSSAIEQMTANINSVTKTLSENSKNVEALTEASENGKTGVQTVAQMIQEISKDSEGLLEINAVMDNIASQTNLLSMNAAIEAAHAGEAGKGFAVVADEIRKLAESSSEQSKTTATMLKKIKGSIDGITKSSDEVLERFGAIDTGVKTVSEHEQNILNAMEEQEVGGKQILESIGRLRDITSSVKNGSDNMAKSGETLVRETDGFIQTSKETVEGMNEILNGINQINVSVSHVNEMSLENNKNFESLKHETEKFNDTVGNEKRKIVIVEDDSIHHEKGNEEMSGEYPE

SEQ ID NO: 40261 - DNA, 657 bp, Unknown
  Obtained from environmental sample
  misc_feature (1)..(657): n is a, c, g, or t
ttgccgacagtatcgttaaacttttccgtttcatgctttagcgattcaaagtttttgttgttttccagactcatttcgttgacgtggctcaccgatacatttatctggttaatcccgttcagtatctcgttcatgccttctacagtttctttactggtttgtataaatccatccgtctccctgacaagggtctctcccgatttcgccatgttatcagacccgttcttaaccgaggaggttatgtccctcaggcggcctatggattccagtatttgctttccgcccacttcctgctcttccatcgcgtttaagatattttgctcatgttcggaaactgtttttacgcctgtatctatcgccccgaaacgctccaggacttcgtcggatgatttggtgatgccgtctatggagccttttatttttttaagcatagtcgcggtagtttttgactgctcgcttgatgattcggcaagcttgcggatttcatcggcgactacggcaaagcccttgcccgcttctccggcgtgcgccgcctcaatagcggcgttcatagaaagcaggttggtctggctggcgatattgtccattacggcgtttatttccaacagcccttcggagtccttcgatatttcctgtatcatctgcgccactgtctga

SEQ ID NO: 40262 - protein, 218 aa, Unknown
  Obtained from environmental sample
  misc_feature (1)..(218): Xaa is any amino acid
MPTVSLNFSVSCFSDSKFLLFSRLISLTWLTDTFIWLIPFSISFMPSTVSLLVCINPSVSLTRVSPDFAMLSDPFLTEEVMSLRRPMDSSICFPPTSCSSIAFKIFCSCSETVFTPVSIAPKRSRTSSDDLVMPSMEPFIFLSIVAVVFDCSLDDSASLRISSATTAKPLPASPACAASIAAFIESRLVWLAILSITAFISNSPSESFDISCIICATV

SEQ ID NO: 40263 - DNA, 372 bp, Unknown
  Obtained from environmental sample
  misc_feature (1)..(372): n is a, c, g, or t
atgaggggctatcttcaaattgatgaatcaaaactggacgccgcgcttgaacagcaccttcccgctatccggcagctgttcggttccgacacaacaggcgacctgattatagacacaggcgtcgcttttaacatggacagactctccaaaccttttgttgagaccggcggcatcatctcgctaaaaacaagcaccatagattcgcggatcagccaggacagaaggcggatcgaaaccatggaccgccagcttgccgccaaggaagccgatttaaagagccaatacagccgcatggaaagcgcttacgcgcgcatggaacaaatgacaacctctctggataatttcaaccgccagaacagcaacaacaggtaa

SEQ ID NO: 40264 - protein, 123 aa, Unknown
  Obtained from environmental sample
  misc_feature (1)..(123): Xaa is any amino acid
MRGYLQIDESKLDAALEQHLPAIRQLFGSDTTGDLIIDTGVAFNMDRLSKPFVETGGIISLKTSTIDSRISQDRRRIETMDRQLAAKEADLKSQYSRMESAYARMEQMTTSLDNFNRQNSNNR

SEQ ID NO: 40265 - DNA, 819 bp, Unknown
  Obtained from environmental sample
  misc_feature (1)..(819): n is a, c, g, or t
ttgcaaagagcaaacgatttgcgaatggctggcgcttatgccgccgcccaagattattacgaaacaatattgcttaaatatccgaatttgcccatagctctttttggtgcagcatattccattatagcacaagattctatttctgcggaaaaaattgcaaaaacaaaaagcctaatagaaaaccttgcgaagcaaatgcctggttccgtgtgggtaaaactgcttttaacattctccagagaacgcgaaggtaatttaatttatgcgttggatttggcatctgagctcgcttatgactctccagcattttccgaagcaaggcttagatattcggaattgcttttgaaaaccgaacagccatctagggcagcaaatgaagctagagctgcaatttccacatctgcgggtttagatgcaagagcttatgcaaatctcgcttttgctttgcacaaaatgggaaatcttgaagaatgttccgaacttgtaagctacgccttgccaagatttccttcgcaaacgggattattgcttttgcacggttatttgaatgaatattccagaaactttgacgttgcgctaagtgattacagaaaaattttagtattaaagccaggtgacataaacgccatgaacgccatagctacactcggcgaaaaaattccgccacaagcagatgcctcatcaacctacccaggcggtatatctttgaaagaccaagcaagagaagccgcaaaaataattttacctttaatagatgaatatcccggaaaatttgccgccttcgcgaagccccttggaaaaatttatctccaaacctag

SEQ ID NO: 40266 - protein, 272 aa, Unknown
  Obtained from environmental sample
  misc_feature (1)..(272): Xaa is any amino acid
MQRANDLRMAGAYAAAQDYYETILLKYPNLPIALFGAAYSIIAQDSISAEKIAKTKSLIENLAKQMPGSVWVKLLLTFSREREGNLIYALDLASELAYDSPAFSEARLRYSELLLKTEQPSRAANEARAAISTSAGLDARAYANLAFALHKMGNLEECSELVSYALPRFPSQTGLLLLHGYLNEYSRNFDVALSDYRKILVLKPGDINAMNAIATLGEKIPPQADASSTYPGGISLKDQAREAAKIILPLIDEYPGKFAAFAKPLGKIYLQT

SEQ ID NO: 40267 - DNA, 363 bp, Unknown
  Obtained from environmental sample
  misc_feature (1)..(363): n is a, c, g, or t
atgctgagaaagatgattgagaaggacaggaagcgctttaaaagaaaggtgcacatacggaaggctatttccggaaccgcagagcggccccggatgacggtttttaaaagcaaccgttctctttcgattcagataattgatgatgccaacgggaatacccttgcttcggcgtctaccctggaaaaagaactccgcaatataaaagctacaattgcgggagcgggacagcttggggagattatggggaagaggattcttgagaaaaacattaaggccgtggtctttgacagaaacggttacttgtatcatggcgttgtgaaggcaatggccgacggagcccggaaggccggggttctgttttag

SEQ ID NO: 40268 - protein, 120 aa, Unknown
  Obtained from environmental sample
  DOMAIN (7)...(120): Ribosomal L18p/L5e family
  misc_feature (1)..(120): Xaa is any amino acid
MLRKMIEKDRKRFKRKVHIRKAISGTAERPRMTVFKSNRSLSIQIIDDANGNTLASASTLEKELRNIKATIAGAGQLGEIMGKRILEKNIKAVVFDRNGYLYHGVVKAMADGARKAGVLF

SEQ ID NO: 40269 - DNA, 741 bp, Unknown
  Obtained from environmental sample
  misc_feature (1)..(741): n is a, c, g, or t
atgggcattattccgggcgtaggggccaatgtggtcgggctgattggctatgactacgccaaaaagctgtccaataatccggaagaatggggcaagggcgaaccccagggcgtgctggcctcggaaaccaccaacaacaccacggtcggcccggccctcattcccctgcttaccctgggcattcccggcagccccaccgcggcggcgctcctgggcggcttgctcatccacggtcttttccccgggccggatctgttcaccaaacaccgcgacataaccctgaccttcatggcaggcctgctggcggcgcaagtcttcatgtgcgccggcggcctgctcgtttcccgctattcccagcatatcaccaaagtgcccgcgctgatcatgatcgctgccgtttccgtgtgcgccgtagtgggatcctatggtgtgcagaacagcatggatgatgtgttcatcatgctgggtctcggacttatgacctacgggcttctcaagctggacttcccggtggcgccgatggtgctgggcgttgttctcggccccattgccgaggaaaacttcctgcgaggcaggctcattgcgggcgcaggcgacgggatgttccaattcttttttaccggcggcctcaacctggttttcattcttatctgcgccctttccatcgcctggggagtgtttgcggaataccgcagttacaaaagcagcagggccacagccgtagcggaggtgaaaccatga

SEQ ID NO: 40270 - protein, 246 aa, Unknown
  Obtained from environmental sample
  DOMAIN (1)...(176): Integral membrane protein DUF112
  misc_feature (1)..(246): Xaa is any amino acid
MGIIPGVGANVVGLIGYDYAKKLSNNPEEWGKGEPQGVLASETTNNTTVGPALIPLLTLGIPGSPTAAALLGGLLIHGLFPGPDLFTKHRDITLTFMAGLLAAQVFMCAGGLLVSRYSQHITKVPALIMIAAVSVCAVVGSYGVQNSMDDVFIMLGLGLMTYGLLKLDFPVAPMVLGVVLGPIAEENFLRGRLIAGAGDGMFQFFFTGGLNLVFILICALSIAWGVFAEYRSYKSSRATAVAEVKP

SEQ ID NO: 40271 - DNA, 546 bp, Unknown
  Obtained from environmental sample
  misc_feature (1)..(546): n is a, c, g, or t
ttggagataagcgaagaaacgtattttattgaatcttttacgcctgaatatatcgttgaaatcaaagataaaaaaacaacgttgtttgttaaaggccttaaaaatcttcgtttgtgcgatcttcaaatagagaccgacagtatgtttatcagaaaggtaaaagcccacgggggaaatgagaaggagctttacaatttatccgtaaacggcacgacatacaaggatacggtattgccgcttaaccggcaggtttcagaaaatgaaatattcaccgtaattataaacgatgcggatgacaagccgataaatgttacgggtattagcctgcgctattatgcggatgatcttgtgtttcagggagactcaggcggtgtttacagactggaattcggcgcggatctgtcaagaccggctccggtatatgatatacaacgttacaagaacgaaatactaaaaggccctatcgacaggcttgtgttgggtgaaatagtttatttacaggcagagtctgtacgcgaacctgtttcttacagaatttatttttaa

SEQ ID NO: 40272 - protein, 181 aa, Unknown
  Obtained from environmental sample
  misc_feature (1)..(181): Xaa is any amino acid
MEISEETYFIESFTPEYIVEIKDKKTTLFVKGLKNLRLCDLQIETDSMFIRKVKAHGGNEKELYNLSVNGTTYKDTVLPLNRQVSENEIFTVIINDADDKPINVTGISLRYYADDLVFQGDSGGVYRLEFGADLSRPAPVYDIQRYKNEILKGPIDRLVLGEIVYLQAESVREPVSYRIYF

SEQ ID NO: 40273 - DNA, 600 bp, Unknown
  Obtained from environmental sample
  misc_feature (1)..(600): n is a, c, g, or t
ttgtgggctttgatcaatactgttaagggccgagccttgagcgagacgccccagaaaatgcccgcgcggcggacgacgagtttgagaccgcttgttgacatagcccttatcaccaaagaccgcccggtcgctttcgcgcagcagatctgtcaagacactgacatcagccacattgcccgctgtcacccccactgtatgcaccaacccgctttgagcgtctgccccaatatgaactttcatcccaaagtgccacagattgcctttctagctctgatgcatctcagggtcacgttgcttcgtgcggttcttcgtcgaagggctggcatgaaggagcgtcgcatccaccatggtcccccgtttcaacagacagccccgcgattgcagcgattcgttgatggcttccaacatcaacttgctcaattcatgctcctcaagcaggtggcgaaagttcaggatcgtcgtctcgtcgggcaaggcatccaggcacagttcaaggcgcgcgaaacggcgcatcgattcgatctcgagcaaccggacaaatatcgcgctacaaaaccggacaaatcaaaagctcgtgacaggcctcatacagccacttga

SEQ ID NO: 40274 - protein, 199 aa, Unknown
  Obtained from environmental sample
  misc_feature (1)..(199): Xaa is any amino acid
MWALINTVKGRALSETPQKMPARRTTSLRPLVDIALITKDRPVAFAQQICQDTDISHIARCHPHCMHQPALSVCPNMNFHPKVPQIAFLALMHLRVTLLRAVLRRRAGMKERRIHHGPPFQQTAPRLQRFVDGFQHQLAQFMLLKQVAKVQDRRLVGQGIQAQFKARETAHRFDLEQPDKYRATKPDKSKARDRPHTAT

SEQ ID NO: 40275 - DNA, 303 bp, Unknown
  Obtained from environmental sample
  misc_feature (1)..(303): n is a, c, g, or t
atgaaagttcatattggggcagacgctcaaagcgggttggtgcatacagtgggggtgacagcgggcaatgtggctgatgtcagtgtcttgacagatctgctgcgcgaaagcgaccgggcggtctttggtgataagggctatgtcaacaagcggtctcaaactcgtcgtccgccgcgcgggcattttctggggcgtctcgctcaaggctcggcccttaacagtattgatcaaagcccacaaacgcttccaccgctagaatgtctctgttcaagccaagtgtcgaaacatgtggttcccaggtga

SEQ ID NO: 40276 - protein, 100 aa, Unknown
  Obtained from environmental sample
  misc_feature (1)..(100): Xaa is any amino acid
MKVHIGADAQSGLVHTVGVTAGNVADVSVLTDLLRESDRAVFGDKGYVNKRSQTRRPPRGHFLGRLAQGSALNSIDQSPQTLPPLECLCSSQVSKHVVPR

SEQ ID NO: 40277 - DNA, 543 bp, Unknown
  Obtained from environmental sample
  misc_feature (1)..(543): n is a, c, g, or t
ttggtggctttctacgcgcgattcgggacattcccaccggcagacgggcaaaaaccatcaccggacgacctgaagcccgggacaaccagccgggggtcatcgggagcaatagccagcaccgccggtctgtccagaaaggcggtgacgctcaccggcgcgtccgcttcggaagccgctctgctcgccaatttacgcgcggagtactcgctagaacaacggcagattgcctgtgccgccttctccgttgcggttgcggaatacccgaccgaagccgaccgcgaccgggcgctctatcaggttaacaaggtggcggattgtgttggccttgcgccggacgccgtttttcgggagacagaaaacgcccgcgccgccgtgattcgcgccctgcttgcccaaaacgtcaagccggacagaatccgtgccgttgcgcattctctgcctgcctgtctggttgcccataatctggacgtggaagaagaggcgttcctgcaaagaaacgcgatccggcatcccctattcgtgagcggggtggtcaatggatga

SEQ ID NO: 40278 - protein, 180 aa, Unknown
  Obtained from environmental sample
  misc_feature (1)..(180): Xaa is any amino acid
MVAFYARFGTFPPADGQKPSPDDLKPGTTSRGSSGAIASTAGLSRKAVTLTGASASEAALLANLRAEYSLEQRQIACAAFSVAVAEYPTEADRDRALYQVNKVADCVGLAPDAVFRETENARAAVIRALLAQNVKPDRIRAVAHSLPACLVAHNLDVEEEAFLQRNAIRHPLFVSGVVNG

SEQ ID NO: 40279 - DNA, 318 bp, Unknown
  Obtained from environmental sample
  misc_feature (1)..(318): n is a, c, g, or t
atgaaatacggattatccgaaagaacgcttaatacgctcaactccatttttaaacaatatccaggcattaaagaggctgttctttacggaagcagggcaaagggaaattaccgcaatggctctgacattgatttatccctaaaaaccaacgaaggctttacgcacaggaatgtattgcgcctaatggatgattttgaagactcagatatgccatatcttgtggacgtttccgtttacggagagctttcaaacccggacttaaaagcccacattgatcgagtagggataattttgtataccggacagaatgcaccttga

SEQ ID NO: 40280 - protein, 105 aa, Unknown
  Obtained from environmental sample
  DOMAIN (6)...(99): Nucleotidyltransferase domain
  misc_feature (1)..(105): Xaa is any amino acid
MKYGLSERTLNTLNSIFKQYPGIKEAVLYGSRAKGNYRNGSDIDLSLKTNEGFTHRNVLRLMDDFEDSDMPYLVDVSVYGELSNPDLKAHIDRVGIILYTGQNAP

SEQ ID NO: 40281 - DNA, 366 bp, Unknown
  Obtained from environmental sample
  misc_feature (1)..(366): n is a, c, g, or t
ttggcatctggatttttccgcatcgacactaaacggccgatttctgttaaagtgcgcgtccagctggtcggcgaatgtccggcggtcaaaatgggtctgatgctggcgcaggccattcacgaattgccgattaaatgtctgccgctggaaatacccgtggctatcgaagtccatgtttccaaactggaaaacgcccacgatgccattcggatcagcgatttacatttgccgaatatcactattgagctgccgcccggtcaggaaatcgtccacgccgaagtgccgcgtgaactgaaagccgaggaagccgctccggccgccgcgacagccgaagaaccggctacctccccagaaagcggaaggtga

SEQ ID NO: 40282 - protein, 121 aa, Unknown
  Obtained from environmental sample
  misc_feature (1)..(121): Xaa is any amino acid
MASGFFRIDTKRPISVKVRVQLVGECPAVKMGLMLAQAIHELPIKCLPLEIPVAIEVHVSKLENAHDAIRISDLHLPNITIELPPGQEIVHAEVPRELKAEEAAPAAATAEEPATSPESGR

SEQ ID NO: 40283 - DNA, 843 bp, Unknown
  Obtained from environmental sample
  misc_feature (1)..(843): n is a, c, g, or t
atgccggtgtggatcaaagaaaagctctttatgcgctccatgttgcgcgatgcgctgaaagaattttcccttgacggaaagccgatgtatttccccgaacaccacctttcccacgccgcctcggccttctatccctcgccttttgaggaggcggccgtgctcaccgttgacggcgtgggcgaatggacgactacctcgatcggacggggacgaggcaacacgatcgaagtgctgcgggaaattcatttcccccattccctgggactgctctattccgcgttcacggcttactgcggtttcaaggtgaacagcggggaatacaagctcatgggccttgcgccctacggcaaccctgacgccgaacgtacccgccttttcgagcggaagatacgcgaggaactgatcgatatccgtgaagacggctcctatctgttgaacatgcaatatttttccttcgccgtgggtctgcgcatgtaccatgaggagcgctggacggccctgttcggcatcggcccgcgcaaggcggaatccgaggatgtggcgcaggaatacatggacatggcgctggccatccaacgggtaaccgaagaccttatcctgcgcatggcgcgcacggcacgagacttgaccggggcggagaacatctgcctggccggcggcgtggcgctcaactgcgtagccaacggcaagctgctgcgttcgggtctctttaagggcctgtgggtccagcccgcctccggcgataaagggggcgcgctcggcgcggccctggccgtatggcacataaatttgggcgcggaacggaagcctgaagcccggagatgccatgcggggcgcctgtga

SEQ ID NO: 40284 - protein, 280 aa, Unknown
  Obtained from environmental sample
  DOMAIN (40)...(280): Carbamoyltransferase
  misc_feature (1)..(280): Xaa is any amino acid
MPVWIKEKLFMRSMLRDALKEFSLDGKPMYFPEHHLSHAASAFYPSPFEEAAVLTVDGVGEWTTTSIGRGRGNTIEVLREIHFPHSLGLLYSAFTAYCGFKVNSGEYKLMGLAPYGNPDAERTRLFERKIREELIDIREDGSYLLNMQYFSFAVGLRMYHEERWTALFGIGPRKAESEDVAQEYMDMALAIQRVTEDLILRMARTARDLTGAENICLAGGVALNCVANGKLLRSGLFKGLWVQPASGDKGGALGAALAVWHINLGAERKPEARRCHAGRL

SEQ ID NO: 40285 - DNA, 552 bp, Unknown
  Obtained from environmental sample
  misc_feature (1)..(552): n is a, c, g, or t
atgatggctttgaatatgcagcaaaaactcgaccttttaaaaaatctcgggcgtcccaccatacgcgattacataccgcttgtttttaaggattttattgaattgcacggcgaccgctatttcagcgacgaccctgcgcttttgggaggcatctgttcgttaaacggcataccggtaacggttgtctcgcaggtgcgcgcgaaagacatcgccgaattacagagaatcaacttttccatgcctcatcccgaaggataccgcaaagctctgcgccttgcgaagcaggctgaaaaattccgccgtcccgttatctgctttattgacacccccggcgcttactgcggagtcggcgcggaagagagaggccagggcgaagcgattgcgcgtaaccttcacgaatttatgatgttaaaaactccggtaatttccgttgtattaggagagggcggctccgggcggagcgcttgctcttggcgtttgcgaccagcttggccttgcaggaaaacgctctcaattcggttatcccgccgaagggcttttgctcccttttga

SEQ ID NO: 40286 - protein, 183 aa, Unknown
  Obtained from environmental sample
  DOMAIN (2)...(97): Acetyl co-enzyme A carboxylase carboxyltransferase alpha subunit
  misc_feature (1)..(183): Xaa is any amino acid
MMALNMQQKLDLLKNLGRPTIRDYIPLVFKDFIELHGDRYFSDDPALLGGICSLNGIPVTVVSQVRAKDIAELQRINFSMPHPEGYRKALRLAKQAEKFRRPVICFIDTPGAYCGVGAEERGQGEAIARNLHEFMMLKTPVISVVLGEGGSGRSACSWRLRPAWPCRKTLSIRLSRRRAFAPF

SEQ ID NO: 40287 - DNA, 426 bp, Unknown
  Obtained from environmental sample
  misc_feature (1)..(426): n is a, c, g, or t
ttggaaaaaggaaaaggaaccagcttttttttggagcgcaattttcccaaccgagcttttgaacccccgaaattgatgccgaaagattgccagcaggttaggctccaatttgctgatgaatgctattcaagctatggaaacggatggcaaaatttcagttggcatcagctcaaagaaaaatttgcggagataaccgtcgcggatacaggcaatggcattgagtcagagcatttaaaaaatattttcacgccttttttcactacaaaagaacaaggcacaggtttggggcttgccattgttaaaaaaataattgacctacacgaaggcgaaatcaccgttgaaagtaccattggcaaaggcacttcatttttcataaagataccgcttcaatcgaacaacgcgttgttgccttctggaatggggtag

SEQ ID NO: 40288 - protein, 141 aa, Unknown
  Obtained from environmental sample
  DOMAIN (20)...(130): Histidine kinase-, DNA gyrase B-, and HSP90-like ATPase
  misc_feature (1)..(141): Xaa is any amino acid
MEKGKGTSFFLERNFPNRAFEPPKLMPKDCQQVRLQFADECYSSYGNGWQNFSWHQLKEKFAEITVADTGNGIESEHLKNIFTPFFTTKEQGTGLGLAIVKKIIDLHEGEITVESTIGKGTSFFIKIPLQSNNALLPSGMG

SEQ ID NO: 40289 - DNA, 705 bp, Unknown
  Obtained from environmental sample
  misc_feature (1)..(705): n is a, c, g, or t
ttgcatacggcttcgaccccttttctgacttatcttgaaatacacaccaaacgcgggaaggaggcaatggacgatatagggatactcaatgatttcaaggggatagcggtacacgactgcttttcttcttactggaattaccgttgcgttcattctttgtgcaacgcgcacttgttacgtgaaattacctttattgacgaaacaaccggtcaaagatgggcgaaggaaatgattgaactgctgctggagataaagaagtcagttgacgtaaggcgcttgtgcaaaaaggaatttctaccaaaggcggaactgtcaaaatatacaaaacgatataacatgctcgtggaagaaggcttgaatgaaaatcccgaacaggctaaaccgggaggcaggcgtgggagagcaaaacagacgaaggctcggctgttgctattaaggctgcattgccacaaagaagagtatctgcgattcgccaatgattttaccgctccgtttgacaacaatcaggctgaaagagactttagaatggcaaaagtcaaagagaaagtatccggctgttttcgctctgaaaaaggagaaaagagttttgcaacgatatactcattcatacaaacactcaaaaaaaataaggtatctgtatttgatgaattggttaaaaccctcaaaggtgattattctttcccttttcaactgttaactgaatag

SEQ ID NO: 40290 - protein, 234 aa, Unknown
  Obtained from environmental sample
  misc_feature (1)..(234): Xaa is any amino acid
MHTASTPFLTYLEIHTKRGKEAMDDIGILNDFKGIAVHDCFSSYWNYRCVHSLCNAHLLREITFIDETTGQRWAKEMIELLLEIKKSVDVRRLCKKEFLPKAELSKYTKRYNMLVEEGLNENPEQAKPGGRRGRAKQTKARLLLLRLHCHKEEYLRFANDFTAPFDNNQAERDFRMAKVKEKVSGCFRSEKGEKSFATIYSFIQTLKKNKVSVFDELVKTLKGDYSFPFQLLTE

SEQ ID NO: 40291 - DNA, 513 bp, Unknown
  Obtained from environmental sample
  misc_feature (1)..(513): n is a, c, g, or t
gtgaaacacatgtttgtcaaacgtcatgaccgctccctgccggctctccacgcaagcaacagcccggtttccctggcccatctcgtgcaaggcaggcttgaggccaaagcccggaaccggaaagaactccatctggtgcaactctggaaaaactggggcatggccatgggcaacgatctggccgaacaggtgttcccgctcggccatcgggaggggattctgcttgcgggcggcgaagaccatctgattcttcaggaactgagctattcgatcccggaaatcctgatgcgggtgaatgccttcatgggggaagatttttttgcaaaagtggaattgcaactccttatgggaagaatcccgctcaacgccattcaagccgcccccccgcccgtcccgctttctcccgtccggccggaacctttgggacgcctgtccggggaaggcgcattaaacccgtatgtggagcagtgttacaaggcatatgtgcgctgcttcaacctcatcgagacatga

SEQ ID NO: 40292 - protein, 170 aa, Unknown
  Obtained from environmental sample
  misc_feature (1)..(170): Xaa is any amino acid
MKHMFVKRHDRSLPALHASNSPVSLAHLVQGRLEAKARNRKELHLVQLWKNWGMAMGNDLAEQVFPLGHREGILLAGGEDHLILQELSYSIPEILMRVNAFMGEDFFAKVELQLLMGRIPLNAIQAAPPPVPLSPVRPEPLGRLSGEGALNPYVEQCYKAYVRCFNLIET

SEQ ID NO: 40293 - DNA, 588 bp, Unknown
  Obtained from environmental sample
  misc_feature (1)..(588): n is a, c, g, or t
ttgattgatccggatgtttcctataatgagatagaagggactgtaatagaaaaaatcatcaatcctgttcttgaacctaccggattacttgataaaaaaacaaagtactttattaaccccacggggcggtttgtaatcggaggtccgttcggggacacggggcttacagggcgcaaaattattgttgacacttacggcggcatggggcggcacggcggcggcgctttctcaggcaaagacccgtccaaagttgacagatcggcggcttatgcggcgcgttacatcgccaaaaacattgtcgcagccaaacttgccgaccgctgtgaaatccagcttgcttatgcgattggagtgccgttcccggtttcgataatggtagacacattcggaaccgcaaaagtagatgaaaaaagaatcgggaaagccgtggaaaagattttcgatttaagccccgcgggaattatcaagatgttggatctgcgccgcccgatttacttaaagaccgcatcttacggtcattttggccgctctgaattcccctgggaaaagacggacaaagtagaggaactgaaaaaagcaataaactaa

SEQ ID NO: 40294 - protein, 195 aa, Unknown
  Obtained from environmental sample
  DOMAIN (46)...(183): S-adenosylmethionine synthetase, C-terminal domain
  misc_feature (1)..(195): Xaa is any amino acid
MIDPDVSYNEIEGTVIEKIINPVLEPTGLLDKKTKYFINPTGRFVIGGPFGDTGLTGRKIIVDTYGGMGRHGGGAFSGKDPSKVDRSAAYAARYIAKNIVAAKLADRCEIQLAYAIGVPFPVSIMVDTFGTAKVDEKRIGKAVEKIFDLSPAGIIKMLDLRRPIYLKTASYGHFGRSEFPWEKTDKVEELKKAIN

SEQ ID NO: 40295 - DNA, 741 bp, Unknown
  Obtained from environmental sample
  misc_feature (1)..(741): n is a, c, g, or t
atgatcacggagcttagggaggttgtcggcgacttaaacaatggtatagaggatatgtcgcagacgatccacgagatagccaagaatgcggatcaccagaggagcggctcggagagcatggcggccgccatgaccgagctgtcggcctccattgaccaagtgagcgccggctcagagtcatcgctggtgcagctcgatgccgcgcttgaggccaccaaccaaggcaacgaagcaggagcctcaaccaagaaggcaatggaagacatcaccacgaccacaggcaagatagccttggccatcggcgtcatccaagagatagccaaccagaccaacctgctgtcgctgaacgccgccatcgaggcggccaaggccggcgagcagggcaagggcttcgccgttgtcgccgaggaagtgagaaagctggccgagcgcagcgcaacgtcggctaaggagatagcccagtacaacatagatgcgcgggaatcggtccagcagggcgaccacatggtcaacctgaccgtgggtctgatggaaaagatcaagttgagcctagaccaattcgctgcgcatacgagggagtccgtggaagccacgagggagcaggcgaagaccggcaccgaggtggccaagccaggtggaatccagcgtgaacgagacagtgtcaatagcctcgggcacccaagagctgtccagaaccgccgcccacctccagaggaagtccgcagccaggtcaaactctga

SEQ ID NO: 40296 - protein, 246 aa, Unknown
  Obtained from environmental sample
  DOMAIN (17)...(245): Methyl-accepting chemotaxis protein (MCP) signaling domain
  misc_feature (1)..(246): Xaa is any amino acid
MITELREVVGDLNNGIEDMSQTIHEIAKNADHQRSGSESMAAAMTELSASIDQVSAGSESSLVQLDAALEATNQGNEAGASTKKAMEDITTTTGKIALAIGVIQEIANQTNLLSLNAAIEAAKAGEQGKGFAVVAEEVRKLAERSATSAKEIAQYNIDARESVQQGDHMVNLTVGLMEKIKLSLDQFAAHTRESVEATREQAKTGTEVAKPGGIQRERDSVNSLGHPRAVQNRRPPPEEVRSQVKL

SEQ ID NO: 40297 - DNA, 717 bp, Unknown
  Obtained from environmental sample
  misc_feature (1)..(717): n is a, c, g, or t
gtgaggataggcacccgcgctgtttgggctcctcgccccctagggatctggggagtagcaaggaggcttcagagtttgacctggctgcggacttcctctggaggtgggcggcggttctggacagctcttgggtgcccgaggctattgacactgtctcgttcacgctggattccacctggcttggccacctcggtgccggtcttcgcctgctccctcgtggcttccacggactccctcgtatgcgcagcgaattggtctaggctcaacttgatcttttccatcagacccacggtcaggttgaccatgtggtcgccctgctggaccgattcccgcgcatctatgttgtactgggctatctccttagccgacgttgcgctgcgctcggccagctttctcacttcctcggcgacaacggcgaagcccttgccctgctcgccggccttggccgcctcgatggcggcgttcagcgacagcaggttggtctggttggctatctcttggatgacgccgatggccaaggctatcttgcctgtggtcgtggtgatgtcttccattgccttcttggttgaggctcctgcttcgttgccttggttggtggcctcaagcgcggcatcgagctgcaccagcgatgactctgagccggcgctcacttggtcaatggaggccgacagctcggtcatggcggccgccatgctctccgagccgctcctctggtga

SEQ ID NO: 40298 - protein, 238 aa, Unknown
  Obtained from environmental sample
  misc_feature (1)..(238): Xaa is any amino acid
MRIGTRAVWAPRPLGIWGVARRLQSLTWLRTSSGGGRRFWTALGCPRLLTLSRSRWIPPGLATSVPVFACSLVASTDSLVCAANWSRLNLIFSIRPTVRLTMWSPCWTDSRASMLYWAISLADVALRSASFLTSSATTAKPLPCSPALAASMAAFSDSRLVWLAISWMTPMAKAILPVVVVMSSIAFLVEAPASLPWLVASSAASSCTSDDSEPALTWSMEADSSVMAAAMLSEPLLW

SEQ ID NO: 40299 - DNA, 600 bp, Unknown
  Obtained from environmental sample
  misc_feature (1)..(600): n is a, c, g, or t
ttgtaccaactgcggccagccaatacagccagcactatctgtagagacgtaccaggccccttcaaccgtttcaccaactgcccatttttgccagatgccaaagcgggtgaagcgggaaaagggaagaaatggatgctggcttggatagttggtgttgcactagtgtgtgcagtagctgtagttgcggttatcgcaatagttggggggaaaaaaatatcgaccgaggattcgcagctgtatagaataacccacctgaccttgaccgaggattccctgtcactttacaccggggacaccgaagagctggttgcaagcatagagccagcaaatgccacgaatgcatccctaaaatggacatccagcaacccagatgttgcaatagtgtccgacagcggcagtattacggcaattcgctctgggacagcagtcatttccgttgcctcgccggatggtgggcttaccgcaaactgcactctcactgtcaatccaaatgtgtatgtggtgggccatgaggtttttccgagcaatgagtttggcccgctgggcaagtcagttgccccagtttgggaaaaatgggaacccggaacgcctgaacactga

SEQ ID NO: 40300 - protein, 199 aa, Unknown
  Obtained from environmental sample
  DOMAIN (81)...(159): Bacterial Ig-like domain (group 2)
  misc_feature (1)..(199): Xaa is any amino acid
MYQLRPANTASTICRDVPGPFNRFTNCPFLPDAKAGEAGKGKKWMLAWIVGVALVCAVAVVAVIAIVGGKKISTEDSQLYRITHLTLTEDSLSLYTGDTEELVASIEPANATNASLKWTSSNPDVAIVSDSGSITAIRSGTAVISVASPDGGLTANCTLTVNPNVYVVGHEVFPSNEFGPLGKSVAPVWEKWEPGTPEH

SEQ ID NO: 40301 - DNA, 384 bp, Unknown
  Obtained from environmental sample
  misc_feature (1)..(384): n is a, c, g, or t
ttgtatgtgcttcttattattttcttcgcgtatttctatacgcaggtaacgcttaaccccatagaaatagcgaaacagatacgggaaaacggcggatccattcccgggattaggaccgagcgtattgaagaatacctcaccaaaatcctgaaccgcatcgtgcttcccggttcattgtaccttgccctgatagcggtcattccgacctttatccaatgggcgtttaagtttcccacatcaatttcctatctgatgggcggcacttcgcttctcattctggtaggcgttgacctgtacacgatgagccagattgagggattgttgaaaatgcaccaccatgaaggtttggtcaagcgcgggcggctgcgcgggcggaacttgtaa

SEQ ID NO: 40302 - protein, 127 aa, Unknown
  Obtained from environmental sample
  misc_feature (1)..(127): Xaa is any amino acid
MYVLLIIFFAYFYTQVTLNPIEIAKQIRENGGSIPGIRTERIEEYLTKILNRIVLPGSLYLALIAVIPTFIQWAFKFPTSISYLMGGTSLLILVGVDLYTMSQIEGLLKMHHHEGLVKRGRLRGRNL

SEQ ID NO: 40303 - DNA, 348 bp, Unknown
  Obtained from environmental sample
  misc_feature (1)..(348): n is a, c, g, or t
atgacgaaatcgccttattcgccgaataccgtacccggctcatttccgatgtggtcacaggcaagcttgacgtgcgcggcgtggctgtgccggaatatgaggcggtgcaggacagcgcgccggatgaaactgggggcgaaaccgaggacgaaaccgaacttgatgacggtgaacagtatgccgaccaatacttatgaatccggctttgagagtctcattgtcacatggctcgttgaacagaacggctttgagcagggcgcgagcgccgactacaaccgcgaatacgccgtggacgagccgagcctgttccgctttctggaagacacgcagccggagcagaagcaatga

SEQ ID NO: 40304 - protein, 115 aa, Unknown
  Obtained from environmental sample
  misc_feature (1)..(115): Xaa is any amino acid
MTKSPYSPNTVPGSFPMWSQASLTCAAWLCRNMRRCRTARRMKLGAKPRTKPNLMTVNSMPTNTYESGFESLIVTWLVEQNGFEQGASADYNREYAVDEPSLFRFLEDTQPEQKQ

SEQ ID NO: 40305 - DNA, 552 bp, Unknown
  Obtained from environmental sample
  misc_feature (1)..(552): n is a, c, g, or t
ttgataaaattgacgattatattttttgagcaaacaacactcttgattgctgaggatggcgccaaccttgtcttaagaaatcttccgcttatatatatagcaaagggaaggtattgggttaataatcatgctcacatactcagaccaaatgataataatgacttagggtttatggcatatctattagaaagcattgactatactgtttacattacaggagcggctcaacccaaactttcacaagataatcttggcagggttccgctttatgtcccgccattagaagagcagaaaataatcacggcatatctgggcgggctatgtggatacattgacagagtaattagcaaacttaatgacgaaatcgccttattcgccgaataccgtacccggctcatttccgatgtggtcacaggcaagcttgacgtgcgcggcgtggctgtgccggaatatgaggcggtgcaggacagcgcgccggatgaaactgggggcgaaaccgaggacgaaaccgaacttgatgacggtgaacagtatgccgaccaatacttatga

SEQ ID NO: 40306 - protein, 183 aa, Unknown
  Obtained from environmental sample
  DOMAIN (1)...(109): Type I restriction modification DNA specificity domain
  misc_feature (1)..(183): Xaa is any amino acid
MIKLTIIFFEQTTLLIAEDGANLVLRNLPLIYIAKGRYWVNNHAHILRPNDNNDLGFMAYLLESIDYTVYITGAAQPKLSQDNLGRVPLYVPPLEEQKIITAYLGGLCGYIDRVISKLNDEIALFAEYRTRLISDVVTGKLDVRGVAVPEYEAVQDSAPDETGGETEDETELDDGEQYADQYL

SEQ ID NO: 40307 - DNA, 591 bp, Unknown
  Obtained from environmental sample
  misc_feature (1)..(591): n is a, c, g, or t
atgatttgccgtttgtcttcatcggacagggagcccggaatggctatgaaacccgccacccgccttgactaccaggccagcatcgaccgaccgtctctcgcgctgcccgacggcaagcgtgtcgccgtctacatcgtggtgaacgttgagaactgggatatcgaccgccccatgccacgccaggtgctgaccgcgccgcagggcgcgtcggtgatccccgacctgccgaactgggcctggcacgaatacggcatgcgcgtcggtttctggcgcctgaaggcggcgctggacgcgcacggcatcgcgccttcgatgacgataaacggcagtgtgcccgccgcgtatccacgcgtgacacaggccgcacgcgacgccggctgggaattcatgggccacggcttccatcagaccgcaacccacaatgtcaccgaccagcgggcgatgatccgcgccgcgatcgattcgctgcgcgccgccggcgggcacgaaatcgtcggctggctggcgcccggactcacggaaacgctcgacaccgccgatctgctgacggaagccggccatccgttattgcgcggactgggggttggatga

SEQ ID NO: 40308 - protein, 196 aa, Unknown
  Obtained from environmental sample
  DOMAIN (72)...(190): Polysaccharide deacetylase
  misc_feature (1)..(196): Xaa is any amino acid
MICRLSSSDREPGMAMKPATRLDYQASIDRPSLALPDGKRVAVYIVVNVENWDIDRPMPRQVLTAPQGASVIPDLPNWAWHEYGMRVGFWRLKAALDAHGIAPSMTINGSVPAAYPRVTQAARDAGWEFMGHGFHQTATHNVTDQRAMIRAAIDSLRAAGGHEIVGWLAPGLTETLDTADLLTEAGHPLLRGLGVG

SEQ ID NO: 40309 - DNA, 618 bp, Unknown
  Obtained from environmental sample
  misc_feature (1)..(618): n is a, c, g, or t
ttggcaattgatggcaactccacaactcgctggtcaagctaccaaaatggtgctgataacgataatcaatggataaccatagatttaggcgatacttacaaagtgaacaaagttattctaaactgggaagcagcgtatggaaaaacttacagaattgaagtttccacagacggctcctcctggattacagtagcatacaccactaataacgcaagctcaggcgttaaagaacaccccattgcgcccagagatgcacgatatgtgagaatgtttggagaggaacgtgggaatcaatacggcggtttttctctttattcctttgaaatctacggagagcaatcaaatcaacaaccatccactccgcacaacgcaagattttttatgcctcacactaacgaaacaggctattggtggcaaggggagaacgctcgcatagcttctcttgccgctgcatttataatgggtgccccatttgcacgtagcaaatattgggcagataccttgtttggcatggctaccgcacagttagactggatacttggaaaaaatccgtttggagttagtatgatgttttgttttcggaaaaatcaatttatccctaactatccccgctactag

SEQ ID NO: 40310 - protein, 205 aa, Unknown
  Obtained from environmental sample
  DOMAIN (2)...(107): F5/8 type C domain
  misc_feature (1)..(205): Xaa is any amino acid
MAIDGNSTTRWSSYQNGADNDNQWITIDLGDTYKVNKVILNWEAAYGKTYRIEVSTDGSSWITVAYTTNNASSGVKEHPIAPRDARYVRMFGEERGNQYGGFSLYSFEIYGEQSNQQPSTPHNARFFMPHTNETGYWWQGENARIASLAAAFIMGAPFARSKYWADTLFGMATAQLDWILGKNPFGVSMMFCFRKNQFIPNYPRY

SEQ ID NO: 40311 - DNA, 507 bp, Unknown
  Obtained from environmental sample
  misc_feature (1)..(507): n is a, c, g, or t
atgctgaccgacatcaaaaggaagtttgcacagaagataaatgagtgtgctaatgcacttgctaataatgggtattccagttttgaaatggaaaatgcaaagtatgctctttgtgcttggatagatgaatatatctatgcaaacagcacaatatctgcaaaatggttttcacattcgcttgctttaagcgaatttggggatgccaaagctggcaaacatttttttgacagaatggatgctttgcataaaaacgcacagagcaatcagttgcttgaactttatgcaaagtgcatattattcggttttatgggacaatttaaaatgggagaacaccccgagttgaggcaagttctgaatactgcaatttcaaaaacgaatgtatttttagaaccaataaattacaaaccagcttccaaaagcaaatacagattttctttttgggcctggcataaaaaatattttaataacaggatcttgccaaattcaatgcaaggggtttgccactaa

SEQ ID NO: 40312 - protein, 168 aa, Unknown
  Obtained from environmental sample
  misc_feature (1)..(168): Xaa is any amino acid
MLTDIKRKFAQKINECANALANNGYSSFEMENAKYALCAWIDEYIYANSTISAKWFSHSLALSEFGDAKAGKHFFDRMDALHKNAQSNQLLELYAKCILFGFMGQFKMGEHPELRQVLNTAISKTNVFLEPINYKPASKSKYRFSFWAWHKKYFNNRILPNSMQGVCH

SEQ ID NO: 40313 - DNA, 774 bp, Unknown
  Obtained from environmental sample
  misc_feature (1)..(774): n is a, c, g, or t
atgctggtggcggatcgcatttacacggcttgcaagtattatgaaatattccagttcaagggcttcaagcagtgcgccatcatcacgtcgtacgcgccgctggaaggcaatctacgcacagagtcgccagattctgaggaatttgaaaaatatgaggcataccgcaaaatgctgggggcggtcgagggcgaaaaggtgacgcaacagaccattgacacgtttgaaaaagaggcaaagaggaagttcatagaagacccagcgcaaatgaagctgctgatagtggtaaataaattattgacgggctttgacgcgccgccctgcacgtacctctacattgacaaaaagatggaagactacggcttatttcaggccatctgccgcgtgaatcgcctagacgatgaaacaaaggactttggctacatagttgactatcagcaattgttcggcgatttggcggacgcattaaacaagtacacggccggcgcctttgagggctatgacgcggatgacgttgagggcctgataaaaggccgccttgcagaagccaaaaaatacctagacgccacattggaagaacttgacgacctgtgcggcggcgttcccgcccctcgtgcccaccttgactatacccactatttctgcggcgaaaacggcgttggcggcatagacgatgaaatctgttcgcgcagccgcgaaaagctgtaccaggctgggttaacccgcttgcccacgcatacgccgaaatcaaaggcaaatgggcgatgctggctataa

SEQ ID NO: 40314 - protein, 257 aa, Unknown
  Obtained from environmental sample
  misc_feature (1)..(257): Xaa is any amino acid
MLVADRIYTACKYYEIFQFKGFKQCAIITSYAPLEGNLRTESPDSEEFEKYEAYRKMLGAVEGEKVTQQTIDTFEKEAKRKFIEDPAQMKLLIVVNKLLTGFDAPPCTYLYIDKKMEDYGLFQAICRVNRLDDETKDFGYIVDYQQLFGDLADALNKYTAGAFEGYDADDVEGLIKGRLAEAKKYLDATLEELDDLCGGVPAPRAHLDYTHYFCGENGVGGIDDEICSRSREKLYQAGLTRLPTHTPKSKANGRCWL

SEQ ID NO: 40315 - DNA, 522 bp, Unknown
  Obtained from environmental sample
  misc_feature (1)..(522): n is a, c, g, or t
gtgctgatcaccatcggatcgggactgctgaatccggctttgtttgaatttcttaaatccgcggcactgagtccgatcaatcttcatatctggctaaaacttgatgccgcaacggaagcgtggtaccaatacataaatcgttccagtattccccataaggaactgctttcccgcatccgggattttgccgcttcgtttgctccgtttatcgtacaaaccatgctctgtacggtaaatggtgcattaccgccgccggaagaaaattttgcctgggtacagttggtaacggaactggccgttctttccgccccaaaaacaagccgctccggcgcggaagcgaacggagcggcggggaagcaggtgaatttgcgggcggtacaaatctacggtaaggcccggcccgctcccgaggatcctcttgccgaaacggtaccggcggcagtcctggaggaacgggccgcactgcttcggaaggtactgaagaaagcaggaacaacggtaccggtggaagtatacgagtaa

SEQ ID NO: 40316 - protein, 173 aa, Unknown
  Obtained from environmental sample
  misc_feature (1)..(173): Xaa is any amino acid
MLITIGSGLLNPALFEFLKSAALSPINLHIWLKLDAATEAWYQYINRSSIPHKELLSRIRDFAASFAPFIVQTMLCTVNGALPPPEENFAWVQLVTELAVLSAPKTSRSGAEANGAAGKQVNLRAVQIYGKARPAPEDPLAETVPAAVLEERAALLRKVLKKAGTTVPVEVYE

SEQ ID NO: 40317 - DNA, 834 bp, Unknown
  Obtained from environmental sample
  misc_feature (1)..(834): n is a, c, g, or t
atgcgatatggaaaattttgggcatctgaacacgctgttgtggtatctccatcagaacaatgttctgtcctctggctgggcgaacttttacgcacaatgaatctggggcaatattctgccgctgctgcgcaaccaggtcttgcaattgatacaataaacaaactcaaaatagctgtgcctcccctccctgaacaacacgccatcgccgccttcctcgaccgtgaatgttcccgcattgacgcgcttattgaaaagaaaaaccgtctgctggaattgctggaagaaaagcgccgcgccgtgatcactcaggcggtcacgcgcggccttgatccccatgcgcccatgaaggattccggagtggagtggctggggaaagtgccggaagggtggcaacaaacatctttaaagtacttttttcctatattgcaatcaggcgtgagcgttaatgcagaacaaagccacgcaacagaagattcttttggagtattaaaaactagttgtgtctatggaaataagtttaatccagaagaaaataaacgggtttttgataatgaagttgaaagattagcctgtcctgtaacgcaagatagtattataattagtagaatgaatactcctgatctcgttggtagctgtggatatgtcaataatgatcatcctaaccttttccttccagatcgtctttggatagcttgctttgcaaaacaagcgcaagtttgtacgcgctttgtatggtatttgttgatttcaaaccctcttatttcaattacaggtatattggcgacagggacctacggggagcatgaaaaatctttcacaggacaaatttcttag

SEQ ID NO: 40318 - protein, 277 aa, Unknown
  Obtained from environmental sample
  misc_feature (1)..(277): Xaa is any amino acid
MRYGKFWASEHAVVVSPSEQCSVLWLGELLRTMNLGQYSAAAAQPGLAIDTINKLKIAVPPLPEQHAIAAFLDRECSRIDALIEKKNRLLELLEEKRRAVITQAVTRGLDPHAPMKDSGVEWLGKVPEGWQQTSLKYFFPILQSGVSVNAEQSHATEDSFGVLKTSCVYGNKFNPEENKRVFDNEVERLACPVTQDSIIISRMNTPDLVGSCGYVNNDHPNLFLPDRLWIACFAKQAQVCTRFVWYLLISNPLISITGILATGTYGEHEKSFTGQIS

SEQ ID NO: 40319 - DNA, 462 bp, Unknown
  Obtained from environmental sample
  misc_feature (1)..(462): n is a, c, g, or t
atgtcatcaataatcaaccacaacatcccgtccctcaccgcgcaacgttatttgggagtaaacaaccgttcggcggaaagatccatgtcccgcctggcttccggcctcagggtgaacagcgcggccgacgacgccgccggtctggccatctcggaaaagatgcgcgggcaaatccgcggtctggatatggccaagaagaacgcgcaggacacctcctcgctcatccagatagcggaaggcgcgctggatcagacccacgccatcttggggcgtatccgcgaactggctatccaggcggccaatgacaccaataccgacgacgaccgcaacgaaatcgaaaacgaaatcaaacagctcaaaaaagaagttgaccgtatcggccacaccacggaatttaacaccaaaaaactgctggacggctccatgcgcggcacccgtgatctggttcaagggcccgcatga

SEQ ID NO: 40320 - protein, 153 aa, Unknown
  Obtained from environmental sample
  DOMAIN (29)...(150): Bacterial flagellin N-terminus
  misc_feature (1)..(153): Xaa is any amino acid
MSSIINHNIPSLTAQRYLGVNNRSAERSMSRLASGLRVNSAADDAAGLAISEKMRGQIRGLDMAKKNAQDTSSLIQIAEGALDQTHAILGRIRELAIQAANDTNTDDDRNEIENEIKQLKKEVDRIGHTTEFNTKKLLDGSMRGTRDLVQGPA

SEQ ID NO: 40321 - DNA, 444 bp, Unknown
  Obtained from environmental sample
  misc_feature (1)..(444): n is a, c, g, or t
ttgaaccagatcacgggtgccgcgcatggagccgtccagcagttttttggtgttaaattccgtggtgtggccgatacggtcaacttcttttttgagctgtttgatttcgttttcgatttcgttgcggtcgtcgtcggtattggtgtcattggccgcctggatagccagttcgcggatacgccccaagatggcgtgggtctgatccagcgcgccttccgctatctggatgagcgaggaggtgtcctgcgcgttcttcttggccatatccagaccgcggatttgcccgcgcatcttttccgagatggccagaccggcggcgtcgtcggccgcgctgttcaccctgaggccggaagccaggcgggacatggatctttccgccgaacggttgtttactcccaaataacgttgcgcggtgagggacgggatgttgtggttgattattga

SEQ ID NO: 40322 - protein, 147 aa, Unknown
  Obtained from environmental sample
  misc_feature (1)..(147): Xaa is any amino acid
MNQITGAAHGAVQQFFGVKFRGVADTVNFFFELFDFVFDFVAVVVGIGVIGRLDSQFADTPQDGVGLIQRAFRYLDERGGVLRVLLGHIQTADLPAHLFRDGQTGGVVGRAVHPEAGSQAGHGSFRRTVVYSQITLRGEGRDVVVDY

SEQ ID NO: 40323 - DNA, 315 bp, Unknown
  Obtained from environmental sample
  misc_feature (1)..(315): n is a, c, g, or t
ttgggagtaaaaatatctgtcagcgagcttgacgttctgatagtaacttatcaggagtttgcgccttatggtcaggggcccaacaaacaaaatttaatgccggaagataaaaggatcgagggactaaagaagcaggcagaactatacggccaatactttaaagtatatctggaattcagtgatatcattgagcgcgtatcgttttggggcgtcactgacgataaaagctggcgatctgccgccttgccgcttatatttgatgcagccggaacccccaaagatgcatactacagcgtgattggatcgcttaggtaa

SEQ ID NO: 40324 - protein, 104 aa, Unknown
  Obtained from environmental sample
  misc_feature (1)..(104): Xaa is any amino acid
MGVKISVSELDVLIVTYQEFAPYGQGPNKQNLMPEDKRIEGLKKQAELYGQYFKVYLEFSDIIERVSFWGVTDDKSWRSAALPLIFDAAGTPKDAYYSVIGSLR

SEQ ID NO: 40325 - DNA, 456 bp, Unknown
  Obtained from environmental sample
  misc_feature (1)..(456): n is a, c, g, or t
gtgcaattagcggtggatttttacccctcggcggacggcgaggcaagcccctatcttgaggaattacgcgtaacatatatgccggacgagcctcccctgccgccggcccgccttaccgcggtcgcgatggacggcgcggtccagcttcaatggaggagcagccccgacgccaatactacgggctatcttgtttattacggctccacgggcgccgattatctgggcgaagacgccgcggcgggagtgtcgccggtcgacgtgggcaagcgcaacgccgttgttatagaaggcttaaagaacggcacgctgtattatttccgcgtcgccgcgtacaaccacaaagaccccgacaatgtcaccgccttacacaggctggactaccatatcggcgatttttcagccgaagtccgcgcaagacccctcacgggattaaaacagggaacagggaacaggtaa

SEQ ID NO: 40326 - protein, 151 aa, Unknown
  Obtained from environmental sample
  DOMAIN (32)...(117): Fibronectin type III domain
  misc_feature (1)..(151): Xaa is any amino acid
MQLAVDFYPSADGEASPYLEELRVTYMPDEPPLPPARLTAVAMDGAVQLQWRSSPDANTTGYLVYYGSTGADYLGEDAAAGVSPVDVGKRNAVVIEGLKNGTLYYFRVAAYNHKDPDNVTALHRLDYHIGDFSAEVRARPLTGLKQGTGNR

SEQ ID NO: 40327 - DNA, 732 bp, Unknown
  Obtained from environmental sample
  misc_feature (1)..(732): n is a, c, g, or t
atgatagaaatagcaaaggccctgtcttttaatcttgatgtccttataatggacgagccaagctcggccttgagtgaatcagaaattgacgaactgtttaaggttatcaggaatttaagggaacagggcaaaggaattgtgtacatttcccacaggatggatgaactgcgccgtatctgtgacagggttacggtaatgcgggacggccagtatatcgccactacgtccatgaaggacattaccaccgaacagatcatctcccagatggtaggccgtgaaatttacgaaagccaccatcctcatggggatacttcaaagaatgaagtggtgctggaggtaaaaaacctgaaccgcggccgttttgtgcgggacgtatcatttgaactgcataagggggagatactcggcttcgcggggcttctcggagcgggcaggtccgaggcgatgcggcttatttttggcgccgatccggcggattccggcgaaatttttgtcaatggcgtgaaagcccggattaaaaaaccaaaggacgcggtacgccacggcatcgggtatctgtcagaagaccgaaaacgttttgggctggccctgattatgtcggtaaaggcaaatacggttatggcttcccttgaaaagtttctgaaagcgcttggcattgttgacgacgccaaaacccggcaggttaccgccgaatatgtcaagcggctgaatactcaaacctcccgggtatag

SEQ ID NO: 40328 - protein, 243 aa, Unknown
  Obtained from environmental sample
  misc_feature (1)..(243): Xaa is any amino acid
MIEIAKALSFNLDVLIMDEPSSALSESEIDELFKVIRNLREQGKGIVYISHRMDELRRICDRVTVMRDGQYIATTSMKDITTEQIISQMVGREIYESHHPHGDTSKNEVVLEVKNLNRGRFVRDVSFELHKGEILGFAGLLGAGRSEAMRLIFGADPADSGEIFVNGVKARIKKPKDAVRHGIGYLSEDRKRFGLALIMSVKANTVMASLEKFLKALGIVDDAKTRQVTAEYVKRLNTQTSRV

SEQ ID NO: 40329 - DNA, 978 bp, Unknown
  Obtained from environmental sample
  misc_feature (1)..(978): n is a, c, g, or t
ttgctagagagtttggaaaccaaggcgcctggtatcagcggaattttggacgaatttatcaaccctcatcaggataatatacaattgtttagttatgttgccatgggtatgtattataacactgccctgaaaattaaaagtgcgttggaaaatccggagaaatatatggatgccgataatccggcggaagcgctgctagaggagattcgtaaaggcggcgaaaattataagtccgtagagaatacttacaatagctttaaggattttctcaagtctctggagtcacaacaggagaaagccgaaacccaagaagcgacgaaaggcgacatagtaatcgctccggatgtcggagagtttctcatgcaggctttgtgggagagagaagtaaatggaatcgttgcgcttcagaccggaaagaccaatcattcggttttaaaagccgaagcgctgcaaatccccatgatgattggcttgccggagtgtattgtggattatattgaccggcgtgatggcgacgagttggccgatatgctggctttttacggttatgaatttattgtcaatccgactaaaaatagtctggataggctgcaggagcaggccttgcgggataatccgcagttttttatcgataaatttgccacaactaatgtgcatatggatggccgggaaattaagtttaagataaattttttctatcccagaaatgcagatccggtaacgcccataggcggagaaatcggtcttttgcgcgacgaaatgctctccggcagtgattaccagaaaatctgcgcggtattccgcaatattgcacgtctggctcccaagggtgtgacctggccgacattggatgtgagccgaattgataaatctccaggagagcatcggttttccggcctacccggactgaacaaaaaactttactggattatatccgcggcacgccggcggctgaattgcggattaaaatacgcatga

SEQ ID NO: 40330 - protein, 325 aa, Unknown
  Obtained from environmental sample
  misc_feature (1)..(325): Xaa is any amino acid
MLESLETKAPGISGILDEFINPHQDNIQLFSYVAMGMYYNTALKIKSALENPEKYMDADNPAEALLEEIRKGGENYKSVENTYNSFKDFLKSLESQQEKAETQEATKGDIVIAPDVGEFLMQALWEREVNGIVALQTGKTNHSVLKAEALQIPMMIGLPECIVDYIDRRDGDELADMLAFYGYEFIVNPTKNSLDRLQEQALRDNPQFFIDKFATTNVHMDGREIKFKINFFYPRNADPVTPIGGEIGLLRDEMLSGSDYQKICAVFRNIARLAPKGVTWPTLDVSRIDKSPGEHRFSGLPGLNKKLYWIISAARRRLNCGLKYA

SEQ ID NO: 40331 - DNA, 684 bp, Unknown
  Obtained from environmental sample
  misc_feature (1)..(684): n is a, c, g, or t
ttgcggattaaaatacgcatgaaagctttttttgccgtggctcaggaatttccggagacggtctttagcgtcatgtatccgatgatctctgcgccggaagacttggcttactatcacgagaatttctatagtccggcgcaggagctttatcctatggtccgtgtcagggaaggcgctatgatcgagactccggaagccgtgcaaaacatcggcgctattctgccggtcacggattttatcagcgttggttctaatgatctgactatgaccacacttaatcgaaatacccggcaagaaacgttaaatggactggctccgtcggttttggccaatattcaagctattctctatgctgccgatgttgcagaccaggaagtttgtgtttgcggcgatatggcgagcgatcccgtcttgtcggcggtcttgttagctttgggcagaaccaatttgagcgccggagcaaacggcgaaagtgcggtctgcaagcaggcctgtgctttcgttgtggagcaggatttactgccgcaaatcaggaaaattttagagaccaccggcacgcataattatattacggatgtttaccgccgggtaatgcaattgtttgaaggcgacgcgagactgtacgaatatatccgtaacaattatgcgctcaatttgccaacgcaaacaactctgcccaactag

SEQ ID NO: 40332 - protein, 227 aa, Unknown
  Obtained from environmental sample
  DOMAIN (2)...(170): PEP-utilising enzyme, TIM barrel domain
  misc_feature (1)..(227): Xaa is any amino acid
MRIKIRMKAFFAVAQEFPETVFSVMYPMISAPEDLAYYHENFYSPAQELYPMVRVREGAMIETPEAVQNIGAILPVTDFISVGSNDLTMTTLNRNTRQETLNGLAPSVLANIQAILYAADVADQEVCVCGDMASDPVLSAVLLALGRTNLSAGANGESAVCKQACAFVVEQDLLPQIRKILETTGTHNYITDVYRRVMQLFEGDARLYEYIRNNYALNLPTQTTLPN

SEQ ID NO: 40333 - DNA, 720 bp, Unknown
  Obtained from environmental sample
  misc_feature (1)..(720): n is a, c, g, or t
atgctattgcgctttgcatattatggagcatttggtttgttgattcctgcaaacgaagaggaaaatgtcttgattttagtttcaggaacgagtttggttttattagcaattatattcagcggaacaagaacaggcttaataggaataggaataggcattctatttggaatatattcgtactcattcacggattcaagcatttcgcacactaccactattaataaaagcatgagtttttttataattatcatttttgtaactattgctttttcaataatttggaatacttttatgaaggatttgcttattgcaagaactatggaatccattttgaatggcaaaatagactctagcaatatggggcgcattatagcatggctaagagcttatgatactttttccaataacaaaatatggggtgcaggtccagatagcttttccgatatttattcaaaatttctaaaaacttttccagatatagaaatctctcgtaaacctcttgttcatgcacataatgaaattttgcaaactttgtcgcaatctggtttgataggatttatacatttaagcgctgtggtttctttttgcatattctctattatcaattatatgcgaaaaaataaagaggaaacgatatgttatggaattatcgcaggtttctccattttcttcatttcaaggaggctagatggtatgccatcctttgggcttattccataa

SEQ ID NO: 40334 - protein, 239 aa, Unknown
  Obtained from environmental sample
  DOMAIN (116)...(187): O-Antigen Polymerase
  misc_feature (1)..(239): Xaa is any amino acid
MLLRFAYYGAFGLLIPANEEENVLILVSGTSLVLLAIIFSGTRTGLIGIGIGILFGIYSYSFTDSSISHTTTINKSMSFFIIIIFVTIAFSIIWNTFMKDLLIARTMESILNGKIDSSNMGRIIAWLRAYDTFSNNKIWGAGPDSFSDIYSKFLKTFPDIEISRKPLVHAHNEILQTLSQSGLIGFIHLSAVVSFCIFSIINYMRKNKEETICYGIIAGFSIFFISRRLDGMPSFGLIP

SEQ ID NO: 40335 - DNA, 354 bp, Unknown
  Obtained from environmental sample
  misc_feature (1)..(354): n is a, c, g, or t
gtgaccgaagagatcaccaatgccatggtcggcctactggacgctaccgaaaaagaagtggtgcacggccacgccgaagttttgcagttgttcaaggtgcaaaaatccgtgatcgcaggctgccgtatccaagatggggctgtcaagcgctctcatctcgtgagagcaaagagggatgcagaattgcttttcgagggccacataaaggcccttaggcgcttcaaggacgacgttgcagaagtaaagacaggcttcgagtgcggcatccagattgatggcttcgacgccatagccgaaggcgacacgctggaatttttcacaaaggaaaaggtggccgcgactagcttgaattga

SEQ ID NO: 40336 - protein, 117 aa, Unknown
  Obtained from environmental sample
  misc_feature (1)..(117): Xaa is any amino acid
MTEEITNAMVGLLDATEKEVVHGHAEVLQLFKVQKSVIAGCRIQDGAVKRSHLVRAKRDAELLFEGHIKALRRFKDDVAEVKTGFECGIQIDGFDAIAEGDTLEFFTKEKVAATSLN

SEQ ID NO: 40337 - DNA, 750 bp, Unknown
  Obtained from environmental sample
  misc_feature (1)..(750): n is a, c, g, or t
ttggacttaatcaacatccaaatagtccgccttattgcggtttttaacggagatggttctgcttatgccccacttaacattacacataacggaaccggtgacggtgggttaaaaagcatggaaagagacaaacactatgcgcttatgacggatttaaccctaaataattggaaaccgatatgtggacaaaatagcagttttctaggaacttttaacggcatgggacataaaattacttttaccggagatatgcaaccgcttgatgacggtaacgctaaatacgcgggactttttggcgttatcggcgacggtggtattgtgaagaatcttgatctgaatggtcgtatatattctgttcaaagcggtattgctccgctttatgccggggcagtggcaggtataaacaatggtgtaataaaaaatgtaatatccagagcagatattgatattgaaattactactgctagtgctagtgctggtgaaggtgagatctttattggcggtatagcggggcagaccacaatgaatatcaataattgcgccgctattggacaaattggcggttcaaattataaaaatatcggttatgcgggcggtattgacggcatagtatccaatggggaaataaagcagcgcaggggcttctggcgaaatatccgcttcaaaaagcaatggtaccgtggggggaaatgcccgggagcatttccatcggcgcaaatcaaaactgcgttacgagctaatacccggtga

SEQ ID NO: 40338 - protein, 249 aa, Unknown
  Obtained from environmental sample
  misc_feature (1)..(249): Xaa is any amino acid
MDLINIQIVRLIAVFNGDGSAYAPLNITHNGTGDGGLKSMERDKHYALMTDLTLNNWKPICGQNSSFLGTFNGMGHKITFTGDMQPLDDGNAKYAGLFGVIGDGGIVKNLDLNGRIYSVQSGIAPLYAGAVAGINNGVIKNVISRADIDIEITTASASAGEGEIFIGGIAGQTTMNINNCAAIGQIGGSNYKNIGYAGGIDGIVSNGEIKQRRGFWRNIRFKKQWYRGGKCPGAFPSAQIKTALRANTR

SEQ ID NO: 40339 - DNA, 399 bp, Unknown
  Obtained from environmental sample
  misc_feature (1)..(399): n is a, c, g, or t
atggcgagctggagggggtataaaattgcggagaaagttgttgagcacagagctaggcggcacgggatttccaaatatggcgtttccagattggtatcgggttttctggacttgttgaccttgatgtttttgcgcaaattttctatcaaacctctgcacctttttggcactttgggtttattcatgtgcattgcggcatccgctgtttttggctactttggctatgaatggatttccacaggtgctttaagagttcgccctttgctcattttagcgggttttgcttttgtctccggcattcaattcatatcgcttgggcttttgggcgaaatgctcaattccaaattactcccaagcgcgccgccactttccgtttttccaccgcaaaaacaggaatag

SEQ ID NO: 40340 - protein, 132 aa, Unknown
  Obtained from environmental sample
  misc_feature (1)..(132): Xaa is any amino acid
MASWRGYKIAEKVVEHRARRHGISKYGVSRLVSGFLDLLTLMFLRKFSIKPLHLFGTLGLFMCIAASAVFGYFGYEWISTGALRVRPLLILAGFAFVSGIQFISLGLLGEMLNSKLLPSAPPLSVFPPQKQE

SEQ ID NO: 40341 - DNA, 864 bp, Unknown
  Obtained from environmental sample
  misc_feature (1)..(864): n is a, c, g, or t
ttggcacaggaacataggggtttgagtcttgcagccaccatcggcgaccggaattggatccgaccgtgcccccttgggcccttggccctgccctttaacgtacctgcttcaagccgccttgaggctgggccttgtgtgcagggcgaagggcgtttcgcttgccgcgctgtggaagagaaccgcccaaaaaaatggtcgctggcgttgggatggatcgaagtacctcttggtggcgcttgcctgcgccctcttgctgaacctagcagtctcccccttcatgcccgaaggcgacccaccgcagaaggagcttgtggacctcatccgcggcgccaaaggcgtagtcccgtacgccgctacctttggcgccgtcgcccttttggggccgatcttcgaggaagtctttttcaggggctttctgctccccatcctgcggcgcagggcatccccgctcgcggccatcctccttgtgggcgcgttgttcggcgcggtgcatctccagcccctcgccttccccctgctggcgctccttggctccctgctgggcctggtcttcctgaccacccgcgacataagggccgccatctttgtccacgcctgctggaacggcggggccttcctgctgcaaaggctgctgctgggcgggtgaggccgtttcccatggcggatagacgaagccgttggcccagggatgtcaacaggccgcgcagtccagagccaacgtcgcccaaggcacagcgaagggcggaccaacataagggagaaagctgtgctggcgtgaccccacgggcaaaagcgccccctgccgctcgctacccgccgccaaaaatgcaaaaaagggccatcagaggaggtgggatcctctag

SEQ ID NO: 40342 - protein, 287 aa, Unknown
  Obtained from environmental sample
  misc_feature (1)..(287): Xaa is any amino acid
MAQEHRGLSLAATIGDRNWIRPCPLGPLALPFNVPASSRLEAGPCVQGEGRFACRAVEENRPKKWSLALGWIEVPLGGACLRPLAEPSSLPLHARRRPTAEGACGPHPRRQRRSPVRRYLWRRRPFGADLRGSLFQGLSAPHPAAQGIPARGHPPCGRVVRRGASPAPRLPPAGAPWLPAGPGLPDHPRHKGRHLCPRLLERRGLPAAKAAAGRVRPFPMADRRSRWPRDVNRPRSPEPTSPKAQRRADQHKGESCAGVTPRAKAPPAARYPPPKMQKRAIRGGGIL

SEQ ID NO: 40343 - DNA, 618 bp, Unknown
  Obtained from environmental sample
  misc_feature (1)..(618): n is a, c, g, or t
ttgcagccaccatcggcgaccggaattggatccgaccgtgcccccttgggcccttggccctgccctttaacgtacctgcttcaagccgccttgaggctgggccttgtgtgcagggcgaagggcgtttcgcttgccgcgctgtggaagagaaccgcccaaaaaaatggtcgctggcgttgggatggatcgaagtacctcttggtggcgcttgcctgcgccctcttgctgaacctagcagtctcccccttcatgcccgaaggcgacccaccgcagaaggagcttgtggacctcatccgcggcgccaaaggcgtagtcccgtacgccgctacctttggcgccgtcgcccttttggggccgatcttcgaggaagtctttttcaggggctttctgctccccatcctgcggcgcagggcatccccgctcgcggccatcctccttgtgggcgcgttgttcggcgcggtgcatctccagcccctcgccttccccctgctggcgctccttggctccctgctgggcctggtcttcctgaccacccgcgacataagggccgccatctttgtccacgcctgctggaacggcggggccttcctgctgcaaaggctgctgctgggcgggtga

SEQ ID NO: 40344 - protein, 205 aa, Unknown
  Obtained from environmental sample
  DOMAIN (109)...(199): CAAX amino terminal protease family
  misc_feature (1)..(205): Xaa is any amino acid
MQPPSATGIGSDRAPLGPWPCPLTYLLQAALRLGLVCRAKGVSLAALWKRTAQKNGRWRWDGSKYLLVALACALLLNLAVSPFMPEGDPPQKELVDLIRGAKGVVPYAATFGAVALLGPIFEEVFFRGFLLPILRRRASPLAAILLVGALFGAVHLQPLAFPLLALLGSLLGLVFLTTRDIRAAIFVHACWNGGAFLLQRLLLGG

SEQ ID NO: 40345 - DNA, 396 bp, Unknown
  Obtained from environmental sample
  misc_feature (1)..(396): n is a, c, g, or t
atgaaatgggacaaaaaggacatttcccccgaacaggtaaaggaaatctcagtaaaatacggctgtgatctgctcaccgcctcaattctcgctcgcagaggcttttgcacaggcgattctatccgctattttctggaagatgaccttacgtcccttcgcaacccctttgccatggacggaatggaagacgctgtggagcgtattctggcggcgaaagatgaaggcgaaaaagtgctggtcttcggcaacagcgatgttgaccgcattacgggaacttgccttcttgcaggctaccttgaaagtataggcatgggacataacattggcgaatccccacaggcgatgaatcttatgggcttttctcctgaccccgttgaaaatttcctccccaagtga

SEQ ID NO: 40346 - protein, 131 aa, Unknown
  Obtained from environmental sample
  misc_feature (1)..(131): Xaa is any amino acid
MKWDKKDISPEQVKEISVKYGCDLLTASILARRGFCTGDSIRYFLEDDLTSLRNPFAMDGMEDAVERILAAKDEGEKVLVFGNSDVDRITGTCLLAGYLESIGMGHNIGESPQAMNLMGFSPDPVENFLPK

SEQ ID NO: 40347 - DNA, 555 bp, Unknown
  Obtained from environmental sample
  misc_feature (1)..(555): n is a, c, g, or t
ttgagggggtgccctttccgtttttgtgtccgcaagctgtcgggcaaaaagaatacgcgctttgtagccgcagagcgggcctcatgccccaaactcacgcgcggcatttttgagtatgactttggcgacgaggccggctacacaccgctgttgcccatgtttacgctggggcataacttagcacccgcacacattcacgcaggcggcttgcgctatcacggcgcaggcaccattgtgagccaactactcaaggataaactcattgaagcggtggatatcaagcaacttgactcgttcaaggcgggtattttattctcgcagaccgagggtattattcccgcgcatgaatcgtgccacgccattgccgccaccattcaggaggcgctcaaggcaaaagaggagggcaagcataagaccattttgttcaacctctcagggcatggcttaagggacatgacagcctacgacgcctacctttcgggtgatttgaccaactacgagttgagcgatgatgtgataaagcaaaatgtaaaagggctggaaaaactggcgtaa

SEQ ID NO: 40348 - protein, 184 aa, Unknown
  Obtained from environmental sample
  misc_feature (1)..(184): Xaa is any amino acid
MRGCPFRFCVRKLSGKKNTRFVAAERASCPKLTRGIFEYDFGDEAGYTPLLPMFTLGHNLAPAHIHAGGLRYHGAGTIVSQLLKDKLIEAVDIKQLDSFKAGILFSQTEGIIPAHESCHAIAATIQEALKAKEEGKHKTILFNLSGHGLRDMTAYDAYLSGDLTNYELSDDVIKQNVKGLEKLA

SEQ ID NO: 40349 - DNA, 384 bp, Unknown
  Obtained from environmental sample
  misc_feature (1)..(384): n is a, c, g, or t
ttgacgacccaatcgccttgccgcttgacgaattctccccaaatggtacgcgctgtccgacgcgccgtagaaatcggggcgcaagggacgattgattattataggcgcgaaagaggcgaaaagcttgtcggtcaaattttggggagcggcgttaaagagctggctccttctgaaaaagccaattatcatcttacaaaccgttctatacacgcgcttcgggacattcaaaagggcgagattttgaaaaggggagattacgcggttttaaggacggaaaaaattcttcgcccgggacttgagccatgctgggaaaatattattgaagggcgcgtggcgagagaatttattcccgcgggtgaggggattaggtttgaggatttataa

SEQ ID NO: 40350 - protein, 127 aa, Unknown
  Obtained from environmental sample
  DOMAIN (68)...(127): Antifreeze-like domain
  misc_feature (1)..(127): Xaa is any amino acid
MTTQSPCRLTNSPQMVRAVRRAVEIGAQGTIDYYRRERGEKLVGQILGSGVKELAPSEKANYHLTNRSIHALRDIQKGEILKRGDYAVLRTEKILRPGLEPCWENIIEGRVAREFIPAGEGIRFEDL

SEQ ID NO: 40351 - DNA, 459 bp, Unknown
  Obtained from environmental sample
  misc_feature (1)..(459): n is a, c, g, or t
atgaacgcgctcaaattagaaggaagaaacaagaaaaagaaactcttgttgatgaaggtgatgaaaacgtggaggttattcaaggataaagacggaaacgcttttgtgcgatgtgggcctaacggagtctatctaaaagttactcctcctgtaggtaaaggtaagaaagtatatacagcttctgcagtacatgaacttcaaagcagaaacatagaaaattacgacaacggtttagttgaaaaacttgtagatgaagccggtggaatgtatgtaaaagtggcggaatttaatcataatcccgcaaatgacaccatggctaacatagaagttgacgatgcggaaatgaaagttattgctactattattcctcccaatgaaggcggtgcggatttaactgttgacgtatataaaagtcttcttgtacagaatagggtatatcacggcgttaaagagcaataa

SEQ ID NO: 40352 - protein, 152 aa, Unknown
  Obtained from environmental sample
  misc_feature (1)..(152): Xaa is any amino acid
MNALKLEGRNKKKKLLLMKVMKTWRLFKDKDGNAFVRCGPNGVYLKVTPPVGKGKKVYTASAVHELQSRNIENYDNGLVEKLVDEAGGMYVKVAEFNHNPANDTMANIEVDDAEMKVIATIIPPNEGGADLTVDVYKSLLVQNRVYHGVKEQ

SEQ ID NO: 40353 - DNA, 492 bp, Unknown
  Obtained from environmental sample
  misc_feature (1)..(492): n is a, c, g, or t
atggcgcaggaaatacttgcaaaacacgttccttttttacaagtcgtgatgcttgtgttctttgccctgcctcaaataatttctatgtcgtctccttttgcttctcttatgggaacccttatgacaatcgggagaatgagttccgataacgaagttttaataatgctggcttcgggcctttcatataaaatgatattcattcccgcggtgattgtcggcattctgatttcggtagtttctttttttgcaaacgacgtactgcttccggcgggcacaattcagtttgcgaaactttaccggagaattcttgtttccactccggcgctggaactggaagccaattccgttaagcgttttaaggatacgacaattgtaaccggaccggttgaggggacggcaatcgcgaacattcttattatggacagaactaacgacggcgaaaggcgcattatattggcgcaggacgccgaattgaaggacgccggcaggtaa

SEQ ID NO: 40354 - protein, 163 aa, Unknown
  Obtained from environmental sample
  misc_feature (1)..(163): Xaa is any amino acid
MAQEILAKHVPFLQVVMLVFFALPQIISMSSPFASLMGTLMTIGRMSSDNEVLIMLASGLSYKMIFIPAVIVGILISVVSFFANDVLLPAGTIQFAKLYRRILVSTPALELEANSVKRFKDTTIVTGPVEGTAIANILIMDRTNDGERRIILAQDAELKDAGR

SEQ ID NO: 40355 - DNA, 864 bp, Unknown
  Obtained from environmental sample
  misc_feature (1)..(864): n is a, c, g, or t
gtgaggaaaatagacaacgagccgataagctctatgagctattgggcgatggaacgaagactgcgcgggaccgtcggcagcgaactggagattttgcgcatgtcggcactcacgagggagcaaaaaaagataaccataaagagggaaaaactcaagcggcagcccattgtgtctagcgtcggccccaaggctgtcttggttgcacttccagacttgagcgagggcagggcggcagagatgaaggccatcctgagggcggcagactccaagctgcccctggtcctggatatcaggaattgcccgagcggtagctacgctgaagcggccaaagtggcttcccttttgggatgcggaggcacttttgccactttgcaggaggtcgggcaaccagacaagcccttgtcggtgcctcacaatggcggtgtacattttaagaaaattgctgttttggttgggcagggaaccatgggtcctgcggaaacgctggcgttcgctctgaaaaatctggggacccagccaattggcgcaaataattcagcagtggagattgtatttttgggcgagcgcacacaaggcaacgccgtagaactcaagacgctgccgctcaggcagggcggggccgtcgagatcgtcgccaagcgctggttgggggcaggcggcgaaaggctggacatggggctgggcgggggccaactgaggtcaactggcttgatgcccgattattcgttacggggtgtgcccgacaaccaggacttttgcccagggtgctggaagccctggaaaagggcccaaataaaccccaaagatgtcccccaaaaagtggccccgctttgggcattgggatgcaaaaaatgtttgaattaa

SEQ ID NO: 40356 - protein, 287 aa, Unknown
  Obtained from environmental sample
  DOMAIN (63)...(243): Peptidase family S41
  misc_feature (1)..(287): Xaa is any amino acid
MRKIDNEPISSMSYWAMERRLRGTVGSELEILRMSALTREQKKITIKREKLKRQPIVSSVGPKAVLVALPDLSEGRAAEMKAILRAADSKLPLVLDIRNCPSGSYAEAAKVASLLGCGGTFATLQEVGQPDKPLSVPHNGGVHFKKIAVLVGQGTMGPAETLAFALKNLGTQPIGANNSAVEIVFLGERTQGNAVELKTLPLRQGGAVEIVAKRWLGAGGERLDMGLGGGQLRSTGLMPDYSLRGVPDNQDFCPGCWKPWKRAQINPKDVPQKVAPLWALGCKKCLN

SEQ ID NO: 40357 - DNA, 447 bp, Unknown
  Obtained from environmental sample
  misc_feature (1)..(447): n is a, c, g, or t
ttggggcacggcagaatgcaaatgcttttcaaaaatgggaatttaaattccattttagacggagcgcattatccggcagcggcaaaggagcttgcaaaatgtttaagggaaaaaaacataaattcgctgccttgcattttcgcttctctaacagataaagatactttcaatgttcttaaagcattaaagccgcatatatccgtttgctatccagtgcaaattgaaaattcaagggcaagaagtgtggaagaactttgcgagatttgcaaaaagctgaaaataaaagcagagcctcttgcaggttccgttaaaaattacgttctaaaatcaaaaagtccggtgctgataaccggctcgctttatttggttgggagggctatttttgtgttgcgtggtgagtttggtgagttggcggagttcaggggattgaaagagacagcggattag

SEQ ID NO: 40358 - protein, 148 aa, Unknown
  Obtained from environmental sample
  misc_feature (1)..(148): Xaa is any amino acid
MGHGRMQMLFKNGNLNSILDGAHYPAAAKELAKCLREKNINSLPCIFASLTDKDTFNVLKALKPHISVCYPVQIENSRARSVEELCEICKKLKIKAEPLAGSVKNYVLKSKSPVLITGSLYLVGRAIFVLRGEFGELAEFRGLKETAD

SEQ ID NO: 40359 - DNA, 438 bp, Unknown
  Obtained from environmental sample
  misc_feature (1)..(438): n is a, c, g, or t
ttgcaaaaagcaaacggcgattttatagccattatggatgccgatttgcaagaccctccaagcttgattatgcaaatgcttgaatccattgagtctggggaattcgattgcgcggctacccgcagagtcacaagaaaaggcgaacctccaatacgttctttttttgccagatgtttttaccgcgctatgaaaaaaataagcgacattaacatagtagatggagcaagagattttaggcttatgaatcgaaaatatgcagatgctattttggaattaagcgaaaaaagccgttttttcaaagggctttttccttggattggttncagggnaaagcgggctgaatacgaaaatttgccgagattagctggagaaagcaaatggtcctttttggaaattactttnanatcccctagacggaaaagctgcggtttctggtaa

SEQ ID NO: 40360 - protein, 145 aa, Unknown
  Obtained from environmental sample
  misc_feature (1)..(145): Xaa is any amino acid
MQKANGDFIAIMDADLQDPPSLIMQMLESIESGEFDCAATRRVTRKGEPPIRSFFARCFYRAMKKISDINIVDGARDFRLMNRKYADAILELSEKSRFFKGLFPWIGXRXKRAEYENLPRLAGESKWSFLEITXXSPRRKSCGFW

SEQ ID NO: 40361 - DNA, 462 bp, Unknown
  Obtained from environmental sample
  misc_feature (1)..(462): n is a, c, g, or t
gtgaggcaaaagctcaacccactctcttccaacgtgcgggggaaaaaggttgtgctagtggatgattcgatagtgagaggcactacctgcgctagaatcatcaaaagcctgaagacagccggcgcaaaagaagttcacatgagggtttcgtcaccgccctttcgccatacatgccactatgggatagacattgacagcgaagaagcattgatagcaaacaaactggacttggacggaatcagaaacgaaataggcgccgacagcttggcgtacatcagcatagacggcctgaaaagagcatgctggaaatgctcgctgccattttgcactgcctgttttactggaaattgggtgtccgaaagcacaaaaaaagaaatttttgaccagagagtgcggatgggttcgatagtggcaaatcaaccccagcacaagtcagcgtgccgcccgtacaaagagttttga

SEQ ID NO: 40362 - protein, 153 aa, Unknown
  Obtained from environmental sample
  misc_feature (1)..(153): Xaa is any amino acid
MRQKLNPLSSNVRGKKVVLVDDSIVRGTTCARIIKSLKTAGAKEVHMRVSSPPFRHTCHYGIDIDSEEALIANKLDLDGIRNEIGADSLAYISIDGLKRACWKCSLPFCTACFTGNWVSESTKKEIFDQRVRMGSIVANQPQHKSACRPYKEF

SEQ ID NO: 40363 - DNA, 402 bp, Unknown
  Obtained from environmental sample
  misc_feature (1)..(402): n is a, c, g, or t
atgagaaagggtcatctcctccaaggatcagagccccaagatccaaagaggaccttacgcgagtatgtgcattttggagtaaggggtattttgccaggcccgtctcgatggtggacggactttcaatatatgaggcctgatataagcatgagcatcattttagaggaggagtacttgacagacgctgacattgtgtgcggtgtccctgactcagagctggtagccgccagtggattcagtgcccaaagcgggatacctgtcatgtggagcttcataaaaaataggtacatcgggcgcagcttcatctatccaatccagaacacagcgggacggcgcggtgaggcaaaagctcaacccactctcttccaacgtgcgggggaaaaaggttgtgctagtggatga

SEQ ID NO: 40364 - protein, 133 aa, Unknown
  Obtained from environmental sample
  misc_feature (1)..(133): Xaa is any amino acid
MRKGHLLQGSEPQDPKRTLREYVHFGVRGILPGPSRWWTDFQYMRPDISMSIILEEEYLTDADIVCGVPDSELVAASGFSAQSGIPVMWSFIKNRYIGRSFIYPIQNTAGRRGEAKAQPTLFQRAGEKGCASG

SEQ ID NO: 40365 - DNA, 447 bp, Unknown
  Obtained from environmental sample
  misc_feature (1)..(447): n is a, c, g, or t
ttgataaaaaaattaatgacgttgcaggaaaaattaatgacgccattaaaaaaattaatgacgttgctgaaaaaattaatgacgttgataaaaaaattaatgacgccattaaaaaaattaatgacgtcattaaaaattttaatgacgttgataaaaaaattaatgacgccattaaaaattttaatgacgttgataaaaaaattaatgacgtcattaaaaaaattaatgacgccattaaaaattttaatgacgttgataaaaaaattaatgacgtcattaaaaattttaatgacgttgataaaaaaattaatgacgtcattaaaaaaattaatgacgtcattaaaaaaattaatgacgttgataaaaaaattaatgaaattgctggaaatttacggaaaaagagcgcaaatatctgacttcatgccaggaatattccgcaaaatctaa

SEQ ID NO: 40366 - protein, 148 aa, Unknown
  Obtained from environmental sample
  misc_feature (1)..(148): Xaa is any amino acid
MIKKLMTLQEKLMTPLKKLMTLLKKLMTLIKKLMTPLKKLMTSLKILMTLIKKLMTPLKILMTLIKKLMTSLKKLMTPLKILMTLIKKLMTSLKILMTLIKKLMTSLKKLMTSLKKLMTLIKKLMKLLEIYGKRAQISDFMPGIFRKI

SEQ ID NO: 40367 - DNA, 777 bp, Unknown
  Obtained from environmental sample
  misc_feature (1)..(777): n is a, c, g, or t
atgacgtcattaatttttttaatgacgtcattaatttttttatcaacgtcattaaaatttttaatgacgtcattaatttttttatcaacgtcattaaaatttttaatggcgtcattaatttttttaatgacgtcattaatttttttatcaacgtcattaaaatttttaatggcgtcattaatttttttatcaacgtcattaaaatttttaatgacgtcattaatttttttaatggcgtcattaatttttttatcaacgtcattaattttttcagcaacgtcattaatttttttaatggcgtcattaatttttcctgcaacgtcattaatttttttatcaacgttgcaggaatttcttactccgtcattaatttttttatcaacgttgcaggtttttttaacaacgtcattaatttttatagcaacgttgcaggaatttttaacaacgtcattaatttttatagcaacgttgcaggtttttttagcaacgtcattaattttttcagcaacgttgcaggaatttcttactccgtcattaatttttttatcaacgctgcaggaatttcttactccgccattaatttttttaactccccctttaattttattaactccgtctttaatttttttagctccgtctttaatttattctgcaacgtcgcaggttattttaacccccgttgtacgattatttaccccctctacaggtttttcaacccccgatgaacaaaaaaacttgccatttttgacaaactcacggctgtggttccgcttttaa

SEQ ID NO: 40368 - protein, 258 aa, Unknown
  Obtained from environmental sample
  SIGNAL (1)...(29)
  misc_feature (1)..(258): Xaa is any amino acid
MTSLIFLMTSLIFLSTSLKFLMTSLIFLSTSLKFLMASLIFLMTSLIFLSTSLKFLMASLIFLSTSLKFLMTSLIFLMASLIFLSTSLIFSATSLIFLMASLIFPATSLIFLSTLQEFLTPSLIFLSTLQVFLTTSLIFIATLQEFLTTSLIFIATLQVFLATSLIFSATLQEFLTPSLIFLSTLQEFLTPPLIFLTPPLILLTPSLIFLAPSLIYSATSQVILTPVVRLFTPSTGFSTPDEQKNLPFLTNSRLWFRF

SEQ ID NO: 40369 - DNA, 441 bp, Unknown
  Obtained from environmental sample
  misc_feature (1)..(441): n is a, c, g, or t
atgacaaaaacaatcagcgataaaacgctaagaaaatccttctttaactggttcttctggaacggctgctcccagcaagccgagaccatgctgggtatggcttttggccaggccatggctccggttgtcgatgaactgtacgacagccaggaagaaaaagcacaagccctaaaacggcacattaccctttttaatacagaatcccaggtgggttcgatctgtaacggtattgtctgtggtttggaagaagccaatgccaacaagcagtgtacgccggaacttattactagtaccaaggtagccctcatcggccccacctcggctattggcgattccctttgggtagctacggttattcccatccttttaacgatctgcctttctattgcccaggcaaatttccttctaccgtcctgggcttggcctcggagctgtacatga

SEQ ID NO: 40370 - protein, 146 aa, Unknown
  Obtained from environmental sample
  DOMAIN (3)...(143): PTS system mannose/fructose/sorbose family IID component
  misc_feature (1)..(146): Xaa is any amino acid
MTKTISDKTLRKSFFNWFFWNGCSQQAETMLGMAFGQAMAPVVDELYDSQEEKAQALKRHITLFNTESQVGSICNGIVCGLEEANANKQCTPELITSTKVALIGPTSAIGDSLWVATVIPILLTICLSIAQANFLLPSWAWPRSCT

SEQ ID NO: 40371 - DNA, 453 bp, Unknown
  Obtained from environmental sample
  misc_feature (1)..(453): n is a, c, g, or t
atgaaaaccaaaaattttcttttggcgacaatccttggatttgccttgacatttaccttttctggctgtgtagcagtaccagcacagaggtacaatactggtgaatactatgcggataacgcaacagtaaatgctaccgctggcattcaacaaaatggttctttcaccgaccctcgcgatggcaaaacctataaagctgttaaaataggcagccaaatctggatggcgaagaacttggactacgtagctaagggtagcagatgttacgaagacaagccttcttactgccaaaaatacggtcgcctttataatttggaaacagctatgaaggcttgtccaagtacggttggcatttgccaagcaatagggaatgggaagttctgtatcactacgcagacggcaccccaaataccgaaagtccttacaagagcgaaacagcatgcaaatacctaa

SEQ ID NO: 40372 - protein, 150 aa, Unknown
  Obtained from environmental sample
  SIGNAL (1)...(25)
  misc_feature (1)..(150): Xaa is any amino acid
MKTKNFLLATILGFALTFTFSGCVAVPAQRYNTGEYYADNATVNATAGIQQNGSFTDPRDGKTYKAVKIGSQIWMAKNLDYVAKGSRCYEDKPSYCQKYGRLYNLETAMKACPSTVGICQAIGNGKFCITTQTAPQIPKVLTRAKQHANT

SEQ ID NO: 40373 - DNA, 747 bp, Unknown
  Obtained from environmental sample
  misc_feature (1)..(747): n is a, c, g, or t
ttgaaaaaagaatgggacgccagtaacaaactttcagcaggacacccttggaatggacctttgggagggaatgcttcaggggccctagaagggattccatataaaaattcgaagccggtgaaatttggcaaagagggaatcgagaatgggcaaaggctagaccctgttgtgggccaatggtaccgcggcctcaggttgaccgccgtgcgtgcctcaccggtgaggcccgaaatgttccagacgctgagggagtcgctgaggcttcaaggcagggcggcagaccaaaaatctgcggattcgacagtggaagcaccagcgcctggccctgtgaaagaagccagcgcattgttcggtaggatagacaaagattcggctatggccgaaatagaggcccagcaagcggcgcccgctctcaaggcacaaaaactggatgtacctgagctccgcgaaagtacagactatgacactttttggacgacagaccttagagtgggcaagatattggaggcggagcgggtgccaaagagcgataagctgataaagaggaaagtcgacagtaacctagaaattgagcacggtcgtcggcggcattgggaaggcatacgatcccgcccaaatagtgggcaaaagcgtcgtggtcgttgccaagtcggccccgcgaaaattgatggggatagagagccacgggatgctgatgtgcgcctcggacaacaattcaaagccatatttaatttcaccagcggatga

SEQ ID NO: 40374 - protein, 248 aa, Unknown
  Obtained from environmental sample
  misc_feature (1)..(248): Xaa is any amino acid
MKKEWDASNKLSAGHPWNGPLGGNASGALEGIPYKNSKPVKFGKEGIENGQRLDPVVGQWYRGLRLTAVRASPVRPEMFQTLRESLRLQGRAADQKSADSTVEAPAPGPVKEASALFGRIDKDSAMAEIEAQQAAPALKAQKLDVPELRESTDYDTFWTTDLRVGKILEAERVPKSDKLIKRKVDSNLEIEHGRRRHWEGIRSRPNSGQKRRGRCQVGPAKIDGDREPRDADVRLGQQFKAIFNFTSG

SEQ ID NO: 40375 - DNA, 348 bp, Unknown
  Obtained from environmental sample
  misc_feature (1)..(348): n is a, c, g, or t
ttggcggtcgcaaccagcctaaagactgaactatgcgctcccgtactgcgtaacaacggtattgataatttttttgacgttatttgcagaacagatgacgttgggcatggaaaatcacatcccgatgtttttctgctgacggcccaaaaaatcggcataccgccacaggattgccttgtatttgaagacatactctctgcggtaaaaagcgccaaaagcgcggggttttgcgtctgcgccgtatatgacaagacatcggaaaacgattgggaacaaataaaagccgaggctgattattcgattgttgattttcatgaaatgttgatccgaatcaatactgtggaataa

SEQ ID NO: 40376 - protein, 115 aa, Unknown
  Obtained from environmental sample
  misc_feature (1)..(115): Xaa is any amino acid
MAVATSLKTELCAPVLRNNGIDNFFDVICRTDDVGHGKSHPDVFLLTAQKIGIPPQDCLVFEDILSAVKSAKSAGFCVCAVYDKTSENDWEQIKAEADYSIVDFHEMLIRINTVE

SEQ ID NO: 40377 - DNA, 540 bp, Unknown
  Obtained from environmental sample
  misc_feature (1)..(540): n is a, c, g, or t
ttgagcaagcctgaatttatcgtcttgtacaacggccaccataactatcccgattacaaagagctaaggctatccgattcattttttcaggctgacataaagattgatttaccgctggaacttgtggttcaggtatataacattaataaggggcggaatcaggagatattgagcaaaagcaaaacgcttgaaaattacagcaaatttatagacaagatacgggagtaccagaaagagtataagtggaagtattataaagaagaaaacgacgaggacaggaagaaaaaattacttgaaaaatcgtttagatctgcgataaactattgtataaagaacaatatcctaaaggattttttaaagaaacatagttcggaggtattgaatatgctgtataccgagtatgatccggaagtagagatgaaggttgtccgtgaagaaactcgtgaagaagaccgagagcgtttccttggactgttaaagcaggatttgactaaagaggaaattatacaacggcttcaacaggaagaaaaaattttctaa

SEQ ID NO: 40378 - protein, 179 aa, Unknown
  Obtained from environmental sample
  misc_feature (1)..(179): Xaa is any amino acid
MSKPEFIVLYNGHHNYPDYKELRLSDSFFQADIKIDLPLELVVQVYNINKGRNQEILSKSKTLENYSKFIDKIREYQKEYKWKYYKEENDEDRKKKLLEKSFRSAINYCIKNNILKDFLKKHSSEVLNMLYTEYDPEVEMKVVREETREEDRERFLGLLKQDLTKEEIIQRLQQEEKIF

SEQ ID NO: 40379 - DNA, 567 bp, Unknown
  Obtained from environmental sample
  misc_feature (1)..(567): n is a, c, g, or t
atgggctatcatggttcggtatcggtaaaatccatgaaacgctttatttcagaggataaactttggccgtggaaggataacgacgaatggctcgttcacgcggcgtctcctgaaacaagcggtgaaggcagctatgagtaccggattgagttaatggccaagcagatcaaggaactatttgggacaatccctgaaacactggaagattttgttttggcaagccagatttcccagggagaggctaaaaaattctttgtggaactcttccgtacccagccccaccgttcaggcattatctggtggaacctcattgacggctggccccaattcagtgacgcggtggtagattataatttctacaaaaaactggcctatttctacctgcgccagagccagaggccccttatcctcacctttaccgaaccaaaagactggaaattgcgcctctgcgcttccaacctctccggtatggggcccctggagttctcatataaggtcagggatttcgcttcaggtgacacggttctttccggtaaaacatcctgccctgaccagggggatttttga

SEQ ID NO: 40380 - protein, 188 aa, Unknown
  Obtained from environmental sample
  misc_feature (1)..(188): Xaa is any amino acid
MGYHGSVSVKSMKRFISEDKLWPWKDNDEWLVHAASPETSGEGSYEYRIELMAKQIKELFGTIPETLEDFVLASQISQGEAKKFFVELFRTQPHRSGIIWWNLIDGWPQFSDAVVDYNFYKKLAYFYLRQSQRPLILTFTEPKDWKLRLCASNLSGMGPLEFSYKVRDFASGDTVLSGKTSCPDQGDF

SEQ ID NO: 40381 - DNA, 465 bp, Unknown
  Obtained from environmental sample
  misc_feature (1)..(465): n is a, c, g, or t
atggcaatgcgaattgataaagccgccggacatagtttagtccaccagattagcgaaaggcaaaaaagcctttcaaaaacgcacgagaagatgagcaccggcaaggagattaaccgtgcccaagacaatgcggcaggacttgctgttgcaaaactgctggaatccatgtccagaggctacaaagcagacagcataaacataggcgatgccaagagtgccatgaacataggcgagggtgctacgcagggcatttccgatatgcttaaccgtatgcgcgaactgagcgttcaagcctcaaacgataccttaaccgatagcgagcgcggtgcccttaacggggaattccagcaactcaagcaagaaatagataggcatacaaaaagcacccagttcaacacccaagacttgctctccggtcaaagccccttgagggacccctacgggcaaattccaagttggacctaa

SEQ ID NO: 40382 - protein, 154 aa, Unknown
  Obtained from environmental sample
  DOMAIN (28)...(151): Bacterial flagellin N-terminus
  misc_feature (1)..(154): Xaa is any amino acid
MAMRIDKAAGHSLVHQISERQKSLSKTHEKMSTGKEINRAQDNAAGLAVAKLLESMSRGYKADSINIGDAKSAMNIGEGATQGISDMLNRMRELSVQASNDTLTDSERGALNGEFQQLKQEIDRHTKSTQFNTQDLLSGQSPLRDPYGQIPSWT

SEQ ID NO: 40383 - DNA, 660 bp, Unknown
  Obtained from environmental sample
  misc_feature (1)..(660): n is a, c, g, or t
atgccatgcgggcgcgttttcgctggtgcgcggcgcaaacgtgtcattgtcgccctcaaaccgcacctggtcgagccggtgctgcgggaactcgcgccacacctcaagtccgagcacctgttggtctccttggcggccgggatatcgctcggtcgtttgcagcaggctgcgggcggcgcgtgtcctgtggtgcgcgtgatgcccaataccccggcgctggtcggcgcgggcgtgttcgctctgtgtctggacgacccggccttgaagtcgaaacagaaaaaagcggttgtggaacttttcagttccctcggcacggtgattgagctgtcggatgcgaaattcaacgcctttacggcggtcttcggcgcgggtccggcctacgtgtttcacatgatgcagtcgttgacgcaggctgccgtgacgctgggacttgcgaaaacggaagccgcgcgtcttgtgaacgcgttgtttgcgggttcggccaagctggcccaagattccgaatccggccacggggagttgttggatatggtctgttcgcccggcggggtgaccgtttgcggggtcaaccacatggatcgtcagggcgtgcgcggccatcttgtggacgccgtgctggcggcctatgcgcgcggcctggaacttgaaaacagcgaataa

SEQ ID NO: 40384 - protein, 219 aa, Unknown
  Obtained from environmental sample
  DOMAIN (4)...(200): NADP oxidoreductase coenzyme F420-dependent
  misc_feature (1)..(219): Xaa is any amino acid
MPCGRVFAGARRKRVIVALKPHLVEPVLRELAPHLKSEHLLVSLAAGISLGRLQQAAGGACPVVRVMPNTPALVGAGVFALCLDDPALKSKQKKAVVELFSSLGTVIELSDAKFNAFTAVFGAGPAYVFHMMQSLTQAAVTLGLAKTEAARLVNALFAGSAKLAQDSESGHGELLDMVCSPGGVTVCGVNHMDRQGVRGHLVDAVLAAYARGLELENSE

SEQ ID NO: 40385 - DNA, 840 bp, Unknown
  Obtained from environmental sample
  misc_feature (1)..(840): n is a, c, g, or t
ttggaacgaccggaaattccatttgcaattttttttatggttgaatgtttagtagccttccgttgcatttcgtgtttaaataagtgctttgtgtgctatatttgtgcaaaatgtcaaaaagaatattttttatataaaaaaatgaatattctattatgcgatgatatgaaaaaagatgcggataagctcgcagctatgattgcccaatctggctttgaggctcaaacatcggtttttacctgcccttcgcaaaccctggattacctttgctccaatgctgacatagatgcgtgctttctagacatcataatgcctgagatgaacggaattaaattagcggaaaaactgcgcgaaaataattttgcaaaggatattgtttttctaaccacttccaacgattttgccagccagtcttatcaagttcaggcttttgactatttgctcaaacccttgactctcgaaaaagtgaaaaatgtgatgagcaagctgaaaaagtctcaggaagacacagataaagccggattaaccgtggtgacacaatccactgcaaggtttgttccgtttcgcgatatttcccacgttgaagtcataaaacatatgatatatattgagctgctggataaatccataatcaagatgtatgccgtctttagcaagatagaaaagcaactcctagcagacaacaggtttgcaaaatgccatcgctcgtatatagtgaacctaaacgcaataataacaatggtaaatagcgagctaactatgaaaaacggctctaaaattcctatttctaggacctactcgcaagtcaaggatagaatagttaagtggatgtccaaataa

SEQ ID NO: 40386 - protein, 279 aa, Unknown
  Obtained from environmental sample
  DOMAIN (181)...(278): LytTr DNA-binding domain
  misc_feature (1)..(279): Xaa is any amino acid
MERPEIPFAIFFMVECLVAFRCISCLNKCFVCYICAKCQKEYFLYKKMNILLCDDMKKDADKLAAMIAQSGFEAQTSVFTCPSQTLDYLCSNADIDACFLDIIMPEMNGIKLAEKLRENNFAKDIVFLTTSNDFASQSYQVQAFDYLLKPLTLEKVKNVMSKLKKSQEDTDKAGLTVVTQSTARFVPFRDISHVEVIKHMIYIELLDKSIIKMYAVFSKIEKQLLADNRFAKCHRSYIVNLNAIITMVNSELTMKNGSKIPISRTYSQVKDRIVKWMSK

SEQ ID NO: 40387 - DNA, 318 bp, Unknown
  Obtained from environmental sample
  misc_feature (1)..(318): n is a, c, g, or t
atgaataaaagagagttcgagattacagaaaacgcaaaagagaataactccgttgtgtttattctgaaagggcgtttgaataccagtaacgcagactggtttctattcaaattggaagaggcagtgagagacgggtgtataaatattaccctgaatatgtctcaggttgaatttctaagttctactgggataagggttattttgaaaatgtataagcagctcgcggaaaaatctggcaaactcggcattgaatatccatccgagtgcgtgaaaaacgttttaggtatggtggcgttgaaaaatatgttggtaaactaa

SEQ ID NO: 40388 - protein, 105 aa, Unknown
  Obtained from environmental sample
  DOMAIN (9)...(104): STAS domain
  misc_feature (1)..(105): Xaa is any amino acid
MNKREFEITENAKENNSVVFILKGRLNTSNADWFLFKLEEAVRDGCINITLNMSQVEFLSSTGIRVILKMYKQLAEKSGKLGIEYPSECVKNVLGMVALKNMLVN

SEQ ID NO: 40389 - DNA, 582 bp, Unknown
  Obtained from environmental sample
  misc_feature (1)..(582): n is a, c, g, or t
ttgttcctggttattaatggtttttggtcccgcaacgttggttggcgttttcaacatacctctccccgaagcaaaagggaacggccggcatattcctgcacgccaattccttgggggaggttacccgaaaccataattggagatggcgacagagcctttcagtattacattcaagtaattccggcagcaaagaacgatggcaaaataagcgaatttgagtccgagccatactgctatccacaaaacattctgggcgatgggcacaagcaattcggtttggcacgcaatgcgtggttaagtggcacaagttcttggacataccaagctgcaacccaatatattttgggaatcaaagctacatttaaagggttgtccgtcaatccctgcattccaaaagcttggaaagagttccaagttttccgcaaattccgtggcgtagtttatgatattttggtgaaaaacccaaatggcgtaagcaaaggggtaaaaaggattaccatagacggcaatgctattgagggcaatgtgcttccaattttggaaggtaaaaaacatattgttgaagtggttatgggagagtga

SEQ ID NO: 40390 - protein, 193 aa, Unknown
  Obtained from environmental sample
  misc_feature (1)..(193): Xaa is any amino acid
MFLVINGFWSRNVGWRFQHTSPRSKRERPAYSCTPIPWGRLPETIIGDGDRAFQYYIQVIPAAKNDGKISEFESEPYCYPQNILGDGHKQFGLARNAWLSGTSSWTYQAATQYILGIKATFKGLSVNPCIPKAWKEFQVFRKFRGVVYDILVKNPNGVSKGVKRITIDGNAIEGNVLPILEGKKHIVEVVMGE

SEQ ID NO: 40391 - DNA, 399 bp, Unknown
  Obtained from environmental sample
  misc_feature (1)..(399): n is a, c, g, or t
atgattgttgtacttgatgtttcaggcgcaatggagattctattgcacaaagaaaaagtaaagaaatttttaaaaacattacagagcgctgttttagtaattacacccgatttatatgtttcggaattggcaaatacactttggaagcatcataaagcaaaaacactttccaaagatgaatgttcgttatatatgcggcaaggaattggaatgattaataattttgtcaatgccaaagaaatatgggaagaagctttttccgaagcgattaacaacaaccattctgtttacgatatgttttacatgattgccgcaagaagacacgccggaacattgattaccaatgactcaactttggcggcgatttgcaggaagaatcatgttcaggtttgttgttga

SEQ ID NO: 40392 - protein, 132 aa, Unknown
  Obtained from environmental sample
  misc_feature (1)..(132): Xaa is any amino acid
MIVVLDVSGAMEILLHKEKVKKFLKTLQSAVLVITPDLYVSELANTLWKHHKAKTLSKDECSLYMRQGIGMINNFVNAKEIWEEAFSEAINNNHSVYDMFYMIAARRHAGTLITNDSTLAAICRKNHVQVCC

SEQ ID NO: 40393 - DNA, 453 bp, Unknown
  Obtained from environmental sample
  misc_feature (1)..(453): n is a, c, g, or t
gtgacatcccaacagacgacgcgccggaagaagttaccgccattatcaataccgcaatcggcaaggtatttcccacaggaatataaacacggtactgataccgttattgataaaaaaaacagcatagaagttaccacattcagaacagattccgtctattctgacggacgcagtcctgataaaattgaatatacttcacccatagaagaagacctttccagacgtgattttacaatgaacgcaatcgcccttcgtcttccaaagggcgagatagtcgatcctttcgcaggcgcgaaagacatagacgcaaaaattattagatgtgtgggaaacgcagcggaacgttttaacgaagacggactgcgcccgttaagagccgtgcgttttgcggcgcagcttggaaaaggaattgaggaaaacacattggccgccattgcggtcaaaaaggggtaa

SEQ ID NO: 40394 - protein, 150 aa, Unknown
  Obtained from environmental sample
  DOMAIN (44)...(150): Poly A polymerase family
  misc_feature (1)..(150): Xaa is any amino acid
MTSQQTTRRKKLPPLSIPQSARYFPQEYKHGTDTVIDKKNSIEVTTFRTDSVYSDGRSPDKIEYTSPIEEDLSRRDFTMNAIALRLPKGEIVDPFAGAKDIDAKIIRCVGNAAERFNEDGLRPLRAVRFAAQLGKGIEENTLAAIAVKKG

SEQ ID NO: 40395 - DNA, 714 bp, Unknown
  Obtained from environmental sample
  misc_feature (1)..(714): n is a, c, g, or t
gtggcaaaacctattgtcatgagtatttttattctattagctgttatattaagtggaacgagaatgggactaattggcattgtgttgggattatttttagttggaatatctagaattttagttacaaattacaaaaaatcaatattcataaaaatattttcaggtattgcatttttagcatgtttatctatattgacaatagtcatttgggaaatgataccagatgatatgttaatcaagagaacttttggttatttgctttcaatgaaattggataacagcaatttagggcgagtgattgcatggcttgccgccgcagaaacaattcctaaatatcctttatggggaatagggccttataatttcaacatatatttgcataatcttgcactagcttataacatacaaaatccagcgtaccatgctttaggccatgcacataatttatttttgatagttctttctgaatttggtgttagtggttttttagtaattggctcaattgtatttttatgtgaatttaaattgcttcataacatattaaagggtacgcgaaatagcactgtgtatgcgatcttcaacggatttatagttatgatgtttttgggcatgtttgatggaactccactcacagtaggaacgcttggttttggtgggtggttaatgggtatctcattttattttagtttcttgcaaaaggataaagtatgttaa

SEQ ID NO: 40396 - protein, 237 aa, Unknown
  Obtained from environmental sample
  SIGNAL (1)...(23)
  DOMAIN (92)...(163): O-Antigen Polymerase
  misc_feature (1)..(237): Xaa is any amino acid
MAKPIVMSIFILLAVILSGTRMGLIGIVLGLFLVGISRILVTNYKKSIFIKIFSGIAFLACLSILTIVIWEMIPDDMLIKRTFGYLLSMKLDNSNLGRVIAWLAAAETIPKYPLWGIGPYNFNIYLHNLALAYNIQNPAYHALGHAHNLFLIVLSEFGVSGFLVIGSIVFLCEFKLLHNILKGTRNSTVYAIFNGFIVMMFLGMFDGTPLTVGTLGFGGWLMGISFYFSFLQKDKVC

SEQ ID NO: 40397 - DNA, 903 bp, Unknown
  Obtained from environmental sample
  misc_feature (1)..(903): n is a, c, g, or t
ttggcgtatgatgaaccgcaattaagaagaattgtgggtcaaggtttagcgcatagcccagtacacgaagtattgctggaagaatcaattctgggttggaaagaatacgaactggaattgatgcgagatcgcaacgataatgtggtaatcgtttgttccatcgaaaatgttgatgcagttggggtgcataccggagattcggttaccattgcacctgctttaactttgacggatcgcgaatatcagcggatgcgcgatatttctatcgccattattcgtgaagttggggtagatactggcgggtgtaatatccaattcgcggttgatcccaagacaggccgcattatcgttatcgaaatgaatccgcgtgtttcgcgtagctctgctttggcttctaaagctagtggttatccgatcgcaaaaattgcagctaaggttgcgattggatatacgctcgatgaaattccgaatgatattactgcggaaactccggctagttttgagccgacgcttgactatgtcgtgttgaaagtgccgagattcgcgtttgagaaattcacggctgctgatccgactcttactaccacaatgaaatccgtgggcgaagcgatggcgttaggccggaattttaccgaatccctcggtaaagccttaaggtcaatcgataaagcgggcgtgcaattccattgggacggcgcaacgcccaccggcgataacctccaagctttgctagaaaagatcaagactccttacgaaaccctgctcgttgatgtacagcaagcacctccggttgccccccagaacagggcggcgcccgccattttaggccctctattaaactaccccaaattgaacccttggtttcctaaatcaaatttcaccaaaaaaccgaaagtgccttga

SEQ ID NO: 40398 - protein, 300 aa, Unknown
  Obtained from environmental sample
  DOMAIN (1)...(183): Carbamoyl-phosphate synthase L chain, ATP binding domain
  misc_feature (1)..(300): Xaa is any amino acid
MAYDEPQLRRIVGQGLAHSPVHEVLLEESILGWKEYELELMRDRNDNVVIVCSIENVDAVGVHTGDSVTIAPALTLTDREYQRMRDISIAIIREVGVDTGGCNIQFAVDPKTGRIIVIEMNPRVSRSSALASKASGYPIAKIAAKVAIGYTLDEIPNDITAETPASFEPTLDYVVLKVPRFAFEKFTAADPTLTTTMKSVGEAMALGRNFTESLGKALRSIDKAGVQFHWDGATPTGDNLQALLEKIKTPYETLLVDVQQAPPVAPQNRAAPAILGPLLNYPKLNPWFPKSNFTKKPKVP

SEQ ID NO: 40399 - DNA, 522 bp, Unknown
  Obtained from environmental sample
  misc_feature (1)..(522): n is a, c, g, or t
ttggccactaaaggtcggccgatttccaaaactcacgcttccgcacaggttccgtttaaacccgcttattgtctcaggcgagcgctttacggccagatggcttcgaaaagccgcgacatggacataatccgccagggtgtgcttgagaatttcgcgctgaccctgtacggctcacgaaagaccggaaaaccgagggcgcttaataccgcttttggtaatattgaggttgccgccggtgacaagccgctggaggagattatcaggagaattgaccgcggtattatgatgaaccggttttccggcggcgcgcccagtgcgagcggcgaaatgtccggcgtggcaaaaaacagtttcctgatagaaaacggaaaagtgaccgacgcccttaaagaaacgatggtgtcttttgacatagtaaacattctagcgaatatcaccgctgtttcatttgaacgctgtcagaatggggtatccatactgccctggtgctgctttgacggggttactatttcggggaaataa

SEQ ID NO: 40400 - protein, 173 aa, Unknown
  Obtained from environmental sample
  misc_feature (1)..(173): Xaa is any amino acid
MATKGRPISKTHASAQVPFKPAYCLRRALYGQMASKSRDMDIIRQGVLENFALTLYGSRKTGKPRALNTAFGNIEVAAGDKPLEEIIRRIDRGIMMNRFSGGAPSASGEMSGVAKNSFLIENGKVTDALKETMVSFDIVNILANITAVSFERCQNGVSILPWCCFDGVTISGK

SEQ ID NO: 40401 - DNA, 543 bp, Unknown
  Obtained from environmental sample
  misc_feature (1)..(543): n is a, c, g, or t
atgaagccaatcacggagctgacagccgaagaagcccagggcgtgcgatatttcctgatggacattgacgataccctcaccacgcggggaaaactcctaccttcatcttatacggccctgtggaaactgaaagatgccgggcttaaggtaattcccgtaacagggcgtccggcgggctggtgcgacttaatcgcgcgggagtggcctgtcgatggggtaattggtgaaaatggggcgctggccttttgggaggaacccgggtcggtgctgaaaacggaataccatcccaacgcggaaagaaacgatcacagcgtccttacacagatcaaagaaaaagcttttgcggagtttcctgctctcaggcttgcaaaggatcaattcgcccggctttttgatatagccctggacttcccggaggaagaaccggtttcttcctctcagcgtcccacagcgcatttaaggaaattgtggaagaagggggagcttgtggccaggatctcttcccatccaggggaatattctggatggggcaggttacactaa

SEQ ID NO: 40402 - protein, 180 aa, Unknown
  Obtained from environmental sample
  misc_feature (1)..(180): Xaa is any amino acid
MKPITELTAEEAQGVRYFLMDIDDTLTTRGKLLPSSYTALWKLKDAGLKVIPVTGRPAGWCDLIAREWPVDGVIGENGALAFWEEPGSVLKTEYHPNAERNDHSVLTQIKEKAFAEFPALRLAKDQFARLFDIALDFPEEEPVSSSQRPTAHLRKLWKKGELVARISSHPGEYSGWGRLH

SEQ ID NO: 40403 - DNA, 942 bp, Unknown
  Obtained from environmental sample
  misc_feature (1)..(942): n is a, c, g, or t
ttggaaaaaattaaagctatgcagagtgtcattcaaaaagattctgtttcattcttttatacggctacttatgggcaatacatattgtattttatgctcatttctacgctttctttttatctgtggtattttcgtttagatagaaaagttcgccctttgcatatatgggcaatttccattatactaatagcccagattgttctctttcgcatagttcacgatttcttttccatattcattcaaaacgaatatctgaatataatttggttttatccctttgcattcgctcctattttaatatcggttctctatccatttagaacggctataaccacatctgtttggagttctgtgctaattggagtctttgcatattacgatttatcactctgcatagttgcgtttttcatatcgtttgctatgagtttaatagtgaataatataagatacagagttaggtttatgcaggcgtttggagctgggcttgttatttttgcagtatcgttgcttgcaattttgcttttgcgaaacagcgtgtcttgggatgcttattggcaaaactttttgctcggtgctgcgaatttattgttaagtgtaacttttgtatctgttttttgcaatgtttttgaaaggctttttcaaataacaacaaatttaagattggtggaactctccgatttcaatcatcccttgctcangcatttgtctgaatatgctccgggcagttttccccacagtattcaagttggaaatcttggcgaaatagcaggagagcgcattggagcaaacaacccttttaataaagggaaatggcactttaccccgaaattgggcaaaatatgcgcccccgaatatttcacagaaaacaaagatttggctacaacccccacgataatctatctcccttacgattcaataaaaatttttaaaaagcccccttaa

SEQ ID NO: 40404 - protein, 313 aa, Unknown
  Obtained from environmental sample
  DOMAIN (24)...(217): 7TM receptor with intracellular HD hydrolase
  misc_feature (1)..(313): Xaa is any amino acid
MEKIKAMQSVIQKDSVSFFYTATYGQYILYFMLISTLSFYLWYFRLDRKVRPLHIWAISIILIAQIVLFRIVHDFFSIFIQNEYLNIIWFYPFAFAPILISVLYPFRTAITTSVWSSVLIGVFAYYDLSLCIVAFFISFAMSLIVNNIRYRVRFMQAFGAGLVIFAVSLLAILLLRNSVSWDAYWQNFLLGAANLLLSVTFVSVFCNVFERLFQITTNLRLVELSDFNHPLLXHLSEYAPGSFPHSIQVGNLGEIAGERIGANNPFNKGKWHFTPKLGKICAPEYFTENKDLATTPTIIYLPYDSIKIFKKPP

SEQ ID NO: 40405 - DNA, 606 bp, Unknown
  Obtained from environmental sample
  misc_feature (1)..(606): n is a, c, g, or t
atgccgccacctttgagagtgagctggatacacagtcaacgatgggttttattctgggcgcgaacagtcaggagcagcggggaaaggctgaccgactggataggggaaattgccccatattacgccgcagcgccggtccggctgggaggcgcaaaagtaccgcacctgatgccgggtgactcactaaacctgcagacggctcaggatacggataacggctactgggtgtttgagcagtcactgctgcggtatatcgctgccaggctgggtgtctcgtatgagcagctttcccggaattacgcccagatgagctactccacggcacgggccagtgcgaacgagtcgtgggcgtactttatggggcggcgaaaattcgtcgcatcccgtcaggcgagccagatgtttctgtgctggctggaagaggccatagttcgccgcgtggtgacgttaccttcaaaagcgcgcttcagttttcaggaagcccgcagtgcctgggggaactgcgactggataggctccggtcgtatggccatcgatggtctgaaagaagttcaggaagcggtgatgctgatagaagccggaatgagtacctacgagaaagagtga

SEQ ID NO: 40406 - protein, 201 aa, Unknown
  Obtained from environmental sample
  misc_feature (1)..(201): Xaa is any amino acid
MPPPLRVSWIHSQRWVLFWARTVRSSGERLTDWIGEIAPYYAAAPVRLGGAKVPHLMPGDSLNLQTAQDTDNGYWVFEQSLLRYIAARLGVSYEQLSRNYAQMSYSTARASANESWAYFMGRRKFVASRQASQMFLCWLEEAIVRRVVTLPSKARFSFQEARSAWGNCDWIGSGRMAIDGLKEVQEAVMLIEAGMSTYEKE

SEQ ID NO: 40407 - DNA, 417 bp, Unknown
  Obtained from environmental sample
  misc_feature (1)..(417): n is a, c, g, or t
atgatttcgttggttaaaaaaccgcttgtatttgccgcgtttgcacttgttttacttttttccgcttgcgcttcttcggcgaatatcagcgaagacctgtcgcctgcggaaataatacagcgcgcgcaggaagcgtcagacagaaaccgttacaagcttgcgctgcagtactatcaggcgctaaacgaacgcaaccgcagtaatatcgatcttgtcatcacgtccgaatatgaaatcgcctacattcattacaaacaaaaaaagtaccagcaggccaaagcagaattgacggacatactggaatactacaatactcccgacgaaaaactgctcccccagcattacaaaaaactttcaaaaatagtaattgaacgcttagaaaataaagaaaaaaaactccctctccacgggaaataa

SEQ ID NO: 40408 - protein, 138 aa, Unknown
  Obtained from environmental sample
  SIGNAL (1)...(26)
  misc_feature (1)..(138): Xaa is any amino acid
MISLVKKPLVFAAFALVLLFSACASSANISEDLSPAEIIQRAQEASDRNRYKLALQYYQALNERNRSNIDLVITSEYEIAYIHYKQKKYQQAKAELTDILEYYNTPDEKLLPQHYKKLSKIVIERLENKEKKLPLHGK

SEQ ID NO: 40409 - DNA, 570 bp, Unknown
  Obtained from environmental sample
  misc_feature (1)..(570): n is a, c, g, or t
ttgtcttccgggagaacccgtatgcccgacattcattccagttacaccgattccatacattttttcggctccaccacgccgcatgaactgctgcgccgtttcggctccgtactctatgtttacaatgaaaacattctgcgccgatcctgccgcgatctgctgggtttatcctcccatcccggatttaaagtcaattactcaatcaaggccaactccaatcccgccctgttgcgcatcatccgtgaggagggctgtctggcggacgccatgtcgccgggcgagctgcacaacgacattctggccgggtttacgccggaggatatcctttacgtctgcaataacgtttccgccgacgaactgcgcaacgccgcagatcataaagttctggtcagtgtggattcactgtcgcaacttaatgtgtacggacaggtcaatcctggcggcagggtcatgatccgcatcaatcccggcgtaggcgcgggacacagcaacaaggtcatcacggccggcaagaaaaccgaaattcggcatccgatccccatagtctggacgatatcccaaccatcctga

SEQ ID NO: 40410 - protein, 189 aa, Unknown
  Obtained from environmental sample
  misc_feature (1)..(189): Xaa is any amino acid
MSSGRTRMPDIHSSYTDSIHFFGSTTPHELLRRFGSVLYVYNENILRRSCRDLLGLSSHPGFKVNYSIKANSNPALLRIIREEGCLADAMSPGELHNDILAGFTPEDILYVCNNVSADELRNAADHKVLVSVDSLSQLNVYGQVNPGGRVMIRINPGVGAGHSNKVITAGKKTEIRHPIPIVWTISQPS

SEQ ID NO: 40411 - DNA, 603 bp, Unknown
  Obtained from environmental sample
  misc_feature (1)..(603): n is a, c, g, or t
atgctccaaaaaaacccctcgctggatccggcaaaaatctccctgcccgcggtaatagccgggcttaccgccggcctttcatgcgcggcggatctgttcacaggcaagggttcaagcctgattgccagcgacccctgctgggataactacagccttatttttgaaacgcgccggcaggcgcggataatacccgtcccgtttttcagccaaacgcaaagctcagggcgcgggctggacatagaagcgataaccgcggcggtcaggcaagaggcaaaaagcggcgcggcgcggatcatctttaattttcccaacaacccttccggctattcggccacaacggaagaagcggacgcccttgtgcgcctccttaaagaaaccgccgagaacggggcggacgtgctggcgatctgcgacgacgcatacttcggcctgttctacgaggacaatatcgccaaggaatcgctgttcgcgaaattcgcggatctccacgagcgcgtgctggcgatcatactcgacggccccactaaagaagattatgtctggggccttcgcacgggcttcttcacattcggctcaaaaggattaaacgagacccattattga

SEQ ID NO: 40412 - protein, 200 aa, Unknown
  Obtained from environmental sample
  SIGNAL (1)...(29)
  misc_feature (1)..(200): Xaa is any amino acid
MLQKNPSLDPAKISLPAVIAGLTAGLSCAADLFTGKGSSLIASDPCWDNYSLIFETRRQARIIPVPFFSQTQSSGRGLDIEAITAAVRQEAKSGAARIIFNFPNNPSGYSATTEEADALVRLLKETAENGADVLAICDDAYFGLFYEDNIAKESLFAKFADLHERVLAIILDGPTKEDYVWGLRTGFFTFGSKGLNETHY

SEQ ID NO: 40413 - DNA, 660 bp, Unknown
  Obtained from environmental sample
  misc_feature (1)..(660): n is a, c, g, or t
atgttagaacatccagctttgaatatacagttagatagatttgactgcttggtaaagcatttagaaaatgcaggtgtgcgtccaccgctatgccatatagcaaattcgcctgcaacatttttatatgcaaacaaaactcattataatatggttcgtcccggtcttgctctttatggctatgacccactttgtgaaattccatctagatttccaataaaacctgttttgcggctccgctcaaccgtgcgagcattgaggcacgttgaggcaggggagggaatttcttacgggcattttttcaaggcagaaaaaaatatgcttgtggcaacggtcgccattggctatggagacggttatttacgtggcgagccaaataaaggcgtggttttcataaacggcaaagcctgcccaattttagggcgagtgtgcatggatgcctgtatggtggatgcaagctgggttccagatgtgaaaataggcgacatggcggagtgcataaacggagaattttccgagcaaatatcagtagaagcattcgcagccgagcataaaacaatcccctacgaaataacaacccgcatggcgcgcaggctttacaggctataccgctacaaggggaaagtttgcgggtggcatgagcttgtgaagaattggggctaa

SEQ ID NO: 40414 - protein, 219 aa, Unknown
  Obtained from environmental sample
  DOMAIN (75)...(203): Alanine racemase, C-terminal domain
  misc_feature (1)..(219): Xaa is any amino acid
MLEHPALNIQLDRFDCLVKHLENAGVRPPLCHIANSPATFLYANKTHYNMVRPGLALYGYDPLCEIPSRFPIKPVLRLRSTVRALRHVEAGEGISYGHFFKAEKNMLVATVAIGYGDGYLRGEPNKGVVFINGKACPILGRVCMDACMVDASWVPDVKIGDMAECINGEFSEQISVEAFAAEHKTIPYEITTRMARRLYRLYRYKGKVCGWHELVKNWG

SEQ ID NO: 40415 - DNA, 435 bp, Unknown
  Obtained from environmental sample
  misc_feature (1)..(435): n is a, c, g, or t
ttgagaaaagttgtattagctgcaatgctaatcgtcagtgtaatgctggtagtttcctgcgcatctacccccaaggacaatgacgaacattacagaagactgtacgacgccaacacaggtcttgatcttacaaatgcggaatcttacacggtaaaatcgggtgacacactgtcggatatttccagaatgcattatgatgatggtttttattatcccgtcattatgcttgcttcccgcggtgtcgttataaatcctgacaagattcaaccaggtatggtactgaccatccccgatcttgaaaggaacaaagccgaaccgggcagcagaagaagcatgaaaaactgccttaacggatttgccgacatagaaaaaaccaagaaaaatccaaggcagtctctgatcgatggctttaggaaacgcgctgacgaattgtaa

SEQ ID NO: 40416 - protein, 144 aa, Unknown
  Obtained from environmental sample
  SIGNAL (1)...(21)
  DOMAIN (49)...(97): LysM domain
  misc_feature (1)..(144): Xaa is any amino acid
MRKVVLAAMLIVSVMLVVSCASTPKDNDEHYRRLYDANTGLDLTNAESYTVKSGDTLSDISRMHYDDGFYYPVIMLASRGVVINPDKIQPGMVLTIPDLERNKAEPGSRRSMKNCLNGFADIEKTKKNPRQSLIDGFRKRADEL

SEQ ID NO: 40417 - DNA, 948 bp, Unknown
  Obtained from environmental sample
  misc_feature (1)..(948): n is a, c, g, or t
atgaatcaattcctgcaaacggctaaaatactggctctcgtgtgttttgtttccgccctcctgctttccctgatgaatattctcacgcgcggcgcgatagccgaaacaaaccagaaaaaaaaagacgcggcgcgcacgcaggttcttcccgctgcggaatatgcccccggaacatttttgcccggggatgatccatccgcggtcttgagcgcgctctttggcaaacccgtgcctgaggcgaacgccgaggtcggcacaaattacataatcgcgctggacgaaaacggtgaaaccatcgggtatatctttgacgttattgcgccgggcgggtacggcggcagcatcgaattggttgtgggcgtcaccgtttttcccaacgagacatggggcagcgcccatatcgccgattatcgtgtcatctccagcgcggagacgccggggctcggaaaatcggcggaacataatttacacgcgttttttacaaacagtccattggcggaacgcaagggtgtgttcgatatcgcccccgccgacaggcagcgcgacagcataagcggcgcgacgatcacctcgctcgcgatcaagaacgcgcttgcctccgcgctgcagcgggcaagcctcatcatcaagagcgactggattaatcttaatttcccgcaggagatactgggcattatcccaaatgctcagcgctttatacctattcccaacctgcggcaagacgccgtacgcgaggctcctcgaacaacatggtacgatcagcccagcggctatctcgtgaagatattcctgcaggatgcccggcaaaagcgtgtccggtctcggggggctttgtccgtgtgttcgcgcagggttctatgcccgccccgtctctttgcccatgccggaagaagcgtggcgcgcccttttgtttccggaacccgaatctgcccgcccggtcttttttaa

SEQ ID NO: 40418 - protein, 315 aa, Unknown
  Obtained from environmental sample
  SIGNAL (1)...(25)
  DOMAIN (110)...(205): FMN-binding domain
  misc_feature (1)..(315): Xaa is any amino acid
MNQFLQTAKILALVCFVSALLLSLMNILTRGAIAETNQKKKDAARTQVLPAAEYAPGTFLPGDDPSAVLSALFGKPVPEANAEVGTNYIIALDENGETIGYIFDVIAPGGYGGSIELVVGVTVFPNETWGSAHIADYRVISSAETPGLGKSAEHNLHAFFTNSPLAERKGVFDIAPADRQRDSISGATITSLAIKNALASALQRASLIIKSDWINLNFPQEILGIIPNAQRFIPIPNLRQDAVREAPRTTWYDQPSGYLVKIFLQDARQKRVRSRGALSVCSRRVLCPPRLFAHAGRSVARPFVSGTRICPPGLF

SEQ ID NO: 40419 - DNA, 525 bp, Unknown
  Obtained from environmental sample
  misc_feature (1)..(525): n is a, c, g, or t
gtggaagatttttatacactatttcaagtgtttaagtcaataagcgaaaattacatgaaaaattcccaaataaatccaaagaacctattgacaagtctgcccatagcgtatatactatacatatacagtaaaagtggggtggtatcattggcaatcattgtttcattacaaagcgaaatacccgcgtacgagcaaatcaagatgcaaatcaaagcgcagatactttcgggtaagctgacggctgacgagcctctgacatctatgcggcaacttgcgcgggatttgcgggtgagtgtaattacgacaacccgcgcatacagcgacctcgaagccgaagggctgatttacacagtacagggacggggttgtttcgttaagggcaacgcgaatctggttcgcgaacagtatttgcaagcagttgacgaagcgttacggacagcggcggacaagggcaaggcagcaggtttgacccttgccgatttacaaaacaaactggagggaatatataatgaccaacgcgattga

SEQ ID NO: 40420 - protein, 174 aa, Unknown
  Obtained from environmental sample
  DOMAIN (62)...(125): Bacterial regulatory proteins, gntR family
  misc_feature (1)..(174): Xaa is any amino acid
MEDFYTLFQVFKSISENYMKNSQINPKNLLTSLPIAYILYIYSKSGVVSLAIIVSLQSEIPAYEQIKMQIKAQILSGKLTADEPLTSMRQLARDLRVSVITTTRAYSDLEAEGLIYTVQGRGCFVKGNANLVREQYLQAVDEALRTAADKGKAAGLTLADLQNKLEGIYNDQRD

SEQ ID NO: 40421 - DNA, 741 bp, Unknown
  Obtained from environmental sample
  misc_feature (1)..(741): n is a, c, g, or t
gtggaaagtaacgaccgaaccatggtagagggggttttttaccttggcgacaggcccgtaaggacttttatgacccaccggccgaatattatctggctggatctggatgcggagcctgatttaataaggggaaactgtggaaaaactcggggggttcagcgctacttccctgtggcttccggtgatctggatgaagtgtccgggattgtttcaacagaagacatactactggcccttctgaaagggccgtggccgggactcaagaccctgatgcggctgcccatttttgttcctgaaacaataccggcccttaaatcctttgaaacctttaagaaatccgataccggctgcctttttgtcatggatgaatacggcggttttgccggaatgcttacggttcagaacctgatcgaagaaattgtgggtcagctttcgataggagaaggggaaaaagaagaaattgtccttcaggaagacggaatctggcttgccgacggcagccttaatatagacagcgccgccgaggccctctcactctcaagtctgaacgccgacggtatccattcagaataccataccctggcagggtttatcttaaacctggccggtgaaatcccaaagatcggggcgcattttgactatcacggtttccgctttaccgttgccgatatggatggaaaccgcataggcaaactccggatttccaagttgaaagatgaggatcaggggagtagggagtag

SEQ ID NO: 40422 - protein, 246 aa, Unknown
  Obtained from environmental sample
  DOMAIN (24)...(141): CBS domain pair
  misc_feature (1)..(246): Xaa is any amino acid
MESNDRTMVEGVFYLGDRPVRTFMTHRPNIIWLDLDAEPDLIRGNCGKTRGVQRYFPVASGDLDEVSGIVSTEDILLALLKGPWPGLKTLMRLPIFVPETIPALKSFETFKKSDTGCLFVMDEYGGFAGMLTVQNLIEEIVGQLSIGEGEKEEIVLQEDGIWLADGSLNIDSAAEALSLSSLNADGIHSEYHTLAGFILNLAGEIPKIGAHFDYHGFRFTVADMDGNRIGKLRISKLKDEDQGSRE

SEQ ID NO: 40423 - DNA, 729 bp, Unknown
  Obtained from environmental sample
  misc_feature (1)..(729): n is a, c, g, or t
atgtaccatcaagcgcagcaattgggcataatgtattactattgcgtagtgagcaatacctgcggcagagatacgtccaacgtgagtggagcgcatacggtaacccctcctccgcctccaacgaccggctgtaattccactactatcaatcttggcaccattacttacggcaatacggacaatactaatattgaaacaggaacgactaccgttggcagtcaagtctggtcgggcgtggtttatgcttcgggttgtaataaaaccgattatgacggtggttcttcgggcaattacagatctgactgtcgggcggcgaattccaatcgttcgatgtatggagatttattttcatggtgcgcagtgactaaaaacgccagtacgctttgcccaagttcgggcggttggcgtgttcctaccaatgccgatttctgtgctttggataaggcattgggcggtcctggtacttgtcctcaggccggttactatcataccacgtccggtgttgctaccaaataccgcagtgtttggggtggctcctatggcggcctctgcggtgggtccggttcgacaggggtgttcaatcaaggtttgtacgggtactattggtcgcagggggagaaggatgcgtacgtgctcttcctgtacttcgagtcgtctatcgtctacccgcagcatcaaaccggcagtaagaacgccgggaatcaggttcgctgtgttaaggataattaa

SEQ ID NO: 40424 - protein, 242 aa, Unknown
  Obtained from environmental sample
  misc_feature (1)..(242): Xaa is any amino acid
MYHQAQQLGIMYYYCVVSNTCGRDTSNVSGAHTVTPPPPPTTGCNSTTINLGTITYGNTDNTNIETGTTTVGSQVWSGVVYASGCNKTDYDGGSSGNYRSDCRAANSNRSMYGDLFSWCAVTKNASTLCPSSGGWRVPTNADFCALDKALGGPGTCPQAGYYHTTSGVATKYRSVWGGSYGGLCGGSGSTGVFNQGLYGYYWSQGEKDAYVLFLYFESSIVYPQHQTGSKNAGNQVRCVKDN

SEQ ID NO: 40425 - DNA, 510 bp, Unknown
  Obtained from environmental sample
  misc_feature (1)..(510): n is a, c, g, or t
atgcccaaagtatacataatccccactgacacgcccaacgctttcgccacaggtcgcaacccgtcgcacgcgtcagtggcggcgaccgaggggattttgcggattctgaatgccgaagagcttgagggggtgatggcgcacgaattggcgcacgttaagcaccgcgacatccttatctgcacgatagccgccacgctcggcggcatgataaacctgctcgcccgcgtcttcatgaggggcaggggcaagaaaggcggcgccgccataatcggcttggttatgatgatcctcgcgcccatagcggccatgctcatacaaatggccatctcaagaagccgcgagtacgccgccgactccgtcggtgcgcgcatctgcggcaaacctatggcgttggcgagcgccttgaaccggctggagttaggatcgaaaagagtcccgatggaaatgggcgaccccgcgacatcaagcttgctcatcgtaaacccgttcagagccggctttttatcctag

SEQ ID NO: 40426 - protein, 169 aa, Unknown
  Obtained from environmental sample
  DOMAIN (2)...(168): Peptidase family M48
  misc_feature (1)..(169): Xaa is any amino acid
MPKVYIIPTDTPNAFATGRNPSHASVAATEGILRILNAEELEGVMAHELAHVKHRDILICTIAATLGGMINLLARVFMRGRGKKGGAAIIGLVMMILAPIAAMLIQMAISRSREYAADSVGARICGKPMALASALNRLELGSKRVPMEMGDPATSSLLIVNPFRAGFLS

SEQ ID NO: 40427 - DNA, 339 bp, Unknown
  Obtained from environmental sample
  misc_feature (1)..(339): n is a, c, g, or t
atgacagaatatgaagcatttaatttttttaggggtacaattgaaaatataggtgtattagtttttcaagcatttgatattgacctatccgaaatgcgaggaatatctgtttttgaagaagtttatccaattattgttgttaaccgaaatgatgcgcctccagcgaggatatttactttaatccacgaattcacacatctacttacgaaaacagcacgcacttgtgacagcaccggaatgtctgaattttctccctttgaccttgaacaaatgtgtaatcatatcgccgcatatgcgcttgtccctgacagtttgcttaaagaacatgaaatgacctaa

SEQ ID NO: 40428 - protein, 112 aa, Unknown
  Obtained from environmental sample
  misc_feature (1)..(112): Xaa is any amino acid
MTEYEAFNFFRGTIENIGVLVFQAFDIDLSEMRGISVFEEVYPIIVVNRNDAPPARIFTLIHEFTHLLTKTARTCDSTGMSEFSPFDLEQMCNHIAAYALVPDSLLKEHEMT

SEQ ID NO: 40429 - DNA, 594 bp, Unknown
  Obtained from environmental sample
  misc_feature (1)..(594): n is a, c, g, or t
ttgaaccgggcctgcctgctcattctggccctgtgctgcctgtgttttgctctgggcgcgccctggattttcagcttcctgatgagtccggcggccttggcgctcgtcccggcaaacataagtcaggcggcaagcgcgcagaccgttctggaggcatcggcagtgctggaacaagccctttggctgggcgtgggcgtagtggcgttgttcagtctgttctggctgtcgcgcaaggcgctgctccggcggggcggcggcacgcgtgcggcgcgaacctgggattgcggctgccagatcggcacgccccgcatccaatacagcgcggcatcgtttgtcgagcctctgaccaggctgtttgcggtcatcgtgggtgtcacgcgccgccatgcgcagtggggcgcgattttcccctcccggataatttgcgagtttcacatctccggcgggctgctcaggagcgtctttgcctccttcttcgatggcgcgcgccaggtatgtgaccgcctgaagattgtgcagcacggatatattcacatctatatcctgtatatcctggttgtgcttgtgggtttgctcgtctgggggctggcatga

SEQ ID NO: 40430 - protein, 197 aa, Unknown
  Obtained from environmental sample
  SIGNAL (1)...(19)
  misc_feature (1)..(197): Xaa is any amino acid
MNRACLLILALCCLCFALGAPWIFSFLMSPAALALVPANISQAASAQTVLEASAVLEQALWLGVGVVALFSLFWLSRKALLRRGGGTRAARTWDCGCQIGTPRIQYSAASFVEPLTRLFAVIVGVTRRHAQWGAIFPSRIICEFHISGGLLRSVFASFFDGARQVCDRLKIVQHGYIHIYILYILVVLVGLLVWGLA

SEQ ID NO: 40431 - DNA, 810 bp, Unknown
  Obtained from environmental sample
  misc_feature (1)..(810): n is a, c, g, or t
ttggcaacctggaacgggctgctgagcaacctaagggatttgaaacaatcaaaaatgctggaaactatggtgaggctggctgcggaaaaccctatctgggagtccaagcccgcatcactggagacagacaatctttcctctgaatggctggcggaaaaaactgcggagatacacgaggtgatttccagcatcgcggagaatcagagaaatatacagatcgccgccctggaaaaggtcgtatttggagacatcgaagccaacaggcttgtctattacagtaaagaaaaaggaaaaatcctgattgataaaggagttgaaccctatatttatgctcctgcgttgaatcatcttgcagcttttattcaggattttatcaaaaaagaaatggaggaactttcggatatactactggtgagggggcaatggacgaaaaattctacttcaaatcaaatgtccgaggcctaccatgctattgtagatctctatccggacatccttgaattggattcatccctttctgaagaaggcagttccggcccccgtctccggggcgcactgctccgggcggacaaggatccaaaccaggtccggtatataaataaccttgtaaacttacttaatgatgatgccctgcatataattaaggatgcgattccgtcttttgtggtgataggcaggtatctaaagatgctgatggaagattgtcaaaaaaagtcctacgagctgataatgaactggaaggaattggctttagtttccaaaacacctatgccgcagcggctcaccgaggattacaggaaggttaattaa

SEQ ID NO: 40432 - protein, 269 aa, Unknown
  Obtained from environmental sample
  misc_feature (1)..(269): Xaa is any amino acid
MATWNGLLSNLRDLKQSKMLETMVRLAAENPIWESKPASLETDNLSSEWLAEKTAEIHEVISSIAENQRNIQIAALEKVVFGDIEANRLVYYSKEKGKILIDKGVEPYIYAPALNHLAAFIQDFIKKEMEELSDILLVRGQWTKNSTSNQMSEAYHAIVDLYPDILELDSSLSEEGSSGPRLRGALLRADKDPNQVRYINNLVNLLNDDALHIIKDAIPSFVVIGRYLKMLMEDCQKKSYELIMNWKELALVSKTPMPQRLTEDYRKVN

SEQ ID NO: 40433 - DNA, 450 bp, Unknown
  Obtained from environmental sample
  misc_feature (1)..(450): n is a, c, g, or t
atgaaaaaaaattatttggaaaattatctaagtactatagagattcaggacattaaagattctgttttatctgtaacaaatgaaatttttgaggttaatcttaaagatttagattacagatcgagaaaaattgggcttttgctaggcgaagttcaaagcggaaaaactggtcagatgctcggtattattgccaaagcagcagaaaaaggatttgaaatatttgtcataattaccagcgacaacaagtatttgcacaagcagacttatgactgtgttttttctgctctttctgattttcaagtttgcaatatagaagaagcaatagagtttcatggcaataaaatgcagaaacctgtggtaattgttcttaaaaaaaattcaagcgaccttaaaagatggaggaatgaaaaattaaattcaggatttctcaaagcaagacctatatattaa

SEQ ID NO: 40434 - protein, 149 aa, Unknown
  Obtained from environmental sample
  misc_feature (1)..(149): Xaa is any amino acid
MKKNYLENYLSTIEIQDIKDSVLSVTNEIFEVNLKDLDYRSRKIGLLLGEVQSGKTGQMLGIIAKAAEKGFEIFVIITSDNKYLHKQTYDCVFSALSDFQVCNIEEAIEFHGNKMQKPVVIVLKKNSSDLKRWRNEKLNSGFLKARPIY

SEQ ID NO: 40435 - DNA, 381 bp, Unknown
  Obtained from environmental sample
  misc_feature (1)..(381): n is a, c, g, or t
atgtttgcccggagggcggccctagagattggtacggaatttgaagttattgttccaaaggaattaaggattaaaaaaggatatccccgaaaaaatgagaaattttgggtgataactgatgatggttacaagtttatgtgcgaaaataatggaggagacgattctggcaaaaattttcgttccacagatcctgttcggaagaaagcagatttgaaaattttagggcattggataaaaggacgtatgataaaccgcggagttttgaagtataaagaaatagtcacagaaaaaactttagaaaaatatggcagaaattccatgcttttgacaaaaaccaaaattcccaatacatggtatctggattttaaggcacccgaatga

SEQ ID NO: 40436 - protein, 126 aa, Unknown
  Obtained from environmental sample
  misc_feature (1)..(126): Xaa is any amino acid
MFARRAALEIGTEFEVIVPKELRIKKGYPRKNEKFWVITDDGYKFMCENNGGDDSGKNFRSTDPVRKKADLKILGHWIKGRMINRGVLKYKEIVTEKTLEKYGRNSMLLTKTKIPNTWYLDFKAPE

SEQ ID NO: 40437 - DNA, 2028 bp, Unknown
  Obtained from environmental sample
  misc_feature (1)..(2028): n is a, c, g, or t
atgggcggctacatagacgtgctgcagacggtgtcgaacataatgaacttctatgaaaacctgccgccggaggaacggcgccagacctacgaggacacgatgatgtccgtctttgaggacatgcccgacttcgtgcggatgttcaccgtctggaagcctgacgccatcgacggcatggacgccaaaaacataggcaggatgggctccaccgaaacggggcagttcgcctatgccctggcaagggacaccggggagataaagcccttgaccgccgtggtcgtcaatgaggtaatggcccagattgccgggcccaacgccagggcagtcggcatgagcgatcccgccccgttcaagaacatgggaaaggacacgtatgccgtcaggattgcagttcccattcttaacaagcggctcaatgaagtggtcggggccgtaggctgccagctggacatcagcatgatacagcccaggatagagcagaccatcaaagacttcgacgaagtcaccagcatggttatttactccgacagcgggtttgttttgggaaactacctgcctgagttcatagggaagcagattgacgcggaaacgcaatacggcccttacctaaacgacgtcaaagcggttattaaaagcgcgcaggaatgggagggcactgcctacgatcccgagctgaagacaaacatggtaatggcagtggccaatatccccataggggcttccccgacaacatggtcggtaatggtcggctcgaccgaggcctacatcatgagagacgtcaacacgatgaggaacttcgtcattcttttagcgtcgatagcccttgcggcggcggtggcgcttgtataccttgccttgagcaggaccatcaagccaatcgttaaggtagcggacaccctcagggacatttccgaaggcgagggcgatctgacacggagcattcccgtcagttccaaagacgagatcggcagccttgccctgtacttcaacaaaaccctggaaaaaatcaaaaacctcatcgtaaccatcaaaaaagaggcggcaagcctcaacaatatcggcaacgaccttgccagcaacatgaccgaaaccgccgccgctgttaatcaaatcacgtccaatatccagagtatcaagggccgcgtaatgaaccagagcgccagcgtaaccgaaactaacgcgaccatggaacaggttgtggcgaacatcaacaaacttaacggccatgtagagaaccagagtaacaatgtttctcaggcgtcatccgccattgaacaaatggtagccaatatccattcggttaccgaaaccctgatcaagaacgccgccaatgtaaaaaacttaaaagaatcctccgaagtgggccgtggtggattgcgggaagtggcggcagatattcaggaaatcgcccgcgagtccgagggcctgctggaaattaacgcggtaatgaaaaacatcgccagccagaccaatttgctttcgatgaacgcggcgattgaggcggcccacgccggggaatcgggcaagggctttgccgtagtcgccgatgagatacgcaaactggcggaaaattccggcgagcagtccaagaccatcgccacagtgttgaaaaaaataaaaagttccatcgacaagatttcccgctccacggaaaacgtgctgaccaagttcgaggcgattgactcaagcgtcaggacggtggcggatcaggaagaaaacatccgcaacgcgatggaagagcagggcgagggaagcaagcaagtcctgcatggtgtcggcagtttgaatgagcttacccagaatgtaaggagcagttccgaggaaatgctgaacggcagccaggaagttatgagggaaagccaaaaccttgaaaaggcaacgcaggaaataaccggcggtatgaacgagatgtcgagcggagcggagcagataaacgtagcggtacaccaggtcaacgagataagcaccaaaaaccgcgaaggcattgctacattgatgaaggaagtttcgcgtttcaaggtggaatag

SEQ ID NO: 40438 - protein, 675 aa, Unknown
  Obtained from environmental sample
  DOMAIN (418)...(631): Methyl-accepting chemotaxis protein (MCP) signaling domain
  misc_feature (1)..(675): Xaa is any amino acid
MGGYIDVLQTVSNIMNFYENLPPEERRQTYEDTMMSVFEDMPDFVRMFTVWKPDAIDGMDAKNIGRMGSTETGQFAYALARDTGEIKPLTAVVVNEVMAQIAGPNARAVGMSDPAPFKNMGKDTYAVRIAVPILNKRLNEVVGAVGCQLDISMIQPRIEQTIKDFDEVTSMVIYSDSGFVLGNYLPEFIGKQIDAETQYGPYLNDVKAVIKSAQEWEGTAYDPELKTNMVMAVANIPIGASPTTWSVMVGSTEAYIMRDVNTMRNFVILLASIALAAAVALVYLALSRTIKPIVKVADTLRDISEGEGDLTRSIPVSSKDEIGSLALYFNKTLEKIKNLIVTIKKEAASLNNIGNDLASNMTETAAAVNQITSNIQSIKGRVMNQSASVTETNATMEQVVANINKLNGHVENQSNNVSQASSAIEQMVANIHSVTETLIKNAANVKNLKESSEVGRGGLREVAADIQEIARESEGLLEINAVMKNIASQTNLLSMNAAIEAAHAGESGKGFAVVADEIRKLAENSGEQSKTIATVLKKIKSSIDKISRSTENVLTKFEAIDSSVRTVADQEENIRNAMEEQGEGSKQVLHGVGSLNELTQNVRSSSEEMLNGSQEVMRESQNLEKATQEITGGMNEMSSGAEQINVAVHQVNEISTKNREGIATLMKEVSRFKVE

SEQ ID NO: 40439 - DNA, 342 bp, Unknown
  Obtained from environmental sample
  misc_feature (1)..(342): n is a, c, g, or t
ttgaacgaaaaaggcaaaaaaatgaacggacatgacataaaaatcacattgggaaagaacatcaagttttttaggttccgtagagaatattcccaggcggatcttgccgaaaaagcggatatttccatcacttttcttagtaatattgaaagaggcctgaaatttcccaagccggatattatctcccggcttgcggatactctgggagtagaagtatttgaactatttaaggccggctcattctctgaagacaacagagactttgtaaatcatctggctgaagaccttgccaaaaatataaattcagcgctgcacaatgtttttaagcagtatctgagatag

SEQ ID NO: 40440 - protein, 113 aa, Unknown
  Obtained from environmental sample
  DOMAIN (21)...(75): Helix-turn-helix
  misc_feature (1)..(113): Xaa is any amino acid
MNEKGKKMNGHDIKITLGKNIKFFRFRREYSQADLAEKADISITFLSNIERGLKFPKPDIISRLADTLGVEVFELFKAGSFSEDNRDFVNHLAEDLAKNINSALHNVFKQYLR

SEQ ID NO: 40441 - DNA, 633 bp, Unknown
  Obtained from environmental sample
  misc_feature (1)..(633): n is a, c, g, or t
gtggaaggcgaagtttttggggaatgcgctggagacattcagcggcaatacgtccgaccgccgggcgttggaatctctgcgccaagaaaacgatcggcttgtacatatggtcggggagctgacgatcgacaacaacttcttaaaaaaaaacttgaagaagttgaacctgttgtgaggcaaaaaatggtggaaaaacaagatgaactgagcctatctcggcagtgccgcctcctttctgtcgggcgtacgtccgtgtactaccgcccccaagaaaacggccggacgctggatttgatgcggcggatagacgaactttacactgaagacccgacctacggcgcccggcgtatgtgcgccgtattgcgcaacgcgggggttaaaatcgggcggtataaagtacgccggttgatggggaagatggggttggaggccatttatcgcaagcctaaactctcggaaccgcaccccgggcacaaggtttacccctacttgctgcgcggagtgaaggtcacccgtgtcaatcaggtttggagtacggacatcacgtacatccggctgcggcgcggctttgtgtatctgacggcggtcatcgactgggtgcgccagttcggcgcgtgtaatatagcgtggtga

SEQ ID NO: 40442 - protein, 210 aa, Unknown
  Obtained from environmental sample
  misc_feature (1)..(210): Xaa is any amino acid
MEGEVFGECAGDIQRQYVRPPGVGISAPRKRSACTYGRGADDRQQLLKKKLEEVEPVVRQKMVEKQDELSLSRQCRLLSVGRTSVYYRPQENGRTLDLMRRIDELYTEDPTYGARRMCAVLRNAGVKIGRYKVRRLMGKMGLEAIYRKPKLSEPHPGHKVYPYLLRGVKVTRVNQVWSTDITYIRLRRGFVYLTAVIDWVRQFGACNIAW

SEQ ID NO: 40443 - DNA, 333 bp, Unknown
  Obtained from environmental sample
  misc_feature (1)..(333): n is a, c, g, or t
atgcccagaaagaagagcagcggagagaagccgtccggtacccggaagacgtatgacgacgcgttcaaggcgaaggtcgcgcttgcggcattgcgtgagacgatgccgctcagcgaacttgcatcgaagtaccaagtccaccccaatcagatcagccagtggaaggcgaagtttttggggaatgcgctggagacattcagcggcaatacgtccgaccgccgggcgttggaatctctgcgccaagaaaacgatcggcttgtacatatggtcggggagctgacgatcgacaacaacttcttaaaaaaaaacttgaagaagttgaacctgttgtga

SEQ ID NO: 40444 - protein, 110 aa, Unknown
  Obtained from environmental sample
  DOMAIN (15)...(100): Transposase
  misc_feature (1)..(110): Xaa is any amino acid
MPRKKSSGEKPSGTRKTYDDAFKAKVALAALRETMPLSELASKYQVHPNQISQWKAKFLGNALETFSGNTSDRRALESLRQENDRLVHMVGELTIDNNFLKKNLKKLNLL

SEQ ID NO: 40445 - DNA, 549 bp, Unknown
  Obtained from environmental sample
  misc_feature (1)..(549): n is a, c, g, or t
atgattgagcttaatatctcctgccccaacgtcaaggcaggtggtatggcgtttggtctggaccccgcagcggcggcagcggtggtaacgccggtacgccgcgccttgaccggcaagcccctcatggtaaaactttcacctaacgcaccggatttgaccgctgtcgcccgcgcctgtatcaacgcgggggccgacgccctttcgctggtcaatacgttcaaggcaatggcaatagacgtacaaaaacgcaaaccggtttttgacaatatcagcgcgggactttccggcccggcaattaaacccattgccctgcgcatggtatgggaattgtgcggggaattacgaccggctgttcccattgtggggtttggaggcattgccagtaccaatgacgcgctggaattccttatggccggcgcggcggcaatacaggtcggttccgccacctttgcccaccccgcagccatgatcgaaattattgacggtattgaagattatatgcgccgttgcgatattgccaaactggaagacattgccattcacggttaa

SEQ ID NO: 40446 - protein, 182 aa, Unknown
  Obtained from environmental sample
  DOMAIN (1)...(167): Dihydroorotate dehydrogenase
  misc_feature (1)..(182): Xaa is any amino acid
MIELNISCPNVKAGGMAFGLDPAAAAAVVTPVRRALTGKPLMVKLSPNAPDLTAVARACINAGADALSLVNTFKAMAIDVQKRKPVFDNISAGLSGPAIKPIALRMVWELCGELRPAVPIVGFGGIASTNDALEFLMAGAAAIQVGSATFAHPAAMIEIIDGIEDYMRRCDIAKLEDIAIHG

SEQ ID NO: 40447 - DNA, 783 bp, Unknown
  Obtained from environmental sample
  misc_feature (1)..(783): n is a, c, g, or t
atggtgtggtttcgggcggggcggcgagatttatttgtgatacagcggggcgggatttatattactatctacccttaccccaaaggatcaaccacaatgcgcaaactcatactgactacggcggcggtcgcggcggcgattgcgggggttttcgccggagagccgtcgtttgggacgctcaccgacagccgagacgggcaaacgtacaagacggtgaagattggcaaacagacttggatggcgcagaacctgaattatcagacggacagcgggtcttggtgctatgacaacgtcgattctaattgcgttaaatacggcaggctgtacgattgggacgcggcaatgacggcctgtcccgccgaatatcatttggcctcggaggaagattgggtgaatttgggaaacaccgtaggcggtaaacggcggaatgattatcatccgccgataacggattggttaggcgccggcatttcattgaaagcgaaacacggttggaatagttgtaaaagccaatgcggcaatggatcggataaattcggtttttcggctctacccggcggcagcagggactccggcggcgtgttcaacggagccggcagttatggccgttggtgggcaatcacgaatttataccgtgtcgtcggcgtcaacaaaggcggcgtttggtggatagactgtagcgagcgccgtaattgcgatgttgtgatattctacttcggccatgccgatgcggtggagcggggtggcggcttttccgtccgttgcgtcgccgacaccccatga

SEQ ID NO: 40448 - protein, 260 aa, Unknown
  Obtained from environmental sample
  misc_feature (1)..(260): Xaa is any amino acid
MVWFRAGRRDLFVIQRGGIYITIYPYPKGSTTMRKLILTTAAVAAAIAGVFAGEPSFGTLTDSRDGQTYKTVKIGKQTWMAQNLNYQTDSGSWCYDNVDSNCVKYGRLYDWDAAMTACPAEYHLASEEDWVNLGNTVGGKRRNDYHPPITDWLGAGISLKAKHGWNSCKSQCGNGSDKFGFSALPGGSRDSGGVFNGAGSYGRWWAITNLYRVVGVNKGGVWWIDCSERRNCDVVIFYFGHADAVERGGGFSVRCVADTP

SEQ ID NO: 40449 - DNA, 990 bp, Unknown
  Obtained from environmental sample
  misc_feature (1)..(990): n is a, c, g, or t
atgcccgtcaaaacgaccgtaaaaaagaccgtaaaaaagaagcgtaccgcgaccgccgtcaaaaccaccgccaagaagcccgcagagcgcgagttggtctcgtttgacttcgccgtcaaatacctgttgcgcggcaagcgcgactacgtcgtcctaaacggctttctgtccgaacttcttggtaaaaaggtcgaggtcaagtctatcgacgacccagaaaacattaagacctacaaaaacgacaaggtgaaccgcgtagacattaaggcgcggattaacggcggcgaactcgccattttcgagatacagtttcttcaagagtttgactttttcgcgagggtgcttttcggcgtctgcagcgcgatagttgatcaagtcgaggcgggtgatttctacaacataaagaaagtctactcgataaacatagcctattttaacctaaacgccaagcgcgagtatttattttccggcgatataaacacttttaaaggtgtccactacaaagacgaacaaatcccgtttgagcgggctgtctctccgaagtcaaagaaaatggttgacattcatcctgaatattaccttatcttgccgagaatgttcgacgaaaagatgcgtagcaggttcgacgagtgggtatacgtcctgaagaaatcctccgtccgcgacgacttcaaggctgccggaataaaggaggccaaagcgaagttagactatatccgaatgacgccggagcaaagaaaggtatactttaagtacatggacaaccgccgaagtgccgacagcgcgatccaaacggcggagggcaagggcgaacttagaggcatacggaaaggcaggcaagaaggcctacaagaaggcctacagaaaggtcaggaattggaacgcgccaaactcgtcaaaagtctgtacgaaacgggcttaaccatcgcaaaaattgtaaaaggcacaaaactctccgaaaccgccgtcaagcggattttaggcttgtaa

SEQ ID NO: 40450 - protein, 329 aa, Unknown
  Obtained from environmental sample
  misc_feature (1)..(329): Xaa is any amino acid
MPVKTTVKKTVKKKRTATAVKTTAKKPAERELVSFDFAVKYLLRGKRDYVVLNGFLSELLGKKVEVKSIDDPENIKTYKNDKVNRVDIKARINGGELAIFEIQFLQEFDFFARVLFGVCSAIVDQVEAGDFYNIKKVYSINIAYFNLNAKREYLFSGDINTFKGVHYKDEQIPFERAVSPKSKKMVDIHPEYYLILPRMFDEKMRSRFDEWVYVLKKSSVRDDFKAAGIKEAKAKLDYIRMTPEQRKVYFKYMDNRRSADSAIQTAEGKGELRGIRKGRQEGLQEGLQKGQELERAKLVKSLYETGLTIAKIVKGTKLSETAVKRILGL

SEQ ID NO: 40451 - DNA, 888 bp, Unknown
  Obtained from environmental sample
  misc_feature (1)..(888): n is a, c, g, or t
ttgcgcgcctttaatatcatccttaaagaattggtcagagaaaaatcgcctacggctatatcaccggcattgataaagcgtttcaataacatggtcggcaaaaatataggcgaagcttttaacggtaatcccggcgaactgcgcagacggaatgttacggtaggcgcttaccgtccgccttcttttgaagaggtggaagacctggttaagaaattatgtgactggctgatgcatgaatttcattacgagcatgaacaaaattttgatgaagcggtgattgaggctgttgtcacccatgtgtatattgcgtggatacacccatttcttgacggcaacggaagaacagcccgtcttctggaattttatctgttgctgcgggccggggttcccagcatcgcttcgcacattttgtcgaaccattacaacaatacccgcactgaatattaccggcagcttcaaaacgcttcagaaaccggaaatttaagcgcgttcattgaatatgcccttgaaggattccgtgacggtctggaaaataccatcaagattattcaccgggatcaagttgaattaacctggaataattacgtccacgatgtaattgaaaaaatggaagatgaggggaaaaaccccagaacatgccgtcgtatacgacagcttgcatattatatcccggctgaccgtttttatgccatggatgaaatcatatttattaatccaaaaatcgccaaagactacatgaatttaaatttgataacgctacgccgtgacttggacctgttggtcgaaaaaaaactgttaattgtggataaaaataaattttgcgccaattacaagctgcttaataatttcttttctgagacaagcgtacaaataatgcggcgttattaa

SEQ ID NO: 40452 - protein, 295 aa, Unknown
  Obtained from environmental sample
  DOMAIN (24)...(158): Fic protein family
  misc_feature (1)..(295): Xaa is any amino acid
MRAFNIILKELVREKSPTAISPALIKRFNNMVGKNIGEAFNGNPGELRRRNVTVGAYRPPSFEEVEDLVKKLCDWLMHEFHYEHEQNFDEAVIEAVVTHVYIAWIHPFLDGNGRTARLLEFYLLLRAGVPSIASHILSNHYNNTRTEYYRQLQNASETGNLSAFIEYALEGFRDGLENTIKIIHRDQVELTWNNYVHDVIEKMEDEGKNPRTCRRIRQLAYYIPADRFYAMDEIIFINPKIAKDYMNLNLITLRRDLDLLVEKKLLIVDKNKFCANYKLLNNFFSETSVQIMRRY

SEQ ID NO: 40453 - DNA, 591 bp, Unknown
  Obtained from environmental sample
  misc_feature (1)..(591): n is a, c, g, or t
ttgcagcatgtggaaaatatcacgaatgttttcaaacttccggcggtagtcgccataaacgcgtttccccgcgatacaaaagccgaactggaactgatagaaaaaaaatgcagggcgttaggcgtcaatgtcgcgctttccgaagtttgggcaaaaggcggcgaaggcgcggtaaaacttgccgaagaaacggttcgtctttgcgaacaacccaacaattttgaattttcctacgatgtcaatctttccatagaagagaaaatagaagccatcgccaggaaaatctaccgcgccgacagtgtggtcattttacgggacgcgcaaaagcagattagtcagattgaaaaaatggggcttgataaagcgcccatttgcatggcaaaaacccagtacagcttttcagacgacgcttcccttttgggcgcgcccaaaggctggcggctgacggtaaggaacgtgaaactttccgcgggcgcgggatttatcgttgttctcacgggagaaatcatgaccatgccgggactgccccctgtcccgtcggcggaaaagatagacattaacagtaccggaaagatttcagggcttttctag

SEQ ID NO: 40454 - protein, 196 aa, Unknown
  Obtained from environmental sample
  misc_feature (1)..(196): Xaa is any amino acid
MQHVENITNVFKLPAVVAINAFPRDTKAELELIEKKCRALGVNVALSEVWAKGGEGAVKLAEETVRLCEQPNNFEFSYDVNLSIEEKIEAIARKIYRADSVVILRDAQKQISQIEKMGLDKAPICMAKTQYSFSDDASLLGAPKGWRLTVRNVKLSAGAGFIVVLTGEIMTMPGLPPVPSAEKIDINSTGKISGLF

SEQ ID NO: 40455 - DNA, 351 bp, Unknown
  Obtained from environmental sample
  misc_feature (1)..(351): n is a, c, g, or t
atgacattaaaacagatttttatcaaaaatttgaaagaatttcgtaaaaaagaaggtttatcgcagatgaaacttgctgaatattgcaatacagcgccaagttatattgggcaaattgaaaccggacttagatttccttctttagaattggttgaaaaaatggctgatactctaagaatagaaccttatcacttcttcaaaaaaaagtcggccaaagacgatagttctgatactgagaacatttttccccttctgccaaactctatgaaaaaacaaatttcaacacaaattaaaacacagatagaccgttcaacaagcgaaatcctgaacgaaatactgagcaaatattaa

SEQ ID NO: 40456 - protein, 116 aa, Unknown
  Obtained from environmental sample
  DOMAIN (11)...(65): Helix-turn-helix
  misc_feature (1)..(116): Xaa is any amino acid
MTLKQIFIKNLKEFRKKEGLSQMKLAEYCNTAPSYIGQIETGLRFPSLELVEKMADTLRIEPYHFFKKKSAKDDSSDTENIFPLLPNSMKKQISTQIKTQIDRSTSEILNEILSKY

SEQ ID NO: 40457 - DNA, 456 bp, Unknown
  Obtained from environmental sample
  misc_feature (1)..(456): n is a, c, g, or t
gtggagcccttgtcgcgacttttcaaagacgaggtgcgcgaactgggcagaaaacttaatctgccctcgtcacttgttaaccgccagccttttccggggcctgggcttgccatccgcgtcatgggcgaaataactgaagaaaaactggacgttttacgccgcgccgacgcgatccttcgcgaggaactggacgctttgaaacgcaggcccaatcaatacttctgcgtcatgaccggcacgcgctccgtgggcgttaaaggcgacgacaggacctacgattttgtaatcgccataagggccgtaacgaccgacgattttatgacttgcgaatacgccccgctgccgcacaaattgttaagccgaatatcctcacggatcacaagcgagatagcgcaggcaagcagagttgtttacgatattacatcaaagcccccggcaacggtggaatgggagtag

SEQ ID NO: 40458 - protein, 151 aa, Unknown
  Obtained from environmental sample
  DOMAIN (60)...(150): GMP synthase C terminal domain
  misc_feature (1)..(151): Xaa is any amino acid
MEPLSRLFKDEVRELGRKLNLPSSLVNRQPFPGPGLAIRVMGEITEEKLDVLRRADAILREELDALKRRPNQYFCVMTGTRSVGVKGDDRTYDFVIAIRAVTTDDFMTCEYAPLPHKLLSRISSRITSEIAQASRVVYDITSKPPATVEWE

SEQ ID NO: 40459 - DNA, 426 bp, Unknown
  Obtained from environmental sample
  misc_feature (1)..(426): n is a, c, g, or t
gtggatgaaaaggcagttttcgcggcctttttcaagggaaatctgccggatagcctccaaaaacggctggctttcaatatcgcccgttgtgccgccgatctcggtaatcaagacatcggcgcggcttttttccgccccggcataaataaaacttttaatttccccggtaacatggggaatcacctgcacggtactgccaagatagccgcccgcgcgttcgcggtcaagcacgttccggtacacctgcccggatgtcaggttgctgaacttcgtcaggttttcatcaataaaacgctcgtaatgcccaaggtcaagatcggtttccgcgccgtcgtctgtaacaaaaacctcgccgtgctggaacggactcattgttcccggatcaacgttcatgtagggatcgagtttctgcgccgccacttttaa

SEQ ID NO: 40460 - protein, 141 aa, Unknown
  Obtained from environmental sample
  misc_feature (1)..(141): Xaa is any amino acid
MDEKAVFAAFFKGNLPDSLQKRLAFNIARCAADLGNQDIGAAFFRPGINKTFNFPGNMGNHLHGTAKIAARAFAVKHVPVHLPGCQVAELRQVFINKTLVMPKVKIGFRAVVCNKNLAVLERTHCSRINVHVGIEFLRRHF

SEQ ID NO: 40461 - DNA, 732 bp, Unknown
  Obtained from environmental sample
  misc_feature (1)..(732): n is a, c, g, or t
ttgaatgataatttattgaaaatacttgggagaaagcacacagcaaaaaatgctttggaagcttttggaaagttaaatcccgcttttggcacaggaaactgcgatttgatgttttgcctgccaaaccaaagcacggagaattttttgagtgatgttaaaaccttggcaagccttggcgcaaaacacataagtttttatggacttgctttggaaaaagggaaaaaattcccaccccagccagaagacctatacccagaaatgtacttaaaagcggtgcaaattttaagtgaagccaagctggatagatacgaagtctcaaattttgccttgccttgccacgagagcaaacataaccaagtttactggaaaatgggggcttatttaggcataggtccctcggctcacagctatttgaatggaattcgcagttatgttgagggaaaatatgttccttggaagaagtgggttatgagcggttgccagcaaagcggtttaacagaagacattccaagcacagaaggcagggaaatggaagcagtttggctctctttgagaacaagggaaggcttatcgctaaaagactatgagcaaaaattcgggaaagaatttaaattggaaaaagcaaagccttttatagaaaaaaaatggcttgaattaaacaatggccatcttaggctaaatggcgaaggttggctatggcttgataaaatttttctatattcatttccatga

SEQ ID NO: 40462 - protein, 243 aa, Unknown
  Obtained from environmental sample
  DOMAIN (119)...(232): HemN C-terminal region
  misc_feature (1)..(243): Xaa is any amino acid
MNDNLLKILGRKHTAKNALEAFGKLNPAFGTGNCDLMFCLPNQSTENFLSDVKTLASLGAKHISFYGLALEKGKKFPPQPEDLYPEMYLKAVQILSEAKLDRYEVSNFALPCHESKHNQVYWKMGAYLGIGPSAHSYLNGIRSYVEGKYVPWKKWVMSGCQQSGLTEDIPSTEGREMEAVWLSLRTREGLSLKDYEQKFGKEFKLEKAKPFIEKKWLELNNGHLRLNGEGWLWLDKIFLYSFP

SEQ ID NO: 40463 - DNA, 330 bp, Unknown
  Obtained from environmental sample
  misc_feature (1)..(330): n is a, c, g, or t
ttgtatattatagctatgtttttgataaaaaggcaagaatatctatcgcagctcctgagttttaaggatgagcaattgataaaagttatcagcggggttaggagatgcggaaaatccaccctgcttttgcagtttatggattatttaaaagaaaatggcataaactctcagcaaattatatacataaattttgaagatatgaattttgccaatttggataatgcaaaaaagttgcacaaatatgttgtttctaaaatgcaggaaaataaaaagaattatataattttagatgaaatccaaaatgtcaaaaattttgagaaagccagttga

SEQ ID NO: 40464 - protein, 109 aa, Unknown
  Obtained from environmental sample
  misc_feature (1)..(109): Xaa is any amino acid
MYIIAMFLIKRQEYLSQLLSFKDEQLIKVISGVRRCGKSTLLLQFMDYLKENGINSQQIIYINFEDMNFANLDNAKKLHKYVVSKMQENKKNYIILDEIQNVKNFEKAS

SEQ ID NO: 40465 - DNA, 1197 bp, Unknown
  Obtained from environmental sample
  misc_feature (1)..(1197): n is a, c, g, or t
atgaagttgctgcacacctccgattggcatttgggcaggatgctctatgcaaaaaaagaacgctacgaagaacacgagcggtttttagaatggctattgaatacaataaaagaaaatgccatcgacgtattactcatcgccggcgatgtttttgactctggcactccatcaaatatctcgctaaaaatgtattacgattttttgctaaaagttagaaacagcgggtgcggcaatgttgttgtgattggcggcaaccacgactctccgagcttgctggacgccccaaaggaaattttgcaggcgttgaatgtaaaagtggtagggaaagcctgtgaaaacccagaagacgaggtgtttgcagttgaggacaaaaataagaatcccatagcgatagtttgcgccgtgccgtttttgcgcgaaagggacatcagccgttttgccgaaggcgaaacttactcagaccgctccaagcgcataagggagagtttgcgcaagcactacgcagaaattgcagaaattgcaaaaaacaaacgcgatgaattgaaaaaaaacattccgattatagcaaccgggcatttgtcggtagcgggtggtaaaacctgtgcagacgatggagttcgtgatacctatatagggacaatagaatgtattggcagtgatattttttcgcccatttttgactacgtagctcttgggcattttcatatcccatcggcgataaatgaaaacatccgctattccggctcgcctattccaatgggttttggagaggcaggtcagcagaaaagtgttgtgattatagactttaaaaataacacaaaaaatgaaatggcaatacccgtgttccaaaaaatggaatctatcaaaggcaataaaaatctcatctcagaaaaattgtccgagctaaaaaaaggcggggaatcggtttgggtggaggttatctataacggtgatgagctatttgccgacttccaatcctggattgatgaacagataataggtacaaaggttgaggttttgaaaatccaagacaaacgaattttggacaaggttctaacgcaggaacacgcggcaagccttgatgatttaaatgaatttgatgtttttggcaaattattagaagacagggatttaccagaggaacaaaaagccgaattgaaggaattatataaggaagtcgtgggggattttctataa

SEQ ID NO: 40466 - protein, 398 aa, Unknown
  Obtained from environmental sample
  DOMAIN (1)...(237): Calcineurin-like phosphoesterase
  misc_feature (1)..(398): Xaa is any amino acid
MKLLHTSDWHLGRMLYAKKERYEEHERFLEWLLNTIKENAIDVLLIAGDVFDSGTPSNISLKMYYDFLLKVRNSGCGNVVVIGGNHDSPSLLDAPKEILQALNVKVVGKACENPEDEVFAVEDKNKNPIAIVCAVPFLRERDISRFAEGETYSDRSKRIRESLRKHYAEIAEIAKNKRDELKKNIPIIATGHLSVAGGKTCADDGVRDTYIGTIECIGSDIFSPIFDYVALGHFHIPSAINENIRYSGSPIPMGFGEAGQQKSVVIIDFKNNTKNEMAIPVFQKMESIKGNKNLISEKLSELKKGGESVWVEVIYNGDELFADFQSWIDEQIIGTKVEVLKIQDKRILDKVLTQEHAASLDDLNEFDVFGKLLEDRDLPEEQKAELKELYKEVVGDFL

SEQ ID NO: 40467 - DNA, 744 bp, Unknown
  Obtained from environmental sample
  misc_feature (1)..(744): n is a, c, g, or t
atgagcctttccaactatataggagacaatgactctatagcggccgttatatgcgccgcgggttcctccgcccgcatggggggcgctaaaaaggaatacctgcctttgcccggagcctccgttaccgtgctgggcgcggccgtttccgcctttaccgttattcccgaaatcaggattattgtcatagttgtgccggaagagcccggaaccggggaaaccgcggcgcgaaacgccctgtcttccgccggaatcgcccagccgctgcgctttgtcacaggcggcagtacccgcagagcttcggtgtttaacgcccttcgcgcgcttgccgcagacgcgccaaattacgcgcttatacatgacggcgcccgcccctggatcagccctgccctgattgagcgtgtgattaggagcgttaaacaataccgcgccgttatccccctgctccccctaacggaaacccccaaagaaactgacttgccgctcaagggttttgttggctgcgactcttggggtcctgtttttatcaagcggcagctaaagagggcctttatcggaactgcccagacgccccaggcctttgctttcccggaaattctcgttgcccatgaaaaagccgccgatcaggatggcagggaatttaccgatgacgccgaagtctgggcggaattctgcggccctgtcgcggtcattcccggcgagaccggaaaccgtaaaataactttcaaggaagatatgtcatgttga

SEQ ID NO: 40468 - protein, 247 aa, Unknown
  Obtained from environmental sample
  DOMAIN (13)...(246): Uncharacterized protein family UPF0007
  misc_feature (1)..(247): Xaa is any amino acid
MSLSNYIGDNDSIAAVICAAGSSARMGGAKKEYLPLPGASVTVLGAAVSAFTVIPEIRIIVIVVPEEPGTGETAARNALSSAGIAQPLRFVTGGSTRRASVFNALRALAADAPNYALIHDGARPWISPALIERVIRSVKQYRAVIPLLPLTETPKETDLPLKGFVGCDSWGPVFIKRQLKRAFIGTAQTPQAFAFPEILVAHEKAADQDGREFTDDAEVWAEFCGPVAVIPGETGNRKITFKEDMSC

SEQ ID NO: 40469 - DNA, 477 bp, Unknown
  Obtained from environmental sample
  misc_feature (1)..(477): n is a, c, g, or t
atgttgaaggtagggctggggcgggatttgcaccgccttgtaaaaggacgccgttttttgcttggagggattgagatccccgcgaagcgcggcgaactgggacattccgacggggacgcgcttgcccacgcggtatgcgacgccattctgggcgccgcggcgttagacgacattggcggcctctttccaccctcggacgcggcatggaaggacgcggattccatggaactgctgcaccgcgcttttgcctccgtaaagaaagccggctggcggcttgtcaatctggactgcgtggtatgctgcgaggagccaaaagtgctgcccttcagggacagcatacgcagatcgctggcgcaggcgctggaaagccctgttgacagggtttttgtaaaaggcaaaaccggcgaaggcctgggtgttgtcggaaaaggcaaagccgtagaagccatggcagtgtgcctgttaacaaatgagtaa

SEQ ID NO: 40470 - protein, 158 aa, Unknown
  Obtained from environmental sample
  DOMAIN (2)...(158): YgbB family
  misc_feature (1)..(158): Xaa is any amino acid
MLKVGLGRDLHRLVKGRRFLLGGIEIPAKRGELGHSDGDALAHAVCDAILGAAALDDIGGLFPPSDAAWKDADSMELLHRAFASVKKAGWRLVNLDCVVCCEEPKVLPFRDSIRRSLAQALESPVDRVFVKGKTGEGLGVVGKGKAVEAMAVCLLTNE

SEQ ID NO: 40471 - DNA, 606 bp, Unknown
  Obtained from environmental sample
  misc_feature (1)..(606): n is a, c, g, or t
gtgaccactgtggctgaaaattacagccatgaaccctgggcggtgctggtctccacgattctcagcctacgcaccaaagatgaagtgacgctggatacctcaaggcggctgcttgcaaaagcgcccggccccgcagaacttgccgcgttaagcgaagataaagtcgcacgccttgcctatccggcgggtttttaccgcacaaaagcaaaaagcctgaaaaaaatagccgcaatccttcttgagcaatacaacggcaaagtgcccgcctgcatggacgcgcttctggccctgccgggcgtcggcagaaaaaccgccaatctggtgttaatcgaagcctttgatctgcccggcatctgcgttgacgtccatgtccaccgcatatctaaccgctgcggctggctgcgtaccgaaaatcggtacggtacaaaaacgccggaagaaaccgaaatgacgctgcgcgaaatactgccaaaaaaatactggaaagggataaacgcccttttggtcctctacggacaaaatctctgccgccccgtcagcccctggtgctcccgctgcgtaatcaaagcctattgcaaacgggtgggagtggagaaaagcaggtaa

SEQ ID NO: 40472 - protein, 201 aa, Unknown
  Obtained from environmental sample
  DOMAIN (82)...(111): Helix-hairpin-helix motif
  misc_feature (1)..(201): Xaa is any amino acid
MTTVAENYSHEPWAVLVSTILSLRTKDEVTLDTSRRLLAKAPGPAELAALSEDKVARLAYPAGFYRTKAKSLKKIAAILLEQYNGKVPACMDALLALPGVGRKTANLVLIEAFDLPGICVDVHVHRISNRCGWLRTENRYGTKTPEETEMTLREILPKKYWKGINALLVLYGQNLCRPVSPWCSRCVIKAYCKRVGVEKSR

SEQ ID NO: 40473 - DNA, 474 bp, Unknown
  Obtained from environmental sample
  misc_feature (1)..(474): n is a, c, g, or t
atgcgtcacttagtatcagggcgaaagctcaaccgcacctcctctcaccgcagggcgatgctctccaatttggccgtgtccgttttggacaaggagcgggtcaccaccacgcttgccaaggccaaggaggtccgcggcgttgtggagcgtatgatcacatacggcaagaagggcgatttgcacgcgaggcgtctggccgccacgaggatcaacgacggcgcggtgctcagaaaactcttcgacgacatagcccccggctacaaggagcgcaacggcggctacacgagggtcttgaagacggaggaccgcaagggcgacaatgcccccatggcgataatagagctcgtaggccgcggccacaacgacgcggtcaggaaaaaaggcggcgccaaaaagaagtcgtcaaagccgaaagccgcagcgcatcagcctgcggaacaggtagcgccggaagttgaagagacaaaagattaa

SEQ ID NO: 40474 - protein, 157 aa, Unknown
  Obtained from environmental sample
  DOMAIN (20)...(116): Ribosomal protein L17
  misc_feature (1)..(157): Xaa is any amino acid
MRHLVSGRKLNRTSSHRRAMLSNLAVSVLDKERVTTTLAKAKEVRGVVERMITYGKKGDLHARRLAATRINDGAVLRKLFDDIAPGYKERNGGYTRVLKTEDRKGDNAPMAIIELVGRGHNDAVRKKGGAKKKSSKPKAAAHQPAEQVAPEVEETKD

SEQ ID NO: 40475 - DNA, 855 bp, Unknown
  Obtained from environmental sample
  misc_feature (1)..(855): n is a, c, g, or t
gtggaagaaaacgtaaaaaaactaatcagcggaaaagttcgggaagtatacgaaatctcagacgatgctctggtgattgtcacaacggacagaatttccgcttttgacgtggttttgccaaagcctgtggcgaacaagggaaaggtgctaaacgccatctccctttattggtttaacttcacgaaaggcatcatccacaaccatattatctcaagcgatcttaaagatatgcctgagtttttccaaaaggacgaattcgaggggcgcacagttctggtgaaaaagctaaaaatgctgccgtttgaatttatcgtcaggggatatatgttcggcaatatgtgggaagcatattccaaaggcgaaaaattctgcggtcaatatattgaaggcaattataatcttgccgagaaactggccgtcccgctttttaccccttccacaaaagcgcgtgtcgggcatgacgagtatatctctgttcaacacgttaaggacgtgattggcgcggagctggtcggcaggatagaaacagttagcctaaagctttacaacacctgctacaactacgcttataacaagaacataattatcgcggataccaaatttgaattcggccttgacgcgaataacagcctttatgtcgcagacgaaatacttacgccggattcaagcaggttctggagccttttggattataaggcgggggtttctccaaaaagttacgacaagcaattggtaagggattggctcacggaaaacaaaataaacggcgagatgcaatttgacaacgtgagcgacgaggttctaagaaaaacgtcggagatctacgcagaatgtctaacgaaaataaccggataa

SEQ ID NO: 40476 - protein, 284 aa, Unknown
  Obtained from environmental sample
  DOMAIN (4)...(267): SAICAR synthetase
  misc_feature (1)..(284): Xaa is any amino acid
MEENVKKLISGKVREVYEISDDALVIVTTDRISAFDVVLPKPVANKGKVLNAISLYWFNFTKGIIHNHIISSDLKDMPEFFQKDEFEGRTVLVKKLKMLPFEFIVRGYMFGNMWEAYSKGEKFCGQYIEGNYNLAEKLAVPLFTPSTKARVGHDEYISVQHVKDVIGAELVGRIETVSLKLYNTCYNYAYNKNIIIADTKFEFGLDANNSLYVADEILTPDSSRFWSLLDYKAGVSPKSYDKQLVRDWLTENKINGEMQFDNVSDEVLRKTSEIYAECLTKITG

SEQ ID NO: 40477 - DNA, 621 bp, Unknown
  Obtained from environmental sample
  misc_feature (1)..(621): n is a, c, g, or t
gtgaaaagggtgtatgtcaatgaaaaatggtgccttggctgccatttgtgcgaatattactgcgcttttgccggaacgaacgaaaaagacatggccagggcgctgaagaacatgcgcatccatccgaagatagagatcgaggagcgcggcgacatctctttcgccgtttcctgccggcactgccatgaagccttgtgcgtcaagggctgcatcaccggcgctttgagcatggcggacggggtcatcgtcattgaccggaacagatgcgtaagctgctacacctgcattttaagctgtccgtatggcgctgtcgctccctcggacgacggcgcggtgcanaagtgcgagctgtgcgtcaagacggccgaaggcactcccgctgcgtcagaagctgcccgaacggcgcgattgttttggagaaagnagccgcgtatgaagtatgtgatcatcggcaaactcgcgcgggcgtcggcgcggcgaaggcatacggcaagtggacccagcgggcaaatccacatcatctcggaggacccgaacaatactcccccgggcccccatttcctatcccttgtcgggaaagcccccccgaaaaacatgaaatcccccccccaaaggttttaa

SEQ ID NO: 40478 - protein, 206 aa, Unknown
  Obtained from environmental sample
  DOMAIN (82)...(105): 4Fe-4S binding domain
  misc_feature (1)..(206): Xaa is any amino acid
MKRVYVNEKWCLGCHLCEYYCAFAGTNEKDMARALKNMRIHPKIEIEERGDISFAVSCRHCHEALCVKGCITGALSMADGVIVIDRNRCVSCYTCILSCPYGAVAPSDDGAVXKCELCVKTAEGTPAASEAARTARLFWRKXPRMKYVIIGKLARASARRRHTASGPSGQIHIISEDPNNTPPGPHFLSLVGKAPPKNMKSPPQRF

SEQ ID NO: 40479 - DNA, 741 bp, Unknown
  Obtained from environmental sample
  misc_feature (1)..(741): n is a, c, g, or t
gtgcggcgttccgctagacccgtatccttattacccggaaaacgcaaagacggtgtttcttacagcggacgccgcgtgggacgcggacattatcggcaagataaaacaaagtcttttgaaaggaagcaaggtttttatcacaaccngggttgtatgaaaaacgtggcgggaaagggaatagaggatatacttccgcttgaaatcacaaacagaaaaataactacggatgtttttaccaacagcgcttttggcaggggcaactgcggttatgtaaaagccgccgctcccataactcttcctcatgtcgcttacaatgaaaacgatatatggccgctntcagccgcgcttactcctcattcaagccacgctcttttgttatgcggcgcgtacggcaagggctgtctctatgtactgacaattcccgactcattcgccgacttgtacaatcttcccgccgaaacgcttacccttttacgcagggaatttaatttgcccataacgctggaatgcggcagccgtgtgtctttgtttctttatgacaacgacacttttattttgcagtcattccttgacaggcctgaacgggcgcgtgttcgcattaacagggcaggagtgtcgttagtaccgttaaaaatgccaaaaatgcgtccgtttgagattgtacgctcaggcgagaatgagagtatttttgatatttacataacgccggggcattatatggtttttaggattgaagggtag

SEQ ID NO: 40480 - protein, 246 aa, Unknown
  Obtained from environmental sample
  misc_feature (1)..(246): Xaa is any amino acid
MRRSARPVSLLPGKRKDGVSYSGRRVGRGHYRQDKTKSFERKQGFYHNXGCMKNVAGKGIEDILPLEITNRKITTDVFTNSAFGRGNCGYVKAAAPITLPHVAYNENDIWPLSAALTPHSSHALLLCGAYGKGCLYVLTIPDSFADLYNLPAETLTLLRREFNLPITLECGSRVSLFLYDNDTFILQSFLDRPERARVRINRAGVSLVPLKMPKMRPFEIVRSGENESIFDIYITPGHYMVFRIEG

SEQ ID NO: 40481 - DNA, 813 bp, Unknown
  Obtained from environmental sample
  misc_feature (1)..(813): n is a, c, g, or t
gtgaaatcgccgcgtacacggcggaagctttttgatgaactcatactggacgatttttattttaccaactgccgctgtgaatcctgcataaaggccaagggagaccgcgattgggcttctttccgtcttgcgcttatgaacgacatttccgaaaatgtgataattaaaaacgcaaaagcggcgaatccgaaagtaaattgcataatcaaatatcccaactggtacgacagttttcaggctaacggctataaccttgaagacgaatcaaaaatgtttgacatgatctacacaggaaccgagacgcgcgatcccaattatactcatcaaaatctgccgcgctatttaagttttttcctgccccgtctttttgaacacatcaagccgggaaaaaacggcggcggctggtacgatctttttgactgctccctggaagactatgtacagcaggcgtacttgactcttttttcaaaatgccgcgaacagatgttattctgtttccctttactcgtatacgcccccctttacaccgccgccgtaggcgcgttcttcgatgaagctgaccctttcattgggcagataggggagcccgtgggcgtcgcctgttacaagccgtataactcgtacggagagcggcttcttcatgaatttgtcggaatgtgcggcgttccgctagacccgtatccttattacccggaaaacgcaaagacggtgtttcttacagcggacgccgcgtgggacgcggacattatcggcaagataaaacaaagtcttttgaaaggaagcaaggtttttatcacaaccngggttgtatga

SEQ ID NO: 40482 - protein, 270 aa, Unknown
  Obtained from environmental sample
  misc_feature (1)..(270): Xaa is any amino acid
MKSPRTRRKLFDELILDDFYFTNCRCESCIKAKGDRDWASFRLALMNDISENVIIKNAKAANPKVNCIIKYPNWYDSFQANGYNLEDESKMFDMIYTGTETRDPNYTHQNLPRYLSFFLPRLFEHIKPGKNGGGWYDLFDCSLEDYVQQAYLTLFSKCREQMLFCFPLLVYAPLYTAAVGAFFDEADPFIGQIGEPVGVACYKPYNSYGERLLHEFVGMCGVPLDPYPYYPENAKTVFLTADAAWDADIIGKIKQSLLKGSKVFITTXVV

SEQ ID NO: 40483 - DNA, 330 bp, Unknown
  Obtained from environmental sample
  misc_feature (1)..(330): n is a, c, g, or t
atgcattacaaaaattttttaacggtcacttacgcgcccgcgggttatctgaatgacaattcgattgaacagataaaggcggacattgaaaaagtcggcaactatatcaagctggataaaatctaccttgaaacctaccgctcggaaattttgatagaacgtgaaaaaatggaagccgtaaaagccctgtttacggaaaaaggctatgcggtttccggcgggattacaaccacggttaagcgcacgctgatgggcagcatgtgctttactgacccggaaaaccgcanaaaggtaggtgaaatcgccgcgtacacggcggaagctttttga

SEQ ID NO: 40484 - protein, 109 aa, Unknown
  Obtained from environmental sample
  misc_feature (1)..(109): Xaa is any amino acid
MHYKNFLTVTYAPAGYLNDNSIEQIKADIEKVGNYIKLDKIYLETYRSEILIEREKMEAVKALFTEKGYAVSGGITTTVKRTLMGSMCFTDPENRXKVGEIAAYTAEAF

SEQ ID NO: 40485 - DNA, 354 bp, Unknown
  Obtained from environmental sample
  misc_feature (1)..(354): n is a, c, g, or t
gtgtacgcgcaaatggtagcgggcaaagacgcggttaaccacggcgaggccaagaattcatggcttacgggaaccgcggcctggacctttgtcagcatttcccagtacattcttggggtgcgtcccgtttttgacggccttatgattgacccgtgcattccctcaacgatgaaggacttcaccgtcacgcgtcatttccgcggcgctgattatcacataacggttgacaacaacgcgggcgcggaaaaggggataaagtccataaccgttgacggcaagccgctgaacggagttgtcttgccggtatttggcgataacaaagtacataaagtcgttgtaactttggggaaataa

SEQ ID NO: 40486 - protein, 117 aa, Unknown
  Obtained from environmental sample
  misc_feature (1)..(117): Xaa is any amino acid
MYAQMVAGKDAVNHGEAKNSWLTGTAAWTFVSISQYILGVRPVFDGLMIDPCIPSTMKDFTVTRHFRGADYHITVDNNAGAEKGIKSITVDGKPLNGVVLPVFGDNKVHKVVVTLGK

SEQ ID NO: 40487 - DNA, 2079 bp, Unknown
  Obtained from environmental sample
  misc_feature (1)..(2079): n is a, c, g, or t
gtgatgggttacgcgacggttgaagcggaagtatccggcctcaaggtgtctattgagaccggcaggatggcgaagcaggcaaacggttcggctgtggtgcgcctcggggactcaatggttctcgtgacggcgtgctgcgcgcagtcggagtccgaatcggattttttcccgctttcggtggagtacatagagaagacttacgcggcggggaagatccccggcgggtacatcaagcgtgagggtcgtcccagcgaaaaagagattttgtcggcgcggatagttgaccgtccgatacgtccgctctttcccgacggttaccggcgggaggttcagatcgtctgcacggtgatctcagccgacgagaagtacgacacggacgtgctggcggtgacggcggcatccacggcgctgtgcctctcggacatgccttttacggagcctgtcgcggcggtccgcgtgggcatggccgacggcaaactcaaggtcttcccgacctacgccgagacggagagcggcgaactcgacatggtcgtggccggcactgaagagtcgatcatgatggtcgagggcggcgcgatggagctttccgaggacgtgttgctggaggcgattctcttagcgcataccgagataaaaaagctgacggcgctgcaaaaggatctcatgtccaaatgcggcaagcagaccgcgccttacacatcccctacggtgaacgaagaactcgtgaatgcggtcaaggaaatagtaagctcgcggttgcacgacgcgagtttcatgggtataaaaccggaacgctacgcggcggttgccgcgctgcgcgacgaggcggtaacagcgcttgccgaacgcttcccggattcaaagaaagcgatctccgaaatcttcactgaaatcgagcgcgaagacatccgccaatcgattctgaacaacggcgtccgcattggcggccgcgggctggacgagatacgcaaaatcacctgcgaactcgacgtgctgcctcgcgcccacggctcggcgctcttcacgcgcggcgaaacgcagtcgcttgccgccacgacgcttgggacgaaactcgatatccagcacatcgacaacatacagggcaactacgacaaatcgtatatgctccactacaacttcccgccctactcggtgaacgaagtcaagcgtatgacgtcggtgagcagacgcgaaatcggccacggacacttggccgaacgctccatagcccccgtgctacccaatgagaaaagcttcccgtacacgatacgcgtggtctctgagattctcgagtcanacggcagttcgtctatggcctctgtctgctgctcttcgctctcgctgatggccgccggcgtgccgctaaaaacgcacgtggccggcgtggcgatgggcctgatcaaagagggcgaccgcgtggcgatcctgaccgacatcctcggtaccgaagaccacgtgggtgacatggacttcaaagtagccggcacccgcgacggcgtgaccgccatccagatggacataaaactagccggcatcaccgccgaaatcatgaaagaggcgctcgcgaaagccaaagtcgcccgcttcaagatactcgacatcatgacggaggcgctgccgtcggcccgcaaagagatgtccgctttcgcgccgcgcataacaacgattaccatcgacaaggacaagatccgcgaggtcataggccccggcggtaaaatgatccgcgacatccaagataccaccggcgccacgatcttcattgacgacgacggtaccgtgcagatagccgcctccaacaaagagtcgagggatgccgcgctgcgccgcatcaaaggcatagtcgcggaaccggaactcaacgcgatctacgaaggcacagtcaagacaatcgtggagttcggagcgttcgtagaatatttgccgggtaaagatggattattgcatatatcggagcttgaacacagcagggtcaacaaagtggaggatgtgctgcagcttggggataaggtgaaggtcaagttgattgggtttgataggatggggaaggtgaaactcagcaggaaagcgctgttggaatag

SEQ ID NO: 40488 - protein, 692 aa, Unknown
  Obtained from environmental sample
  DOMAIN (241)...(318): Polyribonucleotide nucleotidyltransferase, RNA binding domain
  misc_feature (1)..(692): Xaa is any amino acid
MMGYATVEAEVSGLKVSIETGRMAKQANGSAVVRLGDSMVLVTACCAQSESESDFFPLSVEYIEKTYAAGKIPGGYIKREGRPSEKEILSARIVDRPIRPLFPDGYRREVQIVCTVISADEKYDTDVLAVTAASTALCLSDMPFTEPVAAVRVGMADGKLKVFPTYAETESGELDMVVAGTEESIMMVEGGAMELSEDVLLEAILLAHTEIKKLTALQKDLMSKCGKQTAPYTSPTVNEELVNAVKEIVSSRLHDASFMGIKPERYAAVAALRDEAVTALAERFPDSKKAISEIFTEIEREDIRQSILNNGVRIGGRGLDEIRKITCELDVLPRAHGSALFTRGETQSLAATTLGTKLDIQHIDNIQGNYDKSYMLHYNFPPYSVNEVKRMTSVSRREIGHGHLAERSIAPVLPNEKSFPYTIRVVSEILESXGSSSMASVCCSSLSLMAAGVPLKTHVAGVAMGLIKEGDRVAILTDILGTEDHVGDMDFKVAGTRDGVTAIQMDIKLAGITAEIMKEALAKAKVARFKILDIMTEALPSARKEMSAFAPRITTITIDKDKIREVIGPGGKMIRDIQDTTGATIFIDDDGTVQIAASNKESRDAALRRIKGIVAEPELNAIYEGTVKTIVEFGAFVEYLPGKDGLLHISELEHSRVNKVEDVLQLGDKVKVKLIGFDRMGKVKLSRKALLE

SEQ ID NO: 40489 - DNA, 351 bp, Unknown
  Obtained from environmental sample
  misc_feature (1)..(351): n is a, c, g, or t
gtgtccgtggccgatttcgcgtctgctcaccgacgtcatacgcttgacttcgttcaccgagtagggcgggaagttgtagtggagcatatacgatttgtcgtagttgccctgtatgttgtcgatgtgctggatatcgagtttcgtcccaagcgtcgtggcggcaagcgactgcgtttcgccgcgcgtgaagagcgccgagccgtgggcgcgaggcagcacgtcgagttcgcaggtgattttgcgtatctcgtccagcccgcggccgccaatgcggacgccgttgttcagaatcgattggcggatgtcttcgcgctcgatttcagtgaagatttcggagatcgctttctttga

SEQ ID NO: 40490 - protein, 116 aa, Unknown
  Obtained from environmental sample
  misc_feature (1)..(116): Xaa is any amino acid
MSVADFASAHRRHTLDFVHRVGREVVVEHIRFVVVALYVVDVLDIEFRPKRRGGKRLRFAAREERRAVGARQHVEFAGDFAYLVQPAAANADAVVQNRLADVFALDFSEDFGDRFL

SEQ ID NO: 40491 - DNA, 714 bp, Unknown
  Obtained from environmental sample
  misc_feature (1)..(714): n is a, c, g, or t
ttgagttccggttccgcgactatgcctttgatgcggcgcagcgcggcatccctcgactctttgttggaggcggctatctgcacggtaccgtcgtcgtcaatgaagatcgtggcgccggtggtatcttggatgtcgcggatcattttaccgccggggcctatgacctcgcggatcttgtccttgtcgatggtaatcgttgttatgcgcggcgcgaaagcggacatctctttgcgggccgacggcagcgcctccgtcatgatgtcgagtatcttgaagcgggcgactttggctttcgcgagcgcctctttcatgatttcggcggtgatgccggctagttttatgtccatctggatggcggtcacgccgtcgcgggtgccggctactttgaagtccatgtcacccacgtggtcttcggtaccgaggatgtcggtcaggatcgccacgcggtcgccctctttgatcaggcccatcgccacgccggccacgtgcgtttttagcggcacgccggcggccatcagcgagagcgaagagcagcagacagaggccatagacgaactgccgtntgactcgagaatctcagagaccacgcgtatcgtgtacgggaagcttttctcattgggtagcacgggggctatggagcgttcggccaagtgtccgtggccgatttcgcgtctgctcaccgacgtcatacgcttgacttcgttcaccgagtag

SEQ ID NO: 40492 - protein, 237 aa, Unknown
  Obtained from environmental sample
  misc_feature (1)..(237): Xaa is any amino acid
MSSGSATMPLMRRSAASLDSLLEAAICTVPSSSMKIVAPVVSWMSRIILPPGPMTSRILSLSMVIVVMRGAKADISLRADGSASVMMSSILKRATLAFASASFMISAVMPASFMSIWMAVTPSRVPATLKSMSPTWSSVPRMSVRIATRSPSLIRPIATPATCVFSGTPAAISESEEQQTEAIDELPXDSRISETTRIVYGKLFSLGSTGAMERSAKCPWPISRLLTDVIRLTSFTE

SEQ ID NO: 40493 - DNA, 561 bp, Unknown
  Obtained from environmental sample
  misc_feature (1)..(561): n is a, c, g, or t
gtgggatcatactattatttcatagcccagcttccttatctcgtatatggaacaaaaccgccaatgtcttctgaaaattttaaagcgatgacagcgaatctgttagatgataacgacgcgaaatttatgaagtatctttcctttgacggcgtattttcaaacgagtcctgtgactgcgcttttatcaatgattggcggaattgggaacgtgcccttagaatgaatctcgcgaaagagagggcgctaaaattaaaaaaagaagtcttagtaactgatattccgttttttccgcaggaagcggctgtcgccgcttctaaagccgtagacgaaaagtctccgttggacggcgaaatattactggataaagcgcgatggaacgcgatagatacgattgcaggcaatgaatattacagcataaacggcgtatatgcctattatttaaaattattactgttggaaagacggcaagtctttgatgcagaaaaaggatttgcagaatataaaacattgtacgcttccattctggaaagcgcgcaaaattccccgggggaacctaaatga

SEQ ID NO: 40494 - protein, 186 aa, Unknown
  Obtained from environmental sample
  misc_feature (1)..(186): Xaa is any amino acid
MGSYYYFIAQLPYLVYGTKPPMSSENFKAMTANLLDDNDAKFMKYLSFDGVFSNESCDCAFINDWRNWERALRMNLAKERALKLKKEVLVTDIPFFPQEAAVAASKAVDEKSPLDGEILLDKARWNAIDTIAGNEYYSINGVYAYYLKLLLLERRQVFDAEKGFAEYKTLYASILESAQNSPGEPK

SEQ ID NO: 40495 - DNA, 783 bp, Unknown
  Obtained from environmental sample
  misc_feature (1)..(783): n is a, c, g, or t
atgagcttgaatgtctttctgcttgcggactccacaagccgtggggcgcaggcaatgcgcgaaatgtcagggcgtttggaagaaatcccaggtgaagaagcgttccccgcttacatggaatcgacaatcgccagtttctacgaaagagccggtatcgtccgcctgcgcgacggcggtttaggctccgtcacaatcggcggaaccgtaagccccgccggcggtaactttgaagaacctgtaacgcaggcgacattaaaagtcgtaggcgcgttccacggcctttcacgagaacgctccgacgcgcgtaagttccccgccattcacccgcttgattcatggtcaaagtacaagggaattattgacggcgagaaagtagcctacgcgcatggatttttgcgccgaagcgcggaagtcgagcagatgatgaaggttgtcggcgaagaaggaacaagcattgaagactacgttattttcctaaaaggcgatcttgtcgactccgtatacttccagcaaaactcatttgacgaagtagacgcggcggtcaaacctgaaagacaaaaatatgtttttgccaaattactgtttattcttggttctaaattttcttttacggacaagaatgacgcgcgtacatggtttaacaagctcaggcaaaaattcctcgattataacggcagtccgtggaagagtgagcgttttgacaaacttgaatccgaaattgattcggcgataaagagtcaatcacagggtcttgataagaccgccgaaaaaataatttactag

SEQ ID NO: 40496 - protein, 260 aa, Unknown
  Obtained from environmental sample
  DOMAIN (1)...(114): ATP synthase alpha/beta family, nucleotide-binding domain
  misc_feature (1)..(260): Xaa is any amino acid
MSLNVFLLADSTSRGAQAMREMSGRLEEIPGEEAFPAYMESTIASFYERAGIVRLRDGGLGSVTIGGTVSPAGGNFEEPVTQATLKVVGAFHGLSRERSDARKFPAIHPLDSWSKYKGIIDGEKVAYAHGFLRRSAEVEQMMKVVGEEGTSIEDYVIFLKGDLVDSVYFQQNSFDEVDAAVKPERQKYVFAKLLFILGSKFSFTDKNDARTWFNKLRQKFLDYNGSPWKSERFDKLESEIDSAIKSQSQGLDKTAEKIIY

SEQ ID NO: 40497 - DNA, 747 bp, Unknown
  Obtained from environmental sample
  misc_feature (1)..(747): n is a, c, g, or t
ttggggagcggtttcctgtcagataccgtcgctggcggcgtctctacgttagctgaagttgaagaaatcgcggcccttggctgtgacgtacagcttggaatggcgttgtacaccggaaaaataaatcttgcagactcttttatagtttcactcaactggaaaaaaggagaaattcaatcccccgtttctcagggtgaaaaagccgcccccctgcttcccgttatagttcaggctcccgacggccaggtattgatgaccggctttacagataaagaagcgttagctgaaacattcaagcgcggcaatgtttgttttcacagcagaacaagaaacaagctttggatgaaaggagagaattccggcaatgtgttaaaacttgtcagactgcggacagactgcgacaaggacgccattcttgccatagctgagccggaaggccccgtctgccatacgggagcgtggtcgtgttttacaaataacaggggctatacgctgcaatttttgcagaacataatacgggatcgttttcgctgccccgcgccgggttcgtatacggctacccttgacgatgaacttgtgcgcgaaaaaattctggaagaagcgaaagaattgtgcgaggcaaaaacccgcgaagaaattgtttgggaagccgccgaccttctgtattttacaacagtattgatgacaagggcaggggtgagtattcaggaaatccttgatgagcttgaccggaggcacaaaaagtag

SEQ ID NO: 40498 - protein, 248 aa, Unknown
  Obtained from environmental sample
  DOMAIN (165)...(247): Phosphoribosyl-ATP pyrophosphohydrolase
  misc_feature (1)..(248): Xaa is any amino acid
MGSGFLSDTVAGGVSTLAEVEEIAALGCDVQLGMALYTGKINLADSFIVSLNWKKGEIQSPVSQGEKAAPLLPVIVQAPDGQVLMTGFTDKEALAETFKRGNVCFHSRTRNKLWMKGENSGNVLKLVRLRTDCDKDAILAIAEPEGPVCHTGAWSCFTNNRGYTLQFLQNIIRDRFRCPAPGSYTATLDDELVREKILEEAKELCEAKTREEIVWEAADLLYFTTVLMTRAGVSIQEILDELDRRHKK

SEQ ID NO: 40499 - DNA, 969 bp, Unknown
  Obtained from environmental sample
  misc_feature (1)..(969): n is a, c, g, or t
atgagcgaatattggaatacccgcgtaaaaaatctttccccgtatgtgcccggcgaacagcctaaggacaggagattcattaaacttaacacaaatgaaaatccctatccgccttcgcccaaggttatcgaagccattcaaaaagcggcgaatgaaagtttgcgtttgtaccccgatcccgaatgtactgaatttcgcgaagctgtcgccgcgcgttacggcgttaaaacggaacaggttttcgcgggtaacggctccgatgaaattttagcgtttgctttcggcgcgttttttgaatccgccaaagaaggcgttagcggaacaagcgaaaataaaagcgcgatactgtttccggacataacttacagtttttatcctgtttatgccaatctttgggaaataccgtataaattaatgccgttacgcgatgattttacaattaattccgatgaatataaaattaactccggcggcgttatcctgccgaatccaaacgctccaaccggaattgcgctgccgttaaaagaaattttatctcttgccgaatatcttgcaagtattgggaaggtttttattgcagatgaagcgtatatcgcctttagcggcgcaaagagcggcgcaaaattttgcgcaaagctcggttctttatccgctgtcccgcatattaacagtaatcctaatctgctgacggtgcatacgctttcaaaatcagcgtctcttgccgggttaagggcgggttttgccatcggtaatgtaaaattgatagaagccctttgccgaatccgcgattcatttaattcatacactatggaccgcattgcccttgcgggagcgtcggcggcggttagggacgcggcatactacgatgaaataacacacgagtcgccgcacacggggaacgggcggcgaaatacttacacggtcttggattcaccgttctgccgtcagagtcaaatttattttttataa

SEQ ID NO: 40500 - protein, 322 aa, Unknown
  Obtained from environmental sample
  DOMAIN (24)...(322): Aminotransferase class I and II
  misc_feature (1)..(322): Xaa is any amino acid
MSEYWNTRVKNLSPYVPGEQPKDRRFIKLNTNENPYPPSPKVIEAIQKAANESLRLYPDPECTEFREAVAARYGVKTEQVFAGNGSDEILAFAFGAFFESAKEGVSGTSENKSAILFPDITYSFYPVYANLWEIPYKLMPLRDDFTINSDEYKINSGGVILPNPNAPTGIALPLKEILSLAEYLASIGKVFIADEAYIAFSGAKSGAKFCAKLGSLSAVPHINSNPNLLTVHTLSKSASLAGLRAGFAIGNVKLIEALCRIRDSFNSYTMDRIALAGASAAVRDAAYYDEITHESPHTGNGRRNTYTVLDSPFCRQSQIYFL

SEQ ID NO: 40501 - DNA, 783 bp, Unknown
  Obtained from environmental sample
  misc_feature (1)..(783): n is a, c, g, or t
atgatgagtaacaaatctgtttttaaaagcgccgcggcggttatccttgccacgttattcttggcaatagcaggctgcggccccgatccgttttttattcatgtagtgtccattgagggcgtgccggaaacaggcgaggcggggacgccccttgcccttacgggaaatatcaggcccgcttttgctagtaacaagaatattgtttggtctgttacagacggcggaaacaccggcgcagatataagcggaaatattttaaatactacggcaagcgggatagttataataagagcgacagtagcaaacggcttggcggaaggaaaggactatactcaggattttgaaattatatttagtgaaggcggcgcagtaggcgatgccgctgtagacggcgttacgctcaatcactcaacgcttacattgaatgtcggcggatcatataccctgacggcgacagtaaccccttcaaacgcggcaaacaagaatgtaacatggacatccaacgagacgggtatagttaccgtaaacaacggcgttgttaccgcccatgccgccggaaccgcggacattaccgtaaccacagaggacggcggttttacggcgacatgcggggttacggtagtagaatccggcgcgcccgtatatgtaaccgacgtaacgcttaatcattctacctttaccctgacagtaggtgaaacaacaacccttatcgcaaaggtattgcctgataacgcgaccaataaagcggtaagctggagtaccggtaatgctctcgcgatctga

SEQ ID NO: 40502 - protein, 260 aa, Unknown
  Obtained from environmental sample
  SIGNAL (1)...(24)
  DOMAIN (128)...(205): Bacterial Ig-like domain (group 2)
  misc_feature (1)..(260): Xaa is any amino acid
MMSNKSVFKSAAAVILATLFLAIAGCGPDPFFIHVVSIEGVPETGEAGTPLALTGNIRPAFASNKNIVWSVTDGGNTGADISGNILNTTASGIVIIRATVANGLAEGKDYTQDFEIIFSEGGAVGDAAVDGVTLNHSTLTLNVGGSYTLTATVTPSNAANKNVTWTSNETGIVTVNNGVVTAHAAGTADITVTTEDGGFTATCGVTVVESGAPVYVTDVTLNHSTFTLTVGETTTLIAKVLPDNATNKAVSWSTGNALAI

SEQ ID NO: 40503 - DNA, 381 bp, Unknown
  Obtained from environmental sample
  misc_feature (1)..(381): n is a, c, g, or t
gtggggcggcgcattttgctggtagaagatgtggaaatcaaccgcgaaattgtactttccctgcttgaaccaacacagttggaaattgactgcgcgaaaaacggcgcggaagccgttcgcatgttcagtgaagacccgaacaagtacgagttgatttttatggatgtgcagatgcccgaaatggacggctacgaggcaacgcggcgtatccggtcgctgaatacgtccaatgggaaaaccgtcccaatcatagccatgactgcgaatgcattccgtgaagatatagaagaatgtctcgccgccggcatgaacgaccatatcgggaaaccgattgattttgaaaaggtcatagaaaagttgtgcgcttatttaccacaataa

SEQ ID NO: 40504 - protein, 126 aa, Unknown
  Obtained from environmental sample
  DOMAIN (3)...(121): Response regulator receiver domain
  misc_feature (1)..(126): Xaa is any amino acid
MGRRILLVEDVEINREIVLSLLEPTQLEIDCAKNGAEAVRMFSEDPNKYELIFMDVQMPEMDGYEATRRIRSLNTSNGKTVPIIAMTANAFREDIEECLAAGMNDHIGKPIDFEKVIEKLCAYLPQ

SEQ ID NO: 40505 - DNA, 978 bp, Unknown
  Obtained from environmental sample
  misc_feature (1)..(978): n is a, c, g, or t
atgcttgaagaactgctttacaaagagcggcgtctaatcgactacttcgacaagaatttgtcaattttccctgttgaggattttccggtatttgtgagcgacaagccaagcggcggatacgcggaagcctacgatgcgcggggcggcgaagctgttcagcagattaagccccgcatcaggcagttaatcgcggaacggggacatatcggcgcgaaagatgtcgatgttgacgagaagatcgtctggcattggggcacgctgacctcgcttcccagggccgcgcttgaatcgatgtactttcgcggggagctcgtcatccatcacaagacaggcacgaacaagagttatgcctttacaaaagatgttttaccggcggaagtattgaacgctccattgcccttcaaaacagtggaggagcggcaggcgtggtatgtaaaacgcagaataggcgctgtcggaatgttatggaacagacaaagcgacgcgtttttggggctaaggttgaaacccgcccagcgcgcggccgcattcaataaactgctggcggacagcgagattttcgaggtcagcgtaaaggacattaaagagccgttttatgtccgcgaagacgagcgcgatgagcttgaagaagtcctttcaggaacgggataccaggcaaggcctgagttcatcgcgccgctggacaaccttttatgggacaggcggcttattggggcgcttttcggattcgaatacaaatgggaaatttacacgccgcaagcaaaacgaaaatacggcccttacacgctgccgtttctctacggcgataattcgcgggggcgtgttgacataacgcgcaggggcagagcgattctcattaacaaggtctggacagaaaacggaaaaccattgaaaggcaagataaagtccgcattcgaggaatgcgcgaagcgcttcgcggactttaacgattgcgaaagagttgaaaagctaaaataa

SEQ ID NO: 40506 - protein, 325 aa, Unknown
  Obtained from environmental sample
  DOMAIN (1)...(325): Protein of unknown function (DUF1006)
  misc_feature (1)..(325): Xaa is any amino acid
MLEELLYKERRLIDYFDKNLSIFPVEDFPVFVSDKPSGGYAEAYDARGGEAVQQIKPRIRQLIAERGHIGAKDVDVDEKIVWHWGTLTSLPRAALESMYFRGELVIHHKTGTNKSYAFTKDVLPAEVLNAPLPFKTVEERQAWYVKRRIGAVGMLWNRQSDAFLGLRLKPAQRAAAFNKLLADSEIFEVSVKDIKEPFYVREDERDELEEVLSGTGYQARPEFIAPLDNLLWDRRLIGALFGFEYKWEIYTPQAKRKYGPYTLPFLYGDNSRGRVDITRRGRAILINKVWTENGKPLKGKIKSAFEECAKRFADFNDCERVEKLK

SEQ ID NO: 40507 - DNA, 402 bp, Unknown
  Obtained from environmental sample
  misc_feature (1)..(402): n is a, c, g, or t
ttgcttgtcggcttaaggagaaaccgggaagagctttaccgccgcatcaacgagcgtacggcggcaatgttcagggcaggcctgcctgaggaagtacagcgcctttacgaagccggttttaccccggaaaatcccggcctcagggcgataggttaccgcgaattttttgtgcgcgatccaggcggcgtctggcggctttccgaagacttcgctggcgttgaagcccttgtcgcccaaaacagccgccgttacgccaaacggcagatgaccttttttgcgtcaattcccgatgtaaagtggatcgactgcgaaggagacacaatgccggacttggacggaataatcattgagaaaataaactctcgcaaaggcgccaaggcgcaaaggaatttaggttattag

SEQ ID NO: 40508 - protein, 133 aa, Unknown
  Obtained from environmental sample
  misc_feature (1)..(133): Xaa is any amino acid
MLVGLRRNREELYRRINERTAAMFRAGLPEEVQRLYEAGFTPENPGLRAIGYREFFVRDPGGVWRLSEDFAGVEALVAQNSRRYAKRQMTFFASIPDVKWIDCEGDTMPDLDGIIIEKINSRKGAKAQRNLGY

SEQ ID NO: 40509 - DNA, 1224 bp, Unknown
  Obtained from environmental sample
  misc_feature (1)..(1224): n is a, c, g, or t
ttgaccaatcaggacgaacagatggcaatccttgtccagcgtgtttcgggaaaccattacaatgagctgttttttccgcatgttgccggcgtcggaaattccgtcaatttgtatgtgtgggaaaaaaccatggacccgaacgccggtatgctgcggattgtattcgggctgggaacgcgggctgttgaccgcgtttcaggcgattacgcaaaaatagttcccctggactgtccgaacaggggcccccccgtcagctacggcgatgaaaaaaagttttctcaacataaagccgatgtccttgacctgcttaacaacaaattgacggaagtatcccttgatatactggcgaatggtgatttgaaaaccgacaccggcattttctttactgttgattccgcggcggtaaaccgcatgagggaacgcgggtataactctgattcaaccccccgaatcatggactttaaaaaattactgaccgaaaccgggtttcccgaatttgtccgcgccgtgcttgcggcgctgagtaaagcctatgactatccggtggatattgagtttaccgtcaatttcactcccaacggcgagttccactttagtctgctgcaatgccgccctctgcaaacaaaagggctcggcagagttatggaagccccgcgtccaaaacaggagcaaatctttttctcgtccgccggcgattttatgggcggcaatgtcaggctgcattttgattatgttgtttttgtcaaagcaactgaataccttgaactaagcgataaggataagtatcaggcggcgcgtactgtcggcattatcaaccaaaagctgaaagacaagacgactttactaatggggccgggcaggtgggggacaaccacgccgtctctgggagtccctgttcatttcagcgaattgtgcaacatggcggctctgtgcgaagtatcctacccgaaagcgggcatagtgccggaactgtcctttggcagccacttctttcaggacatcgtggaatccgatattttttacgccgcggtctttgacggggaacccggcattattttctgtcccgatcaaatcttatcgcgggaaaacctgtttaaggaattttaccctgaagaacaaaaatgggaatccgtgatacacatagccaaaacgtctaatttaatattgcaatcggatgttacaaaccaaaaactccttatttattgggagaaggaagtatcatga

SEQ ID NO: 40510 - protein, 407 aa, Unknown
  Obtained from environmental sample
  misc_feature (1)..(407): Xaa is any amino acid
MTNQDEQMAILVQRVSGNHYNELFFPHVAGVGNSVNLYVWEKTMDPNAGMLRIVFGLGTRAVDRVSGDYAKIVPLDCPNRGPPVSYGDEKKFSQHKADVLDLLNNKLTEVSLDILANGDLKTDTGIFFTVDSAAVNRMRERGYNSDSTPRIMDFKKLLTETGFPEFVRAVLAALSKAYDYPVDIEFTVNFTPNGEFHFSLLQCRPLQTKGLGRVMEAPRPKQEQIFFSSAGDFMGGNVRLHFDYVVFVKATEYLELSDKDKYQAARTVGIINQKLKDKTTLLMGPGRWGTTTPSLGVPVHFSELCNMAALCEVSYPKAGIVPELSFGSHFFQDIVESDIFYAAVFDGEPGIIFCPDQILSRENLFKEFYPEEQKWESVIHIAKTSNLILQSDVTNQKLLIYWEKEVS

SEQ ID NO: 40511 - DNA, 579 bp, Unknown
  Obtained from environmental sample
  misc_feature (1)..(579): n is a, c, g, or t
atggccgagggggttttgcaaaaacctcgctatcagggggcagggagcagcaagattgttcccaataagctcgacaacgcctatgacgcattcaaaactgcgggcattgcctttgactttgcgcagggctataacggcacaaatccggacgccgcacttatagaagaagcggtcaaagttgccaagggcaaagaaagggtaatcatttttgcggggcttccagatgagtacgaaagcgaagggtacgaccgttcttctttcgatatgcctccaagccacaacaaattgatagaagcggttgccgcagttaacccgaataccatcatcgttttacagcttggcgccccagcggcactgccttgggcaggcaaagtaaaaggtatacttgcggcgtatctatgcggacaggcgggaagcggcgcaattgttgacctgcttttgggcaaacattctccaggcggcaagctcgcggaaacgtggccgctctccctgggagacaccccctgttatcactattatccgggaagtgtccgaaactcggagtccgggaagcatctttgtgggttaccgctactatga

SEQ ID NO: 40512 - protein, 192 aa, Unknown
  Obtained from environmental sample
  DOMAIN (3)...(190): Glycosyl hydrolase family 3 C terminal domain
  misc_feature (1)..(192): Xaa is any amino acid
MAEGVLQKPRYQGAGSSKIVPNKLDNAYDAFKTAGIAFDFAQGYNGTNPDAALIEEAVKVAKGKERVIIFAGLPDEYESEGYDRSSFDMPPSHNKLIEAVAAVNPNTIIVLQLGAPAALPWAGKVKGILAAYLCGQAGSGAIVDLLLGKHSPGGKLAETWPLSLGDTPCYHYYPGSVRNSESGKHLCGLPLL

SEQ ID NO: 40513 - DNA, 498 bp, Unknown
  Obtained from environmental sample
  misc_feature (1)..(498): n is a, c, g, or t
atgactacaattcactcctatacagctacccagaaaaccgtagacggcgtttcccagaaagactggagaggcggacgcgcggcggctgtaaatatcattccctcaacaaccggcgcggcgaaagccgtaggcgaagtgcttccctcaaccaaaggaaaacttaccggtatgagcttccgcgttcccacacccacaggctcggtagtagacttgacattccgcgctgaaaaagacacatctatcgaagaaattgacgcagcaatgaaaaaggctgcgagttcctacatgaaaggcgttctgtcttattgcaacgaagaaatcgtttcatccgacatcgttcacaataccaacacatcaatttatgacagccttgccacacttcagaacaacctcaagggcgaaaaacgcttcttcaaagtcgtatcatggtacgacaacgagtggggctattcaaacaaagttgtagacctgcttaactatatcgatagtaaaaaatag

SEQ ID NO: 40514 - protein, 165 aa, Unknown
  Obtained from environmental sample
  DOMAIN (1)...(144): Glyceraldehyde 3-phosphate dehydrogenase, C-terminal domain
  misc_feature (1)..(165): Xaa is any amino acid
MTTIHSYTATQKTVDGVSQKDWRGGRAAAVNIIPSTTGAAKAVGEVLPSTKGKLTGMSFRVPTPTGSVVDLTFRAEKDTSIEEIDAAMKKAASSYMKGVLSYCNEEIVSSDIVHNTNTSIYDSLATLQNNLKGEKRFFKVVSWYDNEWGYSNKVVDLLNYIDSKK

SEQ ID NO: 40515 - DNA, 1095 bp, Unknown
  Obtained from environmental sample
  misc_feature (1)..(1095): n is a, c, g, or t
atgtcgcacttgggagacccttccaaggacgcgaagaaggcgcaggaaaaagccgagaaagacggcaaaacatttgacaaggacgcgtacatcaaaggcaaacaccgcatggctcctgtcgccgcctaccttgaaaagaaactcggaaagcctgtaatttttgcgggagaagacagctgctacggcaaaaaagcttttatcgaaagccagcctgacggctctgttatcatgctggaaaatacacgcttccacaaagaagaaacagccaaagaaccggcggaattggacaagctggcgaaagagcttgccacttacggtgaaatttttgtaaacgacgctttcggaaccgcccaccgcgatcacgcttctacggcttctatcgcgaagtttgtgcctgtttctgtcgcgggcttcctcatggaaaaagaagttaactatcttgaaccgattgttacgaacccgcaaaaaccgttagtagcgattatcggcggcgcgaaagtttcgtcaaaaatcgcggtgctggaaagtctgcttaaaaattcagccgcgcttattatcggcggcggtatggcgtatacattcctgaaaactcaggggcacaaaatcggcaaatcgcttgttgaggacgatcagcttgatacggcgcanaaaatccttgacgccgcgaaaagcgcgaatgtgcagattattctgccgcttgaccacattgccgcgacaagttttgacgcgaattcatctcctngtccggntgacggtctcgatcttcccgacaatatgcttgggttggacgtaggaccaaagactcttgccaaatacaaagaagtaatcactatcgctaaaaccattgtatggaacggtccggtcggcgtttttgaatttgacgcttttgccaaaggaaccgaacaagttgcgaaacttgtagcggaagcgacaagcaagggaacgatcactgtagtcggcggcggcgattcagttgcggctgtaaacaaattcggtcttgcttcaaagatgagccatgtctcaacaggcggcggcgcttcgttggaattgcttgaaggtaaaaaactccccggcatcgaagtttgccgcgggtag

SEQ ID NO: 40516 - protein, 364 aa, Unknown
  Obtained from environmental sample
  DOMAIN (8)...(362): Phosphoglycerate kinase
  misc_feature (1)..(364): Xaa is any amino acid
MSHLGDPSKDAKKAQEKAEKDGKTFDKDAYIKGKHRMAPVAAYLEKKLGKPVIFAGEDSCYGKKAFIESQPDGSVIMLENTRFHKEETAKEPAELDKLAKELATYGEIFVNDAFGTAHRDHASTASIAKFVPVSVAGFLMEKEVNYLEPIVTNPQKPLVAIIGGAKVSSKIAVLESLLKNSAALIIGGGMAYTFLKTQGHKIGKSLVEDDQLDTAXKILDAAKSANVQIILPLDHIAATSFDANSSPXPXDGLDLPDNMLGLDVGPKTLAKYKEVITIAKTIVWNGPVGVFEFDAFAKGTEQVAKLVAEATSKGTITVVGGGDSVAAVNKFGLASKMSHVSTGGGASLELLEGKKLPGIEVCRG

SEQ ID NO: 40517 - DNA, 480 bp, Unknown
  Obtained from environmental sample
  misc_feature (1)..(480): n is a, c, g, or t
gtggtagaattcttctacccgcggcaaacttcgatgccggggagttttttaccttcaagcaattccaacgaagcgccgccgcctgttgagacatggctcatctttgaagcaagaccgaatttgtttacagccgcaactgaatcgccgccgccgactacagtgatcgttcccttgcttgtcgcttccgctacaagtttcgcaacttgttcggttcctttggcaaaagcgtcaaattcaaaaacgccgaccggaccgttccatacaatggttttagcgatagtgattacttctttgtatttggcaagagtctttggtcctacgtccaacccaagcatattgtcgggaagatcgagaccgtcanccggacnaggagatgaattcgcgtcaaaacttgtcgcggcaatgtggtcaagcggcagaataatctgcacattcgcgcttttcgcggcgtcaaggattttntgcgccgtatcaagctga

SEQ ID NO: 40518 - protein, 159 aa, Unknown
  Obtained from environmental sample
  misc_feature (1)..(159): Xaa is any amino acid
MVEFFYPRQTSMPGSFLPSSNSNEAPPPVETWLIFEARPNLFTAATESPPPTTVIVPLLVASATSFATCSVPLAKASNSKTPTGPFHTMVLAIVITSLYLARVFGPTSNPSILSGRSRPSXGXGDEFASKLVAAMWSSGRIICTFALFAASRIXCAVSS

SEQ ID NO: 40519 - DNA, 1482 bp, Unknown
  Obtained from environmental sample
  misc_feature (1)..(1482): n is a, c, g, or t
atggacaccggtgaagcgtttagtttagatgctaaaggcgttgaactggcggctccggcggcggttgttacgctgccccgtccaaacgcgcgctttataaaaaacagcgccgaaccggtaaatattcgcttcgcgtggaatgtaataaatatcgatcaaagacagcccttgcgtttggaaattgcctcaggtcctaactttacgcgcatagtacggacagccgaaggcattgatttttccaatgttgctcttggcgcggggatttggtattggcggctgtcgtatcaggataacgtcctaagttcggggcagtttacaattgctgacgcaacaatgaccgcgcttgcaagccccattcaggacagccggttcagctatcaggaaaatatgcctgtccgttttgaatggcagcctgtggaaggagtgtcctattatattcttgaggccggtcttacgccggatataatatatccgtcaataataagacaaacagccattgcttcttgtgtcgaatcgaatatggaagcgggaaattggtactggcatgtaaagccggttttttcttctctttatgaaggcagtaccgatttttctcaagtctcgtctttccgcatagaaaaaatcgatgagcctgtagccgccgctcagaatgttgacaacttcccggtaatatcggcgcagcctgaaccggaactaatagcggcaatcactcctaaccccgctagtcctgtaactccatccatgtcaaacacgagaacatcggcagtttccatacaaaatcctgaaatcatttctgaacatgtaactccctccacgtcaattacgacaacaccgacagtttctatatcaaatcctgaagttatccctgaacctgtaactccctccgcatcaaatacggcaacaccgcccgtttctgtgtcaagttccaatttatttatctcatcaaccgcagggtggaaagcgttaagtggtggtggtaattcaaagtcaaatatcaatatttccagagaaacaattgacggtgcagaaagagaagtcttaaccataaatgcaactcttggaggaagtagttcagaatgggcaggagctatattaatagatgaagattatttacacaaggtgtttatttcacaaacacaatcaaaattgacaggaactacgatagcggatataaatctcatccaaaaacttaaaaatgctaatgggatacgttttaaggtacagggtgacggaaaaagatggagggtctattttatgataactaatgttactgacagcgcctggcatggagcaacaatatcaactcaaaacggaaaagtcagcaatattgatatttctttcaacaaattggatcaacctgattatggaagcaaaaccagatttaataagaacaatttaaaaggaattaccattgaaagaaacgctaatactccaggcggcagagcgtctacaattaaagtttttgattttgaggtttattga

SEQ ID NO: 40520 - protein, 493 aa, Unknown
  Obtained from environmental sample
  misc_feature (1)..(493): Xaa is any amino acid
MDTGEAFSLDAKGVELAAPAAVVTLPRPNARFIKNSAEPVNIRFAWNVINIDQRQPLRLEIASGPNFTRIVRTAEGIDFSNVALGAGIWYWRLSYQDNVLSSGQFTIADATMTALASPIQDSRFSYQENMPVRFEWQPVEGVSYYILEAGLTPDIIYPSIIRQTAIASCVESNMEAGNWYWHVKPVFSSLYEGSTDFSQVSSFRIEKIDEPVAAAQNVDNFPVISAQPEPELIAAITPNPASPVTPSMSNTRTSAVSIQNPEIISEHVTPSTSITTTPTVSISNPEVIPEPVTPSASNTATPPVSVSSSNLFISSTAGWKALSGGGNSKSNINISRETIDGAEREVLTINATLGGSSSEWAGAILIDEDYLHKVFISQTQSKLTGTTIADINLIQKLKNANGIRFKVQGDGKRWRVYFMITNVTDSAWHGATISTQNGKVSNIDISFNKLDQPDYGSKTRFNKNNLKGITIERNANTPGGRASTIKVFDFEVY

SEQ ID NO: 40521 - DNA, 1011 bp, Unknown
  Obtained from environmental sample
  misc_feature (1)..(1011): n is a, c, g, or t
gtgctgtttatcaccaccgccaattccctgcacagcataccgtatcccctgcttgaccgcatggaaatcatcaatattcccggttacggggaaaatgaaaaactcgccatcgccaagcaattcctggttcccaaagcattaacggaaaacgggcttgcgccggcgcgggttacttttaccgatgacgcgctgcggggcattatacgctattggacaatggaatccggcgtgcgcagccttgagcgggaaatagcccgctgtgtcaggcgcgtcgcccgtcaggcggtcgccgccaattacggaaaacccgaaggcaaacccatcggagaatttaaaaaaatcgttaaaagcgaagggctggaaaaacttttgggcaggcggaaatataaaaacgacgtggtgttcaaagaggcgcgggtagggataagctgcgggcttgcctggaccgagaccggcggcgccatactaccggtggaaagcacccgtttcggaggaaacggggagctgatcatgaccggcaacctcggcgacgtgatgaaggaaagcgcccgcaccgccctttcgtatctgcgcagcgtgcaggatcattaccattttgaggtaaccaacatcggcaaaaccgattttcacattcatgtccccgaaggggcgattcccaaagacggcccgtcggcgggcatcgccatcgccgcttccctgctgtcaaccctgtgccaaaaaccgctgcgcgccggcatagccatgaccggagaactgaccctcaccgggcgggtcctgcccataggcggcctcaaggaaaagctgttagccgccatccgcaaccagcttgaaaaagtgcttctgcccgccgacaaccgcggcgaatgggacgagcttgacaaggacataacaagcgcgattaacgttgaattcgtcgaaaacgccgcagacgcctttgcgattttgtttgataaaggaataaaaatggggtccggggttcggggttcggggactggggcaaagagaaaataa

SEQ ID NO: 40522 - protein, 336 aa, Unknown
  Obtained from environmental sample
  DOMAIN (114)...(318): Lon protease (S16) C-terminal proteolytic domain
  misc_feature (1)..(336): Xaa is any amino acid
MLFITTANSLHSIPYPLLDRMEIINIPGYGENEKLAIAKQFLVPKALTENGLAPARVTFTDDALRGIIRYWTMESGVRSLEREIARCVRRVARQAVAANYGKPEGKPIGEFKKIVKSEGLEKLLGRRKYKNDVVFKEARVGISCGLAWTETGGAILPVESTRFGGNGELIMTGNLGDVMKESARTALSYLRSVQDHYHFEVTNIGKTDFHIHVPEGAIPKDGPSAGIAIAASLLSTLCQKPLRAGIAMTGELTLTGRVLPIGGLKEKLLAAIRNQLEKVLLPADNRGEWDELDKDITSAINVEFVENAADAFAILFDKGIKMGSGVRGSGTGAKRK

SEQ ID NO: 40523 - DNA, 459 bp, Unknown
  Obtained from environmental sample
  misc_feature (1)..(459): n is a, c, g, or t
ttgtcaatatattttgcgcagtctgaattaacaattaacaaaggaagatggttgtatcttgctttgctcattgctcattgttattttctctttgccccagtccccgaaccccgaaccccggaccccatttttattcctttatcaaacaaaatcgcaaaggcgtctgcggcgttttcgacgaattcaacgttaatcgcgcttgttatgtccttgtcaagctcgtcccattcgccgcggttgtcggcgggcagaagcactttttcaagctggttgcggatggcggctaacagcttttccttgaggccgcctatgggcaggacccgcccggtgagggtcagttctccggtcatggctatgccggcgcgcagcggtttttggcacagggttgacagcagggaagcggcgatggcgatgcccgccgacgggccgtctttgggaatcgccccttcggggacatga

SEQ ID NO: 40524 - protein, 152 aa, Unknown
  Obtained from environmental sample
  misc_feature (1)..(152): Xaa is any amino acid
MSIYFAQSELTINKGRWLYLALLIAHCYFLFAPVPEPRTPDPIFIPLSNKIAKASAAFSTNSTLIALVMSLSSSSHSPRLSAGRSTFSSWLRMAANSFSLRPPMGRTRPVRVSSPVMAMPARSGFWHRVDSREAAMAMPADGPSLGIAPSGT

SEQ ID NO: 40525 - DNA, 1599 bp, Unknown
  Obtained from environmental sample
  misc_feature (1)..(1599): n is a, c, g, or t
ttgcgttacgtcaaagaatggcggcgtaccattacccgtttgggacgctgggtggattttgacaacgattacaaaaccatgaatcctgactacatggaaaccatctggtgggttgtaaaatccctttgggaaaagggacttctgtatgaaggctattacaacctcccttactgtccgcgttgttccaccgtgctttcaaatcacgagcttaatctgggcggctacaagaacgttcacgatccggcgattacaatacgattcaaaataaaggggactggggaattgggaatagggaatagggaaggaacgacccctctcaatgcctactttctcgcgtggacaactactccgtggacattgccctcaaaccttgccctcaccctcggtccggacattgattacgtattaatcgaagacctccccagtccccagtctccattccctattccccatgattattacattctgggagaagcccgcctttcagcttattacaaaaaagaaagcgattataaaattatctggcgaaaaaaaggagcggaactaaaaggcatagagtacgagcctctctttccttatttttcctgggctgcggaaaacaacgcattcaggacttaccttggagattttgttacgaccgaggacggcaccggcatagtgcataccgcgccgggctttggcgaggacgacgccagggtgctaaagggaaccggcgtgccggtgattgttcccatcgacgctgagtgccgcttcacttcggaagtgccggattaccagggcatttttgtcaaggacgcggacagcgcgattatggcgcgccttaaagctgaaaaaaaattaattaaaagggaccagatcctgcacgcgtatcctcattgctggagatgcgaaagtccgctcatctacagggcgataagctcctggtttgtaagcatagaaaaaataaagcaggatatgatagaagccaataatcaaattcactgggtgccggatcatataaagaccgggcgtttcggcaagtggcttgaaggggccagggaatgggcaatcagccggaaccgctattggggcaaccccctgccaatctggaaatgtaccgactgcggcaagacggtctgcgtcggcagccgtgcggaactgaaagaatactcaggcgctgccacaatcgacgatcttcacaagcactttgttgacgagattaccttcccgtgttcaaaagcgccgggcgaaaaaaaatgctcaggaacaatgaagcgcatttctgaggtgctggactgctggtttgagtcaggctcaatgacctacgcccagaatcattatccattcgagaacaaagagttttttgaaaatcactttccggcggattttatcagtgaaagcctcgatcaaaccagaggctggttttacacgcttacaatactggccgctgctcttttcaagcggcctgcttttaagaactgtattgtcagcggcattgtgcttgcctccgacggaaggaagatgagcaagatgctgcgtaactataccgatccggctgagttgatggacgcatacggcgctgacgccctgcggctttttctggttcactccgcgctgtaa

SEQ ID NO: 40526 - protein, 532 aa, Unknown
  Obtained from environmental sample
  DOMAIN (1)...(530): tRNA synthetases class I (I, L, M and V)
  misc_feature (1)..(532): Xaa is any amino acid
MRYVKEWRRTITRLGRWVDFDNDYKTMNPDYMETIWWVVKSLWEKGLLYEGYYNLPYCPRCSTVLSNHELNLGGYKNVHDPAITIRFKIKGTGELGIGNREGTTPLNAYFLAWTTTPWTLPSNLALTLGPDIDYVLIEDLPSPQSPFPIPHDYYILGEARLSAYYKKESDYKIIWRKKGAELKGIEYEPLFPYFSWAAENNAFRTYLGDFVTTEDGTGIVHTAPGFGEDDARVLKGTGVPVIVPIDAECRFTSEVPDYQGIFVKDADSAIMARLKAEKKLIKRDQILHAYPHCWRCESPLIYRAISSWFVSIEKIKQDMIEANNQIHWVPDHIKTGRFGKWLEGAREWAISRNRYWGNPLPIWKCTDCGKTVCVGSRAELKEYSGAATIDDLHKHFVDEITFPCSKAPGEKKCSGTMKRISEVLDCWFESGSMTYAQNHYPFENKEFFENHFPADFISESLDQTRGWFYTLTILAAALFKRPAFKNCIVSGIVLASDGRKMSKMLRNYTDPAELMDAYGADALRLFLVHSAL

SEQ ID NO: 40527 - DNA, 1104 bp, Unknown
  Obtained from environmental sample
  misc_feature (1)..(1104): n is a, c, g, or t
atgccaagcactgcaatgagaatgcagagcacggcagattcgaaggcgatggctgaaagagactattacgagatggagatgccgcaaagttcagttacatcggttgccggtggagcagttgacaccgcctcggggcgcgccgccggagaccaatttgagtttacgctgaaaaaccccgtaacccttgacaggcggcaaagcgccatgctcccgctggtggaaggctcgataaaagcggaaaaaatcctgatattctcaggcgctcgcgcgttaggcggcgctacgataaaccccgcgattagcgcggaactggtcaacaactcaggcatgaaacttcccgccggacccatcacggtttacgaggacggaacctacgcaggtgacgcgctcatcgagttcttccccgaaaacgaaaagcggcttatctcttacggggaagacctctcagtaggcggcagcgttgcttcctcaggtacccgctttattacggcggtaaacatttccggcggcgtcatgaccattacccgccgccagagttacgagaaagtttacacaataaaaaacgtttccggccaggcaaaaaaaataattattgaacaccccattacttccggttctgaactaatggaacctaaagaagccgacgatcgtaccggaagcctttaccgctttaaccggaacctaaacacgaatgaaacattcacttttacggttcgggaagaaacccctgtttttgagcggatcaccctggcgcagctccgtgccgatactttcctgagctatgcctccaaccaggaaatccccgccaatgtccgcgaggtattcgtaaaggcaatcaagctaaaaaaggttgctgacgacgcctccgcggcgcaaagcaggcttgaaatccagatgaccaggctcacttccgatcaggacaggatacgccgcaaccttgaagccgccggcaatcagaccccccagggccaggaataccttaaacgcatggctgctctggatgatgaaatcgacgacttaaaaaaacagatagatgctgcgacgcaggaaacccagagggcaaaggcggagtacgatagttatttggcaacggttaagatttga

SEQ ID NO: 40528 - protein, 367 aa, Unknown
  Obtained from environmental sample
  misc_feature (1)..(367): Xaa is any amino acid
MPSTAMRMQSTADSKAMAERDYYEMEMPQSSVTSVAGGAVDTASGRAAGDQFEFTLKNPVTLDRRQSAMLPLVEGSIKAEKILIFSGARALGGATINPAISAELVNNSGMKLPAGPITVYEDGTYAGDALIEFFPENEKRLISYGEDLSVGGSVASSGTRFITAVNISGGVMTITRRQSYEKVYTIKNVSGQAKKIIIEHPITSGSELMEPKEADDRTGSLYRFNRNLNTNETFTFTVREETPVFERITLAQLRADTFLSYASNQEIPANVREVFVKAIKLKKVADDASAAQSRLEIQMTRLTSDQDRIRRNLEAAGNQTPQGQEYLKRMAALDDEIDDLKKQIDAATQETQRAKAEYDSYLATVKI

SEQ ID NO: 40529 - DNA, 384 bp, Unknown
  Obtained from environmental sample
  misc_feature (1)..(384): n is a, c, g, or t
ttgatcagatcggccgagggacaacggcttaaaataatcggtactgtcctggaatcgtccacccgttttgtcgcctcgcatacggctcttgaaaacgcgacaaagcgaaacaggattgaagaacttgcgatgctgtttagcgctgtacttgagggccgtgaacgcgtgatgctggaaatgaacatacccaaagattgttttgccgcggcagtgaacgggcttccggcaatgcgcagcccaaccgttgcccctttgtttggcgatgaaggttacgccgttaaaatcgcggtgaagaaaaacgaggtttcagaaataattccccgtctaaaaaaattgggcgctcttgatattctggaatacgacctcagaaaagtggtgccataa

SEQ ID NO: 40530 - protein, 127 aa, Unknown
  Obtained from environmental sample
  DOMAIN (51)...(125): HisG, C-terminal domain
  misc_feature (1)..(127): Xaa is any amino acid
MIRSAEGQRLKIIGTVLESSTRFVASHTALENATKRNRIEELAMLFSAVLEGRERVMLEMNIPKDCFAAAVNGLPAMRSPTVAPLFGDEGYAVKIAVKKNEVSEIIPRLKKLGALDILEYDLRKVVP

SEQ ID NO: 40531 - DNA, 678 bp, Unknown
  Obtained from environmental sample
  misc_feature (1)..(678): n is a, c, g, or t
ttgatattctggaatacgacctcagaaaagtggtgccataaacggggaacacaaatggttagaacggcggaaattgagagaactaccaaagaaacatcaataacggtgaaactcaacctggacggaagcggcgccggtaaatttaattacccgattggcttcatcggtcatatgctcaacactttcgcgcggcacgggctctttgatcttgaagtccgcgcttccggcgatcttgaagttgaccagcatcacctggtagaagatacaggtatagttttgggccaatgctttgagagggccttaggcgacaagcgcggaattcgccgtaatggaagctgccttttcccgatggacgagactttggcaagcgccgccgttgatttgtccggacgcccttttctttttatagacgccaagctttcaggaactccgctgattgccgcgcccagcggagaagacgctgaagcttttcaatttcaaacggacacgatagaagatttttggcagggcttcgtaaacgcggcgctctgtaatttgcaccttgaaattgtccgcgggcgcagcgatcatcacaagatagaagccatgtttaaagccgccgcccgcgcccttcgcagcgcctgtgaaatcgacgagcgaagtcgtaatattgttccctcgacaaagggaagtttataa

SEQ ID NO: 40532 - protein, 225 aa, Unknown
  Obtained from environmental sample
  DOMAIN (52)...(205): Imidazoleglycerol-phosphate dehydratase
  misc_feature (1)..(225): Xaa is any amino acid
MIFWNTTSEKWCHKRGTQMVRTAEIERTTKETSITVKLNLDGSGAGKFNYPIGFIGHMLNTFARHGLFDLEVRASGDLEVDQHHLVEDTGIVLGQCFERALGDKRGIRRNGSCLFPMDETLASAAVDLSGRPFLFIDAKLSGTPLIAAPSGEDAEAFQFQTDTIEDFWQGFVNAALCNLHLEIVRGRSDHHKIEAMFKAAARALRSACEIDERSRNIVPSTKGSL

SEQ ID NO: 40533 - DNA, 852 bp, Unknown
  Obtained from environmental sample
  misc_feature (1)..(852): n is a, c, g, or t
gtgaaatttaaaaggggcaagcctttttcttacgattcccctatacctgaaaattccattgtcgaagcgggggggctgatatttacaacggtatcgccgggcgtgatcctctctggggctacggtatccaacgagataagcgtaacagcggaggatgtaggggaaaaatataatgtcggtgccggagctataaataaactggtaacgacactatcggcggatattgtgggagtaaccaatgaccagccggcaacagggggggtatcaagggagtcatggcaggattttgttgccaggtttgcggattatattgtgggcctccaaagaaccaataacgccggtttcaggtctgggctgaccaagggctatgccgtcagatcatacgaaaaagttgaacacttccccccattggatgatatatggaatatgaccgtatacctggaagatggatccggcgatatgccgtcatcgggttttgaattggcgaaggccattattgacggcgatggcacgtctacaaatggcgggtatcgggctccggggatacaaatacgttatttgccgcctgaaaaaattccgattacccttaaaataaaagtgaaaaccacagaggatgtaacaaacgaaattgacgaatccgaagtgaggagcgaggtacaaaaaaaggccaaggaatatgtgaacgggcttaaaatcggagaggaattcgtaaaatccgatcttaccgtggttcttaaaaggattatttacatttatgacgtggacccgattttaccggctgcaaatatcaaaattgccaaaaatcagatcgccagataccaggattgcgaagtcattgtggaggtgggctga

SEQ ID NO: 40534 - protein, 283 aa, Unknown
  Obtained from environmental sample
  misc_feature (1)..(283): Xaa is any amino acid
MKFKRGKPFSYDSPIPENSIVEAGGLIFTTVSPGVILSGATVSNEISVTAEDVGEKYNVGAGAINKLVTTLSADIVGVTNDQPATGGVSRESWQDFVARFADYIVGLQRTNNAGFRSGLTKGYAVRSYEKVEHFPPLDDIWNMTVYLEDGSGDMPSSGFELAKAIIDGDGTSTNGGYRAPGIQIRYLPPEKIPITLKIKVKTTEDVTNEIDESEVRSEVQKKAKEYVNGLKIGEEFVKSDLTVVLKRIIYIYDVDPILPAANIKIAKNQIARYQDCEVIVEVG

SEQ ID NO: 40535 - DNA, 624 bp, Unknown
  Obtained from environmental sample
  misc_feature (1)..(624): n is a, c, g, or t
atgcccatgaatatgacttttttaagatacaccctaccccttgcagcaatgctctgtatctccctcctctcctcttgtgctgaagaatccgatggcaattcttgcaatatagatgattacagaaaaacgcgaataggcaaccaagtgtggatggcagagaactttaactgcgatgttgcaggcagcaagtgctacgataatgagccttccaactgcaaaaagtatggacgtttatacaaatgggaagctgcaaaaacggtatgcccttcaggctggcgtttgccaagcgatgaagattggaacgagctgataagctacgttgagaacgaaaacgggtgcgataattgtgcagggaaatatttgaaagcgactaaaggctggaatgaaaaaggcaatggtcaggacacgtatgaattttccgccctacctggcggtggttggtggaatggtgatactggcggcaccaatgtcggctcctctggctactggtgggctagcgaaggactcattcagattagtggcggtggcgagactgtcagttattacaacagcaaccataagactttttatcaggttgagaattcctcgtacagcgttcgttgtgttacaggattatttgaataa

SEQ ID NO: 40536 - protein, 207 aa, Unknown
  Obtained from environmental sample
  SIGNAL (1)...(27)
  misc_feature (1)..(207): Xaa is any amino acid
MPMNMTFLRYTLPLAAMLCISLLSSCAEESDGNSCNIDDYRKTRIGNQVWMAENFNCDVAGSKCYDNEPSNCKKYGRLYKWEAAKTVCPSGWRLPSDEDWNELISYVENENGCDNCAGKYLKATKGWNEKGNGQDTYEFSALPGGGWWNGDTGGTNVGSSGYWWASEGLIQISGGGETVSYYNSNHKTFYQVENSSYSVRCVTGLFE

SEQ ID NO: 40537 - DNA, 975 bp, Unknown
  Obtained from environmental sample
  misc_feature (1)..(975): n is a, c, g, or t
atgaatattctggtaataggcggcgcgggttatatcggaagccatgtaacaagagaatttctcgacaatgggcataactgtacggtttatgacaatctttcaagcggattgcgcgaaaacctttttcctcagacgcaatttattcacggggacattcacgattacccgctccttcttgaaaccatgaaaacaggcggctttaacgcccttattcatcttgccgcgttcaaggcggcgggcgaatcaatgttaaaaccggaaaaatattcacataacaatatatcgggaaccataaatatactgaatgccgcaagcgaggcgggaattaagaacatcgttttttcttccagcgccgccgtttacggctgccctcaatatctgcctattgatgaaaagcaccctaccctgcctgaaaactattacggttttaccaaactggaaattgagcgttttttgggctggtacgaaaagcttaaaggcataaattacgcctgccttcgctattttaacgccgccggttacgacataaaaggccgcataaaaggactagaacaaaacccggctaatttaattcctgttataatggaaaccgcctgcggcacaagaaaagaaatgcaagttttcgggaacgattacgatactcccgacggaacctgtatccgcggttatgtgcatgtaagcgatctggcaatcggccacgtccttgcgttaaactacatcatcaaaaacaacaagagcctgactgtaaatcttggaagcgagacaggcttttccgtaacagaagtaattgaagcggcgcgaaaagttacgggcaaacctatacccgcgaaaatcacgggaagaaggcagggcgaccccgctgccctttacgattcatcgtccctcgcgtttgaaatactcggctggaaagcgcgttactccgacatggaaacaatacttaaaacaagctgggaagcgtacaaaaatgaaagataa

SEQ ID NO: 40538 - protein, 324 aa, Unknown
  Obtained from environmental sample
  DOMAIN (2)...(322): RmlD substrate binding domain
  misc_feature (1)..(324): Xaa is any amino acid
MNILVIGGAGYIGSHVTREFLDNGHNCTVYDNLSSGLRENLFPQTQFIHGDIHDYPLLLETMKTGGFNALIHLAAFKAAGESMLKPEKYSHNNISGTINILNAASEAGIKNIVFSSSAAVYGCPQYLPIDEKHPTLPENYYGFTKLEIERFLGWYEKLKGINYACLRYFNAAGYDIKGRIKGLEQNPANLIPVIMETACGTRKEMQVFGNDYDTPDGTCIRGYVHVSDLAIGHVLALNYIIKNNKSLTVNLGSETGFSVTEVIEAARKVTGKPIPAKITGRRQGDPAALYDSSSLAFEILGWKARYSDMETILKTSWEAYKNER

SEQ ID NO: 40539 - DNA, 711 bp, Unknown
  Obtained from environmental sample
  misc_feature (1)..(711): n is a, c, g, or t
atgattggtgttatcgctgcaatggaaaaagaattaagtattctatgcaacgcaatgggaaaattcgaaactcataaaaccggatgttttgaatttttcacaggtaaaatcgaaggaaaggatgttacgctgttatgcagcggaattggaaaggtaaacgccgcagtaggctgcgcactgcttattcagcagtttaaacctgcctgcgttatcaatacaggttccgcaggcggcatcaatccgtcgcttaaggtaggagacgctgtcatatcaaccggccttatctaccacgatgttgatgttacggcgtttaactatgctccgggacagcttccacgtcagccgcaaatttttccggtggatgaaaaacttgtaaaacttgcgaaagacgctgttgatgagttaaagcgggaaaaagcgctcccggcttcttttaaccattgcagcggcataatcggatcaggcgatgtttttatgcatgaaccggaacgcatagcggaagtacgcagagttttcccggatattgccgcagtagaaatggagggggccgccattgcccattgctgccatcttttttctgttcccgcccttgttattcgcgctctttcagatgttgccggcacgcaatcgcccataagttttgatgaatttctgccaatagcgtcagaacattccgcaggtatagtaataagaattctccgaggggtataa

SEQ ID NO: 40540 - protein, 236 aa, Unknown
  Obtained from environmental sample
  DOMAIN (1)...(233): Phosphorylase family
  misc_feature (1)..(236): Xaa is any amino acid
MIGVIAAMEKELSILCNAMGKFETHKTGCFEFFTGKIEGKDVTLLCSGIGKVNAAVGCALLIQQFKPACVINTGSAGGINPSLKVGDAVISTGLIYHDVDVTAFNYAPGQLPRQPQIFPVDEKLVKLAKDAVDELKREKALPASFNHCSGIIGSGDVFMHEPERIAEVRRVFPDIAAVEMEGAAIAHCCHLFSVPALVIRALSDVAGTQSPISFDEFLPIASEHSAGIVIRILRGV

SEQ ID NO: 40541 - DNA, 378 bp, Unknown
  Obtained from environmental sample
  misc_feature (1)..(378): n is a, c, g, or t
atgaaacgcggatttttttgcataacggcattgtttttttttgtttcggtttccgcttttgctcagaatgttctttttaagccgtttacctcttttcgggttattcagacagatcattttgaaattattttcccaaaagaatcggaatcatccgcccgtcttttggcttctttcgccgaccgtatttatgataatgtaagctctttgcttggtattaaggttcacggccgtattaatgtaactttttcgcctcatacagatttgttcaacggtttctatgacccgttttttaatcgtattgggcttcttgatacgccgttggatattgaagagatcagttataataataaccttgagaaactttttcttcatgaatga

SEQ ID NO: 40542 - protein, 125 aa, Unknown
  Obtained from environmental sample
  SIGNAL (1)...(21)
  misc_feature (1)..(125): Xaa is any amino acid
MKRGFFCITALFFFVSVSAFAQNVLFKPFTSFRVIQTDHFEIIFPKESESSARLLASFADRIYDNVSSLLGIKVHGRINVTFSPHTDLFNGFYDPFFNRIGLLDTPLDIEEISYNNNLEKLFLHE

SEQ ID NO: 40543 - DNA, 1176 bp, Unknown
  Obtained from environmental sample
  misc_feature (1)..(1176): n is a, c, g, or t
gtggatgtctgtcgcatttatgctgttatgcagtgtaggggcgagtattggggtttctcggcatttggggcaaatgatataaataaagctaaatcatatacgcatacaagcctgtttttatgcctggttttcggtttattatacacggcaacaatgcttttatttcgtcatcaattaataagtttttttaattttaaagaagaagatgtaaaaaaatttgcggaggattacttatccatcgtatccgtatcaataactcttacctttttgtccgcgacgatgggagcggtttttacggcgtcaggcaattcccgaacgccgtttttatgtaatatagttggtacatccataaatatggtacttgaccctatttttatatttcctctcaaacttggcgtattaggggcggcttacgcgacaataattggacaaataattgctttcacgatgtttattgtttttattaaaataagcaagaaacgtccttttgaaaaaataaaattatttactgtcccaaaatggaatgatattgtatggattattaagaagacattgccggtaggagctgaaagttttctgtttacatttcttgtaatggcaacaacaaggcgtgaagctttttttggatctgacgcaattgcgttaagccgtataggttcacaaatagaatcacttacatggttggtcggcggcgcttttggaaccgcattggtttcgttcataggacaaaattatggcgcaaaaaaatgggatcgcatcagcgcaacatttaagacagcttcgttaattatgtttttttatggcgcttttgttacgtttgtattggcggtacctggcaagtatttatttggattgtttttgcctgatcctgtgttaatagagcgtagtgttttataccttcgtattatggcaatatgtcaaataccgctgtgtctggaagccgtatcaagtaattccttccgtggcttaggcaatacgctttcacccgctattataaacacgatctgcaatattttacgagtgccatttgtttatattctatcaatggaaatatttgggtttggtttaataggaatttgggttggcatttcattaagtgcatgcatgaaaagtatttggtcatacacctggtatttaattactgaacgaaaaagaaaaaatgtacaaaatatataa

SEQ ID NO: 40544 - protein, 391 aa, Unknown
  Obtained from environmental sample
  DOMAIN (186)...(346): MatE
  misc_feature (1)..(391): Xaa is any amino acid
MDVCRIYAVMQCRGEYWGFSAFGANDINKAKSYTHTSLFLCLVFGLLYTATMLLFRHQLISFFNFKEEDVKKFAEDYLSIVSVSITLTFLSATMGAVFTASGNSRTPFLCNIVGTSINMVLDPIFIFPLKLGVLGAAYATIIGQIIAFTMFIVFIKISKKRPFEKIKLFTVPKWNDIVWIIKKTLPVGAESFLFTFLVMATTRREAFFGSDAIALSRIGSQIESLTWLVGGAFGTALVSFIGQNYGAKKWDRISATFKTASLIMFFYGAFVTFVLAVPGKYLFGLFLPDPVLIERSVLYLRIMAICQIPLCLEAVSSNSFRGLGNTLSPAIINTICNILRVPFVYILSMEIFGFGLIGIWVGISLSACMKSIWSYTWYLITERKRKNVQNI

SEQ ID NO: 40545 - DNA, 582 bp, Unknown
  Obtained from environmental sample
  misc_feature (1)..(582): n is a, c, g, or t
ttgttcggaaacttcagtttcagaacaactctaatagaggcgaggaaaatgaagagtgatataaagatagcgatttcgggaagaagcggctgcggaaatacaaccgtcagtaaaatgaccgcggacgccctgagcttgcgttgtatcaattttacgttccgaaaccttgcgcaggaacgcggaatggagcttaaagaagtactgcagcttgcgttaaaggacgaatcatgggacagggaagttgacacccggcaagtggcgcttgcccgcgaagacggcggctgcgtgcttggttcgcgtcttgcgatatggatgcttaaagaagccgatgtaaaggttttcctttacgccgaggctgaaataagggccgcgcgcatcgtaaacagggaaggcggccagttggaagaagttgccgcttttaccgacaaacgcgacaggcaggaccacgagcgttatctgggcctttataatattgataccgatgattacagttttgcggatttaataatgataccgggaaaacatacgccggaagaaattacggacttgattgtcaaaaaagcgcaaacaatagtagaataa

SEQ ID NO: 40546 - protein, 193 aa, Unknown
  Obtained from environmental sample
  DOMAIN (41)...(172): Cytidylate kinase
  misc_feature (1)..(193): Xaa is any amino acid
MFGNFSFRTTLIEARKMKSDIKIAISGRSGCGNTTVSKMTADALSLRCINFTFRNLAQERGMELKEVLQLALKDESWDREVDTRQVALAREDGGCVLGSRLAIWMLKEADVKVFLYAEAEIRAARIVNREGGQLEEVAAFTDKRDRQDHERYLGLYNIDTDDYSFADLIMIPGKHTPEEITDLIVKKAQTIVE

SEQ ID NO: 40547 - DNA, 687 bp, Unknown
  Obtained from environmental sample
  misc_feature (1)..(687): n is a, c, g, or t
gtgaaagtttccatccgtatgcgggaacagaacacgcctgtaaacataagcgtaaacacaaacgcgccaaaggcgttttataacgcgataaacaaacttgcggacgaattaaaccttgaagaaaagtgcggtctttccgccttgttaagaatggaaaatgtgctcgagatagaaaagaaccgcgacgaggagcgttattggaaggaaatagagcccttgttaaacgaggcggttcaggcgtttgagaaagaacgaaatcgggaagggaaacacacagaggaggatattttctcaaatcttgaaataattgtttcctcggtaaaaagtatttcggcgcttgcccccgtaatagagaataccttaaaagaaaatataaagacccgttttgcggaactgttgggcgacaaggttgatgaaaaccgcgtgcttgccgaaacggcgtcgctcctgttaaagtatacgatatccgaggaaatatcgcgtcttaactcccacctttcggaattcaaggcggaggcggagaggaatcaaaaaccgggcaaaaaacttgattttttatgtcaggaaattaacagggaaattaatactatcggctcaaaaagtattataatagaagtaagcgccgaagtagtcaaaatgaaggaagcgctggaaaatatcagggaacagttgaggaatattgaatag

SEQ ID NO: 40548 - protein, 228 aa, Unknown
  Obtained from environmental sample
  DOMAIN (1)...(95): YicC-like family, N-terminal region
  misc_feature (1)..(228): Xaa is any amino acid
MKVSIRMREQNTPVNISVNTNAPKAFYNAINKLADELNLEEKCGLSALLRMENVLEIEKNRDEERYWKEIEPLLNEAVQAFEKERNREGKHTEEDIFSNLEIIVSSVKSISALAPVIENTLKENIKTRFAELLGDKVDENRVLAETASLLLKYTISEEISRLNSHLSEFKAEAERNQKPGKKLDFLCQEINREINTIGSKSIIIEVSAEVVKMKEALENIREQLRNIE

SEQ ID NO: 40549 - DNA, 1716 bp, Unknown
  Obtained from environmental sample
  misc_feature (1)..(1716): n is a, c, g, or t
ttggacgagatattcgttctggacgtgtcgcccaagcagattatttcggtatccgcctcgctgattcctttcctggaacatgacgacgccaaccgcgcccttatgggctcgaacatgcagcgtcaggcggtgcctctggtgttccccgaagcgcccagggtcggcacagggatggaggcaaaatgcgcctacgattccggcgtgcttgtcaaggcttgcagaagcgggaccgtattgcgcgtaacatccggcgagatcgtcataaagccggataagcccggccccttaaaatctttgtcgcaggttcttatagacgagcagggaaatgatatttataaactggtgaaattccagcgcaccaatcaggacacctgctataaccagaggccgattatcaaggtgggagaaaaaatcacagccgggcaggtaatcgccgacggccccgccaccgagaacggggagcttgccctgggcaggaatatactcgtgggctttatgccctggaacggttacaactacgaagattcaatccttatctccgagcgcgtggtcaaggaagatatgtttacctctatccatataaaggaatttataaccgaagttagggagaccaagctgggaccggaaaaaattaccgatgagattccgaatacatccgagaagagtctggacaacctggacaaggaaggcattatccgcgtcggcgcgagagtccgctccggcgacatactcgtaggaaaggtaacgccaaaaagcgagaccgagaccacgccggaatttanacttcttaattcgatcttcggagagaaagccaaggaagtgcgtgattcttccctcaggctgccgcacggtgttgagggaacggtgattgacatacagaggctcaaacggacagaaggggacgatctcagccccggcgttgacgaagtggtaaaggtgcttatcgccacaaagcgcaagctccgcgagggcgacaaaatggccgggcggcatggcaacaagggcgttgtggcgcgcatacttccggaggaggatatgccctacatggaagacggcaccccgcttgatatttgccttacccccttaggcgttccttcccgtatgaatataggccagcttctggaaaccgaacttggctgggcaggctcaaccctggacgaatggtattcatcgcctgttttccagtccccttctaccgagcagattgaagaaaaactcaaagatgccggtctgcccgtaaccagcaagaccatgctccgcgacggcaggacaggcgaatattttgtaaacccgattttttgcggggtgatttacttcctcaaactccatcaccttgtggatgacaaaatgcacgctcgcagcactggcccctattcgctggttacccagcagccccttggcggcaaggcacagttcggcggccagcgccttggcgagatggaggtctgggctttggaagcatacggcgcggcgcatacacttcaggagctgctgacgatcaagtcggatgacatgacagggcgctcaaaaatttacgaggccattgtaaaaggagagccttccaccacggcgggcatacctgaatcgtttaacgtactggtgcaggaactgagggggcttgcgctggatcttgccatatttgacaacaacagcaaacaaattcctcttaccgagaaagacgaagagcttatagccaagtcgaagagtaatttctaa

SEQ ID NO: 40550 - protein, 571 aa, Unknown
  Obtained from environmental sample
  DOMAIN (473)...(549): RNA polymerase Rpb2, domain 7
  misc_feature (1)..(571): Xaa is any amino acid
MDEIFVLDVSPKQIISVSASLIPFLEHDDANRALMGSNMQRQAVPLVFPEAPRVGTGMEAKCAYDSGVLVKACRSGTVLRVTSGEIVIKPDKPGPLKSLSQVLIDEQGNDIYKLVKFQRTNQDTCYNQRPIIKVGEKITAGQVIADGPATENGELALGRNILVGFMPWNGYNYEDSILISERVVKEDMFTSIHIKEFITEVRETKLGPEKITDEIPNTSEKSLDNLDKEGIIRVGARVRSGDILVGKVTPKSETETTPEFXLLNSIFGEKAKEVRDSSLRLPHGVEGTVIDIQRLKRTEGDDLSPGVDEVVKVLIATKRKLREGDKMAGRHGNKGVVARILPEEDMPYMEDGTPLDICLTPLGVPSRMNIGQLLETELGWAGSTLDEWYSSPVFQSPSTEQIEEKLKDAGLPVTSKTMLRDGRTGEYFVNPIFCGVIYFLKLHHLVDDKMHARSTGPYSLVTQQPLGGKAQFGGQRLGEMEVWALEAYGAAHTLQELLTIKSDDMTGRSKIYEAIVKGEPSTTAGIPESFNVLVQELRGLALDLAIFDNNSKQIPLTEKDEELIAKSKSNF

SEQ ID NO: 40551 - DNA, 504 bp, Unknown
  Obtained from environmental sample
  misc_feature (1)..(504): n is a, c, g, or t
atgcgcgccacaacgcccttgttgccatgccgcccggccattttgtcgccctcgcggagcttgcgctttgtggcgataagcacctttaccacttcgtcaacgccggggctgagatcgtccccttctgtccgtttgagcctctgtatgtcaatcaccgttccctcaacaccgtgcggcagcctgagggaagaatcacgcacttccttggctttctctccgaagatcgaattaagaagtntaaattccggcgtggtctcggtctcgctttttggcgttacctttcctacgagtatgtcgccggagcggactctcgcgccgacgcggataatgccttccttgtccaggttgtccagactcttctcggatgtattcggaatctcatcggtaattttttccggtcccagcttggtctccctaacttcggttataaattcctttatatggatagaggtaaacatatcttccttgaccacgcgctcggagataaggattgaatcttcgtag

SEQ ID NO: 40552 - protein, 167 aa, Unknown
  Obtained from environmental sample
  misc_feature (1)..(167): Xaa is any amino acid
MRATTPLLPCRPAILSPSRSLRFVAISTFTTSSTPGLRSSPSVRLSLCMSITVPSTPCGSLREESRTSLAFSPKIELRSXNSGVVSVSLFGVTFPTSMSPERTLAPTRIMPSLSRLSRLFSDVFGISSVIFSGPSLVSLTSVINSFIWIEVNISSLTTRSEIRIESS

SEQ ID NO: 40553 - DNA, 807 bp, Unknown
  Obtained from environmental sample
  misc_feature (1)..(807): n is a, c, g, or t
atgggagaattaattaatattctgcctgttattcaaaaaaacaatatgaatgtaggcattccttctgttgcgactaacgtgcaggctaatattgacttttcaaacttccttgcgcaccttttccagcgcgacggccgtatgtacaatgaggacaactcaaggacgcttttggacaccgaagtcgccatagaagcttttgacgtttacacgaaatttttcacgcactataaaacgccggttgtttacgattttgtaaaccgtttccgtaccggtgaaatgccgcttgcgtttgcggattatacaaactttaatactctggaagtatttgcgccggagcttcgcggtctttggggcttctccataatgccgggactgcccagagcaaacggagaaattaatcgatctgtttcgacgggaactatggcggcaatgattttctcaaaagcgaaaaataaagaagctgcatggcagtttatgaaatggtggatcagcgcggatactcagcttaggtacgggcgtgagcttgaaagtataatgggagccgcggcgcggtatccgacggcgaattatgccgctttcaagcgtctttcatggggttccgaacaaatggctgttcttgacgcgcaacgcaagtggacagtaggagtgccggaagtgcccggcggatactttgtcagccgccatattacaaacgcggcgcgccgtattttaaacgaaggacaggacacaagagaaactttgttggactatactctcacgatcaacgatgagttgattaaaaaacgaaaagaatttggtttggaatag

SEQ ID NO: 40554 - protein, 268 aa, Unknown
  Obtained from environmental sample
  misc_feature (1)..(268): Xaa is any amino acid
MGELINILPVIQKNNMNVGIPSVATNVQANIDFSNFLAHLFQRDGRMYNEDNSRTLLDTEVAIEAFDVYTKFFTHYKTPVVYDFVNRFRTGEMPLAFADYTNFNTLEVFAPELRGLWGFSIMPGLPRANGEINRSVSTGTMAAMIFSKAKNKEAAWQFMKWWISADTQLRYGRELESIMGAAARYPTANYAAFKRLSWGSEQMAVLDAQRKWTVGVPEVPGGYFVSRHITNAARRILNEGQDTRETLLDYTLTINDELIKKRKEFGLE

SEQ ID NO: 40555 - DNA, 747 bp, Unknown
  Obtained from environmental sample
  misc_feature (1)..(747): n is a, c, g, or t
ttggtagacgatttaaccgcgtattcaggtgagcgcagcgcacaagcggccgcaacacttacacttgcgcgtcagcttgaactttttgtcaggcgtcccgataaaattccgcgtacccttacaaactttaaagccaacataagttctcttggagacagtatgctggcgctttcccagtctcagcttgacgtagattttattttattaacttccgccgacgcaaaactgccgaagataagggataacttctttgtcgcggcatcgcacgaaatccgctcttttctgtcttcgttctttgtagattataacaatttgggcgacgtgtaccgtaacggcaacaacgttattgatgtgtggatgctcgccggacgcgatcaaagcaccattcttaaagcaatgatagacgacacttttacgcaaaaaaccggaatcagggtaaatgtaaaacttgtcgcggcggacgcggtactgccggcggttgtcgcgggtactgggcctgatatggcgcttaccgttcctcagggcgatcccatgaactacgctattcgtaaagctgtcgtggatgtttcccaattccccgattatgaggaagtaataaaagaattaaacccaagcgttgtagttccttttacttacgcgggcggcgtgtggggtcttcccgagacgcagtactaccatgtaatgttctaccggaaagatattcttgaagaacttaatattcagcttcccgatacatgggagaattaa

SEQ ID NO: 40556 - protein, 248 aa, Unknown
  Obtained from environmental sample
  misc_feature (1)..(248): Xaa is any amino acid
MVDDLTAYSGERSAQAAATLTLARQLELFVRRPDKIPRTLTNFKANISSLGDSMLALSQSQLDVDFILLTSADAKLPKIRDNFFVAASHEIRSFLSSFFVDYNNLGDVYRNGNNVIDVWMLAGRDQSTILKAMIDDTFTQKTGIRVNVKLVAADAVLPAVVAGTGPDMALTVPQGDPMNYAIRKAVVDVSQFPDYEEVIKELNPSVVVPFTYAGGVWGLPETQYYHVMFYRKDILEELNIQLPDTWEN

SEQ ID NO: 40557 - DNA, 798 bp, Unknown
  Obtained from environmental sample
  misc_feature (1)..(798): n is a, c, g, or t
atgacattgcgtaaaaagcccgccctgtttccgctgtatttgggttttatcctcgttataatgtacattccgattcttctggtgattgtctattcatttaaccaaagccgcctttcctcggtgtggggcggatttacgctctcctggtacgcggagctgttccgggatcgcgccatgttcgacagcctgagaaccagcctgatcctcggccttctggcaagcgggctgtccgcggccctgggaaccctggccgcttccggtatggctaaaattcgcctaacggataagggcgcgggcgctcacagggttatggaatatttatctattctccccatcatgacgccggagatcatcatggggatggtttttctcgcgtttttctcgctcctgtcgctgccattgggaatgaccagcgtggtgatagcccatacggctttttgcgtcccctatccctacctgctgttgcgggccaggcttgccggccttgacaagggctatgtggaagccgccaggatattgggtgcatcggatctgagggcgttttacgacattaccctgcccctgatgcttccggccgtcgtttcagggatgttaatttcatttgccatgagtttagacgatgtgattgtcagttattttgtcgccggcgtggacaccaacaccatgccgatgattatttattcccgtctcaaggcgggagtgacccccaagaccaacgccatgtgcagtctgcttattgtccttaccgtcattctgtgtgttacggcggcagtttcttgccaggaggaaaacagttag

SEQ ID NO: 40558 - protein, 265 aa, Unknown
  Obtained from environmental sample
  DOMAIN (63)...(264): Binding-protein-dependent transport system inner membrane component
  misc_feature (1)..(265): Xaa is any amino acid
MTLRKKPALFPLYLGFILVIMYIPILLVIVYSFNQSRLSSVWGGFTLSWYAELFRDRAMFDSLRTSLILGLLASGLSAALGTLAASGMAKIRLTDKGAGAHRVMEYLSILPIMTPEIIMGMVFLAFFSLLSLPLGMTSVVIAHTAFCVPYPYLLLRARLAGLDKGYVEAARILGASDLRAFYDITLPLMLPAVVSGMLISFAMSLDDVIVSYFVAGVDTNTMPMIIYSRLKAGVTPKTNAMCSLLIVLTVILCVTAAVSCQEENS

SEQ ID NO: 40559 - DNA, 867 bp, Unknown
  Obtained from environmental sample
  misc_feature (1)..(867): n is a, c, g, or t
atgatgaagtttttcgctggcaaaaaacagggctggctggcccttgcccccctgtacatttttacccttgcctttgtccttggccccctgatttacatgattgcgttgagttttatgcggcggctgggctcctggggcatagaggctgcgctcaacctgggcaattaccggcgtattctggaacccgtataccttgaaaccttcaaacagtcgatcaagctggcgctgatcagtaccgttacggtaaccatcgcaggctatccgttcggttattttatggcccgcctggcgccgcgccgctggcgcaacagggtaatgatccttcttattatacccttctggacaaacgcgctgatgcggctgtacggctggattattatgtttagggcaaacggcatccttgacgcaatattgattggtttgcgcataacgaaagaacctctgcggctgctgtacacctatccggctgttgttaccggcatgatctacgccctgctgccgtttatgatctactcggtgtacgccagcgcggagaaaatggatcgttctctggtggaagcggcgcgtgttctgggagccgggcgtttgcgcgccttcctcaccgtcaccctgccgctgacaatgccgggcctattctccggcgttattctcactttcatcccgtcaatgggcctttatttcatcgccgacatactcggcggtaacaaggtggtgctggtgggaaacctgatccgcgagcaggtgatgaacgtgcacaacctgcctttcgcggctgccctcagtgttacgcttatggttctgaccagcctgttcctgtacttgtaccgcctcgccgcccgcaccggtgagatcgaggggctgatatga

SEQ ID NO: 40560 - protein, 288 aa, Unknown
  Obtained from environmental sample
  DOMAIN (68)...(283): Binding-protein-dependent transport system inner membrane component
  misc_feature (1)..(288): Xaa is any amino acid
MMKFFAGKKQGWLALAPLYIFTLAFVLGPLIYMIALSFMRRLGSWGIEAALNLGNYRRILEPVYLETFKQSIKLALISTVTVTIAGYPFGYFMARLAPRRWRNRVMILLIIPFWTNALMRLYGWIIMFRANGILDAILIGLRITKEPLRLLYTYPAVVTGMIYALLPFMIYSVYASAEKMDRSLVEAARVLGAGRLRAFLTVTLPLTMPGLFSGVILTFIPSMGLYFIADILGGNKVVLVGNLIREQVMNVHNLPFAAALSVTLMVLTSLFLYLYRLAARTGEIEGLI

SEQ ID NO: 40561 - DNA, 912 bp, Unknown
  Obtained from environmental sample
  misc_feature (1)..(912): n is a, c, g, or t
atggaagaaggacagtttagaagtttcattccgataatgcacggctgcgataatttctgctcttattgtattgtcccgtatgtgaggggcagggaagtctctcgtgatcctcaaaatatcgccgaagaaatccgtcttgtcggcgaaaagggagtgcgggaagttactctgcttgggcagaatgtaaacagttatttttggaaagatgaaaaaacggatttttcagcgctccttaaatataccgccgcgcaggctgaaaaaagcggtgtaaagcggatacgtttcctttcggcgaacccccgtaatttttcttatgaggcggttaaggtaatggcggaaaatcccgtcttctgccggcatctgcacctgcctgtccagcacggctcggacagcgtgctaaaggcgatgaaccgcggctactcggcggaacaatttttcgatttagtcggggaaatccgctcccgaatgcctgaaatcaccctttcaaccgacattctcgtgggttttcccggcgagacggaagaagatgtcgaaaaaacccttaacttaatggagaaggtgaagttcctctattcatatatgtaccattacaacccccgtgaggggactaaggccttcgatatgcctgataaaatcgacgagaaggtaaaaaaggaaaggctttcccgtgtgatcgctttacagaagaaacataccgcagagcttttaaaaagcaggattggaaggacggaagttgtacttgtagaggggatttcacgaaaaaatgccgatgaattaataacaaggactgaaaaagacgaaatggttgtagttcccgggtcaaagtcattaatcggctcattcgccaggcttactctttcatctttaaagggaaatacattcagagcgaaggaggctttcagtttatcatga

SEQ ID NO: 40562 - protein, 303 aa, Unknown
  Obtained from environmental sample
  DOMAIN (237)...(301): TRAM domain
  misc_feature (1)..(303): Xaa is any amino acid
MEEGQFRSFIPIMHGCDNFCSYCIVPYVRGREVSRDPQNIAEEIRLVGEKGVREVTLLGQNVNSYFWKDEKTDFSALLKYTAAQAEKSGVKRIRFLSANPRNFSYEAVKVMAENPVFCRHLHLPVQHGSDSVLKAMNRGYSAEQFFDLVGEIRSRMPEITLSTDILVGFPGETEEDVEKTLNLMEKVKFLYSYMYHYNPREGTKAFDMPDKIDEKVKKERLSRVIALQKKHTAELLKSRIGRTEVVLVEGISRKNADELITRTEKDEMVVVPGSKSLIGSFARLTLSSLKGNTFRAKEAFSLS

SEQ ID NO: 40563 - DNA, 495 bp, Unknown
  Obtained from environmental sample
  misc_feature (1)..(495): n is a, c, g, or t
atgctgccctgccgaggcgataccgccatgctggaaaaggttttcgcgcccctgggttataaagtcgaatgggaaagcggccttctggacgaccgttttcccgaatggggtgacagctgttatgtgaatttaactgtcagcggaaaagtacggctgcaggatcttctgcggcatatctatgtgttgattccggtttttgattaccgcaaacattactggataaatgacaaagaggttgacaagctccttgctcacggctcgggctggctggaaaaccacccggaaaaaaattttattacaaggcgttatttcgcgaggcttggtcattttacaaagcaggcccttatacgccttaaccgaattgataacggcgaaagcggcgcggaaagtcccttaaacgaagtcgaacaggaaacagagccgctcatacccgccntaatgatcagcgcatgcttgccgtattgggcgattgaggcagcggcgctaaatcggtaa

SEQ ID NO: 40564 - protein, 164 aa, Unknown
  Obtained from environmental sample
  misc_feature (1)..(164): Xaa is any amino acid
MLPCRGDTAMLEKVFAPLGYKVEWESGLLDDRFPEWGDSCYVNLTVSGKVRLQDLLRHIYVLIPVFDYRKHYWINDKEVDKLLAHGSGWLENHPEKNFITRRYFARLGHFTKQALIRLNRIDNGESGAESPLNEVEQETEPLIPAXMISACLPYWAIEAAALNR

SEQ ID NO: 40565 - DNA, 582 bp, Unknown
  Obtained from environmental sample
  misc_feature (1)..(582): n is a, c, g, or t
atgggctgcggcgaaggcaatttattgcggcttctgataaaggaaaaggacattgccgctatcgctggaacggatgtatccgccgccgtgctgaaccgggccgcagaaaggcttggcattgaacgccttggagagaaacaaaaaaaccgcatcgccctgtttcaaagctcgcttttttgcagggataaacgttttagaaattacgatgccgccgcgatagtggaagtaattgaacatctggatgaaaaccgcctgtcttcttttgcgtcggttgttttcggcgatacggcattttccattgttatcatcaccacgcccaatgtcgattacaacgaaaactatacttggctaaaggccggtagttttcgccacggcgaccaccgctttgaatggaaccgggatcaattccgcgtttgggcagattctgtcgccgcccgctacggttacactgttcgctatgaagacataggcgaacaggacgaagagcatagaacgccgagtcaaatggctgtgttcaaaaaaaacgccgcccaagagacaactctgccagagccgaatgcggtgaccggggttgccccatga

SEQ ID NO: 40566 - protein, 193 aa, Unknown
  Obtained from environmental sample
  misc_feature (1)..(193): Xaa is any amino acid
MGCGEGNLLRLLIKEKDIAAIAGTDVSAAVLNRAAERLGIERLGEKQKNRIALFQSSLFCRDKRFRNYDAAAIVEVIEHLDENRLSSFASVVFGDTAFSIVIITTPNVDYNENYTWLKAGSFRHGDHRFEWNRDQFRVWADSVAARYGYTVRYEDIGEQDEEHRTPSQMAVFKKNAAQETTLPEPNAVTGVAP

SEQ ID NO: 40567 - DNA, 435 bp, Unknown
  Obtained from environmental sample
  misc_feature (1)..(435): n is a, c, g, or t
gtggtaattatgtgtcctgagccgcagatgctctcaatctacatggacggggaacttccttccccatggaaggaaaaaatggaagcgcatttggctgaatgtcccgaatgcgcccaaaggtataaaaatttccgtcatcttcaggaaatgttcaagaaaaacaaccgtcaaagccggacttatgtggaaagcgacggggagcttaggccgacagcgccggatcaggcgctgccggaacaggatatcgaatccgcaaaagaaaaagtctggcaaaaaatggcgtcaagacggcgtttctgccgcaaaaatttatggggttacaggctttcaattcccctgcccgccgttgcggcggccgcggcggttatccttgtnaattctaccgtgctttttatccgcgggcgggacttactgcccgcagaccccggcttctaa

SEQ ID NO: 40568 - protein, 144 aa, Unknown
  Obtained from environmental sample
  misc_feature (1)..(144): Xaa is any amino acid
MVIMCPEPQMLSIYMDGELPSPWKEKMEAHLAECPECAQRYKNFRHLQEMFKKNNRQSRTYVESDGELRPTAPDQALPEQDIESAKEKVWQKMASRRRFCRKNLWGYRLSIPLPAVAAAAAVILVNSTVLFIRGRDLLPADPGF

SEQ ID NO: 40569 - DNA, 735 bp, Unknown
  Obtained from environmental sample
  misc_feature (1)..(735): n is a, c, g, or t
atgccgcgtccgataccgcgccgaaaaacgctgatgttacaaaaacggaacatgactaaaaaaaattttaccgcccttgtattatctgttctgtttgtgtcatgtaattataaaatcccggttatatcatcaatcgacccaaaaatagggaacatgggcgatgttatcacgctaagagggcgcaatttcggcgcggcgagagagggggcgtttgtaagcatcgcgggcataacgcctaccaactcatcttattatacatggcaggatgatctgattatcttaaaaataccggaatcaggcgattcggggcttgtttatgtgtatgtgaaaggcagaagaagcaacggagtccttttttccaattcagcgtcagtgccaaggcttattgaaggcgaagatacaggcatggagccgaaaatcaccatagtaagcccgcagacaggcgtgccgggaacattagtcgctattacgggacaaaacttcggggcgtcaaaagaaggctcgggagttttcttttcatgggattacgcggcgctttcaattaatccttacgctgcggcggagccggaatatatcgaagtttctgaaatagaattcggctatgaaacatggaacgcgcgcgaaatacgcgtccgcctgccggacggcgccgtcagcggcagtcttaaaataaaaacacctaacggggaatcgcggcctgttttctttgaccgttgcgggcaacccggggtataa

SEQ ID NO: 40570 - protein, 244 aa, Unknown
  Obtained from environmental sample
  DOMAIN (40)...(122): IPT/TIG domain
  misc_feature (1)..(244): Xaa is any amino acid
MPRPIPRRKTLMLQKRNMTKKNFTALVLSVLFVSCNYKIPVISSIDPKIGNMGDVITLRGRNFGAAREGAFVSIAGITPTNSSYYTWQDDLIILKIPESGDSGLVYVYVKGRRSNGVLFSNSASVPRLIEGEDTGMEPKITIVSPQTGVPGTLVAITGQNFGASKEGSGVFFSWDYAALSINPYAAAEPEYIEVSEIEFGYETWNAREIRVRLPDGAVSGSLKIKTPNGESRPVFFDRCGQPGV

SEQ ID NO: 40571 - DNA, 603 bp, Unknown
  Obtained from environmental sample
  misc_feature (1)..(603): n is a, c, g, or t
atggcaaaaataaagctcaccaagaatgagcagaaaaagcagaaagacagcctcaagaggttccagcgctacctcccgaccctgatgttgaaaaaacagcagcttcaagcagaaatccgtctggtagataatcatatggtagagatgctggcattaaaagagcagagagaggccagttttaaaaagtggattgccgttttcggcgaagatggtgtgtttacccaagatatgctgcggatcaccaaattggtggccggagaaggaaacgtcgccggtgtatccattcctgtttttgaaggcgccgagtttgaagtaagcgattatgacatcgtagcaaaacccctctggattgatatagcggtggatagcatgaaaaaagctctcctcctggatttggaactgcgctgccttgaagaacaacagcgccgcctgaggaaggaactccaaaccaccagtcagcgggttaacctatttgaaaagatcaaaatccccgaagccaaggccaacataaaaaagattgccgtgtatttaggagatcagcaaaccgctgctgttgtgcggggtaaaatttccaaacggggcatggagagggcaggatcgtga

SEQ ID NO: 40572 - protein, 200 aa, Unknown
  Obtained from environmental sample
  DOMAIN (2)...(196): ATP synthase subunit D
  misc_feature (1)..(200): Xaa is any amino acid
MAKIKLTKNEQKKQKDSLKRFQRYLPTLMLKKQQLQAEIRLVDNHMVEMLALKEQREASFKKWIAVFGEDGVFTQDMLRITKLVAGEGNVAGVSIPVFEGAEFEVSDYDIVAKPLWIDIAVDSMKKALLLDLELRCLEEQQRRLRKELQTTSQRVNLFEKIKIPEAKANIKKIAVYLGDQQTAAVVRGKISKRGMERAGS

SEQ ID NO: 40573 - DNA, 1296 bp, Unknown
  Obtained from environmental sample
  misc_feature (1)..(1296): n is a, c, g, or t
atgaaaaagatttacagcaagatagaatcgataaccggtaacgttattaccgtccgcgcggagggagtccgttacggagacctggcgaaaatcgatacgagcttcggcgcttccctcgcggaagtgaaccgcctggcaggggatttggtatccctgcaggtatttgccgggggccgtggtatttcgaccggcgacaccattgaattcctgggccatcctatggaggtttccttttcggaaaaccttctgggccgggtctttaacggttccggatctcctcgggataacgggcccagcctggaagagaacctcatccccataggcggcccttcggttaaccctgcccagcgtattatccctcgcaagatgatccgcaccggtatccccatgatcgatctttttaacaccctggttgtttcccaaaagctcccgattttctcaatttccggagagccatacaacgagcttcttgcccgtatcgctatgcaggccgaagttgacgtaatcattttgggcggcatgggcttaaaattcgacgattacctttactttaaagacaccctggaacagggcggctccctttccaagacggtcatgtttgtgcataccgcggccgacccgaccgtagaatgcctgatgatcccggacataagcctggccgtggccgagcagttcgccctgcagaacaaggacgtgctggtactccttaccgatatgacgagctttgccgacgcgatgaaggaaattgccatttcccaggaacaggtacccagtaaccgcggctaccccggcgatctctacagccagctcgcctcccgttacgaaaaggccgttgactttgaaacggcaggttccatcaccgttctgggtgtaaccaccatgcccggcgacgacgttacccacccggtgccggacaataccggttacatcacggaaggccagtactacctgcgcggcgggcgtatcgagcccttcggttccctttcccgccttaagcagcaggtgaacggaaagacccgcaaggatcatcgcgcacttatggacggtatgataaagctctactcggcttacaaagacacgctggaaaagaaatccatgggctttaatatgagcgcctgggacgggaagctgctccagtacggcgagcgttttgaaaaggaaatgatggatctttccgtaaacattcctctggaaagggcccttgatttgggctgggaaattctggcggactgttttaaaagcgatgaaaccgggctccgttcagagctcatcaacgagttctggcctaaaaaatag

SEQ ID NO: 40574 - protein, 431 aa, Unknown
  Obtained from environmental sample
  DOMAIN (8)...(71): ATP synthase alpha/beta family, beta-barrel domain
  misc_feature (1)..(431): Xaa is any amino acid
MKKIYSKIESITGNVITVRAEGVRYGDLAKIDTSFGASLAEVNRLAGDLVSLQVFAGGRGISTGDTIEFLGHPMEVSFSENLLGRVFNGSGSPRDNGPSLEENLIPIGGPSVNPAQRIIPRKMIRTGIPMIDLFNTLVVSQKLPIFSISGEPYNELLARIAMQAEVDVIILGGMGLKFDDYLYFKDTLEQGGSLSKTVMFVHTAADPTVECLMIPDISLAVAEQFALQNKDVLVLLTDMTSFADAMKEIAISQEQVPSNRGYPGDLYSQLASRYEKAVDFETAGSITVLGVTTMPGDDVTHPVPDNTGYITEGQYYLRGGRIEPFGSLSRLKQQVNGKTRKDHRALMDGMIKLYSAYKDTLEKKSMGFNMSAWDGKLLQYGERFEKEMMDLSVNIPLERALDLGWEILADCFKSDETGLRSELINEFWPKK

SEQ ID NO: 40575 - DNA, 1317 bp, Unknown
  Obtained from environmental sample
  misc_feature (1)..(1317): n is a, c, g, or t
gtgattctggagcttgcgcggctctactacgacgcgggcgactaccgcgccgccgctcagaactacgataaagccaacaactccatgctgacggccgaagacctgtactcttgggcggtctctttggagaacaacaaggccgactccaaggccgttgtggaagcctacgaagccgccgtcaagaagttcggaagttctacgtccccaagcgctctcgcggcgcgtgagaagctcgggcgcgcgcatttggcccgcaagtcgttcagggacgccgagtcggcgctcgcgccgctcaaccgcaccgatccggacggtaaggtcgtgccggacatagcgctcctcatggctcaggtaaacgaggggctgggcaatcccaacgcggccatcaatttctatgagaaggcgatagccaaggacaagaacaacgtggaggcctacgcccgtttggctgatctttacgcgaaagcggggcagtcggagaaggcgaacgccacgcagaagaaactcgtctcgctcgatccgaacaacccgaagatacacctctcgctcggcgagtaccatctgaagagccagaagtacagcgaggcgctcaacagttttcagcgcagcttcaccctccaagccaccgccgaggcggccgtgggtatgatgaacgccgcgtggaacctcaaacgctacgacctcgcccgcgacgccgccgaatcggcgttgcatagggatccgtcgctcaaggacccgcaacttatgctcgtcaagatatacatgtccgagaagaactacctcgcggcccgcggcgtgctgctcccgttgctgaaaacggagaccaacgacttaggtctgtggaaggacctcgccgagtgcagcgaaaagacgggcgacgcgcaagtccttgccgatgccgacaaacgtatcatcgctcttgaccctaagaacgtcccgtcgcgtatccgcgtggcaaaggccgccgagaagtccggcgacctcaagaccgcctacgacgcgttaaaagatctcgccaacctgcagccgaaggacgccgacatacagaagagcctctacgaaatcgccacaaagcagaagaatacaacggcggcctccacccacctcaaggcgcttctgaccttgcggcccaacgacgccgaagggcatagggagctgggcaacatgcagtttacctccggcgacatgagcggcgcgctcgcatcctataggtcggcggtcaaggccgacccgaacattaaggggatgtaccagaactacgcaactatacttatgaagaacaggcgcccgctaatgagattatgccggtgctcatag

SEQ ID NO: 40576 - protein, 438 aa, Unknown
  Obtained from environmental sample
  DOMAIN (380)...(413): Tetratricopeptide repeat
  misc_feature (1)..(438): Xaa is any amino acid
MILELARLYYDAGDYRAAAQNYDKANNSMLTAEDLYSWAVSLENNKADSKAVVEAYEAAVKKFGSSTSPSALAAREKLGRAHLARKSFRDAESALAPLNRTDPDGKVVPDIALLMAQVNEGLGNPNAAINFYEKAIAKDKNNVEAYARLADLYAKAGQSEKANATQKKLVSLDPNNPKIHLSLGEYHLKSQKYSEALNSFQRSFTLQATAEAAVGMMNAAWNLKRYDLARDAAESALHRDPSLKDPQLMLVKIYMSEKNYLAARGVLLPLLKTETNDLGLWKDLAECSEKTGDAQVLADADKRIIALDPKNVPSRIRVAKAAEKSGDLKTAYDALKDLANLQPKDADIQKSLYEIATKQKNTTAASTHLKALLTLRPNDAEGHRELGNMQFTSGDMSGALASYRSAVKADPNIKGMYQNYATILMKNRRPLMRLCRCS

SEQ ID NO: 40577 - DNA, 354 bp, Unknown
  Obtained from environmental sample
  misc_feature (1)..(354): n is a, c, g, or t
atgcttagcccaaagagaacaaaacatcgcaaaatgatgaaaggccgaatgaaaggcatagctaccactggcgattatatcgcttttggcgactttggcattcaggctcttgagcagtgctggctcaccgctcgccaaatagaggcagcacgtatttgcatgactcgcaaaataaaaagaggcggcaaggtttggattcgcgtgtttccagataaacccgtttctaaaaagcccgctaaacccgtatgggtaaaggcaagggcgcaccggaattttgggcggctgtggtgctgcctggcagaatattgtttgagatgggaggagttgaaaaaactcttgctttggaggcattaa

SEQ ID NO: 40578 - protein, 117 aa, Unknown
  Obtained from environmental sample
  DOMAIN (1)...(113): Ribosomal protein L16
  misc_feature (1)..(117): Xaa is any amino acid
MLSPKRTKHRKMMKGRMKGIATTGDYIAFGDFGIQALEQCWLTARQIEAARICMTRKIKRGGKVWIRVFPDKPVSKKPAKPVWVKARAHRNFGRLWCCLAEYCLRWEELKKLLLWRH

SEQ ID NO: 40579 - DNA, 468 bp, Unknown
  Obtained from environmental sample
  misc_feature (1)..(468): n is a, c, g, or t
ttgattcacaccgctcgccctggcgtaataataggtcgcaaaggtgaggttgtggatggtttaaaagaagaattgaagatagtgaccaaaaaagacgttcatattgagataatagaaattaagcgcggcgaaacagatgccaaattggtagcagaaaatatcgctcgtcaattggaaaagcgtgtaacaggccgccgtgccatgaagcgcgccattcaaaacgcaatgcgttttggagttgagggcattcgtattcaaattggtggtcgtcttggcggagcggaaattgccagggtagaaaaatacgcagagggcagagttccgcttcacacccttcgcgcagatattgattatgcaactgcaacagcgaaaactctttacggcacaaatggcgtaaaagtttggattatgcacggtgaaaaacttcgcaagggagatttttcttccaacgaaccaaaaaggatttaa

SEQ ID NO: 40580 - protein, 155 aa, Unknown
  Obtained from environmental sample
  DOMAIN (1)...(51): KH domain
  misc_feature (1)..(155): Xaa is any amino acid
MIHTARPGVIIGRKGEVVDGLKEELKIVTKKDVHIEIIEIKRGETDAKLVAENIARQLEKRVTGRRAMKRAIQNAMRFGVEGIRIQIGGRLGGAEIARVEKYAEGRVPLHTLRADIDYATATAKTLYGTNGVKVWIMHGEKLRKGDFSSNEPKRI

SEQ ID NO: 40581 - DNA, 411 bp, Unknown
  Obtained from environmental sample
  misc_feature (1)..(411): n is a, c, g, or t
ttggtacccaaaaacgggcccttcacgtttaccgccagcatcatgtcaaggttttctaccttcattgtttcgacaggctcgcggatatttatcccggcgttgtttaccaaaatgtcaagccgaccggcttcctgcagcaccgccgccatcgcgtctatccagctctgttcattggcaacatccaggcttagaaaggatgccttgccgcccttcccgcaaatttccgccgcggtcgcttttcccgcttccgctttaaggtcgccgatgaaaacccgcgccccttcttccgcaaaacgccgcgccattgccgcgcccagcccttgcgcagccccgcttattaacgccgtttttcccgcaagcctcatctccgccccctatttccgcacttcaatttgcgcgagcttttcatag

SEQ ID NO: 40582 - protein, 136 aa, Unknown
  Obtained from environmental sample
  misc_feature (1)..(136): Xaa is any amino acid
MVPKNGPFTFTASIMSRFSTFIVSTGSRIFIPALFTKMSSRPASCSTAAIASIQLCSLATSRLRKDALPPFPQISAAVAFPASALRSPMKTRAPSSAKRRAIAAPSPCAAPLINAVFPASLISAPYFRTSICASFS

SEQ ID NO: 40583 - DNA, 438 bp, Unknown
  Obtained from environmental sample
  misc_feature (1)..(438): n is a, c, g, or t
ttggaaaagatgggggcttcggttgtattaaccgggaacgtaggcgccggaaacgtaacgaagctcgcgaatcagattatagtagcgctaaacatcgccgccgtttcggaggcctttgtgctggcggcaaaatccggcgttgaccctgtaaaggtttttgacgcgattaaaggcgggcttgcgggttcaaccgtgatgaacgcgaaggtgcctatgatccttgacggcaacttcaagcccggcttccgtatcgagcttcacgtaaaagatttgcagaacgccctggacaccgggcacaaagtgaacgcgccgcttccccttacggcaaacgtaatggaaacgctgcaggcgctcaccgttgacggcatggggaaaaacgatcacagcgccattgtccgtttctatgaaaagctcgcgcaaattgaagtgcggaaatag

SEQ ID NO: 40584 - protein, 145 aa, Unknown
  Obtained from environmental sample
  misc_feature (1)..(145): Xaa is any amino acid
MEKMGASVVLTGNVGAGNVTKLANQIIVALNIAAVSEAFVLAAKSGVDPVKVFDAIKGGLAGSTVMNAKVPMILDGNFKPGFRIELHVKDLQNALDTGHKVNAPLPLTANVMETLQALTVDGMGKNDHSAIVRFYEKLAQIEVRK

SEQ ID NO: 40585 - DNA, 474 bp, Unknown
  Obtained from environmental sample
  misc_feature (1)..(474): n is a, c, g, or t
atgaatattggatttatcggactcggaattatgggccgcccaatggccaaaaacttaatcaaagcaggttataagctggtcgtgtttgacaagttcgccaaatctgacgaccttgttgcccttggtgctgagggagcttcgtcaagcaaagaggtcgcgtcaaaaagcgacgtggttattaccatgctacccaactcgccacatgtaaaggatgcgattttgggagaaggcggcgttcttgaaggcagcaaaagcgggcagattgtagtggatatgagttccatcgctccggctgtctcccaggaaattggggcggccctcaaagccaaaggcgtggagttccttgacgcctctgtttcaggcggcgagcccaaggcggttgacgggacgttggcaatcatggcaggcggcgatcagaaaactttcgacacggcaaagccggtttggaaaagatgggggcttcggttgtattaa

SEQ ID NO: 40586 - protein, 157 aa, Unknown
  Obtained from environmental sample
  DOMAIN (1)...(157): NAD binding domain of 6-phosphogluconate dehydrogenase
  misc_feature (1)..(157): Xaa is any amino acid
MNIGFIGLGIMGRPMAKNLIKAGYKLVVFDKFAKSDDLVALGAEGASSSKEVASKSDVVITMLPNSPHVKDAILGEGGVLEGSKSGQIVVDMSSIAPAVSQEIGAALKAKGVEFLDASVSGGEPKAVDGTLAIMAGGDQKTFDTAKPVWKRWGLRLY

SEQ ID NO: 40587 - DNA, 432 bp, Unknown
  Obtained from environmental sample
  misc_feature (1)..(432): n is a, c, g, or t
ttgtcagattggccgagccagatcgtgaaaatgtaccctataaccgaaggaagcgacgcggttgtttttgccacaggcgttatggtgagtaaggccgttgaagccgccgaaaaactgaaaagcgaaggcatctcggcacaggtggtgaatgtcagtacgctcaagcccctgttaaaagaagaggccttaaaatacgcctcggggaaaaaggcaatcgtcaccgccgaggaagcggtgaaatcaggcggcctgggcgctgccattgcggccctgctctttggcgaaatcaatgttccgttcaggcaggttgccatagacgacatctttggaacatcggctcattcttatgaggaacttttgaccgaatacaggatcagcgccgccgacatatacaacgcggtaaaaaacgcattaacgcaaaggaaggtataa

SEQ ID NO: 40588 - protein, 143 aa, Unknown
  Obtained from environmental sample
  DOMAIN (6)...(130): Transketolase, C-terminal domain
  misc_feature (1)..(143): Xaa is any amino acid
MSDWPSQIVKMYPITEGSDAVVFATGVMVSKAVEAAEKLKSEGISAQVVNVSTLKPLLKEEALKYASGKKAIVTAEEAVKSGGLGAAIAALLFGEINVPFRQVAIDDIFGTSAHSYEELLTEYRISAADIYNAVKNALTQRKV

SEQ ID NO: 40589 - DNA, 609 bp, Unknown
  Obtained from environmental sample
  misc_feature (1)..(609): n is a, c, g, or t
atggaattgaatacggaatttattgaacagcttaaagtaaacgaagtagagctaatgaagcgcattgcggaagggctcaacatcaagacggggcaggtttcttcggtcgttggtctcattgccgacggaagcaccgtgccatttatcgccaggtaccggaaggaagtaacaggcagtcttgacgaggttcaagtcagggacatcgatcatctttttaaaggcgggatgaatctggagaccaggcgcatcgaaattatccggctgatttttgagcagggaaaacttaccgaagctttatacggaaatattgtaaaggcggcttcccttgcagagctggaggatatttacgccccttacaagaaaaagaaaaaaacaaggggaatgcttgccgtagaaaaaggcctggggccgctggcagaagccatgaagaccctggaagcccccgccctgctggcctttgcggcggagttcatagttggcgaaggcgatcccaggattgcggagcacccggaactggcagtcgccacgaaagaagacgctttgcagggggcgatggacattatcgcggaagcggttttcacaagatacggaaaaccgcgcgcaaattaa

SEQ ID NO: 40590 - protein, 202 aa, Unknown
  Obtained from environmental sample
  misc_feature (1)..(202): Xaa is any amino acid
MELNTEFIEQLKVNEVELMKRIAEGLNIKTGQVSSVVGLIADGSTVPFIARYRKEVTGSLDEVQVRDIDHLFKGGMNLETRRIEIIRLIFEQGKLTEALYGNIVKAASLAELEDIYAPYKKKKKTRGMLAVEKGLGPLAEAMKTLEAPALLAFAAEFIVGEGDPRIAEHPELAVATKEDALQGAMDIIAEAVFTRYGKPRAN

SEQ ID NO: 40591 - DNA, 1320 bp, Unknown
  Obtained from environmental sample
  misc_feature (1)..(1320): n is a, c, g, or t
gtgcatactgcggacgacatggggttggaaaaccgtccagtcaatagcgtctatatgcgggtaaagggagaaaagctgttaaaaaacggctgtcttgtcgtagcgccggcggccctcctttccaactgggaaaatgaactgggacgttttgccccttcgctgaaaatttcccgttatcaccgaagccgccgcgtactcgacagaaaacgcgacgtgtttctaaccacctaccaaaccgcggtgcgcgacgcggaaaagctcaaggcagaagccttttccctgcttgtcatagacgaagcccaccttatgaaaaacgccgatacccgcatatcgcgcacggtaaaacagcttcgttcacaataccgccttgccctttccggcactcccgtcgaaaaccgccttgaagacctgcgttccctttttgactttatcctgcccggttatcttggaaacgccgatcaattcaggaaccagtaccgcatacccattgaagttatgcgaaaccgtgaaaaggctgaatccctgaaaaaaattacctctcctttcctgttaagaaggcttaaaacagacaagaagatcatcaaggacttgcctgaaaaaattgttaccaatgaatacgccgtactggaaaaagaacaggccgccctgtacgaaaacatcgtttccgaatccataaaaaaatcggcaagagcggaagccaaagaacgctccgcgttgattcttgaaatgctcacttccctaaagcagatatgcgatcatcctcgcgtgtttgacaaggaaagtcccgccgtcccggaactttccggaaaatcgcagcttcttgttactctgctccaggaaattctcgcgaaccgcgaaaaagttctggttttcagccaatatgttgagactcttgaatgcctgcggctgatcattaaaaaagaacttggcgaggccgcgcttgtctaccacggcgggcttgggcagaatacccgcacaagccttgtcgaacagtttcagaatgatacggcggcgcggataatgctggtaagtttaagagcgggaggactgggcctgaatcttacggccgcgagtcgcgttatccattatgacctgtggtacaatcccgcggttgaaaatcaggcgacagaccgcgccttccgcatagggcagaaacgcaacgtgtttgttcacaggtttataactaaaaacagcttcgaggaaaaaatcgacgccatgatttcaagcaaacgcgaattagccgacatgaccgtaagttccggggaatcatggcttgcgcggatgagccatgaggaattgaaagctctgtttgagcggtaa

SEQ ID NO: 40592 - protein, 439 aa, Unknown
  Obtained from environmental sample
  DOMAIN (305)...(383): Helicase conserved C-terminal domain
  misc_feature (1)..(439): Xaa is any amino acid
MHTADDMGLENRPVNSVYMRVKGEKLLKNGCLVVAPAALLSNWENELGRFAPSLKISRYHRSRRVLDRKRDVFLTTYQTAVRDAEKLKAEAFSLLVIDEAHLMKNADTRISRTVKQLRSQYRLALSGTPVENRLEDLRSLFDFILPGYLGNADQFRNQYRIPIEVMRNREKAESLKKITSPFLLRRLKTDKKIIKDLPEKIVTNEYAVLEKEQAALYENIVSESIKKSARAEAKERSALILEMLTSLKQICDHPRVFDKESPAVPELSGKSQLLVTLLQEILANREKVLVFSQYVETLECLRLIIKKELGEAALVYHGGLGQNTRTSLVEQFQNDTAARIMLVSLRAGGLGLNLTAASRVIHYDLWYNPAVENQATDRAFRIGQKRNVFVHRFITKNSFEEKIDAMISSKRELADMTVSSGESWLARMSHEELKALFER

SEQ ID NO: 40593 - DNA, 498 bp, Unknown
  Obtained from environmental sample
  misc_feature (1)..(498): n is a, c, g, or t
atgataatagcgatagacggccctgccggttccggcaagagttccacggccaaggccgtggcggcgcgtttaggcgccgtctacctagacaccggggcgatgtaccgcgccgtcaccctaaaggcgctgcggctgggcatagcgttcacagacgacgacgctctggccgccgttatgcgggagacggagataacgttcgagggcgcgccgcccgacacgcgcgtcataatggacggagaggacgtgagcgagccggtgcgctccgacgaggtgaccaaaaacgtctccgactactgcgccagggatgcggtaaggaagtctttagtcgaccaacagagaaagatagcgtccggctgttccgtcgtctgcgaggggcgggacatctgcaccgtggtcttcccaaacgccgacgtcaaaatatacatgaccgcgtcaacggaagagagggcgaaacgccgtcaaaaagacttcgcggccatgggtataaacaaatcgtag

SEQ ID NO: 40594 - protein, 165 aa, Unknown
  Obtained from environmental sample
  DOMAIN (56)...(163): Cytidylate kinase
  misc_feature (1)..(165): Xaa is any amino acid
MIIAIDGPAGSGKSSTAKAVAARLGAVYLDTGAMYRAVTLKALRLGIAFTDDDALAAVMRETEITFEGAPPDTRVIMDGEDVSEPVRSDEVTKNVSDYCARDAVRKSLVDQQRKIASGCSVVCEGRDICTVVFPNADVKIYMTASTEERAKRRQKDFAAMGINKS

SEQ ID NO: 40595 - DNA, 813 bp, Unknown
  Obtained from environmental sample
  misc_feature (1)..(813): n is a, c, g, or t
gtggtccgtgtgtttcgtggtaaatttttctcttttttattttttataacattaatatccctttcttcctgttcaaagcttgggtacggggttttactgtggtcaacagaagaccccgttattttgtcaggaaccgtgcttccggtatatataaagtcaaacattgatcaggtgtgggtcgtcggcgttcccgaatcaagcagaaatgataaaaaaaacaaaatcgaaatcccactttctcagcttgactttgcgggcagcaaaaaaaaagcaaaagcgcgagctgaggaatttgcccaatatgcgccggcctatgccgaaaatttacaggacggactgcccattcgtgatgaccccgataacggcgcgcggcgtatatacaagttaagaacgggagaaataataaaaatccttgacaaggttgaaggaaacccgcctataagcatgagcggagatcctttgcccggcgactggtacaaagtactgacgcagaacggcattacagggttctgtttttcctacagattgaaattttttaatcattatgtggggccaattcaggccgttcacggagtacgaattgaaaccgcacccgatcctgatcttgatatggttctatcaagaaaatggtcgtccgaatcatatttacagatgataaatacaaggcggataaacataaacgaacttcaaaaaaattaccgctttgatcctggtcaggatacaggtatagcgaaaattatacttcccgatacggaaatggaatttgtctacgatgtaataactcccgacggagaacgcgcatggcgtttttga

SEQ ID NO: 40596 - protein, 270 aa, Unknown
  Obtained from environmental sample
  SIGNAL (1)...(28)
  misc_feature (1)..(270): Xaa is any amino acid
MVRVFRGKFFSFLFFITLISLSSCSKLGYGVLLWSTEDPVILSGTVLPVYIKSNIDQVWVVGVPESSRNDKKNKIEIPLSQLDFAGSKKKAKARAEEFAQYAPAYAENLQDGLPIRDDPDNGARRIYKLRTGEIIKILDKVEGNPPISMSGDPLPGDWYKVLTQNGITGFCFSYRLKFFNHYVGPIQAVHGVRIETAPDPDLDMVLSRKWSSESYLQMINTRRININELQKNYRFDPGQDTGIAKIILPDTEMEFVYDVITPDGERAWRF

SEQ ID NO: 40597 - DNA, 1746 bp, Unknown
  Obtained from environmental sample
  misc_feature (1)..(1746): n is a, c, g, or t
atgtcagatcggccgagagggaccgcggcccttgcggaatgttactacgaattgggcgaatttgacgaagccttaaactgggtgcggaaagcgagggttttggcgcggggtaatacctccatcataaatctggaagccgtcacccttatagccttgggcaggctggacgcagccgcgtcggtaatatcggatctgcttgcccgcgagccgtataaccgcgaagccctgtttaccgcgggggaattggacattgcaaggggcagaacctccgaggccctgctccgataccgcgacgcgtcgcgccgttaccctgacgacaagcggctgcttatatcgcttgcgctggtcgcgggctctcttggcgacaatgaaggctctctttcttttataaaccgggcgcttgcccagcatcccgatgaataccgggtcttttactttgccgcctatgtcaacgccaatgtgaacaatatgagccaggctatccgctatgcggagatggcccttaacctcaggcccggcttcagcccggcaagatccctgctcgctaaactccgcttccgcaacggccaattcgccgaagcggcgcgtctgtccgatgaggcgattacagctaaccgcgaagatctttcggcctggtatcttaaagggctttcctatgtacggcttgggcgcggcgaggattcccttaccgtgttcggcaacgctctcgccattgatcccaacgatgaattcgtccgcgtggcgcttgaggatactcttatttccattaccacccttgaggacccgcgccggaccacctgggccaaatggcattttgaccgcgccagagacttccgttcccgcagccttgtggatcagtcgctttttgaatacaggcgcggccttcgccttaacccttacgccgtggatcgccgcgaatacgccgacctgctccgactgcagggctacccggcgcgttatcttgaagaactccgccttctgcaggatcagggaatctccgaccgcagcatgaatgacgcggtggaaacttacaattcactgctttcaggcgcgctgtttcagcgctggcaggttagaccggtcgagattgacgggcggcattggaaagtcgccgtattttcaatcgccggccaatccagctaccggcattcggacgcgggggcgattgcatcctcatatataaaggaaattttaatacacgaccgttccattatccccatgaacctggaagtcaaacagccttcgttctcgcaggcgttcaggacagcaagggaagcaaacgccgatttcttcctgatcgtttccacgatggaaaacgagcgcgacatatcccttaagggagaattattcgtcggcaggacaggatcggccgcggcgtctttttacacctaccgcacaggcgcggacaggctgcgcaacgcgtcgcggggcattgttgatcaattggggaacgccctgcccctgaggggaaaacttatccagcggcgtcaggcgcagggccttatagacaagggccgcgccgacaaggtcaaggaaagcgccgtatatgatattgttaaaaaggaaaaatcccagcttgcgaaccaggggattggccttgtttattcgcccgaggatctggtgggaaaaattacaatcgagaatgtcgatgaggaaatagcttccggaaaacttgcgcgtaacgggttctttgaccgcatagaggagggcgacgatgttttcttcatccccgaaggcgggctatag

SEQ ID NO: 40598 - protein, 581 aa, Unknown
  Obtained from environmental sample
  DOMAIN (5)...(30): Tetratricopeptide repeat
  misc_feature (1)..(581): Xaa is any amino acid
MSDRPRGTAALAECYYELGEFDEALNWVRKARVLARGNTSIINLEAVTLIALGRLDAAASVISDLLAREPYNREALFTAGELDIARGRTSEALLRYRDASRRYPDDKRLLISLALVAGSLGDNEGSLSFINRALAQHPDEYRVFYFAAYVNANVNNMSQAIRYAEMALNLRPGFSPARSLLAKLRFRNGQFAEAARLSDEAITANREDLSAWYLKGLSYVRLGRGEDSLTVFGNALAIDPNDEFVRVALEDTLISITTLEDPRRTTWAKWHFDRARDFRSRSLVDQSLFEYRRGLRLNPYAVDRREYADLLRLQGYPARYLEELRLLQDQGISDRSMNDAVETYNSLLSGALFQRWQVRPVEIDGRHWKVAVFSIAGQSSYRHSDAGAIASSYIKEILIHDRSIIPMNLEVKQPSFSQAFRTAREANADFFLIVSTMENERDISLKGELFVGRTGSAAASFYTYRTGADRLRNASRGIVDQLGNALPLRGKLIQRRQAQGLIDKGRADKVKESAVYDIVKKEKSQLANQGIGLVYSPEDLVGKITIENVDEEIASGKLARNGFFDRIEEGDDVFFIPEGGL

SEQ ID NO: 40599 - DNA, 999 bp, Unknown
  Obtained from environmental sample
  misc_feature (1)..(999): n is a, c, g, or t
atgcaaaatgatcataaccagcggcgttttaagcgcactgcgcaccgcgctgcgcgacgagttccgcgcaaggatggcgaacatcgacgcgaagcccatctggaaggacttggcgacaaccatcacgtccagcaccaagagcaacacctacggctggcttggggccttcccccagctgcggaaatgggtcggcgaccgcgtcgtaaaagacatagcggaattcgcctaccagattaccaacgaaaagttcgagtccacccttggggtcgaccgcaccgacatcgaagacgacagccttggccagtacagggtattggcgcgggaaatggccgacgagtacgaacggttcatgaaccgcagcgtggcggcccttatctcaggcggctttaccaacctctgctacgacgggcagaaattcttcgacaccgcacatcctgtttacccgaatacggacggcaccggcgaagcggcggaagtttccaacatcgtcggaaacggaaacggctccccctgggctctggtttccctttccggcagcctcaagccgtttatcgcccagcagcgcagccagccggagttcgacgaaatcaccgacaccaaaaacgacacggtattcatgaaggacgtatatttgtacggcatccgctaccgcggcagcttcggctacggcctctggcagcaggcggtcggctcgaaggccccccttacggcggccaattacgaggcggcccgtcttgccatgcagtccctgaagcgggacggcggcgatcccctgggaatcgtgccgacccacttggtcgtcggcccggccaacgaggcggcggcccgcgcaatcctttcgagggagctcatcaacggcggcgagtccaaccccaactaccacacggcggaacttttgatagtctcgcagatttaaggagaggaagctatggaaaaagaaaaaccggacaaacaaacacccaacaagaaaaaaatttagaacaaaaaagctcgccataa

SEQ ID NO: 40600 - protein, 332 aa, Unknown
  Obtained from environmental sample
  misc_feature (1)..(332): Xaa is any amino acid
MQNDHNQRRFKRTAHRAARRVPRKDGEHRREAHLEGLGDNHHVQHQEQHLRLAWGLPPAAEMGRRPRRKRHSGIRLPDYQRKVRVHPWGRPHRHRRRQPWPVQGIGAGNGRRVRTVHEPQRGGPYLRRLYQPLLRRAEILRHRTSCLPEYGRHRRSGGSFQHRRKRKRLPLGSGFPFRQPQAVYRPAAQPAGVRRNHRHQKRHGIHEGRIFVRHPLPRQLRLRPLAAGGRLEGPPYGGQLRGGPSCHAVPEAGRRRSPGNRADPLGRRPGQRGGGPRNPFEGAHQRRRVQPQLPHGGTFDSLADLRRGSYGKRKTGQTNTQQEKNLEQKSSP

SEQ ID NO: 40601 - DNA, 909 bp, Unknown
  Obtained from environmental sample
  misc_feature (1)..(909): n is a, c, g, or t
atgatcataaccagcggcgttttaagcgcactgcgcaccgcgctgcgcgacgagttccgcgcaaggatggcgaacatcgacgcgaagcccatctggaaggacttggcgacaaccatcacgtccagcaccaagagcaacacctacggctggcttggggccttcccccagctgcggaaatgggtcggcgaccgcgtcgtaaaagacatagcggaattcgcctaccagattaccaacgaaaagttcgagtccacccttggggtcgaccgcaccgacatcgaagacgacagccttggccagtacagggtattggcgcgggaaatggccgacgagtacgaacggttcatgaaccgcagcgtggcggcccttatctcaggcggctttaccaacctctgctacgacgggcagaaattcttcgacaccgcacatcctgtttacccgaatacggacggcaccggcgaagcggcggaagtttccaacatcgtcggaaacggaaacggctccccctgggctctggtttccctttccggcagcctcaagccgtttatcgcccagcagcgcagccagccggagttcgacgaaatcaccgacaccaaaaacgacacggtattcatgaaggacgtatatttgtacggcatccgctaccgcggcagcttcggctacggcctctggcagcaggcggtcggctcgaaggccccccttacggcggccaattacgaggcggcccgtcttgccatgcagtccctgaagcgggacggcggcgatcccctgggaatcgtgccgacccacttggtcgtcggcccggccaacgaggcggcggcccgcgcaatcctttcgagggagctcatcaacggcggcgagtccaaccccaactaccacacggcggaacttttgatagtctcgcagatttaa

SEQ ID NO: 40602 - protein, 302 aa, Unknown
  Obtained from environmental sample
  misc_feature (1)..(302): Xaa is any amino acid
MIITSGVLSALRTALRDEFRARMANIDAKPIWKDLATTITSSTKSNTYGWLGAFPQLRKWVGDRVVKDIAEFAYQITNEKFESTLGVDRTDIEDDSLGQYRVLAREMADEYERFMNRSVAALISGGFTNLCYDGQKFFDTAHPVYPNTDGTGEAAEVSNIVGNGNGSPWALVSLSGSLKPFIAQQRSQPEFDEITDTKNDTVFMKDVYLYGIRYRGSFGYGLWQQAVGSKAPLTAANYEAARLAMQSLKRDGGDPLGIVPTHLVVGPANEAAARAILSRELINGGESNPNYHTAELLIVSQI

SEQ ID NO: 40603 - DNA, 831 bp, Unknown
  Obtained from environmental sample
  misc_feature (1)..(831): n is a, c, g, or t
atgaaaaacataaaagataaattgatattaattaccggaggagcgtccggtatcgggcagcttatggcgtttgcctttgccgaaaaaaaagctagggttgttatttgggacattaacggcggtgcgataaaagcaattgaagatacagcccgcgaaaaaaacctttttatacgcggaatggtctgcgatgtatcagacagaaacgctgtttacagtcaggcgcaaaaacttaccgcggaattcggtccgttggatgttcttgttaataacgccggaatcgtatcaaaaaaaggagagaatgtcacaggtccggctttcctcggcgttcccgatgaaaacataatcaaacttatgaacataaacacgctttctcttttctggacaagtaaagcgtttctgccttcaatgatcgaaaggaacagcggtcatattgttacggtttcttcggcggcgggaattatcggcgtaaggggattggcggattattgcgcctcaaaattttgcgccttcggttttgacgaatcgctgcgtatggaacttagacgcatgaaaagcgctgttaaaactaccgtagtatgccctttctttataaataccggaatgtttgacggagtaaaaacgcgtttccctcttcttttgccgattcttaaaaaagaatatgtcggaaaaaagattgtcaaagcggtattgaaaaataaaaaacggcttataatgccgcgttttgtatattcggtatatttacttagactccttcctcccggcatgatggacagtatcgccgacttttttggcataagccacgcaatggacgatttcaagggtagagaatga

SEQ ID NO: 40604 - protein, 276 aa, Unknown
  Obtained from environmental sample
  SIGNAL (1)...(27)
  DOMAIN (7)...(181): short chain dehydrogenase
  misc_feature (1)..(276): Xaa is any amino acid
MKNIKDKLILITGGASGIGQLMAFAFAEKKARVVIWDINGGAIKAIEDTAREKNLFIRGMVCDVSDRNAVYSQAQKLTAEFGPLDVLVNNAGIVSKKGENVTGPAFLGVPDENIIKLMNINTLSLFWTSKAFLPSMIERNSGHIVTVSSAAGIIGVRGLADYCASKFCAFGFDESLRMELRRMKSAVKTTVVCPFFINTGMFDGVKTRFPLLLPILKKEYVGKKIVKAVLKNKKRLIMPRFVYSVYLLRLLPPGMMDSIADFFGISHAMDDFKGRE

SEQ ID NO: 40605 - DNA, 906 bp, Unknown
  Obtained from environmental sample
  misc_feature (1)..(906): n is a, c, g, or t
atgacacataacgatattcatgagcttgtaaataaggcccgtaaagcccaaagtatttgggcggaactttcgtacagcgaaagagcgaggcgtataaaaaaagccggacactgccttgctgaaaaacgtgatgaagttacggaaataatccaccgcgaaaacggcaagctgaaaattgacgctcttgcggcggaagtaattccggcgctcatggcaattccctactatatcaaacaagggcggcgtctgtgcaagccgcaaaaaataagcggcggtaatatccttatggtttataaacaaagcctaatggtttataaaccctggggggtagttggtatcatctctccctggaattatcccttttcaattcccttctccgaagttatcatggcgcttcttgcaggtaacgcagtgattcttaaaacagcatcacttactcccggttcaggccgcataattgcggaaatactcaaggcggcgaatctgccggatgggctttttgtaaatgttgaaatggcagggagtgaagcaggtcccgcttttgttaatgggggaatagacaagctgttttttacaggctctacctctgttggcaaggagctgatgactcttgccgcccaaaggcttctccccctcactcttgaacttggcggcgctgacgccgcgataatccgcaaagacgccgatattgatcgcgctgtggcgggaattatctgggcaggtttttcaaatgccgggcaatcctgcggcggagtacagcgggttttggttcatcgtgatattcacgataaatttttggaaaaattaaaaacaaaggtggaggctcttcagccggggaatgacgtttcttccgatcatggaccgcttattgccaaaagcaaaaggaaaaagtcccgcagcagatag

SEQ ID NO: 40606 - protein, 301 aa, Unknown
  Obtained from environmental sample
  DOMAIN (3)...(301): Aldehyde dehydrogenase family
  misc_feature (1)..(301): Xaa is any amino acid
MTHNDIHELVNKARKAQSIWAELSYSERARRIKKAGHCLAEKRDEVTEIIHRENGKLKIDALAAEVIPALMAIPYYIKQGRRLCKPQKISGGNILMVYKQSLMVYKPWGVVGIISPWNYPFSIPFSEVIMALLAGNAVILKTASLTPGSGRIIAEILKAANLPDGLFVNVEMAGSEAGPAFVNGGIDKLFFTGSTSVGKELMTLAAQRLLPLTLELGGADAAIIRKDADIDRAVAGIIWAGFSNAGQSCGGVQRVLVHRDIHDKFLEKLKTKVEALQPGNDVSSDHGPLIAKSKRKKSRSR

SEQ ID NO: 40607 - DNA, 444 bp, Unknown
  Obtained from environmental sample
  misc_feature (1)..(444): n is a, c, g, or t
gtgggcccgcaaggcgagcgccccgtggtgaaagtgaagataggctttgagaacttctacgtctatagcgcggtgtgcccggcgacgggggaggacttcacccttttcctgccatgggtcaacacgccgatgatgaacatgttcgtcgagcgcatgagcgccgccatgggcggccgcccctgcctcctggtcatggaccaggcgggctggcacagctccagggacctggagatgccgccgaacatcgagcccgtgtacctgccgccccactcgccggagctcaacccggtggagcgcctgtgggactggctgaagcgcaacaccatacgcaaccggttctttcagacgattgacgaggtcatggactcggtcggggagtgcatgaaggacgcgaccgcacctttcctgaaaagcatgtgcgggtgcaactatttattgcaatag

SEQ ID NO: 40608 - protein, 147 aa, Unknown
  Obtained from environmental sample
  misc_feature (1)..(147): Xaa is any amino acid
MGPQGERPVVKVKIGFENFYVYSAVCPATGEDFTLFLPWVNTPMMNMFVERMSAAMGGRPCLLVMDQAGWHSSRDLEMPPNIEPVYLPPHSPELNPVERLWDWLKRNTIRNRFFQTIDEVMDSVGECMKDATAPFLKSMCGCNYLLQ

SEQ ID NO: 40609 - DNA, 519 bp, Unknown
  Obtained from environmental sample
  misc_feature (1)..(519): n is a, c, g, or t
gtgtggaggtgggtcatgccagcgcggttgccaatcccggatagccgggtcgcagagcttgaggagtacaggaagaaaaagtgggagggcctggagcaccagcgcttcctgtgcgtgtggttccgggtgggcagcggcatgtcggccgtggagatagccggggtcctgggctgccacccggacacggtgaggtccatccagagggagttcatagccaggggcgccgtggtcttccgcgacgagaacaacggcgggaggcgcaaccagctgatgacggaggaggaggaggggcgcttcctggaaagtttcgcgaatgccgccaaggacgcatcgatgctgacggccggcacgataaaggccgcgctggaggaaaaggcgggacgggaggtgaacaagagcaccgtgtaccggatgctgaggcgccacaactggaggaaggtggtcccccgcccaaggcacccaaaacaggataggaaggccgcggacgccttcaaaaaaagggcttcgcggacagggtga

SEQ ID NO: 40610 - protein, 172 aa, Unknown
  Obtained from environmental sample
  misc_feature (1)..(172): Xaa is any amino acid
MWRWVMPARLPIPDSRVAELEEYRKKKWEGLEHQRFLCVWFRVGSGMSAVEIAGVLGCHPDTVRSIQREFIARGAVVFRDENNGGRRNQLMTEEEEGRFLESFANAAKDASMLTAGTIKAALEEKAGREVNKSTVYRMLRRHNWRKVVPRPRHPKQDRKAADAFKKRASRTG

SEQ ID NO: 40611 - DNA, 546 bp, Unknown
  Obtained from environmental sample
  misc_feature (1)..(546): n is a, c, g, or t
gtgaggaaggcagggaagaaagggcggccgctgcgcgtgatgttccaggacgaggccaggttcggccgtgtgagccgccccagggcctgctgggccccacggccggtccgccccgaagtgtcgggccagatggtgcgcgagtttgtctacgtgtttggggcggtgagccccgatgacggcaggcacgacagccttgtgctgccgtacgccgacaccggggccatgtcgacgttcctgaaggagatcggcggccggtatccaagtgagcacatactgatgttcatggaccaggccggctggcacaggtcgaagcatctgagggtccccggcaacatagagcttgcctacctgccgccgcactccccggagctgaacccgcaggagcaggtgtgggacgagctgagggagaagcacttcgggaacggctttttcaagagcatcaaggccgtggtggacaggctggtcgagggtctgcgcagcatcgagtcgtcgcccctcgcggttgccagcctgacccggagggattggatgtataaggtcaactga

SEQ ID NO: 40612 - protein, 181 aa, Unknown
  Obtained from environmental sample
  misc_feature (1)..(181): Xaa is any amino acid
MRKAGKKGRPLRVMFQDEARFGRVSRPRACWAPRPVRPEVSGQMVREFVYVFGAVSPDDGRHDSLVLPYADTGAMSTFLKEIGGRYPSEHILMFMDQAGWHRSKHLRVPGNIELAYLPPHSPELNPQEQVWDELREKHFGNGFFKSIKAVVDRLVEGLRSIESSPLAVASLTRRDWMYKVN

SEQ ID NO: 40613 - DNA, 1128 bp, Unknown
  Obtained from environmental sample
  misc_feature (1)..(1128): n is a, c, g, or t
atgaacaaggacatagtgaaggtactcactggcattagacggtgtgggaaatctgttatgcttgaacttataaaaatggatttgaaaaaacgaggcgtttctgttcgaaactttttatccataaattttgagtcaatgacacaaagttacacaagatccataaacgaaacttatgcctatatacagtcatttgcagaaaaacgcaaaaaaatatacctgtttttagatgaaattcaagaattgcagagttgggaaaaattggtgaattcttgcctaattgattttaaagcggatatttacataactggttcaaatgcaaaaatgctttcaggggagcttgcaacgtatttggcagggagatatgttgaaattcatatatatccattttctttttctgaagcaaagcttgcagggctagattcttttgaggaatatgtaaagaagggaggaatgccgtttttataccaaaattcaatggattggcattcttccaaattgtatttgagcgatatttattcttctgttcttttgaaagatattgttgagagatataatgttagagatgttgatttacttaaaaggctcttgcaattttttatagcaaatataggacattccttttctgccactagcgtattgaaatatttgaaaaatgaaaagcgaagcttgtctgctgagacaatatataattacattgactattgcaaaaatgcctgtttgttgtacttggttcacagaaaagatatttcaggaaaaaaaatgcttaaatttcaagaaaaaatttacattgcagaccacgggattagagaagctgtttatggaaataacacgaaagacattgagcaggttttggaaaacgtagtgtatatggaattgctccgtagaggctatgacgtttgcgttgggaaaatagaggagtttgaaatagattttgtagcatcaaaaggagcaaagcaaatttacattcaagtttgctatttgctagcttcaccagaaactatagaaagagaattttccccattgtttaaaataaaagacaatttcccgaaattagttatatcaacggataaatttgatatgagcagggaaggcatagttcacaggaatatagaggagtttttaacctag

SEQ ID NO: 40614 - protein, 375 aa, Unknown
  Obtained from environmental sample
  misc_feature (1)..(375): Xaa is any amino acid
MNKDIVKVLTGIRRCGKSVMLELIKMDLKKRGVSVRNFLSINFESMTQSYTRSINETYAYIQSFAEKRKKIYLFLDEIQELQSWEKLVNSCLIDFKADIYITGSNAKMLSGELATYLAGRYVEIHIYPFSFSEAKLAGLDSFEEYVKKGGMPFLYQNSMDWHSSKLYLSDIYSSVLLKDIVERYNVRDVDLLKRLLQFFIANIGHSFSATSVLKYLKNEKRSLSAETIYNYIDYCKNACLLYLVHRKDISGKKMLKFQEKIYIADHGIREAVYGNNTKDIEQVLENVVYMELLRRGYDVCVGKIEEFEIDFVASKGAKQIYIQVCYLLASPETIEREFSPLFKIKDNFPKLVISTDKFDMSREGIVHRNIEEFLT

SEQ ID NO: 40615 - DNA, 1062 bp, Unknown
  Obtained from environmental sample
  misc_feature (1)..(1062): n is a, c, g, or t
gtgggctcaactgcgataatgagtgataatttcgcgcttatttcaaaattggactatcaggaaatccatgtcaacgacatcctgcatataagagtaggattaattaaagaaacagcctatgcgtcaatgtttagaacatggtttcccgatcataaaaaaactgtggaatacgaaaattctaactccgcctttaacgcccttgaacgcggtgaaatcgatatggtaatggctaatttcagccagttgcttatgctgaccaattattatgaacggtcgggctacaaggcgaattttgtgtttgatttcgccattgaatccacttttgggtttaataaaaatgaagagattctgtgctccattgtggataaaacgctccgccttattgatacaaagggaatttcaggacaatggatgcgaaaaacttatgattacaacgcaaaacttgcaaggtctcagtttccgtggctaatcggcgcggcgattttgattttcttaatacttgtgctcttgtttgttctgattcaaaggaaaagcattatacaaaaatggcttgaaggcattatttataaacgcactaccgagatttatgaacagcataaacttgtaagtctggtaaacgacatcgcggttattctgctggaagcgaacgcgggagattattctgcctctataatcaagggtatggaaatgatcggccgttatgtaaaagtagaccgtgtgagcatttggcaaaacctcagtaacgaagaccgaaggctttattacaggcttgtatgccaatgggcgaataaaggactgcccaatttggacgcggatactgatttctcgtatgaggacaatatgccaaattgggaagttctcattaacaaaggaggatatgtaaacgatattatagacgacctgaccgagcctgagagaacaattttgtccacttataacattcaatcaatgcttgtgttcccgatttttttaaaggggcacctttggagatatatcatctttgacaattacaaaactaaacgtgttttccctgaaacggaattgttcatcctgcgctcatga

SEQ ID NO: 40616 - protein, 353 aa, Unknown
  Obtained from environmental sample
  misc_feature (1)..(353): Xaa is any amino acid
MGSTAIMSDNFALISKLDYQEIHVNDILHIRVGLIKETAYASMFRTWFPDHKKTVEYENSNSAFNALERGEIDMVMANFSQLLMLTNYYERSGYKANFVFDFAIESTFGFNKNEEILCSIVDKTLRLIDTKGISGQWMRKTYDYNAKLARSQFPWLIGAAILIFLILVLLFVLIQRKSIIQKWLEGIIYKRTTEIYEQHKLVSLVNDIAVILLEANAGDYSASIIKGMEMIGRYVKVDRVSIWQNLSNEDRRLYYRLVCQWANKGLPNLDADTDFSYEDNMPNWEVLINKGGYVNDIIDDLTEPERTILSTYNIQSMLVFPIFLKGHLWRYIIFDNYKTKRVFPETELFILRS

SEQ ID NO: 40617 - DNA, 936 bp, Unknown
  Obtained from environmental sample
  misc_feature (1)..(936): n is a, c, g, or t
atgacatcgaaagaaattacgtcaaaagaaacaacgtcaaaagaaggcggaaattcaaagttgaacaccgattcgccgcggaagcccggctcgcgcgggcggttcgccgacgtgtttgtaattcttatctgcgcgtcgggagcggcgttcagcttgaacctgttcaggctcgatctgttccaatcaatagcgtctttaaataaaaaacctgtggggaccgttaccgtcaaatacaacaacgtccagcgcagattttcggacggtacattatggggccgccttgccgtccaatcgcccgtgtaccccggcgaccttatccgcgtggcggaatattccgccgcgaccctcaacgtaaacgacgatataatcgatataaacgaaaattccctgatacgtatacacgctctcgttgacgatgaaggacgtgttgtaatcgatctcggttcgggaagtctgagcgtctcgggcggcggaaccggcgcggttaacggcggtgtagcgttaagaatcacgggtagcgtaatagcgccgaaagccggaacggtattgagcgcgtccgccggagaaaacggcgtgaccgtgcaggtgaacgggggaagcgcgctcattataaaggaagacggacgaagcggcgttctcgttatgggcgaaacattgactttggataccggcggtgtcgaacgggcggttcctctgcggtggttacgctgccgcgtccaaacgcacgcttcattaaaaataacgctgagcagtttaacgtccgctttgcatggaatacggcaaacatcgatcaaaaacaacgcttgcgtttggaaatatcagccgcccctaactttaagcgccttacgcaaacaattgaaggtgttgattctgccaactccgctcttggcgtggggacttggtattggagactgtcgtatcaaggtaccgttctga

SEQ ID NO: 40618 - protein, 311 aa, Unknown
  Obtained from environmental sample
  misc_feature (1)..(311): Xaa is any amino acid
MTSKEITSKETTSKEGGNSKLNTDSPRKPGSRGRFADVFVILICASGAAFSLNLFRLDLFQSIASLNKKPVGTVTVKYNNVQRRFSDGTLWGRLAVQSPVYPGDLIRVAEYSAATLNVNDDIIDINENSLIRIHALVDDEGRVVIDLGSGSLSVSGGGTGAVNGGVALRITGSVIAPKAGTVLSASAGENGVTVQVNGGSALIIKEDGRSGVLVMGETLTLDTGGVERAVPLRWLRCRVQTHASLKITLSSLTSALHGIRQTSIKNNACVWKYQPPLTLSALRKQLKVLILPTPLLAWGLGIGDCRIKVPF

SEQ ID NO: 40619 - DNA, 1158 bp, Unknown
  Obtained from environmental sample
  misc_feature (1)..(1158): n is a, c, g, or t
gtggttacgctgccgcgtccaaacgcacgcttcattaaaaataacgctgagcagtttaacgtccgctttgcatggaatacggcaaacatcgatcaaaaacaacgcttgcgtttggaaatatcagccgcccctaactttaagcgccttacgcaaacaattgaaggtgttgattctgccaactccgctcttggcgtggggacttggtattggagactgtcgtatcaaggtaccgttctgagcgccgggcaattcactattgtagacgcgactgtgtcattgttggtaagtccgattcaaaacagcctgttccgttgtaatgaaaatttgcccactgtccgttttgaatggcagccggtagaagaagcgtcatattatatcctgcaggccggtcttgcgccggacttatcggacattttaattacaagacagaccgctgtcgcttcttttgttgaatcggtcccacaagtgggaacatggtattggcaggtaaaacctgttttttcttccatatatgagggcaataccgtttactctcaggttgcgtctttcaagatagaacagatcgatgaacagatgactgcggttgcgggttccgttgccacgactgtgaacaacctcgaaagtacggtttcttcttccgcaactgcgcctgaatcggcggcagttgaaatgcggatttccccttcggttactatggtactgcctgaacttgcaccggaacaaaagccggaagcggtaaagacatcaggggcggctaataaagcgccatcggcggttttgcccgaagcgaaaaatcttctgcctgtcgcggaacagcggattcaattcgaggatttgcggaaaacgcgtaaaattgatttttcatggttacctgtaaaagaggccgacgcgtatatctttactctgtatcataagagcgacgacggaaaacggcggcgggtcgttcaaacggatccgcttaaaagaacaaattggactctgagtaaccttgcccttttggatcgaggaacttttatatggcatgttgaagcggtaaatataaacctcggcggtaaaattgaacggaggggcaacataacggaaaatacatttatcatagacattcctatttccggcgctccggagatagaagatataggagttatttatggctattaa

SEQ ID NO: 40620 - protein, 385 aa, Unknown
  Obtained from environmental sample
  misc_feature (1)..(385): Xaa is any amino acid
MVTLPRPNARFIKNNAEQFNVRFAWNTANIDQKQRLRLEISAAPNFKRLTQTIEGVDSANSALGVGTWYWRLSYQGTVLSAGQFTIVDATVSLLVSPIQNSLFRCNENLPTVRFEWQPVEEASYYILQAGLAPDLSDILITRQTAVASFVESVPQVGTWYWQVKPVFSSIYEGNTVYSQVASFKIEQIDEQMTAVAGSVATTVNNLESTVSSSATAPESAAVEMRISPSVTMVLPELAPEQKPEAVKTSGAANKAPSAVLPEAKNLLPVAEQRIQFEDLRKTRKIDFSWLPVKEADAYIFTLYHKSDDGKRRRVVQTDPLKRTNWTLSNLALLDRGTFIWHVEAVNINLGGKIERRGNITENTFIIDIPISGAPEIEDIGVIYGY

SEQ ID NO: 40621 - DNA, 642 bp, Unknown
  Obtained from environmental sample
  misc_feature (1)..(642): n is a, c, g, or t
ttgcaaggtctaaaaatatcaaaggaaaaccacccaaaagaatccgatatttgccacgcttttaaggttcaaaacataagctctttttacgaaagtctgggcaaaagcgaaattcctcttaaaaatgttttcaatttcttgaaacgatattcagacgattcttatgcttggcaaaagctcaaaatgttcaatgtgttcagctcggcagaggcccctataagcataggttacaacgaaagatttttgctcaattatgcctcgtgctgcaacccgctacctggtgataatgttaggggaattatgaaaagcggcaagggaatagagatacacaaagaaaattgcaaaattttgaataaatttccgcaaggacagcaaatatccctgcaatgggaacatcacaaccacgcaaaaccagcgttcaaatgcgttttcagggtagaagcggcaggcaaaatgcaaatgggagatattttcagtgcggtttcaaaacaccacgctcttgtgaaaaaaactatatttgagaacaaagaaggacagctaaggggcaaaatagacttgctcgcttttaattccgctcaggtgaagaacatagagcagtcgttaaaagccattgctggaattcaaaggataaaactgctatga

SEQ ID NO: 40622 - protein, 213 aa, Unknown
  Obtained from environmental sample
  misc_feature (1)..(213): Xaa is any amino acid
MQGLKISKENHPKESDICHAFKVQNISSFYESLGKSEIPLKNVFNFLKRYSDDSYAWQKLKMFNVFSSAEAPISIGYNERFLLNYASCCNPLPGDNVRGIMKSGKGIEIHKENCKILNKFPQGQQISLQWEHHNHAKPAFKCVFRVEAAGKMQMGDIFSAVSKHHALVKKTIFENKEGQLRGKIDLLAFNSAQVKNIEQSLKAIAGIQRIKLL

SEQ ID NO: 40623 - DNA, 861 bp, Unknown
  Obtained from environmental sample
  misc_feature (1)..(861): n is a, c, g, or t
ttgtttttgcgaacaaaagaatttataaaaaaaccttttctccttttgccggttttgctttttttcgcctgcgccggtttggagccgtcaaaggaaatacccggccctccggaagcaacaaccgaactccggcctgaacctgaaacagaaacaactgttgcgccccagacgcattacttaaccatcgtcgccgcgggggataaccttcttcacgatcccataatcagggccggttttgtaagcggcggttataattttgattccatatttgataaaatcaggggatatatacttcccgcggacattgcttttattaaccaggaaaccgtgctaattgataaaaatcttggttattccggctatccccggtttggctcgccaaaggagataggagacgccattgcggcggccgggttcaatatcgttaatcacgctaccaatcacatcatggataaaggcgaggcgggaattttgtcaagcatggatttttgggattcatatcaggacatacattatctgggcatacaccgcagcgaggaagaccgggcgaaacggcgggtaataatcagcaaaaataattttaaggttggttttctttcctacacttacggcactaacgggatccctctgcccagaggaaaatcctggcttgggtccatgataaaaaagggaaaaatggccgctgaaataaaggctctgcgcccccctttgcgattaccttgggggaaccactgcactgggggggaggaagaaccggctttaacccccagcaggggacaagggaaaaactttgccgcccttccccagccgaaaaacaggtgggaatgtgggtattgggccaccagtccccatgtgtcgtga

SEQ ID NO: 40624 - protein, 286 aa, Unknown
  Obtained from environmental sample
  SIGNAL (1)...(25)
  misc_feature (1)..(286): Xaa is any amino acid
MFLRTKEFIKKPFLLLPVLLFFACAGLEPSKEIPGPPEATTELRPEPETETTVAPQTHYLTIVAAGDNLLHDPIIRAGFVSGGYNFDSIFDKIRGYILPADIAFINQETVLIDKNLGYSGYPRFGSPKEIGDAIAAAGFNIVNHATNHIMDKGEAGILSSMDFWDSYQDIHYLGIHRSEEDRAKRRVIISKNNFKVGFLSYTYGTNGIPLPRGKSWLGSMIKKGKMAAEIKALRPPLRLPWGNHCTGGEEEPALTPSRGQGKNFAALPQPKNRWECGYWATSPHVS

SEQ ID NO: 40625 - DNA, 600 bp, Unknown
  Obtained from environmental sample
  misc_feature (1)..(600): n is a, c, g, or t
gtgattgaaaaagaaaaaatggaacgcgcaaggaaggccgccgggaacaagccactgttaaaactgctgcccatgaaaccgaaaaaatacggccttgtcattacaggaagcgaggttttccataaacggatacaggatacctttacccccgttattcagaagaaattggcggagtacggctgcgaaatgacatctcatgaaattgtagacgatgatcacgaaaaaatcaccatagcaattaacaatacgctggataaaggcgttgaaatggttttctgtaccggcggcatgagcgtggatcctgacgacaggacgcctttggcgattaagaacgccgcaaataacgttgtcagttacggcgctccggtactgcccggctcaatgttcatgctggcatacactgatgacaagaggccggtctgcgggcttcctggctgcgtgatgtacgcgcacagaaccattttcgatctggttctgccatatctgttggcggacgcgcctgtaagcgccgaatggctggcgggcctgggaaacggcggcttgtgccttgactgcgttgaatgtcatttccccaattgttctttcggaaaaggcgcgtaa

SEQ ID NO: 40626 - protein, 199 aa, Unknown
  Obtained from environmental sample
  DOMAIN (31)...(164): Probable molybdopterin binding domain
  misc_feature (1)..(199): Xaa is any amino acid
MIEKEKMERARKAAGNKPLLKLLPMKPKKYGLVITGSEVFHKRIQDTFTPVIQKKLAEYGCEMTSHEIVDDDHEKITIAINNTLDKGVEMVFCTGGMSVDPDDRTPLAIKNAANNVVSYGAPVLPGSMFMLAYTDDKRPVCGLPGCVMYAHRTIFDLVLPYLLADAPVSAEWLAGLGNGGLCLDCVECHFPNCSFGKGA

SEQ ID NO: 40627 - DNA, 711 bp, Unknown
  Obtained from environmental sample
  misc_feature (1)..(711): n is a, c, g, or t
atgtcatttccccaattgttctttcggaaaaggcgcgtaattatggactggtatcctttatggaactctgtgcgcatagcggctgtaagctgtattatcgtgtttttcctcgggttgtgttgcgcttactatatcgcgaaactgccgcgaatccttaaagggattcttgatgtgattctgacattgccgctggttctgccgcctacggttatgggctatctgttgttgcttgtttttggcgtaaaacgtccgttaggcgcttttttattgcaattcggaatcaaattcgtgatgacctggtacggcgggatcttgaccgcggccgtggcggcgttcccgctcatgtaccgcacggcgcggggcgcttttgaaagttttgacaatacattagcccacgccggccagacgctgggtcttccgaattcgtatatcttttggcgtatccgcatgccatattgccgtcaggggatactggcaggggtagtgcttgcgttcgcccgcgccatgggcgaatacggcgctacaagcatgttgatcggctatacgcccggcaagaccgcgaccatctccacaacagtatatcagatgtggcgtaccggcaatgacgcgggggcgcttggctgggtgttgattaatatcctgatatctatggccgtgctgttgggagtcaacctgctggaacgaaaaaattattataaggaaacgcgttga

SEQ ID NO: 40628 - protein, 236 aa, Unknown
  Obtained from environmental sample
  DOMAIN (20)...(236): Binding-protein-dependent transport system inner membrane component
  misc_feature (1)..(236): Xaa is any amino acid
MSFPQLFFRKRRVIMDWYPLWNSVRIAAVSCIIVFFLGLCCAYYIAKLPRILKGILDVILTLPLVLPPTVMGYLLLLVFGVKRPLGAFLLQFGIKFVMTWYGGILTAAVAAFPLMYRTARGAFESFDNTLAHAGQTLGLPNSYIFWRIRMPYCRQGILAGVVLAFARAMGEYGATSMLIGYTPGKTATISTTVYQMWRTGNDAGALGWVLINILISMAVLLGVNLLERKNYYKETR

SEQ ID NO: 40629 - DNA, 750 bp, Unknown
  Obtained from environmental sample
  misc_feature (1)..(750): n is a, c, g, or t
ttgatgcttactgtagatattcaaaaaaagcttggcgcgttcagcctgaatgtgtcgtttaacgcggctgaaggcgtgacggggattcttggcgcgtccggctgcggtaaaagcatgacgctccgctgtatcgccggcattgaaaagcccgatcaggggcgcataacgcttgacgacgcggtattgttcgacagcgaacagggaattaatttaaagccgcaggaacgcaaagtgggctatttgttccagaattacgcgctgtttcccaacatgactgttgaaaaaaatatactatgcggactgtatcatgagaaagacaggacgaaacgccggcaaatgttagacgacacgattcatctgctcaagctgggggggctggaaaagaacctgccgtcccagctttcaggcggccagcagcagcgcgccgcgctggcgcggattctggtaaacaagccggggctgttaatgcttgacgaaccgttttcggctctggacagccatntacgcgggcagcttcgaattcagatgaaaaaacttcttgaacaatacggcgactcgacacttatagtgacgcataacagcgacgaagcctgtgatttatgcggacggatagcgcttatggatgcgggggcaatcttgacgctaaagccaacgaaggaattgttcagggaaaaagtgactgtcacctacgagagaatagaggaaatggaagaggggaaaagaggaggttgtgatggcggaagaaactga

SEQ ID NO: 40630 - protein, 249 aa, Unknown
  Obtained from environmental sample
  DOMAIN (24)...(210): ABC transporter
  misc_feature (1)..(249): Xaa is any amino acid
MMLTVDIQKKLGAFSLNVSFNAAEGVTGILGASGCGKSMTLRCIAGIEKPDQGRITLDDAVLFDSEQGINLKPQERKVGYLFQNYALFPNMTVEKNILCGLYHEKDRTKRRQMLDDTIHLLKLGGLEKNLPSQLSGGQQQRAALARILVNKPGLLMLDEPFSALDSHXRGQLRIQMKKLLEQYGDSTLIVTHNSDEACDLCGRIALMDAGAILTLKPTKELFREKVTVTYERIEEMEEGKRGGCDGGRN

SEQ ID NO: 40631 - DNA, 528 bp, Unknown
  Obtained from environmental sample
  misc_feature (1)..(528): n is a, c, g, or t
atgcgtgactggaaaaaccgccaaatagaatttgatttaactattcggtctgaaagctcagtttatcaggatatagcgtccataataagggacgagctttcaaaaatcggcattaagattaacatccgcgttttggattttcaaaaacaggttcagcagttatttacaacatttgattgggattccatgctgatggggcttacgggggcaaatatatttccaagtcagggaagcaacgtttggccgtcatcgtctaacttgcatatgtggtttccaaatcaaacgtcgcccgctacggaatgggaagcgcgaattgattatctttacaacgagggcaaatttacaatagacgcgcaaaaagcgcaggagatttgggatgaatttcaatctataatgcttgaacaatgtcccatgatctacttaatgcgttcccgtggtttttgggcgttaaacaaccgttgggatttttcaaatgtttattttgacaatttaaacggcgctgaaacaaattttatttttattaaataa

SEQ ID NO: 40632 - protein, 175 aa, Unknown
  Obtained from environmental sample
  misc_feature (1)..(175): Xaa is any amino acid
MRDWKNRQIEFDLTIRSESSVYQDIASIIRDELSKIGIKINIRVLDFQKQVQQLFTTFDWDSMLMGLTGANIFPSQGSNVWPSSSNLHMWFPNQTSPATEWEARIDYLYNEGKFTIDAQKAQEIWDEFQSIMLEQCPMIYLMRSRGFWALNNRWDFSNVYFDNLNGAETNFIFIK

SEQ ID NO: 40633 - DNA, 513 bp, Unknown
  Obtained from environmental sample
  misc_feature (1)..(513): n is a, c, g, or t
atgattgcttcaatgtttcacgatcttggcatggcgatgggaaggcagaatcacgaatcgcacagtctggttctttccatgcctattattgacaaggttttagcccaagtatatcccgatgatttgaaaaaaagagtcatgatccgagcccttgcccttgaaggaatcgcgggacacatgggaaccataacaatttcttctctggaagcgggattaatacaggtagcggacggttgcgacatgaccaagggaagggcgcgtattccaatttctatttcttccaataacgcaaaagtagggcatattcatcaatattccgcaaattcaattgaatatgtagatattaccgcaggaggcgaaaaacctatccgcattgatgtaaatatgtccagcgaagtggggctttttcaggttgaagaagtactcatgcataaaatagcccaaagtaccgccaaacagtatattgaattatatgccaaggttggagaagacgcgccaaaaaggtatttataa

SEQ ID NO: 40634 - protein, 170 aa, Unknown
  Obtained from environmental sample
  misc_feature (1)..(170): Xaa is any amino acid
MIASMFHDLGMAMGRQNHESHSLVLSMPIIDKVLAQVYPDDLKKRVMIRALALEGIAGHMGTITISSLEAGLIQVADGCDMTKGRARIPISISSNNAKVGHIHQYSANSIEYVDITAGGEKPIRIDVNMSSEVGLFQVEEVLMHKIAQSTAKQYIELYAKVGEDAPKRYL

SEQ ID NO: 40635 - DNA, 735 bp, Unknown
  Obtained from environmental sample
  misc_feature (1)..(735): n is a, c, g, or t
ttgtgtgaaatcttggcacatagcgataaaagtaaaaagtcggcgagtaccagagctgtcattgcttccactactacaacagctcttgggacgatgcaaacatcatgtctgcctttaatcgttatttccttcacgccgccatccctgtctaaaactttttgcggcttgctgattgaaggcgttggtttgaatgccgctctaaaaacaatgtcctgtcctgaggaaatgcctcccagtatgccgccgcagttattggtctcgaatttgccagtgccttctttgcagggtatgtcgttgttttcactgccttttaaattggcggcggcgaaaccggcgccaaactcaacgcctttacacgctccaatcgaaattaccgcgcaggcaagacgggcatcaagtttgtcaaagaccggctctccaagaccgggttttactcctcttgcaaggcaggttataacgccgcctgcgctttcgccttcggcgcggagagattctattttggcggaggctttttcagcgccgagcttgctggggacgcggaaaggattgcgctctatttctacaaagtcaaagccgtcttcgcaaggggaaggttggtttattccggcgatggatgacgaccaagcgaggactgagatttcatgtagggaaagaaattttttggctaccgctcctgcggctacacggcaaagggtttcgcgacctgaacttctgcccccgccgcgatggtcatga

SEQ ID NO: 40636 - protein, 244 aa, Unknown
  Obtained from environmental sample
  misc_feature (1)..(244): Xaa is any amino acid
MCEILAHSDKSKKSASTRAVIASTTTTALGTMQTSCLPLIVISFTPPSLSKTFCGLLIEGVGLNAALKTMSCPEEMPPSMPPQLLVSNLPVPSLQGMSLFSLPFKLAAAKPAPNSTPLHAPIEITAQARRASSLSKTGSPRPGFTPLARQVITPPALSPSARRDSILAEAFSAPSLLGTRKGLRSISTKSKPSSQGEGWFIPAMDDDQARTEISCRERNFLATAPAATRQRVSRPELLPPPRWS

SEQ ID NO: 40637 - DNA, 747 bp, Unknown
  Obtained from environmental sample
  misc_feature (1)..(747): n is a, c, g, or t
atgaaagacagccatagcgaaagttataaagccgcaggcgttgacgtaacggcaggttaccatgccgtagagttgatgaaaaaacacgttgaccgcacaaagacggaaggaatgctcgaaggcatcggcggtttcggcggacttttcgcccttccaaaacagggaagttccgagcctgtgcttgtttcgggaactgacggcgtcggcactaagttaaaaatagcgatgctaatggacaagcacgatactgtcggtattgactgtgttgcgatgtgcgttaacgatataatctgcgccgccgccaaaccgttattttttcttgattacatcgcctgcggaaaaaatattccgcaaaaaatagaacaaattgtaagcggcgtagcggacggttgtgtgcaggcaggctgcgctcttgtcggcggcgaaacggcggaacaccctggactaatggaaattgacgaatacgacatagccggtttttccgtaggcattgttgagaaatcaaaaatacccgataaaaacagcgtaaaaaacggcgacgctgttatagcgattgcatcatcgggagtgcattcaaacgctttttctcttacgcgcaaagttttcggaatagacaaaaaccctgaaatcctgcaaaaacattttcccgaactcggtaaaacgttaggtgaagaattattaatacctacaaagatatatgtaaaatcaattcttactctccttgaaaaacgcctgtccgctcaatag

SEQ ID NO: 40638 - protein, 248 aa, Unknown
  Obtained from environmental sample
  DOMAIN (5)...(166): AIR synthase related protein, N-terminal domain
  misc_feature (1)..(248): Xaa is any amino acid
MKDSHSESYKAAGVDVTAGYHAVELMKKHVDRTKTEGMLEGIGGFGGLFALPKQGSSEPVLVSGTDGVGTKLKIAMLMDKHDTVGIDCVAMCVNDIICAAAKPLFFLDYIACGKNIPQKIEQIVSGVADGCVQAGCALVGGETAEHPGLMEIDEYDIAGFSVGIVEKSKIPDKNSVKNGDAVIAIASSGVHSNAFSLTRKVFGIDKNPEILQKHFPELGKTLGEELLIPTKIYVKSILTLLEKRLSAQ

SEQ ID NO: 40639 - DNA, 423 bp, Unknown
  Obtained from environmental sample
  misc_feature (1)..(423): n is a, c, g, or t
ttgcactactacgactttgagccgaagggttttgagtggatagattgcaacgactgggagcagagcatactcggctttatcaggaaggggccggatgattttgataggatgctgatagtgttgaatttcacgccggagccgcgccggggttaccatgtgggcgtgccggcggcgggtttttgggaggagatattcaacagcgacgctgcggaatacggcgggagcggcgtgggcaacgcggggggtatggagacggaggcgaagccgtggcacggccacaatcagtcgctgctgctgacgctgccgccgcttggggcggtgctgttcaaaatcaggaagcctgagccgaaagcggaggaggtcgttcaggcggatgcgaaggacgcggccggcgggtcagggtcggtaaatatcggtaaataa

SEQ ID NO: 40640 - protein, 140 aa, Unknown
  Obtained from environmental sample
  misc_feature (1)..(140): Xaa is any amino acid
MHYYDFEPKGFEWIDCNDWEQSILGFIRKGPDDFDRMLIVLNFTPEPRRGYHVGVPAAGFWEEIFNSDAAEYGGSGVGNAGGMETEAKPWHGHNQSLLLTLPPLGAVLFKIRKPEPKAEEVVQADAKDAAGGSGSVNIGK

SEQ ID NO: 40641 - DNA, 900 bp, Unknown
  Obtained from environmental sample
  misc_feature (1)..(900): n is a, c, g, or t
gtgatggagcacccgtttggcgggtcgtgggggtaccaaaccgtcggctacttcgcgcccacgagccgcttcggcacgccgcaggatttcatgtacttggttgactatttgcatcagcacgatataggcgtgatcctcgactgggtgccatcgcacttcccgagcgacgagcacggcctcgtctactacgacgggacgtgcctctttgagcacgccgaccccaagaagggctttcaccctgattggaagagctacatcttcaactacgggcgcaacgaggtgcaggcgttcctgctcagcagcgcgatcttctggctcgacaggtaccacgccgacgccatccgcgtagacgccgtggcctctatgctttacttggactactcccgcaaagagggcgagtggatacccaaccagttcggcggtcgtgagaatttggaggcgatatccttcctgaagcggatgaacgaggagatatacaagtcgttccccgacgtgcagacgatagcggaggagtctacggcgtggccgatggtctcgcgtccggcctacgtgggggggcttggtttcgggatgaagtggaacatgggttggatgcacgacacgctcgtgtatatgtccaaggattccatctataggaaataccaccacagcgagctgacgttcagcatgttgtacgcttttacggaaaactacgtgctgccgctttctcacgacgaggtcgtccacgggaaaaattcccttgtcaacaagatgccgggagatgactggaggcggcttgcgaatttgcggctgctgctcagttatcagttcaatcaccccggtaaaaaacttctctttatgggcggcgagttcgcgcagttcgttgagtggaccacgaccgtcagctcaattgggagttga

SEQ ID NO: 40642 - protein, 299 aa, Unknown
  Obtained from environmental sample
  misc_feature (1)..(299): Xaa is any amino acid
MMEHPFGGSWGYQTVGYFAPTSRFGTPQDFMYLVDYLHQHDIGVILDWVPSHFPSDEHGLVYYDGTCLFEHADPKKGFHPDWKSYIFNYGRNEVQAFLLSSAIFWLDRYHADAIRVDAVASMLYLDYSRKEGEWIPNQFGGRENLEAISFLKRMNEEIYKSFPDVQTIAEESTAWPMVSRPAYVGGLGFGMKWNMGWMHDTLVYMSKDSIYRKYHHSELTFSMLYAFTENYVLPLSHDEVVHGKNSLVNKMPGDDWRRLANLRLLLSYQFNHPGKKLLFMGGEFAQFVEWTTTVSSIGS

SEQ ID NO: 40643 - DNA, 759 bp, Unknown
  Obtained from environmental sample
  misc_feature (1)..(759): n is a, c, g, or t
gtggatattaacgggataaaaatcgggggtcccaattttcaaataatcgcgggaccttgttcggtagagtctccgcagcaaatacttgatatagcgaaaaaagtatcagccgcaggcgcgtcaatattgaggggaggcgcgtttaaaccgcgcacatctccatacgattttcaaggactgcgctctgacggaatcgatttgcttcttgaaaccaaaaaacaaacaggtatgcctattgttaccgagatcatgaatacaaatcatctgccgttatttgaaaatgttgacattattcaggttggcgcgcgtaatatgcagaattttgaactgttaaaggaacttggcatgacgcgaaaagcggttttgctgaagcgcggtcttgccaatacaatgcaggaacttcttatgagcgcggaatacattatggcgggaggaaatccaaacataattctttgtgaacgcggcatccgtacatttgaaacatacacaagaaacactctggacatttccgcagttcctatgctgcgcgaattgtctcatctgccggttgttgtagacccaagtcatgcttcgggaattgccagaatggttgagccgatgtcattggcggcggcggcggcaggcgcggacggactcatgatcgaagtgcataatgatcctgttaacgccctttgtgacggagcgcagtcgctaacaccggagcaatttgccgtaacagccgcgaaagtacgccgtatcagagaggttataaaacaatga

SEQ ID NO: 40644 - protein, 252 aa, Unknown
  Obtained from environmental sample
  DOMAIN (2)...(249): DAHP synthetase I family
  misc_feature (1)..(252): Xaa is any amino acid
MDINGIKIGGPNFQIIAGPCSVESPQQILDIAKKVSAAGASILRGGAFKPRTSPYDFQGLRSDGIDLLLETKKQTGMPIVTEIMNTNHLPLFENVDIIQVGARNMQNFELLKELGMTRKAVLLKRGLANTMQELLMSAEYIMAGGNPNIILCERGIRTFETYTRNTLDISAVPMLRELSHLPVVVDPSHASGIARMVEPMSLAAAAAGADGLMIEVHNDPVNALCDGAQSLTPEQFAVTAAKVRRIREVIKQ

SEQ ID NO: 40645 - DNA, 744 bp, Unknown
  Obtained from environmental sample
  misc_feature (1)..(744): n is a, c, g, or t
gtgggcgatttagcgggttttgcggcggccgttttcatgcgcgggattggttttgtgcaaataccgacaactttgcttgcggcggtggattcttctgtcggcggcaagacagcgattaatcttgaaacgggtaaaaatttagcgggagctttttatcagcctgacgctgtgttatgcgatatttccctgctctctacacttacgcccgaagttttcagggacggctgcgcggaagttataaagtacggagttattgcggacagcgtactatttgactcttttgaaacgcctataaaggatcaactggaagatgtcatcgcccgctgtgttgaaataaaacgcgatattgtcgctaaagacgagtacgaaaggaacgaaagaaaacttttaaatttcgggcatactgtaggtcacgcgattgaacttttaagcggatacgaaattacacacggaagcgccgttgccgccggaatggcggttgttacgcgcgcggctgtaaaaatgaaaatctgcgatgactcatgcaagaagagtgttttacagacattaatacgctacgggcttcccataaacactgcttacgattcggtaagcctggctaaagcctgccttgcagacaaaaaaagggacggcggcaaattaacaatgatatttcccgagaaaataggaaaatgcgtcttaaaagatatcaaggtagaagaattggaaaatttaattcggcttggtcttgaggaattaaattga

SEQ ID NO: 40646 - protein, 247 aa, Unknown
  Obtained from environmental sample
  SIGNAL (1)...(27)
  DOMAIN (1)...(210): 3-dehydroquinate synthase
  misc_feature (1)..(247): Xaa is any amino acid
MGDLAGFAAAVFMRGIGFVQIPTTLLAAVDSSVGGKTAINLETGKNLAGAFYQPDAVLCDISLLSTLTPEVFRDGCAEVIKYGVIADSVLFDSFETPIKDQLEDVIARCVEIKRDIVAKDEYERNERKLLNFGHTVGHAIELLSGYEITHGSAVAAGMAVVTRAAVKMKICDDSCKKSVLQTLIRYGLPINTAYDSVSLAKACLADKKRDGGKLTMIFPEKIGKCVLKDIKVEELENLIRLGLEELN

SEQ ID NO: 40647 - DNA, 972 bp, Unknown
  Obtained from environmental sample
  misc_feature (1)..(972): n is a, c, g, or t
gtgccagacgggcttgacatcacacctgctgacatttccccggattcagggcaagcgcaggaagtggccgaagaacaagcggaacaaatagaactgccagaccaaccagagccacttgccgaacaagaggaagaagccgaagggcagacggacgaaacgacgcaaacagaacagccagaaccgcagaccgaacagcaggaagaagctggagaggaattcgggcaatctgaacaagttgggcaaccagaacctcagactgaactacaggaagaagccgaagggcaggcggacgaaacggcgctaacagaacagccagaaccgcccgaaccgcagaccgaacaacaggaagaggcgggagaggatgtagcggagcaaaccgaacaactcgaacagccagaccaactggagccaccggccgaatatgaggaaggccccgaggcacttgcggaacaagccaaacctagtgaaaaaacccttgcctcttctctcgacctctccgaaatgctggaccccctgctggactccgcccaaagcgccgaagtactgaacgatgacaccaaggccgccgaaacggcacagacggcagaggagctgttcaatgcctttagggacggagtcgcggcaaaagtggggggcgatgattatgacacccactacaaccttgggatcgcctacaaagaaatgatgttggccgacccagccatagaggagttcaaaaaaacgatggttgacccggagcgcacgttggattgctgctccatgctggctatgtgcgagaagatgaatgggaacaacgccgccgccgccgattggctgcgcgtcggcatagccgcaccgggcttcccgccgattgacagcatgggccttaggctcgacttggctgcgctcctagaagaaatgggccaccacgatgaatccgaggaacttctgcaagaaaccaaaaatttggaaaatgcgttttgggtgcagtag

SEQ ID NO: 40648 - protein, 323 aa, Unknown
  Obtained from environmental sample
  misc_feature (1)..(323): Xaa is any amino acid
MPDGLDITPADISPDSGQAQEVAEEQAEQIELPDQPEPLAEQEEEAEGQTDETTQTEQPEPQTEQQEEAGEEFGQSEQVGQPEPQTELQEEAEGQADETALTEQPEPPEPQTEQQEEAGEDVAEQTEQLEQPDQLEPPAEYEEGPEALAEQAKPSEKTLASSLDLSEMLDPLLDSAQSAEVLNDDTKAAETAQTAEELFNAFRDGVAAKVGGDDYDTHYNLGIAYKEMMLADPAIEEFKKTMVDPERTLDCCSMLAMCEKMNGNNAAAADWLRVGIAAPGFPPIDSMGLRLDLAALLEEMGHHDESEELLQETKNLENAFWVQ

SEQ ID NO: 40649 - DNA, 348 bp, Unknown
  Obtained from environmental sample
  misc_feature (1)..(348): n is a, c, g, or t
ttgaacagctcctctgccgtctgtgccgtttcggcggccttggtgtcatcgttcagtacttcggcgctttgggcggagtccagcagggggtccagcatttcggagaggtcgagagaagaggcaagggttttttcactaggtttggcttgttccgcaagtgcctcggggccttcctcatattcggccggtggctccagttggtctggctgttcgagttgttcggtttgctccgctacatcctctcccgcctcttcctgttgttcggtctgcggttcgggcggttctggctgttctgttagcgccgtttcgtccgcctgcccttcggcttcttcctgtagttcagtctga

SEQ ID NO: 40650 - protein, 115 aa, Unknown
  Obtained from environmental sample
  SIGNAL (1)...(25)
  misc_feature (1)..(115): Xaa is any amino acid
MNSSSAVCAVSAALVSSFSTSALWAESSRGSSISERSREEARVFSLGLACSASASGPSSYSAGGSSWSGCSSCSVCSATSSPASSCCSVCGSGGSGCSVSAVSSACPSASSCSSV

SEQ ID NO: 40651 - DNA, 894 bp, Unknown
  Obtained from environmental sample
  misc_feature (1)..(894): n is a, c, g, or t
ttgaaaaatccctttgtttatagttccgattgtgatcccgatttctctcccgtcagccgcccttactacgatgccgctaaaacccatgaggaccgtgccgcggctttgcggtttgtgagatttctgcggtacccaggagacaaatcaaagttactttcatatttgatagactacctgcctgaaagcaaagatataaaaggtacttacattgaaccatttgttggcggaggttcggttttctttctcatgaattccaataaagctttaatttctgacttaaattctgaacttattacgctctacaaaggaattaaactttaccctcataaagtatgggatacatttgaatcctttcctacaggaaaggcagcttattataaaatcaggaacattgccctagaagacaaaccgctatattacagggcggcacggacactttttctaaacagaacttgcttcaagggaatgtggagacacaacaggcaaggaaagtttaatgttggatatggcggtgaagaaagacgctgtgcaattacacatgagaacattgttgagttgtcgcggattctacgcaaagcggaaatacttaacaatgactttgaagatgttctttcctgtgcttcaaaagatggttttatttttcttgatccgccttacaaacctggtgaaaaagatttatatgagttgcattattgtaatgggaaatttctctatgaagaacaaatacgaatagcagacgctctaaaaagtctgcctaaatcaaaaaatattcgttgggcaatgacaaattcctctcacaaagacatattaaagttatatgaaaattttagaataaaaaaaatccctttgggtacaagtaataaacccggtattcaaacaaaaaattcaaagtag

SEQ ID NO: 40652 - protein, 297 aa, Unknown
  Obtained from environmental sample
  DOMAIN (44)...(287): D12 class N6 adenine-specific DNA methyltransferase
  misc_feature (1)..(297): Xaa is any amino acid
MKNPFVYSSDCDPDFSPVSRPYYDAAKTHEDRAAALRFVRFLRYPGDKSKLLSYLIDYLPESKDIKGTYIEPFVGGGSVFFLMNSNKALISDLNSELITLYKGIKLYPHKVWDTFESFPTGKAAYYKIRNIALEDKPLYYRAARTLFLNRTCFKGMWRHNRQGKFNVGYGGEERRCAITHENIVELSRILRKAEILNNDFEDVLSCASKDGFIFLDPPYKPGEKDLYELHYCNGKFLYEEQIRIADALKSLPKSKNIRWAMTNSSHKDILKLYENFRIKKIPLGTSNKPGIQTKNSK

SEQ ID NO: 40653 - DNA, 1038 bp, Unknown
  Obtained from environmental sample
  misc_feature (1)..(1038): n is a, c, g, or t
atggtacaaaaagaagaacttcagcgatgtacggccattatcgccgaatgtcgaaaagaaatggcgcgtaggatttcggggcaaaaggagatgattaatgggcttttaacagcccttgtcgccggcggtcatattctgttggaaggagttcccggactcgctaaaactcttgccgttaaaagccttgcggaaataacaggtcttgaatttaaacgtattcaatttactccagaccttttacccgcagaccttacagggacaatgatctgggaacaggcaaacggcagattctcagtgcgtcgcggtcctgtttttgccaatgtaattctggcggacgaaattaaccgcgctccggcaaaggtgcaatccgcgcttcttgaggcaatggaagaaaaacaggtaacaatcggggaagagactcatcccctgcccgatcctttttttgttcttgcgacagaaaaccccattgaacacgaaggaacctattccctgccggaagcggaacttgaccgttttttaatgaaactgcttgttttttatcctaagcctgaggaagaactggaaattgttaaaaacggttccctcctatcttctgtttcagctaacaaaggagcggaactttctccggtattgaacagggaaaaacttttccttctgcgtaacgcggcggattccgtccatattgacgaagatataagcaaatatatcgtgtctgttgtaacggctacgcgcccggcatcaacaaggcaggttctcgcagaattacagcagaggacggaaaatgtaaaaacagacgcggaaaacgtataccgttatgtgtcatttggagcatctccgcgcgcttccatcgcgctgtaccggtgcagccgcatactggcgatgtttgaagggcgcggctttgtaagccccgaggacgtaaaaacagcggcttttccggttttacggcacagaatagtactttcatacgaagcggaagctgaaggcatggacgctgacgccgttattacaagaatattaagccatgtcccggttccgtaa

SEQ ID NO: 40654 - protein, 345 aa, Unknown
  Obtained from environmental sample
  DOMAIN (44)...(228): ATPase family associated with various cellular activities (AAA)
  misc_feature (1)..(345): Xaa is any amino acid
MVQKEELQRCTAIIAECRKEMARRISGQKEMINGLLTALVAGGHILLEGVPGLAKTLAVKSLAEITGLEFKRIQFTPDLLPADLTGTMIWEQANGRFSVRRGPVFANVILADEINRAPAKVQSALLEAMEEKQVTIGEETHPLPDPFFVLATENPIEHEGTYSLPEAELDRFLMKLLVFYPKPEEELEIVKNGSLLSSVSANKGAELSPVLNREKLFLLRNAADSVHIDEDISKYIVSVVTATRPASTRQVLAELQQRTENVKTDAENVYRYVSFGASPRASIALYRCSRILAMFEGRGFVSPEDVKTAAFPVLRHRIVLSYEAEAEGMDADAVITRILSHVPVP

SEQ ID NO: 40655 - DNA, 918 bp, Unknown
  Obtained from environmental sample
  misc_feature (1)..(918): n is a, c, g, or t
atggaaacaagcgatttacttcggactattataaaccttccacttttttcaagaaacctcgccgaagaaatgctcgccggagatttcagctctatctttaaaggacagggaatggaatttgacgaagcgcggcattatgaacccggcgatgatataaggtctatagactggaacgcaagcgcgcgtttcggcgctccgtttgtaaaaatgtaccgagaggaacgcgaacttaccattttaattttactggatgtttccccttccatgcacagaacgcatatcgcgcatcaggggttaagcccttacgagcaggctttaatctgcgcggcgttagttgctttttccgcagagcatacaggtcagcggttgggagcgtttttatttgacaaggacatagaaaaagtttttccgcctcgcaagggacgcaagtctttaatgtcgattataatgaccgctatgcagtaccagaacaatattcttccgcgcaggtctcaatacggcagcgacattgcttccgcgttaacgggcgcgcaaagactcttaaaaaaacgctcgctcgttgtgcttatatcggacttttacagcattaactgggaacaggaaatggataacctctgccgcaagcacgacgtaatagccataaaaatttccgatcctgacacgcttccttttaaggggcttgtaactctggaagacccggagacaggcgtgcgtatagaagcccccgccggtcttgattcgtttaaggaaagctgggcaagctggcttgaagaaaaatcaattcattgggaatcacagtgcaaaaaaagcggagcggcatttttaaagttatctacggaagcggacgctccttccgccctgataaaatttttcggaagccgttccatgaataggtacagaaaccggaaaaaagaatga

SEQ ID NO: 40656 - protein, 305 aa, Unknown
  Obtained from environmental sample
  misc_feature (1)..(305): Xaa is any amino acid
METSDLLRTIINLPLFSRNLAEEMLAGDFSSIFKGQGMEFDEARHYEPGDDIRSIDWNASARFGAPFVKMYREERELTILILLDVSPSMHRTHIAHQGLSPYEQALICAALVAFSAEHTGQRLGAFLFDKDIEKVFPPRKGRKSLMSIIMTAMQYQNNILPRRSQYGSDIASALTGAQRLLKKRSLVVLISDFYSINWEQEMDNLCRKHDVIAIKISDPDTLPFKGLVTLEDPETGVRIEAPAGLDSFKESWASWLEEKSIHWESQCKKSGAAFLKLSTEADAPSALIKFFGSRSMNRYRNRKKE

SEQ ID NO: 40657 - DNA, 477 bp, Unknown
  Obtained from environmental sample
  misc_feature (1)..(477): n is a, c, g, or t
atgaaactctatcatgtctcttttacggctgttccaacccccgatctctcgttttctcgtgatactaccgattttggaaaaggtttttatacaaccactatgcaaacacaggcggaaaaatgggcagagcggtataaacgcaggcaaggcagcggttttgtttcattatatgaaattgatgaagatgaattaagaaaaaatgtgcctgtactcgaatttaatgcttactcggatgaatggcttgactttattatcagatgccgccgtggagagtcggccggtgactatgatctgataatcgggggtattgccaacgatgatgtatttaatacattgacggttttttttagaggttttattgataagacagaagcgataaaacgcctgcgctatgaaaaaccgaacattcagtattgttttaaaactcaggcgatcattgacaagtatttgatatacaaagggaatacggcggtatga

SEQ ID NO: 40658 - protein, 158 aa, Unknown
  Obtained from environmental sample
  misc_feature (1)..(158): Xaa is any amino acid
MKLYHVSFTAVPTPDLSFSRDTTDFGKGFYTTTMQTQAEKWAERYKRRQGSGFVSLYEIDEDELRKNVPVLEFNAYSDEWLDFIIRCRRGESAGDYDLIIGGIANDDVFNTLTVFFRGFIDKTEAIKRLRYEKPNIQYCFKTQAIIDKYLIYKGNTAV

SEQ ID NO: 40659 - DNA, 690 bp, Unknown
  Obtained from environmental sample
  misc_feature (1)..(690): n is a, c, g, or t
atgaacgatttcggcggggactcgatcttcggcgacctcttcggctttggttcgcgcacccgccgcggcggcggccacgggggaacgcgcggcaacgacttgcaggtcaaactcggcctcacgcttgaggagatcggcgcgggcgtgaagaagaccataaaggtcaggcgcttggacagatgctcggagtgcggcggcagcggctccaaaaccggcaagcgcgtcacgtgcgtgaagtgcggcggcagcggccgcgtgcgccatgtcaccacctctttcttcggccagatggttcaggaggcggattgccccgtctgccgaggcgacggccagacggtctccgacccgtgcgcggcctgcggcggcagcggcctgcggcagtccgagtcgacggtgtcggtggacattccggcgggcgtggaggagggaaactacatccgcgttccgggcaggggagacgccggcaggggaggcggggagtcgggcgacctcatcgtagtcttgcacgagaaaccccacgaaactttcacccgccacggcatagaccttagctgcaaactcgacatcaccttctccgaggcggctctcggttgctcgaggtcatcaatacgttggaggataaagtcagccttaaaatccccggcggcacgcagtccgaaaagatattcaaactcaagtcgaaaggtttga

SEQ ID NO: 40660 - protein, 229 aa, Unknown
  Obtained from environmental sample
  DOMAIN (144)...(223): DnaJ C terminal region
  misc_feature (1)..(229): Xaa is any amino acid
MNDFGGDSIFGDLFGFGSRTRRGGGHGGTRGNDLQVKLGLTLEEIGAGVKKTIKVRRLDRCSECGGSGSKTGKRVTCVKCGGSGRVRHVTTSFFGQMVQEADCPVCRGDGQTVSDPCAACGGSGLRQSESTVSVDIPAGVEEGNYIRVPGRGDAGRGGGESGDLIVVLHEKPHETFTRHGIDLSCKLDITFSEAALGCSRSSIRWRIKSALKSPAARSPKRYSNSSRKV

SEQ ID NO: 40661 - DNA, 477 bp, Unknown
  Obtained from environmental sample
  misc_feature (1)..(477): n is a, c, g, or t
atggcgctcacggggcacttggtgtcctcgacgctgcacacaaacgacgcggcgagcaccatagcccgcttcaccgacataggcgtcccccccctgctcctcggctcggcgctcaacctgatcgtggcgcagcggctggtgcggaaaatatgccccaaatgcaaaatcgaatacaaaccgcccacggaactgatagaaagcctcgggctcgaccccgaaaaagtcacgcaattctacaaaggcaacggctgcgtaacctgcaacggcactggcttcgcgggacgcacggcgatattcgaaatgctccaagtcacaaagagcatccgcaaacttatactgaaaaacgcgcccacaatggaaattcaagaggcggcggtcgcggaaaacatgaagaccctgcggcaggcgggcgtggaactggcggtgaacggaacgacgactatcgagcaggttttggcggcgaccatagagatttag

SEQ ID NO: 40662 - protein, 158 aa, Unknown
  Obtained from environmental sample
  misc_feature (1)..(158): Xaa is any amino acid
MALTGHLVSSTLHTNDAASTIARFTDIGVPPLLLGSALNLIVAQRLVRKICPKCKIEYKPPTELIESLGLDPEKVTQFYKGNGCVTCNGTGFAGRTAIFEMLQVTKSIRKLILKNAPTMEIQEAAVAENMKTLRQAGVELAVNGTTTIEQVLAATIEI

SEQ ID NO: 40663 - DNA, 1227 bp, Unknown
  Obtained from environmental sample
  misc_feature (1)..(1227): n is a, c, g, or t
atgactgataaaccgatccttgtaaaaggaaaacataacgaggctcatgtttttgccaaagctcttgaatcggcctgcgaaaacaaaatacgccagtaccttgaccaccccgctttcgccgggacaaccgtgcggataatgcccgatgtacatttggggaaaagcacagtcatcggctggacggcgacctgcggttcccttgtcatcccttcggttatcgggcttgacatcggctgcggggtatgcgcctgcaacctggggcgcggcaaactggcttttgacaaactggacaagttcatccgcaaaaacataccatccggccaggaggttcgtccctctctgcatgaagcccttgatgagataaacggttttgtttcggggaaagcaaacgattccgctttctccgataccggtaatttcaaaaacgaaatacgcaagctgtgtgaaaagcaggggaaaaatcccgagcgtatatttgcctcgcttggaaccctcggcggcgggaatcattttatcgagattgacgttgacgaaaaccacaaccgctggctgttgattcattcaggttcgcggatattcggggcgcatacggctgagtatcacgaaattcttgctttgcgggaaactgacgaagaaagcaaaatcaaatacctttcgggggaatacgcggacggctaccttgcggatttgcgtgtcgtccagcattacgcttctgtcaaccgggcgctcatggcacaatcaatagcaaagggatttttcgatttggatattcgggaaatcgaataccgtgattgcgtgcataactacattgacaccgcctgttcgataatccgcaagggggcgatttccgcgaaaaaggacgagcctttgataatccccttctcaatggcggaaggggctgttttgggcaggggcaagggaaatgacgcatggaacaattctgcgccccacggcgcggggaggaagaagccccgcaccgacgcgcgggctctgtccctggacgagtaccggaaagagatgcggggtgtctggtcaagcgttatctgtaaggacacgctggaagaaagccctatggcctacaaaaaagcgcgggacgtgctggactacatcggcgaaacggtagaagtggagcagcggctaaaaccgctgtataacttaaggcggttgactgacgaacggagtgaggaagcgaagggtttaagcggacggttcaggcgatcatcgtaa

SEQ ID NO: 40664 - protein, 408 aa, Unknown
  Obtained from environmental sample
  DOMAIN (1)...(388): Uncharacterized protein family UPF0027
  misc_feature (1)..(408): Xaa is any amino acid
MTDKPILVKGKHNEAHVFAKALESACENKIRQYLDHPAFAGTTVRIMPDVHLGKSTVIGWTATCGSLVIPSVIGLDIGCGVCACNLGRGKLAFDKLDKFIRKNIPSGQEVRPSLHEALDEINGFVSGKANDSAFSDTGNFKNEIRKLCEKQGKNPERIFASLGTLGGGNHFIEIDVDENHNRWLLIHSGSRIFGAHTAEYHEILALRETDEESKIKYLSGEYADGYLADLRVVQHYASVNRALMAQSIAKGFFDLDIREIEYRDCVHNYIDTACSIIRKGAISAKKDEPLIIPFSMAEGAVLGRGKGNDAWNNSAPHGAGRKKPRTDARALSLDEYRKEMRGVWSSVICKDTLEESPMAYKKARDVLDYIGETVEVEQRLKPLYNLRRLTDERSEEAKGLSGRFRRSS

SEQ ID NO: 40665 - DNA, 414 bp, Unknown
  Obtained from environmental sample
  misc_feature (1)..(414): n is a, c, g, or t
atggttggagagcagttccggccccatcacaaacggaaaaactggtttgtgcaggtaaggccgtttgttgaacctgcaccgggagaattgttctctacagtcgacgtgcgttttgaaaccgcgcgggcaagcggtccgggcggccagcacgtcaataaaactgaaacagccgtccgcgccgtccatatacccacgggaaaaagcgctattgcacggggagagcggtctcagcttatgaacaaaaaacttgcccttgcccggcttgcctctctttttgaggacgaacaggcggacaaagaaaagcagtcccgatccgtcttgcgccatacccattgggagcttgaacggggaaaccccatccgcgtctatgacggggaaaccatgaaactgttgaaggagaaaaagaatgactga

SEQ ID NO: 40666 - protein, 137 aa, Unknown
  Obtained from environmental sample
  DOMAIN (29)...(135): Peptidyl-tRNA hydrolase domain
  misc_feature (1)..(137): Xaa is any amino acid
MVGEQFRPHHKRKNWFVQVRPFVEPAPGELFSTVDVRFETARASGPGGQHVNKTETAVRAVHIPTGKSAIARGERSQLMNKKLALARLASLFEDEQADKEKQSRSVLRHTHWELERGNPIRVYDGETMKLLKEKKND

SEQ ID NO: 40667 - DNA, 306 bp, Unknown
  Obtained from environmental sample
  misc_feature (1)..(306): n is a, c, g, or t
gtggttgttggcacacaaaccggcaaaaaagaagactatgaggttatgggttcactcgtgaatagcaatgctgtgattttagacgatgcaaatcctgctgaactagaaaggttcatgactgagaagcaagctgatattcttgttggcggtgttaaggaacgcccccttgcgtataaacttggaatggcgttttgcgaccacaaccacgaacgcaaacacccccttgccggttttgaaggaatagaaaattttgtgaaagaaattcataaatccattaacagccctgtttggaaatatgtatgctga

SEQ ID NO: 40668 - protein, 101 aa, Unknown
  Obtained from environmental sample
  misc_feature (1)..(101): Xaa is any amino acid
MVVGTQTGKKEDYEVMGSLVNSNAVILDDANPAELERFMTEKQADILVGGVKERPLAYKLGMAFCDHNHERKHPLAGFEGIENFVKEIHKSINSPVWKYVC

SEQ ID NO: 40669 - DNA, 894 bp, Unknown
  Obtained from environmental sample
  misc_feature (1)..(894): n is a, c, g, or t
atgatggaaaaaaccgaaagcagttttcgcgaagaattgcacaagaaattttacaaacctcaaacagcgaaaaaagcagcagacaaaaccgctacacatccttgctttggcgaacaggcttgccaaaatgcacgtgtgcatttacccgttgctccaaaatgcaatatacaatgcaactactgcctgcgaaactacgactgcatgaatgagagccgcccaggagttacatctaaaattttatccccagccgaggctttggaacgctacataaaactcaaagcgaatatgcttggcctcactgttgtgggcattgcaggacccggtgatgctttggcaaattttgacaaatccgctgaaacattccgattgattcgagaatatgacccaagtgtaactttttgcattgccacaaacggattgttgcttacgcaatacgcacaagaattgaaagaattggatgtgagccacgtaacggtaactatgaatgcggttgacccctcaataggtgccaaaatctacaaatatgttcaatatatgggcaaaacttacactggcattgaaggtgcgtctattctacttgcaaatcagctcgctggaataaaaatgttgagcgatgcagggataatgtgcaaagtgaattgcgtgaccttgaaaggaatcaacgaacaccatatatacgaagtgacccaaaccgcagcgaacctcggagcttttatgacaaacataatgccgcatcttccggtaaaaggctcggcgtttgaaggcttggaacgtgtgacaaataaggaaatagcagttcttagagagcagtgcggagcaaatataaagcaaatgacacattgccgccaatgccgctcagatgcagcaggaacgcttatagagatgtgtctatga

SEQ ID NO: 40670 - protein, 297 aa, Unknown
  Obtained from environmental sample
  DOMAIN (48)...(232): Radical SAM superfamily
  misc_feature (1)..(297): Xaa is any amino acid
MMEKTESSFREELHKKFYKPQTAKKAADKTATHPCFGEQACQNARVHLPVAPKCNIQCNYCLRNYDCMNESRPGVTSKILSPAEALERYIKLKANMLGLTVVGIAGPGDALANFDKSAETFRLIREYDPSVTFCIATNGLLLTQYAQELKELDVSHVTVTMNAVDPSIGAKIYKYVQYMGKTYTGIEGASILLANQLAGIKMLSDAGIMCKVNCVTLKGINEHHIYEVTQTAANLGAFMTNIMPHLPVKGSAFEGLERVTNKEIAVLREQCGANIKQMTHCRQCRSDAAGTLIEMCL

SEQ ID NO: 40671 - DNA, 543 bp, Unknown
  Obtained from environmental sample
  misc_feature (1)..(543): n is a, c, g, or t
atgacatacgaacttaactggaacggcgatgtcaattccgtgcatgagaatgttgtttcaggcgttacctacccccgcgaatttatgaacggcgaatgtccgcccgacaaaaaagacgacatcgactatattttcagtttattggattgggagaaaaataccgatcctcactacaaaaaacgctttggtcgtcctccaatcaccattgttaaaaacgcggattatgaggagaaatggatttcctacgccaacgaaggttatttcagcgcgaaagagctttcagttaatccgggcaagagcgttaccatcaaagagcctgccgctcacggcgttatctttattcaaggacacggcaagttcggtccctacccttgcgaagcgccgggtatgcttcgtttcggtcagcagagcgcagatgaatactttgtaagcgaagacgcggcaaagaaaggaatagttatcactaacacaagcccggttgaaccgctggtactgttaaagagcttcggaccgaatcaccccgacgctccgcagtctgtgtaa

SEQ ID NO: 40672 - protein, 180 aa, Unknown
  Obtained from environmental sample
  misc_feature (1)..(180): Xaa is any amino acid
MTYELNWNGDVNSVHENVVSGVTYPREFMNGECPPDKKDDIDYIFSLLDWEKNTDPHYKKRFGRPPITIVKNADYEEKWISYANEGYFSAKELSVNPGKSVTIKEPAAHGVIFIQGHGKFGPYPCEAPGMLRFGQQSADEYFVSEDAAKKGIVITNTSPVEPLVLLKSFGPNHPDAPQSV

SEQ ID NO: 40673 - DNA, 552 bp, Unknown
  Obtained from environmental sample
  misc_feature (1)..(552): n is a, c, g, or t
atgcagagactttttatatcagtaaactgtaatgaaaaagtaaaaaaacagattctctccgtacaggaaaaaattaaatcgctgtcaataaaaggaaatttttcattaccagaaaatattcacctaacgcttgtttttattggcgaaacccccgatgatacgataccgctgataacttcctcggttgacaatgcccttatgccgcctgtcgcgccctttacgcttactttcacgaatgtaggttgttttaaacacagtaataaggaactatggtggataggaacggatcataacgatactcatcttgacattttaaaaacaatcagagggcgtattacagaggctttacttttaaataacatacattttgacaacaggtcatttaacccgcacattacccttggcagggagataaagcatgaatcgcctattatcattccaaaacaagaaattatatatcccgtaaatcgaatcagtttgatgaggtcggaacatattagcggaaaattaacttatacggaaatatttggaagggatttaaagggggagtaa

SEQ ID NO: 40674 - protein, 183 aa, Unknown
  Obtained from environmental sample
  DOMAIN (8)...(92): 2',5' RNA ligase family
  misc_feature (1)..(183): Xaa is any amino acid
MQRLFISVNCNEKVKKQILSVQEKIKSLSIKGNFSLPENIHLTLVFIGETPDDTIPLITSSVDNALMPPVAPFTLTFTNVGCFKHSNKELWWIGTDHNDTHLDILKTIRGRITEALLLNNIHFDNRSFNPHITLGREIKHESPIIIPKQEIIYPVNRISLMRSEHISGKLTYTEIFGRDLKGE

SEQ ID NO: 40675 - DNA, 810 bp, Unknown
  Obtained from environmental sample
  misc_feature (1)..(810): n is a, c, g, or t
atgacattgggagccgtacgtttcgtaatcgccattgtagtgctttttttgatgtatcgcttttctaaggaatggcagggttcaaacagggggtttaaatcagatatgcccctgttaataggctcaggttttgcgggggttactttttattttttctttgaaaacaacggcgtgttgcgtgtaaccgcgtcggaggcttccattattacggcggcaattcccgtacttacgatgatcgccgattggattgcggtaaaattatcattccatgataatgcgccgcgtcttacttggctgtcgtggttgggagcgttcatttccattgccggagtcatatttgtcgctggagtttcattttccatttcgggaagcatatcgggttatgtttacatgggaggagccgcgttgtgctgggttggctacagtctgcttacccgtccccttttcgacagaaaacgctcccgtctctatatcgtgttctggcaaaatttttttgggtttatcggactactcccctttgccatgctggaatacaaaagctggggcaatcccacactgcctgtaatgcttcatgtggtctttctggcccttggctgttccgcacttgggtactggctctacgcccatgcgatggaagtactgggagtatcggtaacgtcggtatttatcaatttgattccggtagtaactgtaatttcgggatttctcgttctgcatgaaaggctcacccttctgcaaggggcgggagcggttttggttcttaccggcgtatatttaacaatactgcctcaacgcacaaaaagtctttaa

SEQ ID NO: 40676 - protein, 269 aa, Unknown
  Obtained from environmental sample
  DOMAIN (136)...(262): Integral membrane protein DUF6
  misc_feature (1)..(269): Xaa is any amino acid
MTLGAVRFVIAIVVLFLMYRFSKEWQGSNRGFKSDMPLLIGSGFAGVTFYFFFENNGVLRVTASEASIITAAIPVLTMIADWIAVKLSFHDNAPRLTWLSWLGAFISIAGVIFVAGVSFSISGSISGYVYMGGAALCWVGYSLLTRPLFDRKRSRLYIVFWQNFFGFIGLLPFAMLEYKSWGNPTLPVMLHVVFLALGCSALGYWLYAHAMEVLGVSVTSVFINLIPVVTVISGFLVLHERLTLLQGAGAVLVLTGVYLTILPQRTKSL

SEQ ID NO: 40677 - DNA, 1623 bp, Unknown
  Obtained from environmental sample
  misc_feature (1)..(1623): n is a, c, g, or t
atgactgaaaaaaagcctgtttttcggcgtttttgccccgtctttaccncttttttacaaataatatatactggaaaaatgagtcaagaaaagaattactccgctcaaaatataacggccttaaaaggtttggagcctgttcgcatgcgcccgggcatgtacatagggacgacgggcatagacggccttcatcaccttgtttatgaggtagttgataattccgtagacgaggccatgcagggcttctgtacaaatattcttgtggttctggaagagaacgatattgtaagggtagaggacaacggccgcggcatccccgtggacatacaccccaccgaaaaagtcagcgccctggagctggtcatgacgcggcttcacgccggcggcaagttcgataaaaagtcgtacaaagtttccggcggccttcacggggtcggcgtttctgtcgtgaacgccctttccgagtggtgcgaagcttttgtccacctcgacggaaaagtccatacccaacgctacaaaatcggcgtcccggaaaaaccggtaaaagagattgacccgcaggacctgccttaccatcattcgcctgacagacagggaaccgtaatccgctggaaagccgactcttcaatttttgaaaccaccacatataactttgacgccctatccaaccgcctgcgcgagcttgccttcttgaacaggggccttaaaatcactatccgcgacgagcggcttaccacgcccaaagagcacgattttatgttcgagggcggcgttaaaagctttgtcgagtacctgaacgagaacaaaacggtgctttacaaagagccggtatatcttgagggaagccgcgacgacggcgcgggcggcaatattgaaattgagtgcgccgtccagtacaacgacggctttaacgaaataatgttttcgtttgttaacgacattaacacgcgcgagggcggaacccatcttgtgggatttaaatccgcgcttacccgcaccttaaacgaatttttgaaaaagtccaaacacgccaaaaagctggaagagagtctttcaggagacgacgtgcgcgaaggacttaccgccgtcctttccgtgaaagtgccaaacccccagtttgagggacagaccaagggcaaactgggcaattcggaagtgaagggcatagtcgagtcttacataaacgagcagcttgaaattttctttgacaaacaccccgaagttatcaacaacatattggaaaaatccgtgttagccgcaaaggcgcgcatcgcggcgcggcaggcgcgtgacgcgacaaggcgcaagaacgcgatggattccgccggccttccgggaaaacttgccgactgctctgaaaaagacccggcaaagtgcgagcttttcatcgtagaaggcgactccgccggcggctccgcgaagggcggccgcgaccgccgcactcaggcgattcttccgctgtggggcaagatgatcaatgttgaaaaacagcgcatcgaanaagttatcaccaacgacaaactgcagcccgttatcgcgagcataggagccggttgcggcaacgattttgacgtttccaaattcgctaccataaaattatcattatggcggatgccgacgtag

SEQ ID NO: 40678 - protein, 540 aa, Unknown
  Obtained from environmental sample
  DOMAIN (58)...(209): Histidine kinase-, DNA gyrase B-, and HSP90-like ATPase
  misc_feature (1)..(540): Xaa is any amino acid
MTEKKPVFRRFCPVFTXFLQIIYTGKMSQEKNYSAQNITALKGLEPVRMRPGMYIGTTGIDGLHHLVYEVVDNSVDEAMQGFCTNILVVLEENDIVRVEDNGRGIPVDIHPTEKVSALELVMTRLHAGGKFDKKSYKVSGGLHGVGVSVVNALSEWCEAFVHLDGKVHTQRYKIGVPEKPVKEIDPQDLPYHHSPDRQGTVIRWKADSSIFETTTYNFDALSNRLRELAFLNRGLKITIRDERLTTPKEHDFMFEGGVKSFVEYLNENKTVLYKEPVYLEGSRDDGAGGNIEIECAVQYNDGFNEIMFSFVNDINTREGGTHLVGFKSALTRTLNEFLKKSKHAKKLEESLSGDDVREGLTAVLSVKVPNPQFEGQTKGKLGNSEVKGIVESYINEQLEIFFDKHPEVINNILEKSVLAAKARIAARQARDATRRKNAMDSAGLPGKLADCSEKDPAKCELFIVEGDSAGGSAKGGRDRRTQAILPLWGKMINVEKQRIEXVITNDKLQPVIASIGAGCGNDFDVSKFATIKLSLWRMPT

SEQ ID NO: 40679 - DNA, 459 bp, Unknown
  Obtained from environmental sample
  misc_feature (1)..(459): n is a, c, g, or t
atgatggtaaggcaggtcctgcgggtcaatctcttttaccggtttttccgggacgccgattttgtagcgttgggtatggacttttccgtcgaggtggacaaaagcttcgcaccactcggaaagggcgttcacgacagaaacgccgaccccgtgaaggccgccggaaactttgtacgactttttatcgaacttgccgccggcgtgaagccgcgtcatgaccagctccagggcgctgactttttcggtggggtgtatgtccacggggatgccgcggccgttgtcctctacccttacaatatcgttctcttccagaaccacaagaatatttgtacagaagccctgcatggcctcgtctacggaattatcaactacctcataaacaaggtgatgaaggccgtctatgcccgtcgtccctatgtacatgcccgggcgcatgcgaacaggctccaaaccttttaa

SEQ ID NO: 40680 - protein, 152 aa, Unknown
  Obtained from environmental sample
  misc_feature (1)..(152): Xaa is any amino acid
MMVRQVLRVNLFYRFFRDADFVALGMDFSVEVDKSFAPLGKGVHDRNADPVKAAGNFVRLFIELAAGVKPRHDQLQGADFFGGVYVHGDAAAVVLYPYNIVLFQNHKNICTEALHGLVYGIINYLINKVMKAVYARRPYVHARAHANRLQTF

SEQ ID NO: 40681 - DNA, 360 bp, Unknown
  Obtained from environmental sample
  misc_feature (1)..(360): n is a, c, g, or t
atgacgcctcttatcgaacaggggcatgtatatcttgccatgccgcccctttacaaggttagctacgacaagaaatctttttacgcctacgacgacgcggaaaaagaccgcatactttcggaatcaggaaaagacgcggaaaaggtttccgttcagcgctacaagggtcttggagagatgaaccccgaccagttatgcgacactacgatggatcccggcaagcgcaatattattcaggtgcatctggacgacacagtcgaggcggagcgcattttcaccacgctgatgggagaggtggtccagccccgccgtgagtttatcgaggacaacgcgctgttggttagtaaccttgatgtgtga

SEQ ID NO: 40682 - protein, 119 aa, Unknown
  Obtained from environmental sample
  DOMAIN (43)...(108): DNA gyrase B subunit, carboxyl terminus
  misc_feature (1)..(119): Xaa is any amino acid
MTPLIEQGHVYLAMPPLYKVSYDKKSFYAYDDAEKDRILSESGKDAEKVSVQRYKGLGEMNPDQLCDTTMDPGKRNIIQVHLDDTVEAERIFTTLMGEVVQPRREFIEDNALLVSNLDV

SEQ ID NO: 40683 - DNA, 1029 bp, Unknown
  Obtained from environmental sample
  misc_feature (1)..(1029): n is a, c, g, or t
atgcagaaattcgcggatgaggcggtaatagaggtttcctccggctcaggggggaacggctgtgtggcatttcaccgtgaaaaatacgtgccacgcggcgggccatcggggggagacggcggccggggcggggacgcaatttttacaatcagacgcaatctgcggactctctcgcatctcaggtacaaacagaattacagggccgagaacggcctagacggctcaggcagaaaccgccacggacggaacggcgaagacgtgcttataccgctgccgcctggttccatgataaaggatgccgaaaccggagagcttatcanggatttcggcaaggatgaaaaggactttatttttttgaaagggggaaacggcggctgggggaatatacattttaagtcatcggtgaaccaggcgccccgcaaagccctgccagggcagccgggtcagacagttcaactgaaagtggagctgcatataatggcggatattggcctggtcggttttcccaacgccggtaaatccagcctgcttgaccgttttaccaatgcccggccaaaaatcgccgcgtatccctttaccacaaaaatccccaaccttggagtgcttagtgtaggggagtccggtgatacggacataagggatgtaatcattgccgatattccggggctgatagaaggcgcttcacagggggcggggcttggcacccgtttcctcaaacatatttcccgtacagccgctttggcttttctggttgatctttcagacgataattaccttagcgcctttgacgtgttacagaacgagcttgcctcattctctcccgaattggtgcaaaaaaaacggctgcttgtggggacaaaaaccgacctgccggaaactggcggacgcctcgcggaactggcggctaaatacccaaatgaaaaagtattcggtatttcggttttttccggcgagggtataaaggaactggccctggaatttcttcgccttgctgacggccttgccgataaggaggcatcgcaggcgtga

SEQ ID NO: 40684 - protein, 342 aa, Unknown
  Obtained from environmental sample
  DOMAIN (161)...(289): GTPase of unknown function
  misc_feature (1)..(342): Xaa is any amino acid
MQKFADEAVIEVSSGSGGNGCVAFHREKYVPRGGPSGGDGGRGGDAIFTIRRNLRTLSHLRYKQNYRAENGLDGSGRNRHGRNGEDVLIPLPPGSMIKDAETGELIXDFGKDEKDFIFLKGGNGGWGNIHFKSSVNQAPRKALPGQPGQTVQLKVELHIMADIGLVGFPNAGKSSLLDRFTNARPKIAAYPFTTKIPNLGVLSVGESGDTDIRDVIIADIPGLIEGASQGAGLGTRFLKHISRTAALAFLVDLSDDNYLSAFDVLQNELASFSPELVQKKRLLVGTKTDLPETGGRLAELAAKYPNEKVFGISVFSGEGIKELALEFLRLADGLADKEASQA

SEQ ID NO: 40685 - DNA, 774 bp, Unknown
  Obtained from environmental sample
  misc_feature (1)..(774): n is a, c, g, or t
gtgggagatgaagtaaacagggacacagagacttacaaggagaggataagtttcttaaaagtgcctatcgacatagttcagcctgaccggcttgatcgcctgacgtataacatgctggcggagggaatagaccagaacgtcgttctgctttccgtgtgggatctcctccgcgcgcggcgtaattcggaataccgggactatgttaataaagcggcgctggttatccccatttccaaaagcattatcaggggcattcagtttttacagggaaaacatgccgtccgctatatgcctttcaattttgttataaaacttttaacaatattggaacaatacgaatattcaagctatcttctgggcggaagaaagcgcatactgttaaaaattgaaaaaaatctccgcgaaacttttccggcgctccgcattgtaggccgttaccccggcgggttcaggacgcaggaagagccgatcatcattgaggcgattcgcaaggcgtcgccgtccctgcttctggttggcaaaggggtgcgcggcggcgaatactggatatccaggaattcccggcggctgggaaagggtctcaggctgtggtgcagcgatctttttgatgtttttgccgagcgaaaacgccacccgtcacagaaggtctttgaacttggccttgaatgggtaggctataccctgcaaagccccataaagctgttccggctttttccctttatgtattacaatctcctgcttctggtgtataaaatattcaagaaaaaaaattaa

SEQ ID NO: 40686 - protein, 257 aa, Unknown
  Obtained from environmental sample
  DOMAIN (66)...(237): Glycosyl transferase WecB/TagA/CpsF family
  misc_feature (1)..(257): Xaa is any amino acid
MGDEVNRDTETYKERISFLKVPIDIVQPDRLDRLTYNMLAEGIDQNVVLLSVWDLLRARRNSEYRDYVNKAALVIPISKSIIRGIQFLQGKHAVRYMPFNFVIKLLTILEQYEYSSYLLGGRKRILLKIEKNLRETFPALRIVGRYPGGFRTQEEPIIIEAIRKASPSLLLVGKGVRGGEYWISRNSRRLGKGLRLWCSDLFDVFAERKRHPSQKVFELGLEWVGYTLQSPIKLFRLFPFMYYNLLLLVYKIFKKKN

SEQ ID NO: 40687 - DNA, 603 bp, Unknown
  Obtained from environmental sample
  misc_feature (1)..(603): n is a, c, g, or t
gtgcgccgtctcgcccccggtgaatattttcccgctttgcttccgggtacttctaacagtgtaagcgtgcgggtattgtcggtagacaagcgcgtcctgataggcgaaatatccgatgaaaattccgcctgggcggagtcatctgtttccaaaaataatctgccgcccatgctcctgttccagtccctgcccaagggagaaaaaatggacctcatcgtaaggcaggccgccgaaggaggactcgcgcagattgtgccgtttatgtcggaattctcggcgattagaaacataaaaagtacaggcttcaaatttacccgatgggaacgcatcataaaggaggcgcggcagcaaagcggttcattgacgccgactgttcttcgacagcccttgtccattgacgggctctttgccttttgggaggaaataaaaactcaaaaccccggtgctctcgggctgctgtttcatcatttaccgcttgtaaaggccagccttcacggttatcttgataaaaagcccgaaattgtcgcgctggcaatagggcctgaaggcggtttttccattccgaagcgtggcggtttatggatgccggttttcagccgctga

SEQ ID NO: 40688 - protein, 200 aa, Unknown
  Obtained from environmental sample
  DOMAIN (1)...(196): Protein of unknown function (DUF558)
  misc_feature (1)..(200): Xaa is any amino acid
MRRLAPGEYFPALLPGTSNSVSVRVLSVDKRVLIGEISDENSAWAESSVSKNNLPPMLLFQSLPKGEKMDLIVRQAAEGGLAQIVPFMSEFSAIRNIKSTGFKFTRWERIIKEARQQSGSLTPTVLRQPLSIDGLFAFWEEIKTQNPGALGLLFHHLPLVKASLHGYLDKKPEIVALAIGPEGGFSIPKRGGLWMPVFSR

SEQ ID NO: 40689 - DNA, 828 bp, Unknown
  Obtained from environmental sample
  misc_feature (1)..(828): n is a, c, g, or t
atgaaactaatggatttggaacaggaagaagccctatatgaattcctcgaaaatgtaagcaaaccgtttactttggacgatattacggactatatacaggcaacggggcataagcttaaaaagcaattaaccatggaaatagccgcctatttggacgcaaggaaaatcgcctttaggcaggacaataaacactgggtatcccgaaagacatgctttgagccggcattgtttgttattactccttcccgtctggaactgttaaacggcatattaattcccggccaccgctgtgtccctttcgcaaatccgttagtccttcctcatcgctatagttttttttggaaaggagaagcgatccccgtatcaactacggaagcgccgcccgaagatttatatccttattactgcgtttacggcgaagaatttgcgcctcagtatatcgcaagggacaaccctgaaaacgaagatgcttttaacgccgacccttacgaagatccgcccgaagtatcaatacatacgcttgatatgcgaggcatttaccgtgagtgcgcatttgtacccggagaccgttttttagtacgcactcttaactggaatgaatgtaaatttgaattggaaaaagtaggtaaagatgattggcggcacgatgattttaacgaatggcaaaaggccgccgaaaaacgttttgaaacagttttgccatgcttggtcccggagcaagcaccgaggaacaaatcgccttcgcatattggtatggcggtcaacgtattagggaagtcccggcttattcattggaagaatttttatatgagaaaacaaatcgaatag

SEQ ID NO: 40690 - protein, 275 aa, Unknown
  Obtained from environmental sample
  misc_feature (1)..(275): Xaa is any amino acid
MKLMDLEQEEALYEFLENVSKPFTLDDITDYIQATGHKLKKQLTMEIAAYLDARKIAFRQDNKHWVSRKTCFEPALFVITPSRLELLNGILIPGHRCVPFANPLVLPHRYSFFWKGEAIPVSTTEAPPEDLYPYYCVYGEEFAPQYIARDNPENEDAFNADPYEDPPEVSIHTLDMRGIYRECAFVPGDRFLVRTLNWNECKFELEKVGKDDWRHDDFNEWQKAAEKRFETVLPCLVPEQAPRNKSPSHIGMAVNVLGKSRLIHWKNFYMRKQIE

SEQ ID NO: 40691 - DNA, 642 bp, Unknown
  Obtained from environmental sample
  misc_feature (1)..(642): n is a, c, g, or t
gtgagagttcaggcaagcgttaaacaggtgcgcccttatcttgccggctttgtggcaaaaggcaagccgatttccgatccgttacttagggacatgattcaaacgcaggaaaaacttgcgtggaatttcggccgtaaacggcggacaatttcgatgggtctttaccgcacctcgttaataaaatggcctatcatttacaagggcgttgatcccgattccgtttcctttgtgccgctccagtgggacacgccccttactctgcgtgaaattcttaaacagcaccccaagggtaaagaatacgcatttattcaggaacacgaaccgattcatccgctgttgaccgatacggagggatttattctttcatatccgcccatcatcaattcaaacgatctcggcgcggtgcaggtcggcgacagcgaagtttttgtggaacttacgggaacggacattgcgtgcctcaaccttgccgcatcaatagtcgcctgcgatcttgcagataacggttttaccatagaacccgtagaagttgagtatgagtttgatacgccgttcgggaaaaatatggtaacgccgtattatttccaagaaccgattttctgttcgctcttcaggatagaaaaatttctcggcgaaaaataa

SEQ ID NO: 40692 - protein, 213 aa, Unknown
  Obtained from environmental sample
  misc_feature (1)..(213): Xaa is any amino acid
MRVQASVKQVRPYLAGFVAKGKPISDPLLRDMIQTQEKLAWNFGRKRRTISMGLYRTSLIKWPIIYKGVDPDSVSFVPLQWDTPLTLREILKQHPKGKEYAFIQEHEPIHPLLTDTEGFILSYPPIINSNDLGAVQVGDSEVFVELTGTDIACLNLAASIVACDLADNGFTIEPVEVEYEFDTPFGKNMVTPYYFQEPIFCSLFRIEKFLGEK

SEQ ID NO: 40693 - DNA, 582 bp, Unknown
  Obtained from environmental sample
  misc_feature (1)..(582): n is a, c, g, or t
atgcatcgttctgtttccaacgaaacaagtaataaatcaaacaacgaacgcctcgaatttttaggcgactcaattctaggcgcggtctgcgcttctcttttgtatcaggcttacaaagataaagccgaaggagaactggcaaaaataaaagccgtagttgtttccgaggacatactttccggcattgcgttaaatcttggaatagataaaatgctgcttcttggcaagggcgaagaaatgtccggcggcagaacaaaaaaagctattcttgccgacgctctggaggcgttaatcggcgcgttgtatcttgattccggctacaagcccgcctttgattttgtcagcgattgcgttcagcctgaaattgacaaagtaaccggcacaaattatcacaaagattataaatctattttgcaggaatactgccagagggaataccgctgttaccctgaatacattatggtgaaacgcaccggacctgagcatgaccgcatattctggatggaagtgcgcataggcgataaagtttacggcgcgggaactgggcggaatagaaaagctgcggaacaggaagctgcttaa

SEQ ID NO: 40694 - protein, 193 aa, Unknown
  Obtained from environmental sample
  DOMAIN (134)...(193): Double-stranded RNA binding motif
  misc_feature (1)..(193): Xaa is any amino acid
MHRSVSNETSNKSNNERLEFLGDSILGAVCASLLYQAYKDKAEGELAKIKAVVVSEDILSGIALNLGIDKMLLLGKGEEMSGGRTKKAILADALEALIGALYLDSGYKPAFDFVSDCVQPEIDKVTGTNYHKDYKSILQEYCQREYRCYPEYIMVKRTGPEHDRIFWMEVRIGDKVYGAGTGRNRKAAEQEAA

SEQ ID NO: 40695 - DNA, 777 bp, Unknown
  Obtained from environmental sample
  misc_feature (1)..(777): n is a, c, g, or t
atggccgcatttctgtcaaaaaatctcggccttcaatccgggagttttgtcggtcttgcgctggaaaacagccatctctggcaggtttgtttttgggcgctgctcatggacggctataagccggtacttattgacgtaaatcaaaaagaagaaatagtcgattacattattgaaagcgccggaatacagactctcatagttaaaaatccgtttgagctaaaaaataaagtcaggcagattccggcggatgagttaaaatccgtaaaagaaaaagccgaagttacccctcaatgggcggataccctcgccctgtgtacgtctggcacaacggcgacgtcaaaggttctcgtttttgacggagccgcgattacaagccagcttaatggtttttacaggacttatgttaacgcgccgcgtatcgcgaccgcgccgacgcctgtaaaaatactcgcgttcctgccccttcatcacgtgctgggctttattacctcctgcatagcatatccctttttaaacaaaaccattgtctaccttagagacagagcgcccgcgtcaatacaaagcgcatgccaaaaaaccggcgttacccacatggtttccgtcccccttctcattaacaatttgaaaaacggggtaattcggaaagttaggcaggaagatccaaaaaaggaaaaagcgcttcaattcctgatgaaagtcagcctttttattcaaaagctggcgccaaagaccggggacgtttttgtaagaaaacatattacaaaatcgcgttattaa

SEQ ID NO: 40696 - protein, 258 aa, Unknown
  Obtained from environmental sample
  misc_feature (1)..(258): Xaa is any amino acid
MAAFLSKNLGLQSGSFVGLALENSHLWQVCFWALLMDGYKPVLIDVNQKEEIVDYIIESAGIQTLIVKNPFELKNKVRQIPADELKSVKEKAEVTPQWADTLALCTSGTTATSKVLVFDGAAITSQLNGFYRTYVNAPRIATAPTPVKILAFLPLHHVLGFITSCIAYPFLNKTIVYLRDRAPASIQSACQKTGVTHMVSVPLLINNLKNGVIRKVRQEDPKKEKALQFLMKVSLFIQKLAPKTGDVFVRKHITKSRY

SEQ ID NO: 40697 - DNA, 762 bp, Unknown
  Obtained from environmental sample
  misc_feature (1)..(762): n is a, c, g, or t
gtgggcgggacgcatgttcccacggattcgctgaagtttattaacgggcttggccatatcgcgactattggctatgggatgaccgaatgcggaattatcgcgtttgagccggggactgtttttaagaaaaggattaacggcacaaccgggcccctcatgcacggttttacaggtaaaatcgttgacgctgacggcaatgaggctgaagtcggggagcttcttcttaaagggacctcaatgcactcgggcagaatgcagaatggcggcatgatcccttccgatgttgatgaaaacggctggctgcataccggggacatcgcgcgttatgtgaaaggctcgcttgttattgaaggccgcgtaaaagaagtaatattgaacgaatcgggggaaaatatataccctgacgagctagaagattattttgacgggctttctaaccttgtagagagatattgcatacttggtttaaatgacaagggcaatgaaaaaatagccattgttgttgaagttaaaaaagacaccaataatgaaaaaggttttgaggaaatttcaaatatagttaataccgttaacggacagcttccgttcctgaaaaggataaaacttatttacgcggccaacgagcctatgcccctcgccaacgggatgaaagtaaaacgtcaaaaactcaaggaaatgcttgaaaacaattcatttccggcagcggaaattcaaatggacgtaagttcgcagccgccctccaatggccgcccctgcggttga

SEQ ID NO: 40698 - protein, 253 aa, Unknown
  Obtained from environmental sample
  misc_feature (1)..(253): Xaa is any amino acid
MGGTHVPTDSLKFINGLGHIATIGYGMTECGIIAFEPGTVFKKRINGTTGPLMHGFTGKIVDADGNEAEVGELLLKGTSMHSGRMQNGGMIPSDVDENGWLHTGDIARYVKGSLVIEGRVKEVILNESGENIYPDELEDYFDGLSNLVERYCILGLNDKGNEKIAIVVEVKKDTNNEKGFEEISNIVNTVNGQLPFLKRIKLIYAANEPMPLANGMKVKRQKLKEMLENNSFPAAEIQMDVSSQPPSNGRPCG

SEQ ID NO: 40699 - DNA, 1221 bp, Unknown
  Obtained from environmental sample
  misc_feature (1)..(1221): n is a, c, g, or t
atggtcggcggcgtagcgtcgatggttggcgccgctattgtcggtccgcgtatcggcaagtattccaaaacgggcgaagcccgcgctattccgggacacagcttaacgcttggcgcactcggcgttttcatactctggttctgctggtttggttttaacggcggctctactacttccatgacgggagaaaatatcgtatctgccagtaaaatttttgttacaacaaaccttgcggccgcgaccgctgcggtctttaccatgttcattacatggatacgctacaaaaagcctgatgtgtcaatgacgcttaacggcgctcttgccggtcttgttgcgattaccgcgggatgcgacgcagtatcacctttcggcgcgttctgcataggtatcgcggcggggtttgtaattgtattcggcattgaatttgttgacaaagttttaaaaattgacgacccggtcggcgcaatcggcgtacacggccttgccggagcggcaggaacaattcttaccggcatattcgcgcttcccggcagccaagaggatcctactttgttcggtttagcgtacggcggcggatggaagatggttggcattcaggctgtcggcgttgttgcggtagctgcgtgggtagcgataacaatgtccatcatctttacgattatcaagaagacaatgggtctgcgtgttacacgcgccgaagaaattgcgggtcttgatattaccgaacacaacattgcgagcagctatgcggattttatgacatctctggtaacaggctttgcgcctgaagatctcnaacaactgtccgacaaggatgttccggtaaatgtggcaattcccgttgtaaacaactcaaagcccggcgcaaagatgacaaaaataacaatcattaccaatcaaaataaacttacaaggcttcataccgcgcttgacagtatcggcattacaggcctcacggttaccaacgtccttggtcatggtatgcaaaaaggacatacggaatattaccgcggttctcctgtaactataaaactgcttcccaaggttcaaattgatataatagtatgcaaaataccgccacaaaccgtcatagacgccgtgaaaaaggtattgtatacaggaaatgtgggcgacggcaaaatattcatttcggatattgagaatgtcgttaaagtccgcacgggagagcaaggatacgacgctttgcaagataacgaataa

SEQ ID NO: 40700 - protein, 406 aa, Unknown
  Obtained from environmental sample
  DOMAIN (1)...(249): Ammonium Transporter Family
  misc_feature (1)..(406): Xaa is any amino acid
MVGGVASMVGAAIVGPRIGKYSKTGEARAIPGHSLTLGALGVFILWFCWFGFNGGSTTSMTGENIVSASKIFVTTNLAAATAAVFTMFITWIRYKKPDVSMTLNGALAGLVAITAGCDAVSPFGAFCIGIAAGFVIVFGIEFVDKVLKIDDPVGAIGVHGLAGAAGTILTGIFALPGSQEDPTLFGLAYGGGWKMVGIQAVGVVAVAAWVAITMSIIFTIIKKTMGLRVTRAEEIAGLDITEHNIASSYADFMTSLVTGFAPEDLXQLSDKDVPVNVAIPVVNNSKPGAKMTKITIITNQNKLTRLHTALDSIGITGLTVTNVLGHGMQKGHTEYYRGSPVTIKLLPKVQIDIIVCKIPPQTVIDAVKKVLYTGNVGDGKIFISDIENVVKVRTGEQGYDALQDNE

SEQ ID NO: 40701 - DNA, 450 bp, Unknown
  Obtained from environmental sample
  misc_feature (1)..(450): n is a, c, g, or t
ttgggttcgcttctggatgcggtaaaatcaggcgatttaattatttgttcggaattgtcaagactgagaagaaatctttttatgatcatgtcgatacttaatcagctaatgatgaatgaagtaagaatatggacaataaaagataattacaggttaggtgacaatatccaatcaaaagttttggcttttgcgttcagtctgtctgctgaaattgaacgcgaactgctttctcaaagaacaaaagaagccctttcgcgtaaacgttccgaaggtaaagttttgggcaggccttacggcagtaaatcctcttatgtaaaactgacagggcgcgaacaggatataaaaatgcttcttgaaaggcaattttcaaaaagagcgataagcaggatatacggtgttgacagaaatactgtgacctctttcctgaaagaaagaatgatattcccataa

SEQ ID NO: 40702 - protein, 149 aa, Unknown
  Obtained from environmental sample
  misc_feature (1)..(149): Xaa is any amino acid
MGSLLDAVKSGDLIICSELSRLRRNLFMIMSILNQLMMNEVRIWTIKDNYRLGDNIQSKVLAFAFSLSAEIERELLSQRTKEALSRKRSEGKVLGRPYGSKSSYVKLTGREQDIKMLLERQFSKRAISRIYGVDRNTVTSFLKERMIFP

SEQ ID NO: 40703 - DNA, 732 bp, Unknown
  Obtained from environmental sample
  misc_feature (1)..(732): n is a, c, g, or t
atgtattcccttcattatttgccatcaggacatatattcatacataccacggacaactgcgatatggtggtagatgccatgctgcaaacggaatacagcgaagaattctgccttgcgcgggactttaatgaagattttattagccgcctcatgaaggctggttttttggtcatgtccacagaactaaaggacgaagattcagacacagaaaatgaaaacgaggcagcggaaccattttacattctgcttcccaagcttcaccttattagatcggtgctgtttttccctgacctgcatataaagaaaagcatacgccctttcatttcaaaatacgaattatgcgtaaatacggactttgattttgttcttgataaatgcgtgcagatccatggccgggattggcttaccccgccgcttgtagaggttcttaaaagccttcatcgcagcgatgcagatgcaaagccattttctttcgcagtctaccgggaagggaatctcagagcaggagaaataggcgttgtcatcgggcaggtttacaccagctatacgggctattacgaagaagataacgccggaaccgttcagataatcctcatggcccgatggctggaagaaaacggctttgcttttctcgatctgggaatgcccctagattacaaaaccgccctgggagcaaaggacatttccccgggtctattcgtggagctgttcaggggcgcgagaggtttataa

SEQ ID NO: 40704 - protein, 243 aa, Unknown
  Obtained from environmental sample
  DOMAIN (66)...(230): Leucyl/phenylalanyl-tRNA protein transferase
  misc_feature (1)..(243): Xaa is any amino acid
MYSLHYLPSGHIFIHTTDNCDMVVDAMLQTEYSEEFCLARDFNEDFISRLMKAGFLVMSTELKDEDSDTENENEAAEPFYILLPKLHLIRSVLFFPDLHIKKSIRPFISKYELCVNTDFDFVLDKCVQIHGRDWLTPPLVEVLKSLHRSDADAKPFSFAVYREGNLRAGEIGVVIGQVYTSYTGYYEEDNAGTVQIILMARWLEENGFAFLDLGMPLDYKTALGAKDISPGLFVELFRGARGL

SEQ ID NO: 40705 - DNA, 666 bp, Unknown
  Obtained from environmental sample
  misc_feature (1)..(666): n is a, c, g, or t
atggcaaataatgaagggaatacatcgattataagtatacacagcttattgactattttccgctttatttgcaatcatttagctatgtttgcgtgtccgccctgtaccagtaaatttctcccaagggagtaccggggcgttgcagaaaaattatttcctcccaatgggttttccaggggcaaggggccttcgatagatgctgccggagcttttgccaatatacttggcataggggaagactataagaggctctggaataattataaatcaggacaggcaattgggagttttctggaacatttccagaataatttagaccttttaattcaaaagacatgggtggaaaaagcggacgaagtaagaaaggaagacctgcaggatcaggttccgccttttattgccttaattgaaaatggggattatgccaaagcccttgaagaatttggcgcaatattggaagaactggcatacctcttctttagcgcccagagccaaaaagacgattttgccgaatacgttttacggattgatactcagatggggcttttttggtggtatggcgggcagattaacggcgcaaaaggagcgccatggatagaaagcattgacaggaatgtgatttatgctctcctgcttnctgggatatgctaccttacgagtttttag

SEQ ID NO: 40706 - protein, 221 aa, Unknown
  Obtained from environmental sample
  misc_feature (1)..(221): Xaa is any amino acid
MANNEGNTSIISIHSLLTIFRFICNHLAMFACPPCTSKFLPREYRGVAEKLFPPNGFSRGKGPSIDAAGAFANILGIGEDYKRLWNNYKSGQAIGSFLEHFQNNLDLLIQKTWVEKADEVRKEDLQDQVPPFIALIENGDYAKALEEFGAILEELAYLFFSAQSQKDDFAEYVLRIDTQMGLFWWYGGQINGAKGAPWIESIDRNVIYALLLXGICYLTSF

SEQ ID NO: 40707 - DNA, 681 bp, Unknown
  Obtained from environmental sample
  misc_feature (1)..(681): n is a, c, g, or t
gtgcattcaacttttagacggcatactttgccacaacggggagtggctgttgaaaagtacataaacaatcctgaaaaaacaggagaaatgctttttgcggaataccaaaaatgccttgccgaagaagatacgagaaacctgcgcagcatgacggttgaaggctgcatagtgcgagtctccgatgtgatagcctatataggaagggatatagaggattcaattgctgtgaacttgataaagagggaggatattcccgccgatatttgcgaggttctagggaatacaaacaagcaaatagtaaattctcttgttttggacataataaacaatagctatggcaaaggctacatatctttttcaaaggaagttttcaaagctttggataatctgaaaagctggaattataaaaacatatacaacaacccaaaaaaaatgtccgaagacaacaaaatacaagcgatgttcaactacgtgctgaattccatttcaagcgaaaacctgcaagggaacatcaaactgcaatacgagaaatggaaagacgggcaaaacaaagaatacttcaaggaaaacggtccagcgcgcattgccgcagactatctctccggcatgacggacgattttttgatgagttcctacaccgagcttgtggtgccgaaatcatttgggtttggctttggataa

SEQ ID NO: 40708 - protein, 226 aa, Unknown
  Obtained from environmental sample
  misc_feature (1)..(226): Xaa is any amino acid
MHSTFRRHTLPQRGVAVEKYINNPEKTGEMLFAEYQKCLAEEDTRNLRSMTVEGCIVRVSDVIAYIGRDIEDSIAVNLIKREDIPADICEVLGNTNKQIVNSLVLDIINNSYGKGYISFSKEVFKALDNLKSWNYKNIYNNPKKMSEDNKIQAMFNYVLNSISSENLQGNIKLQYEKWKDGQNKEYFKENGPARIAADYLSGMTDDFLMSSYTELVVPKSFGFGFG

SEQ ID NO: 40709 - DNA, 387 bp, Unknown
  Obtained from environmental sample
  misc_feature (1)..(387): n is a, c, g, or t
ttgcacgaatttgaagatatgtcttttgatttgatagttttgccgggcggaggctccggaacccaaaatttgcgggagagcgatccggtaaaagaactgcttttaaagagctatgatgtgggtaagcaaatagctgctatatgcgcagctcccaaggttctagcgagcatgggaattctccgcaatcattttgcgacaagccatccggacaataggcaggatattgaacctcattgcaaaaaatatctggatgctccagttgttattagcgaaaacataataacatcaaggggagcaggaaccgctgcggaatttggcttttgcctattatcgctgcttgtaggttttaaggtatctgctgaggttaaaagtaagatgatattttaa

SEQ ID NO: 40710 - protein, 128 aa, Unknown
  Obtained from environmental sample
  DOMAIN (2)...(114): DJ-1/PfpI family
  misc_feature (1)..(128): Xaa is any amino acid
MHEFEDMSFDLIVLPGGGSGTQNLRESDPVKELLLKSYDVGKQIAAICAAPKVLASMGILRNHFATSHPDNRQDIEPHCKKYLDAPVVISENIITSRGAGTAAEFGFCLLSLLVGFKVSAEVKSKMIF

SEQ ID NO: 40711 - DNA, 1005 bp, Unknown
  Obtained from environmental sample
  misc_feature (1)..(1005): n is a, c, g, or t
ttggcacgagaaactgaaaaagttgtaaagaaaataattgagcaagtacgcgctaacggagacactgcaatcagaaaatacgcttccaagtttgacaaatcttccccccaacggcttgaagttccgcttacggaagcaaaatgcgcccttaatcagttacgcaaaactacccccgctcttgtaaacgcaatggaacttgccgcccttcacataaaacgcttttccgagaaacagcgggaacaattcaccaattttgaatttgaaatggaaccgggtcttatcacggggcagcgtataattcccgttcaaaaggcggcaatttatattcccggcggacgtttcccgcttttttcctcagtcctcatgtgcatgattcccgctttttgttcaggtgtggaagaagtgattctctcttctcccccgaccgttgacggtcttcccgataaaaaaatacttgccgccgccatgatagcgtctgaaattacacataacaaaaatgtccgtatcttcgctatgggcggcgcacaggcaatcgccgctcttgctcttggcactgattcagtgcctcgcgcggacgttatcgccggtcccggcaataaatttgtcgtgactgcaaaaaagctcctgttcggcgaagtagggatagattttatcgccggccccacagacgtattgatcatcgcggatgggcgctctggtgacggcgatattgaaaaaactgccgatcttgtcgcggctgatatgcttgggcaatccgagcatgatccggacgcacgctccagagtattggttccaaacatagaacttgccgaaaaaatttcctcggctgtcgagcgtaggctaataactctgtcaacggaaaaaacgcccgcgcttctctggacgcgggagggcttgttatcatctataaggcacaggaagaggcgatacgcatcgccaacacaatcgcgcccgaacatcttgagcttcaggttggcgataccgacagttggattcccctgttga

SEQ ID NO: 40712 - protein, 334 aa, Unknown
  Obtained from environmental sample
  DOMAIN (2)...(326): Histidinol dehydrogenase
  misc_feature (1)..(334): Xaa is any amino acid
MARETEKVVKKIIEQVRANGDTAIRKYASKFDKSSPQRLEVPLTEAKCALNQLRKTTPALVNAMELAALHIKRFSEKQREQFTNFEFEMEPGLITGQRIIPVQKAAIYIPGGRFPLFSSVLMCMIPAFCSGVEEVILSSPPTVDGLPDKKILAAAMIASEITHNKNVRIFAMGGAQAIAALALGTDSVPRADVIAGPGNKFVVTAKKLLFGEVGIDFIAGPTDVLIIADGRSGDGDIEKTADLVAADMLGQSEHDPDARSRVLVPNIELAEKISSAVERRLITLSTEKTPALLWTREGLLSSIRHRKRRYASPTQSRPNILSFRLAIPTVGFPC

SEQ ID NO: 40713 - DNA, 1041 bp, Unknown
  Obtained from environmental sample
  misc_feature (1)..(1041): n is a, c, g, or t
atgggtactacggttttgtttatgcctactacgatacaaagaaaagcccttcgcgtattaaagggcggggctaaacatattttgctgtttgggggcagccgttcaggcaaaacgaccgtattggttatggcgattattttccgcgctttgatgtatgcgggttccaggcatttaatttgtcgttatcgggctaaagacgctcgttcatcggtactgcgggaaacattgataccgtggcttgataataccgtggggaaaagcggttatacctaccttgcccatgaaagtatgataacgctttataacggttctgaaatttggattggtgggcttggcgatagagagcaagcggacaaaattctaggacacgagtattgcactatttattttaatgagattagccaattaagttatgccgctgttactaccgcctattcaagattggcaatgagagttaagggctgtaggaacttgttttattacgactgcaatccggggtcgccccttcattgggcttataagatttttgttttgaagcggactttccttactggcgaactgttagagaaacctgaattgtatcaatcaatgttattaaatccagaggataaccgagaaaacttaccggaagattatatcaatgacattcttgacacattgccggaaaaacaaaaagcccgctttcgtgatggtctttgggtaaaagccgagggcgttatatacgaccgctttgacgaaacgatgatagtaaaagccgatgaccttcctgaacaatttgatagatacgctgcggggcaagacttcggacttaacattactttcgtgaaaattgggtgggttggcgatgtggtttatgtcctttgtgattatggggctttcaatatgactactcaatcattcaatgaggaagttacggcgcggggctggtttgagtgtcctgacggaatgggcttgcctgtgtattgcgatccagcggggggagaaaggatacaggaaataacaggcggtactaaagcaaataattctgtgacagcggtatag

SEQ ID NO: 40714 - protein, 346 aa, Unknown
  Obtained from environmental sample
  misc_feature (1)..(346): Xaa is any amino acid
MGTTVLFMPTTIQRKALRVLKGGAKHILLFGGSRSGKTTVLVMAIIFRALMYAGSRHLICRYRAKDARSSVLRETLIPWLDNTVGKSGYTYLAHESMITLYNGSEIWIGGLGDREQADKILGHEYCTIYFNEISQLSYAAVTTAYSRLAMRVKGCRNLFYYDCNPGSPLHWAYKIFVLKRTFLTGELLEKPELYQSMLLNPEDNRENLPEDYINDILDTLPEKQKARFRDGLWVKAEGVIYDRFDETMIVKADDLPEQFDRYAAGQDFGLNITFVKIGWVGDVVYVLCDYGAFNMTTQSFNEEVTARGWFECPDGMGLPVYCDPAGGERIQEITGGTKANNSVTAV

SEQ ID NO: 40715 - DNA, 819 bp, Unknown
  Obtained from environmental sample
  misc_feature (1)..(819): n is a, c, g, or t
atgacaggcgttatattatccatatcaaaaaaggccgctccgtatggggcggtttatttttcatttgtgagagaaggaactatgaagaatattatcgtcaaagacgaaagaaactaccaggtaatcgctggcaacgcgatttccgtactggacgccctcccgccttcaatctatgaagtctattaccagcgcgattctgggttcagcctaaacgaaatcgaacaggctttcaattccgcaggcaaactttacggcgaggtagagtctataaccgatagggttttaagcacatttgaaaaagtgaaaggcaacctgggagctttatttacaggccctaaaggagttggaaaaagcctgacggtaaggaatatctgccaaaaagccataaagaaagggctgccagtgatattagccaagaaatatttcagcaacgtcactcagttcattgaaacaatttaccagccttgcgtagtcgtctttgacgaatttgaaaaaatataccctgtcagaaggcagagcgaccagaacgaccttgaaagccaggaaagctttttgaatttatttgattcatcgcttgcagggaagaagctgttcctgttgacttgcaatgactggtttgacctatctgagtttttattaaatcggcctggaagaatccattaccatttcaagtaccaccgccttaccgttggtgaaatatcggcgtactgcacggacaacctcgccaaagaaaaacataggcttatccctgaaatctgcgcgtcaggcgcacgcatccctaatttctcttacgatatgttaaagtgcggttgtatttga

SEQ ID NO: 40716 - protein, 272 aa, Unknown
  Obtained from environmental sample
  DOMAIN (106)...(272): ATPase family associated with various cellular activities (AAA)
  misc_feature (1)..(272): Xaa is any amino acid
MTGVILSISKKAAPYGAVYFSFVREGTMKNIIVKDERNYQVIAGNAISVLDALPPSIYEVYYQRDSGFSLNEIEQAFNSAGKLYGEVESITDRVLSTFEKVKGNLGALFTGPKGVGKSLTVRNICQKAIKKGLPVILAKKYFSNVTQFIETIYQPCVVVFDEFEKIYPVRRQSDQNDLESQESFLNLFDSSLAGKKLFLLTCNDWFDLSEFLLNRPGRIHYHFKYHRLTVGEISAYCTDNLAKEKHRLIPEICASGARIPNFSYDMLKCGCI

SEQ ID NO: 40717 - DNA, 1008 bp, Unknown
  Obtained from environmental sample
  misc_feature (1)..(1008): n is a, c, g, or t
atgatcagatcggccgagaagactggcggaagaagaagcagacggcaggaagaaatgcagtctgtctttgaacttatccaggttgagccggacgtatttaacgacttcatggcggatatggaacatgagtttgaagagattgatataatacttaaaaacgactctctatccacgcatgacgcgcttgtaaaaatttaccagtctgttcacgccattaaatcaaacgccgtaattcttggattaaacgtatttggcaacaaggtacataacctggaatcgaaaataaagaaattacgggaaatgcagggagatgtttcgttcggtgaaatgttgaatctgaccatggatatagaaaaaatatccaaggaaaaagaaggattcagggatattcttagcaagcttcaaagttacgcgggaagcggcggtaagagcgcgggaacgggtgaaaaacaaaatatcaaagtattaattgaatctcttacaaaaaccacttccagagtcgccgaagatttagataagaaaattaaatttgtcccctctgacattgatcccgaagccattgacaaaggtccaagacgggtaatgaaagaaatactaatgcaacttatccgtaattccgccctgcacgggatagaaatgccggatgaaagaaagaccaagggtaaaaacgaaacgggtataataaaactttccatcaagatgacggaagatcacaaaaatattcatataaaacttattgacgacggaagaggtcttgattacaagaagattgcccaaagagcgttagccaataaattaatcaaaccggaagacgcaaaaaatcccgacgtgttaatgaaagtaatattcatgcccggctttagcaccgctgatacggaaacagttcacggcggaagaggaataggtttaaatcttgtacgcgaccgtataaaagaagtaaaaggttccattaaagttaaatcagaagccaacaaaggaacgctgttctttatatcacttcctgtttga

SEQ ID NO: 40718 - protein, 335 aa, Unknown
  Obtained from environmental sample
  DOMAIN (190)...(335): Histidine kinase-, DNA gyrase B-, and HSP90-like ATPase
  misc_feature (1)..(335): Xaa is any amino acid
MIRSAEKTGGRRSRRQEEMQSVFELIQVEPDVFNDFMADMEHEFEEIDIILKNDSLSTHDALVKIYQSVHAIKSNAVILGLNVFGNKVHNLESKIKKLREMQGDVSFGEMLNLTMDIEKISKEKEGFRDILSKLQSYAGSGGKSAGTGEKQNIKVLIESLTKTTSRVAEDLDKKIKFVPSDIDPEAIDKGPRRVMKEILMQLIRNSALHGIEMPDERKTKGKNETGIIKLSIKMTEDHKNIHIKLIDDGRGLDYKKIAQRALANKLIKPEDAKNPDVLMKVIFMPGFSTADTETVHGGRGIGLNLVRDRIKEVKGSIKVKSEANKGTLFFISLPV

SEQ ID NO: 40719 - DNA, 372 bp, Unknown
  Obtained from environmental sample
  misc_feature (1)..(372): n is a, c, g, or t
atggagtcggcaaaaaacggaaaattaagtcaggttgatcttttagtcggcgatattactgatacaagccttagttttttaaacggcgagagtaccgcttccaatttcggaaaaatgctggataccgccacccacagcgatattgccctagctattatcaacatggtgtatcaggtaatcggtgttctttccgtttttgcggcaaaggcaaagaattacagccgtgttattgttacgggaaacggcaataaaaacccgataggtaaaaaagttcttaccgatgtttccgccatgtatggaattgaatttgtctatcctgaatatgccgaatatactacggcgattggagccggattatcaaacaggaagtga

SEQ ID NO: 40720 - protein, 123 aa, Unknown
  Obtained from environmental sample
  misc_feature (1)..(123): Xaa is any amino acid
MESAKNGKLSQVDLLVGDITDTSLSFLNGESTASNFGKMLDTATHSDIALAIINMVYQVIGVLSVFAAKAKNYSRVIVTGNGNKNPIGKKVLTDVSAMYGIEFVYPEYAEYTTAIGAGLSNRK

SEQ ID NO: 40721 - DNA, 390 bp, Unknown
  Obtained from environmental sample
  misc_feature (1)..(390): n is a, c, g, or t
gtggaaggggtctttgcatgcggcaatgtgctccatgtgcatgacctggtggactgggtagcccaggaagcccgaagggccggcattcaggctgcgtcctggctcaagggcataagccccgcaacccagatacgcattaaggcgggttccaatgtgcgctacgtgaaccccggaaagctcaatccccagggggaaaacaagctcttccttagatccatgatcataaagaacgacgcggttctggagctaaagctggataaccaggtcttcaaaaccatcaggcagaaccatgtccagccttcggagatgatcagcgtaacgataaaccccaaggatatggaaaagattcggtttagtaccgagtccgtaatggaagcgagtattggttag

SEQ ID NO: 40722 - protein, 129 aa, Unknown
  Obtained from environmental sample
  misc_feature (1)..(129): Xaa is any amino acid
MEGVFACGNVLHVHDLVDWVAQEARRAGIQAASWLKGISPATQIRIKAGSNVRYVNPGKLNPQGENKLFLRSMIIKNDAVLELKLDNQVFKTIRQNHVQPSEMISVTINPKDMEKIRFSTESVMEASIG

SEQ ID NO: 40723 - DNA, 393 bp, Unknown
  Obtained from environmental sample
  misc_feature (1)..(393): n is a, c, g, or t
atgcgtgaattaatctgtatcgtgtgtcctattgggtgttcgctttcggtaaaagagggaccgacatccgagggcttgtcttctttggtcatcacggggaaccgttgcaaccggggggcggcatatgcggaggaagagattcgcactcccaagcgtgtggtgaccgctacctgcggtattgcctttacgcccgaagaaccaggttccggcggccttaccgcgccccggcgggttccggttaaatcaagcgcaccctgtcccaaggaaaagatatttgagcttcttgaggatatttattctctcaaactgagcctgccggtcaaagccggagataggctcattacagactggaaaggctcaggtattgacgtggttgcggtcaggagcctttga

SEQ ID NO: 40724 - protein, 130 aa, Unknown
  Obtained from environmental sample
  DOMAIN (2)...(128): Protein of unknown function (DUF1667)
  misc_feature (1)..(130): Xaa is any amino acid
MRELICIVCPIGCSLSVKEGPTSEGLSSLVITGNRCNRGAAYAEEEIRTPKRVVTATCGIAFTPEEPGSGGLTAPRRVPVKSSAPCPKEKIFELLEDIYSLKLSLPVKAGDRLITDWKGSGIDVVAVRSL

SEQ ID NO: 40725 - DNA, 876 bp, Unknown
  Obtained from environmental sample
  misc_feature (1)..(876): n is a, c, g, or t
gtggggcatacacgtgccgttcgtgggacgggcgacaaggatgttgggcggagcacaatgatgacaaaaacgaaaagacaaaccgcgttgctgtgcgccgccgctgtgctctttcttgtctcctcatgcgccgcccgcaccaataagcgcggcagcgccgagagcgaggctatactgccccagatagacgtcataaaggttaaggagagcgccgacgaagccctgcgcaccgccaacgacctcagacgcgaaaacgaggcgctcaacgcgaagataacggagctcgacaaccgtctgattctcctctccgaggaggtgtccaacgtctccacggccaagatagaggaactggagacgcgcctggctctcctcacagaggcctacaaagacatgttcgtgaagatacaggcgatagagatcgcagtgcgccccgtgccaaagccgaccccgccgccgcccaataggtcgaccttcaccacaacttccgacgggttcatcgtggcgtcgccggagtacgagatgttccaaacgggcntgcgcctcttcaacaaccgcagttacgaaaagtcgctggccatgttcaccgactgcttaggcaaattccccgacggcgagtaccgcgacagggtgcagtactggataggggagtgcaactaccagctcaagcggatggaacaggctatcgaggcgtacaaaaaagtgttcacctaccaaaactcctccaaggccgacgccgcgcaattccaaatagcgctggcctaccaaaagatggggcagacggaaaaagcgagggcggagttcaggaggctcgttgaacggtatccggcgagcagttacgtcgagagggcgaagaagtatatttcggaactaaaatga

SEQ ID NO: 40726 - protein, 291 aa, Unknown
  Obtained from environmental sample
  DOMAIN (244)...(277): Tetratricopeptide repeat
  misc_feature (1)..(291): Xaa is any amino acid
MGHTRAVRGTGDKDVGRSTMMTKTKRQTALLCAAAVLFLVSSCAARTNKRGSAESEAILPQIDVIKVKESADEALRTANDLRRENEALNAKITELDNRLILLSEEVSNVSTAKIEELETRLALLTEAYKDMFVKIQAIEIAVRPVPKPTPPPPNRSTFTTTSDGFIVASPEYEMFQTGXRLFNNRSYEKSLAMFTDCLGKFPDGEYRDRVQYWIGECNYQLKRMEQAIEAYKKVFTYQNSSKADAAQFQIALAYQKMGQTEKARAEFRRLVERYPASSYVERAKKYISELK

SEQ ID NO: 40727 - DNA, 921 bp, Unknown
  Obtained from environmental sample
  misc_feature (1)..(921): n is a, c, g, or t
atgacggaaaacgtccttatataccttaccgaaatgcagaaaagagggcatcaggagtaccttgaaacgaggatttttacggcgttaaaagacgaagagcgtgaatttatcaaaaataacgccggaaaacccataccgatagtcgccgaattcagcaattatccgatttcatttttcaatacgcaggaaaataaatgggacggaatatttttcgaggtgctggagcaggtctcaaatcttaccggtttaaaatttaagatcattaacgaaaacgatacgccgcttttaaaattgatagacatgcttgaaaaaggcgaggcgcagatactgcctgaacttcatcaaacaaaagaatatgacggccgttttttatggtctaaaattccgattataaacgacaactttgcgattatatccagaagcgaattccgcaacataaacgtaaacgacgtttttcatttgcatgtggcaattcgcagggaaaccatatattcggaaatgtttaaaacaatttttcccgcccacaggaattttacagagtatgaaacaatggacgacaactgggaagcgttaaggagaggcgatgtagacgtgattttcgcaagccgccgaaggctggttatttacaccaattattacgagctttcggattttaaacttaaccttgttttcgatcacgcgtttaattcttatttcgcctataacaaaaacgctaaggttcttcaatcaattatggacaaggcgttaaacgttattgacataaataatatggcaaaccagtggatatacaggacttacgattaccgcgttaagatggcggcggcccagcgcccctggctgttcggaacttcgatttcgttttttcctggttcttgtgcctggggtcgggtaatgttgataagaagccgcactggtcggtag

SEQ ID NO: 40728 - protein, 306 aa, Unknown
  Obtained from environmental sample
  DOMAIN (45)...(264): Bacterial extracellular solute-binding proteins, family 3
  misc_feature (1)..(306): Xaa is any amino acid
MTENVLIYLTEMQKRGHQEYLETRIFTALKDEEREFIKNNAGKPIPIVAEFSNYPISFFNTQENKWDGIFFEVLEQVSNLTGLKFKIINENDTPLLKLIDMLEKGEAQILPELHQTKEYDGRFLWSKIPIINDNFAIISRSEFRNINVNDVFHLHVAIRRETIYSEMFKTIFPAHRNFTEYETMDDNWEALRRGDVDVIFASRRRLVIYTNYYELSDFKLNLVFDHAFNSYFAYNKNAKVLQSIMDKALNVIDINNMANQWIYRTYDYRVKMAAAQRPWLFGTSISFFPGSCAWGRVMLIRSRTGR

SEQ ID NO: 40729 - DNA, 804 bp, Unknown
  Obtained from environmental sample
  misc_feature (1)..(804): n is a, c, g, or t
atgccgggcatgccgtatccaccaagaaagaacgaccatcctgtaatatacagaaatgtacctgaagggcgtatactacaggaattccaattgatctacattacgagcggggagggaatttttatctgcgacggcaaaacctaccaggtaaaacccggttcaattatgcttatattgccgggacttaagcattcttatatgccattagctgaaacaggctggtgtgaatactgggtcggttttaagggcgagtatttttccagactccttgatgaaaagcgtttttcacctaaaaatattttctttgaaactggtctccatgattcaattatgttacttttcaaccaaatatttgacgaggtaagagcccagcgtccgctctatcaaatgaaagcctgcgctgcaattttatccctaattgccgaagtactgagcagggaacggcgtaaagagcaatccagctatttcgaacagatcgtagctaaagcaaaatatttaatggaaacaaatgtttatggtacgattaatatgttaggcatttccgatcaacttgggattagcacttctcggtttaaccagatctttaaaacctatacttcaatgacaccttatcaatattacatacacataaaaatacacaaggcagaagtaattctggaacaggatgatatttccgttaaggaagcgtcatacaaaatgggttttgaagatcagtactatttttccagactctttaaaaataaaacaggtatttcaccttccgcatggaaaaagcgttacaaaaccgggaaaactccttactaa

SEQ ID NO: 40730 - protein, 267 aa, Unknown
  Obtained from environmental sample
  DOMAIN (13)...(146): AraC-like ligand binding domain
  misc_feature (1)..(267): Xaa is any amino acid
MPGMPYPPRKNDHPVIYRNVPEGRILQEFQLIYITSGEGIFICDGKTYQVKPGSIMLILPGLKHSYMPLAETGWCEYWVGFKGEYFSRLLDEKRFSPKNIFFETGLHDSIMLLFNQIFDEVRAQRPLYQMKACAAILSLIAEVLSRERRKEQSSYFEQIVAKAKYLMETNVYGTINMLGISDQLGISTSRFNQIFKTYTSMTPYQYYIHIKIHKAEVILEQDDISVKEASYKMGFEDQYYFSRLFKNKTGISPSAWKKRYKTGKTPY

SEQ ID NO: 40731 - DNA, 729 bp, Unknown
  Obtained from environmental sample
  misc_feature (1)..(729): n is a, c, g, or t
ttgacacgaaggctttttatgcgcttgcggaaaagctgctggttttcagggagagccgtaatgcctgatgccggagaacgcgcttacgcctatgccaaagcctgcggaataatcggcaagtcgtttgtcgggaaaagggtacgcggcctggaaagggcaagccggctttccgagctggacaggattgtattccccgcttccgctaaaagtttgcctgaaaaagaactgctccgcgatctggaaaaaaggatcattggccgggaagtaaattccattatctccattgtggattgtttttccaaaccgcctgagtttcttacattgcttatacgcagctatgaatacacagaccttttaagcgcgatcaacgcgtccagggaaaaagaaaaaatcgccccgagccatgtcgatctgggaaattttcagaccgtgcgttttggcgcatggccagatattccaaaaatgatacaagggacggcctttgaatttcttttggataagctggataaggcaagctctgataaggcaggtatctccgaaaagcaaaattttgctttccaaagccttcttgatcagcattattacagcgccctctggaacgcccttttatcccttccggcaggggacaggcaggcggcacaaaaaatcctttccgacgaaatctcgctaaaaaattcctcctgggcgctcaggcttcgcaccttttaccattgcccgacaagaagttaa

SEQ ID NO: 40732 - protein, 242 aa, Unknown
  Obtained from environmental sample
  misc_feature (1)..(242): Xaa is any amino acid
MTRRLFMRLRKSCWFSGRAVMPDAGERAYAYAKACGIIGKSFVGKRVRGLERASRLSELDRIVFPASAKSLPEKELLRDLEKRIIGREVNSIISIVDCFSKPPEFLTLLIRSYEYTDLLSAINASREKEKIAPSHVDLGNFQTVRFGAWPDIPKMIQGTAFEFLLDKLDKASSDKAGISEKQNFAFQSLLDQHYYSALWNALLSLPAGDRQAAQKILSDEISLKNSSWALRLRTFYHCPTRS

SEQ ID NO: 40733 - DNA, 321 bp, Unknown
  Obtained from environmental sample
  misc_feature (1)..(321): n is a, c, g, or t
gtgcatgaagcgatagtcagcctggattatcaactggacgattactcggactggtcatcgtggcgctggatagactttctcaatcctccggtagaaggcaggcattggcaggctgacccaaggttttttcagaacgccgcttcaaggtatttgtataatcttgcaaggcataatttcaggattaatccctcttcgcttgatactattttttgctttataaagcttaaacagtttgaggaggatattcttacaagcagcgccgaagggctgggaataggaatgcccgtaaaggaaactctttcaatgctgggggttgaataa

SEQ ID NO: 40734 - protein, 106 aa, Unknown
  Obtained from environmental sample
  misc_feature (1)..(106): Xaa is any amino acid
MHEAIVSLDYQLDDYSDWSSWRWIDFLNPPVEGRHWQADPRFFQNAASRYLYNLARHNFRINPSSLDTIFCFIKLKQFEEDILTSSAEGLGIGMPVKETLSMLGVE

SEQ ID NO: 40735 - DNA, 609 bp, Unknown
  Obtained from environmental sample
  misc_feature (1)..(609): n is a, c, g, or t
atggatcagatcggccgaggccaccaggaattagtacgaacattggattatatcctcaaccgctgtaacgaaagggatattgaagcggtggccgccgcgataatccgccgccgcagggacatagccatgtttggcagtatgcctgtcgccccggatcccggcagcctggcaaaagagctaaccgcccagctcaacattgatgggaatatcgaaggcctaaaaaacagcgttcgggattacgccatacggataataaagcaacaagccccggaacttacggatgagcagatcgaagaattaacccgctcctggattcctcaaaaagcgtccggcgcgaagagcgggataaagcagaaaggcggccttgacgagtccatcccacgcgatattttggcctctatggtagaccagtttgtttctttttccatggggcacatggaagaggaagaggacaacgccctgcggcgggaaatggggccctggccggataagtattggaacgcttttcccaacgttatccggctccttataaaggattatctaaagggcgaggtggacgaagtcggctttaatacccgaatggggctcgcccttgatatgcgctcctaa

SEQ ID NO: 40736 - protein, 202 aa, Unknown
  Obtained from environmental sample
  misc_feature (1)..(202): Xaa is any amino acid
MDQIGRGHQELVRTLDYILNRCNERDIEAVAAAIIRRRRDIAMFGSMPVAPDPGSLAKELTAQLNIDGNIEGLKNSVRDYAIRIIKQQAPELTDEQIEELTRSWIPQKASGAKSGIKQKGGLDESIPRDILASMVDQFVSFSMGHMEEEEDNALRREMGPWPDKYWNAFPNVIRLLIKDYLKGEVDEVGFNTRMGLALDMRS

SEQ ID NO: 40737 - DNA, 720 bp, Unknown
  Obtained from environmental sample
  misc_feature (1)..(720): n is a, c, g, or t
ttggaggaaaagttgaaaaggtcctttgtattattcacggcattaaccgttcttggcatgatcggtatctcctgctctaaaaacacactccatatttacaactggagttattacactccgccgtcagtaatcgaaaaatttgaaaaagaattcggcgtccgtgtgataattgacgagtacgcaagcaacgaggaaatgtacaccaagctcaagaccggaggctccggttacgacattgtgtttccttcgcaggattatgtgtcgattatgatccaccagggaatgtttgaaaaaatcgacagaagcttaattccgaatctcagtaacatcgatccggcagtgctcagaaaaaccgattacgatcccagcatggattattcagttccctattactggggcgccgccggagttctggtgaacacagccaaggtgccgaattttgaaaagagctggtcaatttttgcccgcagcgatctccgcaacaggatgaccatgctggatgacatgagggaagtaatgggcgacgctttggtatacctcggttactctgtgaacagcaaaaaccctgccgagattgaagcggcaaaaaatcttgttaacagccagtggaagcccaatttaaccaaatttgacgccgaagctttcggcaaaggttacgcaaacggcgaattctgggttgtccagggttacgctgaagtggttttcgtaagaaataattga

SEQ ID NO: 40738 - protein, 239 aa, Unknown
  Obtained from environmental sample
  SIGNAL (1)...(26)
  misc_feature (1)..(239): Xaa is any amino acid
MEEKLKRSFVLFTALTVLGMIGISCSKNTLHIYNWSYYTPPSVIEKFEKEFGVRVIIDEYASNEEMYTKLKTGGSGYDIVFPSQDYVSIMIHQGMFEKIDRSLIPNLSNIDPAVLRKTDYDPSMDYSVPYYWGAAGVLVNTAKVPNFEKSWSIFARSDLRNRMTMLDDMREVMGDALVYLGYSVNSKNPAEIEAAKNLVNSQWKPNLTKFDAEAFGKGYANGEFWVVQGYAEVVFVRNN

SEQ ID NO: 40739 - DNA, 747 bp, Unknown
  Obtained from environmental sample
  misc_feature (1)..(747): n is a, c, g, or t
atggccacaatgatattcctttttcttcccctggttattctgattctttattcctttaacaactctacaggcatgaggtgggtgggcttttcgctaaggtggtaccagcggctgtttacggagcgggacctgtggcgcagtttttggaacagcataatcattgcctttagctccgccataaccgccactgtgatcggaaccttcggggcaatcgggataaactggtaccgcttccggcttagaaactatgtgcagacagtttcttttttgccgatgatactgcctgaaataatcatcggcgtatcgctttcaattttctttgcgggtttgggcatacctttgggtttatttacaattttcgcggcacacactacctttaacctgccttttgtttttcttatggtaatggcgcggctggacgagtttgatttttcaataattgaggccgcccaggatttgggcgccagtgaaaaagagacccttttaaaagttacgcttcccatttgtatgccaggaattatttcaggacttttaacggcagttaccctctcccttgaagatttcgttataaccttctttgtggcggggcctggttcatccacattgccgatttttattttctccgccattacacgcaaggggggagtaaccccggtaataagcgcgctttcggtaattatgattttgggcactgtacttttgacatatctcttaagaaactttttgaaatacatcgcagcaaaatag

SEQ ID NO: 40740 - protein, 248 aa, Unknown
  Obtained from environmental sample
  SIGNAL (1)...(20)
  DOMAIN (44)...(243): Binding-protein-dependent transport system inner membrane component
  misc_feature (1)..(248): Xaa is any amino acid
MATMIFLFLPLVILILYSFNNSTGMRWVGFSLRWYQRLFTERDLWRSFWNSIIIAFSSAITATVIGTFGAIGINWYRFRLRNYVQTVSFLPMILPEIIIGVSLSIFFAGLGIPLGLFTIFAAHTTFNLPFVFLMVMARLDEFDFSIIEAAQDLGASEKETLLKVTLPICMPGIISGLLTAVTLSLEDFVITFFVAGPGSSTLPIFIFSAITRKGGVTPVISALSVIMILGTVLLTYLLRNFLKYIAAK

SEQ ID NO: 40741 - DNA, 732 bp, Unknown
  Obtained from environmental sample
  misc_feature (1)..(732): n is a, c, g, or t
atggacgagcggccgcttcggcgctccccggcggtgattgggggggtgtatgtccattcagcccgcgatcctgaacgggaagggaggcgtcttgcggaggctgccgccgcggacggggaaacaggaccggtggtcattttgggatttgggcttggttatgcggcgcaggcgctggcggaacttgccccgcggcggcccattatcatcgtggaaaaaaacatctgtctgctgcgcacggctctggaactgcgggacttgagcagcctgctgtcccggcccggcgtggcgtttataccgggcggctccggtgagggaataagcggcaccctttctttttttgaaaaaaaaaccggcgaaaaacgcgcaccctgcattatgcgcaaccggacgctgaccggtctggatgaacaatggtatgcttcaatagaaaaccatattcatagttgggcgatgcgggatgatgtcaacgcggcaacgctgaaaaaattcggcaggcgctggatacgcaacttttcccgcaatatgagcgccattcgggacttgccgggcatttcccggcttgcgggtctggcggcgggtggatgtgcctgcggcacatccgctgccggtttttcttgccgccgccggaccggggctggacagcatcgcccccctactgccggaaatacgccaacgctgcatcgtggtggcagtggacaccagtctgcgcttcctgttgaggaacggcgttga

SEQ ID NO: 40742 - protein, 243 aa, Unknown
  Obtained from environmental sample
  misc_feature (1)..(243): Xaa is any amino acid
MDERPLRRSPAVIGGVYVHSARDPEREGRRLAEAAAADGETGPVVILGFGLGYAAQALAELAPRRPIIIVEKNICLLRTALELRDLSSLLSRPGVAFIPGGSGEGISGTLSFFEKKTGEKRAPCIMRNRTLTGLDEQWYASIENHIHSWAMRDDVNAATLKKFGRRWIRNFSRNMSAIRDLPGISRLAGLAAGGCACGTSAAGFSCRRRTGAGQHRPPTAGNTPTLHRGGSGHQSALPVEERR

SEQ ID NO: 40743 - DNA, 450 bp, Unknown
  Obtained from environmental sample
  misc_feature (1)..(450): n is a, c, g, or t
atgggggagcagccgcggataaaagtggttaaagctcacgcgcgcattgagcttcctgcctatgaaagcaaaggaagcgccggcatggatttgcgcgcttttcttgagacggatgttacaattccgcctctcggcagggtgaaaatcccaaccgggttaaggcttgaaattcccgaaggctacgaagcgcaggtgcgcccgcgttcaggtttggcgataaattcaggacttaccgtccttaattcgccgggtactatagattcggattaccgcggggaactggaaataatactgattaatttgggcgccgataatgtggttataaaagacgggcagcggattgcgcagcttgtaaccgctcctgtttccagagcgcttcttgcagaggcgcaaactcttgccgaaaccgaaagggcgggcggcgggttcggttctacaggcgttaattga

SEQ ID NO: 40744 - protein, 149 aa, Unknown
  Obtained from environmental sample
  DOMAIN (14)...(147): dUTPase
  misc_feature (1)..(149): Xaa is any amino acid
MGEQPRIKVVKAHARIELPAYESKGSAGMDLRAFLETDVTIPPLGRVKIPTGLRLEIPEGYEAQVRPRSGLAINSGLTVLNSPGTIDSDYRGELEIILINLGADNVVIKDGQRIAQLVTAPVSRALLAEAQTLAETERAGGGFGSTGVN

SEQ ID NO: 40745 - DNA, 351 bp, Unknown
  Obtained from environmental sample
  misc_feature (1)..(351): n is a, c, g, or t
atgatggccgagagcgaagccgccgttatgggcattgcctcggatccggaaattaacagggtatatgacggcgttgtaaagcgcatcatggatttcggcgcttttgtggaaattctgcccggcaaggaaggacttgtgcatatcagcaaactttccagacagcggattgcgcaggttacggacgtgttaaaagaaggccagcagattcccgttaaactgattgaaattgacaagcagggcaggttaaacctttcctatatagacgctattgatccgaacggctcttccgattcttcgtccgacagaggcacaggaagagatgagcgtccccggaataacaaccgccgttaa

SEQ ID NO: 40746 - protein, 116 aa, Unknown
  Obtained from environmental sample
  DOMAIN (15)...(87): S1 RNA binding domain
  misc_feature (1)..(116): Xaa is any amino acid
MMAESEAAVMGIASDPEINRVYDGVVKRIMDFGAFVEILPGKEGLVHISKLSRQRIAQVTDVLKEGQQIPVKLIEIDKQGRLNLSYIDAIDPNGSSDSSSDRGTGRDERPRNNNRR

SEQ ID NO: 40747 - DNA, 600 bp, Unknown
  Obtained from environmental sample
  misc_feature (1)..(600): n is a, c, g, or t
ttgggttatctcgcggggcttatcactacaagctcaatgcccaatgccaacagtgccaaacagatcggttttatctgtgctcaggaatatcccctgctgagcaggcaaatggttccaggctttatcgaaggagcgcgccgtgtcgatccgagcattgaactggatttccgcgttattggtaattggtatgacgcaaacaaggccgccgaacttgcgtccggtatgattaacgccggagtcgacgtgtttacttctattgccggcggcgcggcgcagggactgacgcgtaccataaaagagcgcggcgcttattcagtgaattttaataccaacgattacagccaggcgccgggtttcattgtgggctgcggtaaaatggaacagaaaaaactggtaaaagaaatacttgcggacgtacttgccggaaaaatcaactacggcgactcaaaaacggtcggcgttaaagaaggctacctggattttatttctgatgatcccggctaccgcgatcatgttcccgcggagatacggcagaaatttgacagcttcatggatgatttccgtaccggacgaattaaatatactgttccggcgctgtaa

SEQ ID NO: 40748 - protein, 199 aa, Unknown
  Obtained from environmental sample
  SIGNAL (1)...(18)
  misc_feature (1)..(199): Xaa is any amino acid
MGYLAGLITTSSMPNANSAKQIGFICAQEYPLLSRQMVPGFIEGARRVDPSIELDFRVIGNWYDANKAAELASGMINAGVDVFTSIAGGAAQGLTRTIKERGAYSVNFNTNDYSQAPGFIVGCGKMEQKKLVKEILADVLAGKINYGDSKTVGVKEGYLDFISDDPGYRDHVPAEIRQKFDSFMDDFRTGRIKYTVPAL

SEQ ID NO: 40749 - DNA, 1491 bp, Unknown
  Obtained from environmental sample
  misc_feature (1)..(1491): n is a, c, g, or t
ttgcatagccggcgaanacggcgcgggcagacaacactgatgaagatacttgacggcattgaaacgccgagcgagggcaatatccgcgttaacggcaatgatgtcaccattgattctccgcttgcagcccgaaaactggggatcgggatggttcaccagaactttatgctgtttcctgaatatacggtcgctgaaaacatcgtcatgggcatagaaccgtgcaaatggggctttctatttgacagcgcacaggccaggactaaagccgcaaaggtgatcaacgcccaccatttttcaattacgcctgacactcctgtgaagagtctcagcattggggaaatgcaacaggttgaaatttgtcgtttgctttaccggaacgcggacattatcattcttgacgagccaagctcggtgcttaccgagaatgaaaccgacgcgctgttcaaaaccttaaagacgttggcaacggcgggaaaatccatttttctcataacacacaaactgcatgaaatcaaagccattgcggacaggattgccgtactcagacgcggcgaattgacggggattcgtgaaacgaaagatgtggatgagtatgaaattgcacgtttaatgatcggcgaaaacaaaattaattttcacagggaaaacaggaaaaaacccgatggtagcggcaaaccggttattgtttttgacaatgttacggtgctaaggcagaggcagcaacgccccttgctgaatcaagtttcattcgaggcgcgatccggcgaaatattgggctttgccggagtgggcggaaacggactgggcgtactggaggcggttcttggcggcttcctccatccggcaacgggagaaattacccataacgggaaggatatctcccgcttgggtatacgccgcctccgcaggcaggggcttgcttatgtgccggccaacaggcagcaggtaggaagttccctgagcgccacagtcgatgaaaatttaatgatagaccgccgccatgcgttttcccgcatggggtttcttgacacaggcgcaatacgcgatttttcggatggacttatcaattgttacaatattgagggcgcggcaggaaccattcccgccgtctcgctttccggcggcaatttgcaaaaattggttttagcgcgagagattgaccagttcaaggactattttgttttttccgaaccgacctggagcctggatataaaagccagcggcttcgtctggtctgaaatcgccgtcttgcgcgaaaaaggcgcggcgatcatactaatatctaccaatcttgacgagattctcaccctcgccgaccgggtcatcgtaatgttccgcggcagcgcgattgcggaattcgataattttgttgataacgctattaaagaaaaaatcggtaactgtatgcagggacttttgccggatactccgaacaataaaacttctatcatgggaaccgccttaaaaatatcctattttatattactataa

SEQ ID NO: 40750 - protein, 496 aa, Unknown
  Obtained from environmental sample
  DOMAIN (255)...(447): ABC transporter
  misc_feature (1)..(496): Xaa is any amino acid
MHSRRXRRGQTTLMKILDGIETPSEGNIRVNGNDVTIDSPLAARKLGIGMVHQNFMLFPEYTVAENIVMGIEPCKWGFLFDSAQARTKAAKVINAHHFSITPDTPVKSLSIGEMQQVEICRLLYRNADIIILDEPSSVLTENETDALFKTLKTLATAGKSIFLITHKLHEIKAIADRIAVLRRGELTGIRETKDVDEYEIARLMIGENKINFHRENRKKPDGSGKPVIVFDNVTVLRQRQQRPLLNQVSFEARSGEILGFAGVGGNGLGVLEAVLGGFLHPATGEITHNGKDISRLGIRRLRRQGLAYVPANRQQVGSSLSATVDENLMIDRRHAFSRMGFLDTGAIRDFSDGLINCYNIEGAAGTIPAVSLSGGNLQKLVLAREIDQFKDYFVFSEPTWSLDIKASGFVWSEIAVLREKGAAIILISTNLDEILTLADRVIVMFRGSAIAEFDNFVDNAIKEKIGNCMQGLLPDTPNNKTSIMGTALKISYFILL

SEQ ID NO: 40751 - DNA, 603 bp, Unknown
  Obtained from environmental sample
  misc_feature (1)..(603): n is a, c, g, or t
ttggtttatgtggaaggcgctccgtattcgacttatacaatccccgctggcggaacacaagttacaaacgacatatcgattattaaaaatatttcccttgataactcggaaaaaattaaaattgacgcgggttgctgctgggacgatatgttagatgacgatgaaactataattgtaccgggagtaggaggaaggcctcctataacgattccccggtcgcaaatactcgtgattattaaacctagaatggaagaaatatttaagctgattaaacaacatcttgactcgctgaatcttccgcgtccgcttggaggaggcgttgtattaacaggcggcggagcgcagttgtcaggcgttgttgatcttgcgaataacattttaaaattacccgcgaggcttgggagtcctataccgtcccaggatttggcgggattggtagaagaataccgaacgccctcttatgccacagtcatagggctcgcgcttgagggaaaccgcagggctggcgttgattcgggcgagagaggcgatcggcacggggataaaaagaacgaagctcttataggcaagttaatatcatggctaagagaggaattcgcataa

SEQ ID NO: 40752 - protein, 200 aa, Unknown
  Obtained from environmental sample
  DOMAIN (1)...(160): Cell division protein FtsA
  misc_feature (1)..(200): Xaa is any amino acid
MVYVEGAPYSTYTIPAGGTQVTNDISIIKNISLDNSEKIKIDAGCCWDDMLDDDETIIVPGVGGRPPITIPRSQILVIIKPRMEEIFKLIKQHLDSLNLPRPLGGGVVLTGGGAQLSGVVDLANNILKLPARLGSPIPSQDLAGLVEEYRTPSYATVIGLALEGNRRAGVDSGERGDRHGDKKNEALIGKLISWLREEFA

SEQ ID NO: 40753 - DNA, 372 bp, Unknown
  Obtained from environmental sample
  misc_feature (1)..(372): n is a, c, g, or t
ttgttcattcctcattgctttatccctccttacttacgctgccttaagcgtactgtttttgtcaacggcacaaaggcccttattgtaaacctcgacaagcgaggcataatgtggtataatatggaaataaggagatcggaaatgccacttgaacactttaaccgcataaccaatgaccccggtgtaatgggcggcaagccctgtattcggggtatgcgcctgacggtgggcagaatactctcccagattggcgcaggagagacgattgaagaactgctggttgattatccctatcttgaacgggaagacgttctgcaatccctgcaatacgccgcatggcttgccgagggccgtgaagtcgcgcttacctga

SEQ ID NO: 40754 - protein, 123 aa, Unknown
  Obtained from environmental sample
  DOMAIN (56)...(113): Protein of unknown function (DUF433)
  misc_feature (1)..(123): Xaa is any amino acid
MFIPHCFIPPYLRCLKRTVFVNGTKALIVNLDKRGIMWYNMEIRRSEMPLEHFNRITNDPGVMGGKPCIRGMRLTVGRILSQIGAGETIEELLVDYPYLEREDVLQSLQYAAWLAEGREVALT

SEQ ID NO: 40755 - DNA, 387 bp, Unknown
  Obtained from environmental sample
  misc_feature (1)..(387): n is a, c, g, or t
atgaaaattattgttgatgtgaaccttgctacccgttgggcgaatatgctttccggccgcgggattgaggctgtccattggactgcaattggagcagctaacgcgcaggacactgaaattatgtcccatgccagggaaaacggttattccgtctttaccaatgatcttgattttagcgctattctggtttctacccgcgcttccagccccagtgttatacaaattcgagctgaagatacccgtcccgaagcgcatcttgatcgggtagcggaagtgcttattaagtattctactgctattgaacaaggtacaataattactattgatccttataagactcgtatgcatattcttccttttgcacttcctgataaaaattctctataa

SEQ ID NO: 40756 - protein, 128 aa, Unknown
  Obtained from environmental sample
  misc_feature (1)..(128): Xaa is any amino acid
MKIIVDVNLATRWANMLSGRGIEAVHWTAIGAANAQDTEIMSHARENGYSVFTNDLDFSAILVSTRASSPSVIQIRAEDTRPEAHLDRVAEVLIKYSTAIEQGTIITIDPYKTRMHILPFALPDKNSL

SEQ ID NO: 40757 - DNA, 624 bp, Unknown
  Obtained from environmental sample
  misc_feature (1)..(624): n is a, c, g, or t
atggaagcaaaaataaagaaatctatcgaattattgataaatcacatcaaacagttaatttctgtagatgccaagaaattggagtacattattgccgctcaaatagcgggcggtcatgtcattttggcggactcgcacggggtggggaaaacctctctcgcgcgggcgttggcgcagtctatcaagtggcgtcctgaggatttagcggctaaaactgccgtgactaaaaccggcgcgaaaaatgccgccgttaaaatggaagggtttagccgtatccagtgtaccgtcgatcttcttcctcaggatattcttggatttaaccgatttatcggtcattcgggagagatgatttttaacaagggtcctgtgttcgcgcattttgtgttatgcgacgagatcaacttgcttacgccgaaaacgcagggaagttttttccaggtaatggaagaacagagcgtgactatcgaggggaaattgtaccaattgacagatcctttttttataattgcaacaatgaatttaaagggtgttcatttattccctctgccaacgcctcagcttgatcgttttatgatcgcctctctctcggctatccaagcgaggaagacgaaacggaaattataa

SEQ ID NO: 40758 - protein, 207 aa, Unknown
  Obtained from environmental sample
  DOMAIN (39)...(192): ATPase family associated with various cellular activities (AAA)
  misc_feature (1)..(207): Xaa is any amino acid
MEAKIKKSIELLINHIKQLISVDAKKLEYIIAAQIAGGHVILADSHGVGKTSLARALAQSIKWRPEDLAAKTAVTKTGAKNAAVKMEGFSRIQCTVDLLPQDILGFNRFIGHSGEMIFNKGPVFAHFVLCDEINLLTPKTQGSFFQVMEEQSVTIEGKLYQLTDPFFIIATMNLKGVHLFPLPTPQLDRFMIASLSAIQARKTKRKL

SEQ ID NO: 40759 - DNA, 924 bp, Unknown
  Obtained from environmental sample
  misc_feature (1)..(924): n is a, c, g, or t
atgattactaaaatcgcgaatgtggaatatgatccgaaagccgattgtccgttatggaagaagtttatcagtgaaattatgaacaataagccggagttgattaattttctacaaaccgctacggggtggtctttgtcgggggatatttcggaacaaactatgtttatcttgtttggaacgggcgcaaacggaaaatcgactttcttaaatacgattatgtatctgttgggcgattatgcggcttctacttttacggaaacttttatgaaaaaatcgggggacggtaacactaatgacgtggctcgtcttcggggtactcggtttgtcgctactacggaagttgaagatgggcggcagctttcagaacctttgattaaaaaaattaccggcaacgaccagatgacggctaggtttctttatggggagttttttaactttacgccgactttcaagatatttttggcgactaaccataaacctgttatcaaggggacggatcacggtatttggcggcggattaagttaattccttttatgacaaggtttaccgaagacaagcaggataaacatcttgaatacaagctgagggaagaagcaagcggtattctaaattggcttttggaaggtgcggcggtttggagaaaagagaggttacaaacgccgaacattgtatcctccgctaccgatgaatacagggttgaaatggacgttattggcaatttcattaatgagagatgtgttcagaaaaaagaattaaaaattaatatcaggtttctttataaggcgtattctgaatggtgcggggaaaataacgaacacgccgtaagcgagagattttttactctgcggttaaaggaaattggttttagtcaatgcaggtcttctacggagaggttttgggttggggttggattgacggattag

SEQ ID NO: 40760 - protein, 307 aa, Unknown
  Obtained from environmental sample
  DOMAIN (1)...(290): Poxvirus D5 protein-like
  misc_feature (1)..(307): Xaa is any amino acid
MITKIANVEYDPKADCPLWKKFISEIMNNKPELINFLQTATGWSLSGDISEQTMFILFGTGANGKSTFLNTIMYLLGDYAASTFTETFMKKSGDGNTNDVARLRGTRFVATTEVEDGRQLSEPLIKKITGNDQMTARFLYGEFFNFTPTFKIFLATNHKPVIKGTDHGIWRRIKLIPFMTRFTEDKQDKHLEYKLREEASGILNWLLEGAAVWRKERLQTPNIVSSATDEYRVEMDVIGNFINERCVQKKELKINIRFLYKAYSEWCGENNEHAVSERFFTLRLKEIGFSQCRSSTERFWVGVGLTD

SEQ ID NO: 40761 - DNA, 1080 bp, Unknown
  Obtained from environmental sample
  misc_feature (1)..(1080): n is a, c, g, or t
ttgacgattgagggaatgtaccaaataccgcccttttcgcttgataagactgaaaaggaaaaactgttgaccgcacggcttttggagcttacgaaacggcacgttgcaaattgcccggagtatgccgccatgatgcgaggcatcggttttgacgccgataagtgcgaaagctattacaatatgccctttttgccggtgagtctctttaaggaactggacttaaaaagcgtcccgcaaatggatgtttttaaggttatgacttcttccggcactacaggacaagcgatttcaaagatttatttggataaagttacagcgagcgcacagcaaaaagtattggttaaggttgtttcggagtttacgggttctgaacgtatgccaatgctgattatcgacagctcttcggcgataaagaaccgcgattcgttttcggcaagaggcgcgggaatattgggtttttcaatattcggttcggatagagtttatgcccttaacgatgaaatggagttggatattccggcggtggaggcgttccttgaaaagcacaaaggcaaaaagcttctactttttggattcacatttatggtttggctgcatctttacagagaattgttgaaacataataagaaaccggatttacggaatagcgtattgatacatggcggaggatggaaaaaactgatctctgaagctgtttcaaaagacgaatttaaaaggcggctgacagatgtgtgcggactttgtgatattcacgactattacggaatggttgaacagacaggttgcgtatatatggaatgtgaatacgggaatttgcacgcgagcgtgttttctgacataattacgcgccgccataccgatttttcgccctgcgctttcggtgaacctggcattgtgcaggttgtttccgtactgcctgaatcctatccgggacatttgcttttaacggaggacgagggcgtcattattggtgaagatgactgcccctgcggacgaaaggggaaatatttccatataaacggcaggcttaaaatggctgaaatacgggggtgcagtgatacttacgcagttggcaggtaa

SEQ ID NO: 40762 - protein, 359 aa, Unknown
  Obtained from environmental sample
  DOMAIN (1)...(359): Acyl-protein synthetase, LuxE
  misc_feature (1)..(359): Xaa is any amino acid
MTIEGMYQIPPFSLDKTEKEKLLTARLLELTKRHVANCPEYAAMMRGIGFDADKCESYYNMPFLPVSLFKELDLKSVPQMDVFKVMTSSGTTGQAISKIYLDKVTASAQQKVLVKVVSEFTGSERMPMLIIDSSSAIKNRDSFSARGAGILGFSIFGSDRVYALNDEMELDIPAVEAFLEKHKGKKLLLFGFTFMVWLHLYRELLKHNKKPDLRNSVLIHGGGWKKLISEAVSKDEFKRRLTDVCGLCDIHDYYGMVEQTGCVYMECEYGNLHASVFSDIITRRHTDFSPCAFGEPGIVQVVSVLPESYPGHLLLTEDEGVIIGEDDCPCGRKGKYFHINGRLKMAEIRGCSDTYAVGR

SEQ ID NO: 40763 - DNA, 585 bp, Unknown
  Obtained from environmental sample
  misc_feature (1)..(585): n is a, c, g, or t
atgtatgggcaaacggaagccactgcgagaatgtcatatctgcccgctgaaaaatcgcttgaaaaatacggcagtatgggaatcgctatacctggcggcgagtttagtttgatagacgctgacggaaaagtaatcacggaaccgaaagtcataggcgaactcgtttataaaggcgcgaatgttactcttggttacgcggaaaacggcgcggatttgataaaaggcgatgaacgcggcggcgtgttaataacgggcgacatggcaaaacgcgacgcggatggattttattatatagtaggacgcaaaaaacgctttctcaaaatcttcggcagtcgcgtaaaccttgatgaaacagagcggctacttaacgatgcgtttgacggtttggactgcgcctgtggcggcatcgacgataaaatgacggtgtttataactgatgccgccgcttctgataaagtaaaaaagtttctggccgagaagaccggtattaatcatgtcgcgtttaggattgttgtaatcgacaaaataccgcgcagtaaagcggggaaaattttatatagcgagctgaacaagattgacgattga

SEQ ID NO: 40764 - protein, 194 aa, Unknown
  Obtained from environmental sample
  misc_feature (1)..(194): Xaa is any amino acid
MYGQTEATARMSYLPAEKSLEKYGSMGIAIPGGEFSLIDADGKVITEPKVIGELVYKGANVTLGYAENGADLIKGDERGGVLITGDMAKRDADGFYYIVGRKKRFLKIFGSRVNLDETERLLNDAFDGLDCACGGIDDKMTVFITDAAASDKVKKFLAEKTGINHVAFRIVVIDKIPRSKAGKILYSELNKIDD

SEQ ID NO: 40765 - DNA, 867 bp, Unknown
  Obtained from environmental sample
  misc_feature (1)..(867): n is a, c, g, or t
ttgtcgcgctgccccaaaacaatagacggcgacctgaaaaatcaatacatcgaaacgtcttttggctttgacaccgcctgtaaaacatacagcgagcttatcggcaatctgatgcgcgacgcgaacagttccaaaaaatactggcactttatcaaattaatgggccgcgccgccagccacatcgccctggaatgcgccctgcaaacccagcctaatgtctgccttatttccgaggaaatacagaccaagcagtactcgctggatgccgtcgtcaacatgatttgcgactcaatcgtcaaacgggcggacaggggcgacaatttcgggatagtccttattcccgaaggtctggttgaatttattcccgaagtcaaaattctcatagaagaactgaacgatgtcattgcccgcgatgaagaagccttttcgaagatcatttcattcattgaccaaattgactggctgagcagccgcctttcggaaccttcataccatctgctcaattcacttcccgccgacataggcgggcaattcctcatggaccgcgatcctcacgggaatgtgcaggtttcccgaatcgaaaccgagaaactgcttatcggcatggttgaacaaagactctattcgctcaaaacggcaaatgtctacaagggaaaattcagcgccctggcccacttcttcggctatgaaggcagatgcgcctttccttccaattttgattcggattattgttattctctgggttacagcgcctttgtattgatagcgtcggggctgaccggctacctttccagcgtgcgcaacctgaccgctccggcccgtgaatggatagcgggcggcgttccctcccatgttaatgaacattga

SEQ ID NO: 40766 - protein, 288 aa, Unknown
  Obtained from environmental sample
  misc_feature (1)..(288): Xaa is any amino acid
MSRCPKTIDGDLKNQYIETSFGFDTACKTYSELIGNLMRDANSSKKYWHFIKLMGRAASHIALECALQTQPNVCLISEEIQTKQYSLDAVVNMICDSIVKRADRGDNFGIVLIPEGLVEFIPEVKILIEELNDVIARDEEAFSKIISFIDQIDWLSSRLSEPSYHLLNSLPADIGGQFLMDRDPHGNVQVSRIETEKLLIGMVEQRLYSLKTANVYKGKFSALAHFFGYEGRCAFPSNFDSDYCYSLGYSAFVLIASGLTGYLSSVRNLTAPAREWIAGGVPSHVNEH

SEQ ID NO: 40767 - DNA, 813 bp, Unknown
  Obtained from environmental sample
  misc_feature (1)..(813): n is a, c, g, or t
gtgccatacagtacttcggcccgcccgaagtgtgcgatgagccaacctttacgctcaaactggaacaggaaaaataacatgaaacggaaccggcgtttttggtgtctcctggcttgcggcgtctgcgctacgggaatttccgcgcagtcaattcgggacagcgccggaatatccgccggctcatctgccttaccggtaaccaaaattacgattttctcttccggacttgcctactatgaacatacggggacgctgaacggccccaccgtgattaacctgccctttaaggcggcggcggtcaacgacgcgctgatgtcgctggtgttaaacgatcccgcctcggcgaaccctgtggtatcgtaccagtcagagcagaccctgtttcaaacactgggaagcctcaaaatcgatctttcccaatcaccggatatggccggcattttaaacggactgcggggaacagaaattgaaatttccgctcccggccccatcagcgggaggatcgtgggcattgaataccgcccgcaaatgtccgccatgggcggcgtaacgcatgatccctggctttccctgtacacggatcaggggattaagatgttcaacctgaaagacattgccgccctgaattttaaggacccgcagatcaacgaagaccttanacgggcgctggatttaatcgtactgtcacgtaactcctgttcgcgggatttggcgctgaatctgccgggaagcggcagccgccgggttactctcagctatgttattcccgcacccggtatggaaggtttcatacccgctggatttggatcgtga

SEQ ID NO: 40768 - protein, 270 aa, Unknown
  Obtained from environmental sample
  misc_feature (1)..(270): Xaa is any amino acid
MPYSTSARPKCAMSQPLRSNWNRKNNMKRNRRFWCLLACGVCATGISAQSIRDSAGISAGSSALPVTKITIFSSGLAYYEHTGTLNGPTVINLPFKAAAVNDALMSLVLNDPASANPVVSYQSEQTLFQTLGSLKIDLSQSPDMAGILNGLRGTEIEISAPGPISGRIVGIEYRPQMSAMGGVTHDPWLSLYTDQGIKMFNLKDIAALNFKDPQINEDLXRALDLIVLSRNSCSRDLALNLPGSGSRRVTLSYVIPAPGMEGFIPAGFGS

SEQ ID NO: 40769 - DNA, 1272 bp, Unknown
  Obtained from environmental sample
  misc_feature (1)..(1272): n is a, c, g, or t
gtgccgggcagccccgcttcgtttgttcaaaatctgtacccgccgtattatctgtcccgcccggtgctgccccttgctatagccggaaccgccgccgcggaggcccatgattcaggttatatcgctctgcgttatgccggggagtcagccgacacaacagccgccgcgccatcacccgccagagcccgttccgagggccgttctaccggacaagtgttcggactcaagtccaatggtcctgccgggctggaatcagatgtcccaaacgagagcatggccggcggggtgattgaaaccgcaacaggcgccgccgcgggggatcagtttgaatttaccgttaaaaccccggtaagccttgaccgccggatgagcgccatgctgccgctggtggaatccccggttgaagcccgccggctgttgattttttccggggcggcagccgccggaggcaaaaatcagcacccccgcctgggcgcggaactgaccaacaccagcgggatgaaacttcccgccggccccattaccgtgtacgacggaggtacctacgcgggggacgcccttattgaattctggaatgaaggcgagaaacggcttatctcttttggcgaagacctttccgtaaacgcggcggtttttgacacgagttcccggacaatcatttcggtcaaaatctcaggcggcgttatgattattaaccgcagccaggaatacattaaaacctacacttttcataatacctcggcgcagataaaatccatcatgattgaacatcctcaaacccccaacgcggttcttgaatctcccgaagccgacgaacagaccccctcagcgtaccgctttaccatgactctgcccgccgaaaaggagattatgcttctggttcgtgagtcgcgtcccattatggaaagaataagcctgattcaactcaggcaggacgctttcctgtcctatatgagcagccaggaaattcctcccccggtacaggcagccctgcggcaggcggttaacctgtggaacgcggttaacgccgccgaagccgccgttaccgaagcggaaaaccgccgttctttcctggcccatgaacaggatcgcatacggaaaaatattgaagtaacgggcaatcaaacccagcaggggcaggagtacctgaagcgtctgcaatcaattgatagcgatattgataagattgccggggaacttgaaaaactccgggcggaagtgaaaaacgcccaaaaaacgtatacggattatctgaacggactgaatttatag

SEQ ID NO: 40770 - protein, 423 aa, Unknown
  Obtained from environmental sample
  misc_feature (1)..(423): Xaa is any amino acid
MPGSPASFVQNLYPPYYLSRPVLPLAIAGTAAAEAHDSGYIALRYAGESADTTAAAPSPARARSEGRSTGQVFGLKSNGPAGLESDVPNESMAGGVIETATGAAAGDQFEFTVKTPVSLDRRMSAMLPLVESPVEARRLLIFSGAAAAGGKNQHPRLGAELTNTSGMKLPAGPITVYDGGTYAGDALIEFWNEGEKRLISFGEDLSVNAAVFDTSSRTIISVKISGGVMIINRSQEYIKTYTFHNTSAQIKSIMIEHPQTPNAVLESPEADEQTPSAYRFTMTLPAEKEIMLLVRESRPIMERISLIQLRQDAFLSYMSSQEIPPPVQAALRQAVNLWNAVNAAEAAVTEAENRRSFLAHEQDRIRKNIEVTGNQTQQGQEYLKRLQSIDSDIDKIAGELEKLRAEVKNAQKTYTDYLNGLNL

SEQ ID NO: 40771 - DNA, 1437 bp, Unknown
  Obtained from environmental sample
  misc_feature (1)..(1437): n is a, c, g, or t
atgtccccggttaagtcgggaaggttatccgctttgtctgcaagttgctctgctatcaaggcatctaaattgggggcggattttgctggagcagcggcgggttttgctggagcggctggtgcggtgtcttcttcgggcggtaggccttttgcaagcaatgagtccatgtctccggttaagtcgggaagattatccgccttgtccgaaagttgttctgctatcaaggcatctaaattgggggcggattttgctggagcagcggcgggttttgccggggcagctggtgcagtatcttcttcgggtaaaccctttgcaagcagagagtccatatccccggttaagtcgggaaggttatccgccttgtcagaaagttgttctgctatcaaggcatctaaattgggggcggattttgcctctgctggttttgctggggcggctggtacagtatcttcttccagcggtaggccttttgcaagcaatgagtccatgtctccggttaagtcgggaaggttatccgccttgtctgcaagttgctctgctatcaaatcgtctaagttcggagcggattttgcctctgttggttttgctggggcggctggtacagtatcttcttccagcggtaggccttttgcaagcaatgagtccatgtctccggttaagtcgggaagattatccgccttgtccgaaagttttctgctatcaaggcatctaaattgggggcggatttttgcctctgctggttttgctggagcagcaggaacggtatcttcttcagcggtaaaccttttgcaagcagggagtccatgtctccggttaagtcgggaaggttctccgccttgtcagaaagttgctctgctatcaaatcgtctaagttcggagcggcttttgcctctgctggttttgctggagcagcaggaacggtatcttcttccggcggtaaaccctttgcaagcagtgagtccatatccccagttaaatcgggaaggttatccgctttgtcagaaagttgttctgctatcaaatcgtctaagttcggagcggcttttgcctctgctggttttgctggagcagcaggaacggtatcttcttccggcggtaaaccttttgcaagcagggagtccatgtctccggttaagtcgggaaggttatccgccttgtccgaaagttgctctgctatcaaagcgtctaagttcggagcggattttgctggagcggctggtgcagtatcttcttccagcggcaaaccctttgcaagcagtgagtccatgtctccggttaagtcgggaaggttctctgctttgtctgcaagttgttccgctatcaaatcgtctaaattgggtgcggcttttgcctctgttggttttgctggggcggctggtacagtatcttcttccagcggtaggccttttgcaagcaatgagtccatgtccccggtaa

SEQ ID NO: 40772 - protein, 478 aa, Unknown
  Obtained from environmental sample
  SIGNAL (1)...(20)
  misc_feature (1)..(478): Xaa is any amino acid
MSPVKSGRLSALSASCSAIKASKLGADFAGAAAGFAGAAGAVSSSGGRPFASNESMSPVKSGRLSALSESCSAIKASKLGADFAGAAAGFAGAAGAVSSSGKPFASRESISPVKSGRLSALSESCSAIKASKLGADFASAGFAGAAGTVSSSSGRPFASNESMSPVKSGRLSALSASCSAIKSSKFGADFASVGFAGAAGTVSSSSGRPFASNESMSPVKSGRLSALSESFLLSRHLNWGRIFASAGFAGAAGTVSSSAVNLLQAGSPCLRLSREGSPPCQKVALLSNRLSSERLLPLLVLLEQQERYLLPAVNPLQAVSPYPQLNREGYPLCQKVVLLSNRLSSERLLPLLVLLEQQERYLLPAVNLLQAGSPCLRLSREGYPPCPKVALLSKRLSSERILLERLVQYLLPAANPLQAVSPCLRLSREGSLLCLQVVPLSNRLNWVRLLPLLVLLGRLVQYLLPAVGLLQAMSPCPR

SEQ ID NO: 40773 - DNA, 771 bp, Unknown
  Obtained from environmental sample
  misc_feature (1)..(771): n is a, c, g, or t
atggactcattgcttgcaaaaggcctaccgctggaagaagatactgtaccagccgccccagcaaaaccaacagaggcaaaagccgcacccaatttagacgatttgatagcggaacaacttgcagacaaagcagagaaccttcccgacttaaccggagacatggactcactgcttgcaaagggtttgccgctggaagaagatactgcaccagccgctccagcaaaatccgctccgaacttagacgctttgatagcagagcaactttcggacaaggcggataaccttcccgacttaaccggagacatggactccctgcttgcaaaaggtttaccgccggaagaagataccgttcctgctgctccagcaaaaccagcagaggcaaaagccgctccgaacttagacgatttgatagcagaacaactttctgacaaagcggataaccttcccgatttaactggggatatggactcactgcttgcaaagggtttaccgccggaagaagataccgttcctgctgctccagcaaaaccagcagaggcaaaagccgctccgaacttagacgatttgatagcagagcaactttctgacaaggcggagaaccttcccgacttaaccggagacatggactccctgcttgcaaaaggtttaccgctgaagaagataccgttcctgctgctccagcaaaaccagcagaggcaaaaatccgcccccaatttagatgccttgatagcagaaaactttcggacaaggcggataatcttcccgacttaa

SEQ ID NO: 40774 - protein, 256 aa, Unknown
  Obtained from environmental sample
  misc_feature (1)..(256): Xaa is any amino acid
MDSLLAKGLPLEEDTVPAAPAKPTEAKAAPNLDDLIAEQLADKAENLPDLTGDMDSLLAKGLPLEEDTAPAAPAKSAPNLDALIAEQLSDKADNLPDLTGDMDSLLAKGLPPEEDTVPAAPAKPAEAKAAPNLDDLIAEQLSDKADNLPDLTGDMDSLLAKGLPPEEDTVPAAPAKPAEAKAAPNLDDLIAEQLSDKAENLPDLTGDMDSLLAKGLPLKKIPFLLLQQNQQRQKSAPNLDALIAENFRTRRIIFPT

SEQ ID NO: 40775 - DNA, 1596 bp, Unknown
  Obtained from environmental sample
  misc_feature (1)..(1596): n is a, c, g, or t
ttgggagcagcttttgctgtagcggcggcgggttttgccggggcggctggtgcagtgtcttcttcgggcggtaaaccctttgcaagcagtgagtccatatctccggttaagtcgggaaggttatccgccttgtctgcaagttgttctgctatcaaagcatctaagttgggagcagcttttgcctctgctggctttgcagcaacggtatcctcttcgggcggtaaaccctttgcaagcaatgagtccatatccccggttaagtcgggaaggttatctgccttgtctgcgagttgttctgctatcaaagcatctaagttgggagcagcttttgctggagcagcggcgggttttgccggggcggctggtgcagtgtcctcttcgggcggcaagccttttgcaagcaatgagtccatatccccggttaagtcgggaaggttttccgccttgtctgcaagttgttctgctatcaaggcatctaagttgggagcagcttttgcctctgctggttttgctggagcagcaggaacggtatcttcttccggcggtaaaccctttgcaagcaatgagtccatatccccggttaagtcgggaagattttccgctttgtctgcaagttgctctgctatcaaggcatctaagttgggagcagcttttgcctctgctggttttgctggagcagcaggaacggtatcttcttccggcggtaaaccctttgcaagcagtgagtccatatccccggttaagtcgggaaggttttccgccttgtccgcaagttgttctgctatcaaggcatctaagttgggagcagcttttgcctctgttggtttgctggagcagcaggaacgggatcttcttcaggtaaaccctttgcaagcagtgagtccatgtccccggttaagtcgggaaggttatccgctttgtctgcaagttgctctgctatcaaggcatctaaattgggggcggattttgctggagcagcggcgggttttgctggagcggctggtgcggtgtcttcttcgggcggtaggccttttgcaagcaatgagtccatgtctccggttaagtcgggaagattatccgccttgtccgaaagttgttctgctatcaaggcatctaaattgggggcggattttgctggagcagcggcgggttttgccggggcagctggtgcagtatcttcttcgggtaaaccctttgcaagcagagagtccatatccccggttaagtcgggaaggttatccgccttgtcagaaagttgttctgctatcaaggcatctaaattgggggcggattttgcctctgctggttttgctggggcggctggtacagtatcttcttccagcggtaggccttttgcaagcaatgagtccatgtctccggttaagtcgggaaggttatccgccttgtctgcaagttgctctgctatcaaatcgtctaagttcggagcggattttgcctctgttggttttgctggggcggctggtacagtatcttcttccagcggtaggccttttgcaagcaatgagtccatgtctccggttaagtcgggaagattatccgccttgtccgaaagttttctgctatcaaggcatctaa

SEQ ID NO: 40776 - protein, 531 aa, Unknown
  Obtained from environmental sample
  SIGNAL (1)...(18)
  misc_feature (1)..(531): Xaa is any amino acid
MGAAFAVAAAGFAGAAGAVSSSGGKPFASSESISPVKSGRLSALSASCSAIKASKLGAAFASAGFAATVSSSGGKPFASNESISPVKSGRLSALSASCSAIKASKLGAAFAGAAAGFAGAAGAVSSSGGKPFASNESISPVKSGRFSALSASCSAIKASKLGAAFASAGFAGAAGTVSSSGGKPFASNESISPVKSGRFSALSASCSAIKASKLGAAFASAGFAGAAGTVSSSGGKPFASSESISPVKSGRFSALSASCSAIKASKLGAAFASVGLLEQQERDLLQVNPLQAVSPCPRLSREGYPLCLQVALLSRHLNWGRILLEQRRVLLERLVRCLLRAVGLLQAMSPCLRLSREDYPPCPKVVLLSRHLNWGRILLEQRRVLPGQLVQYLLRVNPLQAESPYPRLSREGYPPCQKVVLLSRHLNWGRILPLLVLLGRLVQYLLPAVGLLQAMSPCLRLSREGYPPCLQVALLSNRLSSERILPLLVLLGRLVQYLLPAVGLLQAMSPCLRLSREDYPPCPKVFCYQGI

SEQ ID NO: 40777 - DNA, 738 bp, Unknown
  Obtained from environmental sample
  misc_feature (1)..(738): n is a, c, g, or t
atggactcattgcttgcaaaaggcctaccgctggaagaagatactgtaccagccgccccagcaaaaccaacagaggcaaaatccgctccgaacttagacgatttgatagcagagcaacttgcagacaaggcggataaccttcccgacttaaccggagacatggactcattgcttgcaaaaggcctaccgctggaagaagatactgtaccagccgccccagcaaaaccagcagaggcaaaatccgcccccaatttagatgccttgatagcagaacaactttctgacaaggcggataaccttcccgacttaaccggggatatggactctctgcttgcaaagggtttacccgaagaagatactgcaccagctgccccggcaaaacccgccgctgctccagcaaaatccgcccccaatttagatgccttgatagcagaacaactttcggacaaggcggataatcttcccgacttaaccggagacatggactcattgcttgcaaaaggcctaccgcccgaagaagacaccgcaccagccgctccagcaaaacccgccgctgctccagcaaaatccgcccccaatttagatgccttgatagcagagcaacttgcagacaaagcggataaccttcccgacttaaccggggacatggactcactgcttgcaaagggtttacctgaagaagatcccgttcctgctgctccagcaaaccaacagaggcaaaagctgctcccaacttag

SEQ ID NO: 40778 - protein, 245 aa, Unknown
  Obtained from environmental sample
  misc_feature (1)..(245): Xaa is any amino acid
MDSLLAKGLPLEEDTVPAAPAKPTEAKSAPNLDDLIAEQLADKADNLPDLTGDMDSLLAKGLPLEEDTVPAAPAKPAEAKSAPNLDALIAEQLSDKADNLPDLTGDMDSLLAKGLPEEDTAPAAPAKPAAAPAKSAPNLDALIAEQLSDKADNLPDLTGDMDSLLAKGLPPEEDTAPAAPAKPAAAPAKSAPNLDALIAEQLADKADNLPDLTGDMDSLLAKGLPEEDPVPAAPANQQRQKLLPT

SEQ ID NO: 40779 - DNA, 360 bp, Unknown
  Obtained from environmental sample
  misc_feature (1)..(360): n is a, c, g, or t
atgacggacacttatatgtccatgctgatatattccgagcgggactgctatttccgcgtcattcatattgacgtgaacggaaacacgcaggttatttaccccacatcggaaaaggacaacaactttatcaaagcgggggaaacccggcgtatccccgacaacacccgctaccgtatggggccgcctttcggcgaggagataattcttgccgccgcctatgaccgcccttttatcttaatggagcaatcgggaaccttgagcgcggataacatagcccgcggccttacggtggaaggcgacaacaaggcggcgatgagcccttcggcgacggcgaagttcagttataccatattaccgtag

SEQ ID NO: 40780 - protein, 119 aa, Unknown
  Obtained from environmental sample
  misc_feature (1)..(119): Xaa is any amino acid
MTDTYMSMLIYSERDCYFRVIHIDVNGNTQVIYPTSEKDNNFIKAGETRRIPDNTRYRMGPPFGEEIILAAAYDRPFILMEQSGTLSADNIARGLTVEGDNKAAMSPSATAKFSYTILP

SEQ ID NO: 40781 - DNA, 696 bp, Unknown
  Obtained from environmental sample
  misc_feature (1)..(696): n is a, c, g, or t
atgggcattaaattctgctatgaaattgacggtgaaatttccaagccggaagatcgcgaggcgatttacaatttgggcaggggagagctgagcggcgttatttcaactaacgacggctggacttttttcagggcggagagcgagttgaccaaggctgattttgacgattactctgtaatggaaagagtgcgttcttacgttaagaactatgaaagaggacgcatggaagactgggctgtcgggcaagcgaatgaatttatttccgagtcgaaagaaacggggtttgccaatgccgcgcgctggaaaaacttaagcagaaataatttaggaccgcttccgcttaactacgggggagttgatatttttacgacacttgaatcttttaccgaatccggtttaaacgccgacgatcttaaagctttatcacaaaatgaaattttttggaaaagaacttttacaactcctgtaaatactccatgcgagccgcttgttcagggaagcaatgtatttgtgtttattccgacggaagaaacaatagccgaagaatcatcaattgatgaaattgtgtcaaattacaaaaatcaatttgtacaatatacatccgaccaatcattacagaaatattttatgaataacggaaaattgacggatcattttgatgatatttattttaatgttttaaacgccagtaaataa

SEQ ID NO: 40782 - protein, 231 aa, Unknown
  Obtained from environmental sample
  misc_feature (1)..(231): Xaa is any amino acid
MGIKFCYEIDGEISKPEDREAIYNLGRGELSGVISTNDGWTFFRAESELTKADFDDYSVMERVRSYVKNYERGRMEDWAVGQANEFISESKETGFANAARWKNLSRNNLGPLPLNYGGVDIFTTLESFTESGLNADDLKALSQNEIFWKRTFTTPVNTPCEPLVQGSNVFVFIPTEETIAEESSIDEIVSNYKNQFVQYTSDQSLQKYFMNNGKLTDHFDDIYFNVLNASK

SEQ ID NO: 40783 - DNA, 795 bp, Unknown
  Obtained from environmental sample
  misc_feature (1)..(795): n is a, c, g, or t
atgaacataaataatctgaaaatcggagccattcttggctttattattgttacaatgtccttactaagccttatatgggttccgtataattacaataaaatggatcattcaaaacggctcacgcccccgtccgccgcacatcttcttggcaccgacaactttggcagggatattttttcgcgcatcatggcaggaggaagaaattccctgctacttgccgtatgcaccgtaacgggagccgctgctctcggaagcttgctcggccttttggcaggctacatcggcggaattacaggcgaaatcataatgcgttttattgacacgcttaactcgtttcccggaatagtccttgccctccttttggtcgcggtaatgggcaacggccaattcagcctgtttctcgcgctcctgattctttttaccccgagttacacccgcgttatgcgaacaggagccatgcagtacaaagacgcttcttttatacaggcggaaaaaatactcggcgctggtttttttcgcataacattcattcatattctgcctaatctcgccccgtcgctcctttccgcttcggtactggggctttcaaacgcgattctcgcggaagccgcaatgagttaccttggaatgggaatacagccgcccgaaccttcatgggggaggatgttgtttgaagcgcaggcatggtttttcaacgccccgtggtgcgccatagctcccggcatttttataatgctgacggttatcgcttttcacctgttaggcgaaggtattcgcaaaaggtttggaggctga

SEQ ID NO: 40784 - protein, 264 aa, Unknown
  Obtained from environmental sample
  SIGNAL (1)...(23)
  DOMAIN (66)...(264): Binding-protein-dependent transport system inner membrane component
  misc_feature (1)..(264): Xaa is any amino acid
MNINNLKIGAILGFIIVTMSLLSLIWVPYNYNKMDHSKRLTPPSAAHLLGTDNFGRDIFSRIMAGGRNSLLLAVCTVTGAAALGSLLGLLAGYIGGITGEIIMRFIDTLNSFPGIVLALLLVAVMGNGQFSLFLALLILFTPSYTRVMRTGAMQYKDASFIQAEKILGAGFFRITFIHILPNLAPSLLSASVLGLSNAILAEAAMSYLGMGIQPPEPSWGRMLFEAQAWFFNAPWCAIAPGIFIMLTVIAFHLLGEGIRKRFGG

SEQ ID NO: 40785 - DNA, 759 bp, Unknown
  Obtained from environmental sample
  misc_feature (1)..(759): n is a, c, g, or t
atgttacgagaagagatgggacttaacagaaatgttgttatacgctatcttgattggctttcaggctttctttccggcagaacgggaatttcattaagtttccgaggagaagcggtttcctcccttatttcccaacgtattcccgttaccataactttagccatactatctcttttttttattttactcatttccatacctgtctcacttttaaccgtaaaccgcgaagggggcatacttgacggtattgtgaattttttaaccgccgcagggttaagcactcctaacttttttatgggactgctttttatttttttctttggttttggcttaaaactttttatccccggcgaatatattaattacaatgagaatattttcggctttatacgctgtctttgttttcccgccattgcaatcgcaatcccaaacgccgcgattcttgtcaaatttttaagaggctcgctatttgctgaattgcgcggcgattatgtgataatggcaagaagcaagggcgcgggcggactttatatcctgcgtcgccacgttttaaaaaacgcccttttacccgcagttacaatattcgccatgataatcgctgaagttttttcgggcagtatcatcattgaacaggtatttacaattccgggaattggcagacttttaattacggcgataagctcaagagattatccgttaattcaatccctaatgggtttacatagcgtttattatcatcacagccaatactcttgctga

SEQ ID NO: 40786 - protein, 252 aa, Unknown
  Obtained from environmental sample
  DOMAIN (47)...(250): Binding-protein-dependent transport system inner membrane component
  misc_feature (1)..(252): Xaa is any amino acid
MLREEMGLNRNVVIRYLDWLSGFLSGRTGISLSFRGEAVSSLISQRIPVTITLAILSLFFILLISIPVSLLTVNREGGILDGIVNFLTAAGLSTPNFFMGLLFIFFFGFGLKLFIPGEYINYNENIFGFIRCLCFPAIAIAIPNAAILVKFLRGSLFAELRGDYVIMARSKGAGGLYILRRHVLKNALLPAVTIFAMIIAEVFSGSIIIEQVFTIPGIGRLLITAISSRDYPLIQSLMGLHSVYYHHSQYSC

SEQ ID NO: 40787 - DNA, 1140 bp, Unknown
  Obtained from environmental sample
  misc_feature (1)..(1140): n is a, c, g, or t
ttggccaagtattcgaagcgcttcgacgggctgaagcccgccaagctgcgcatcccgcccgccgagatagcggcgcgggcgaggcacgcttcggcggaacttaaaaacgcgatccgcgagaccgtgcgccggttgcgccagtaccacggctgccagggcttgcagatgttcaaggtcagcacgcccgacggcgagatgcgtcaggcggtgagggctttgaaccgcgtggggctttacatcccaggcgggcgcacggtgtacccgtcgagcgtgctgatgaacgtcgttccggcgctgtcggcgggggtcaaggagatcgcggcggtcaccccgccgcaaaaggacggcctcgacgcgggggtcgcgttcgcgctcaacttcctcggggtctccgaggtctaccaagtcggcggggcgcaagcgatagccgcgctcgcctacggcacggagaccatcgcgccggtggacaagatcgtggggcccggcaacgcctacgtcgcggcggcgaagcggctcgtctacggcaaggtggacatagactgcgtggccggcccgagcgaagtggcgatagtcgccgacaagagcgtcgatccgcagctcgtcgcgctcgatctgttggcgcaggcggagcacggctccggcgacgagatcgccgtctgcatagtagagagcaaggtaacggcgaataagatcgccgccgccctcgcaaaagagattaacgtatcaccgtccaaacaaacctttatgaaactgccgccccacgcgataactatattcgtcacaacatcgcgcgcagagagcttggaactctgcgacaccatagcccccgaacacctgcaactgatgaccaccgaggcaaacgacgacgcttggcacgtagccaacgccgccgcgatcttcatcgggtcagacacgccgaccgctttgggagactattttataggcacaaaccacgtcctgccgaccggcggcacggcgcgcttcgcctcgccgctgggcgtggagagtttccaaaagcgcatatctatagccaaagtgtcgctaaaagggctgaaatccgcgatggatatagtacctacattcgcgagggccgaggcgttccaccaccacgcgttgagcgttgaggcgagggggaagtag

SEQ ID NO: 40788 - protein, 379 aa, Unknown
  Obtained from environmental sample
  DOMAIN (1)...(379): Histidinol dehydrogenase
  misc_feature (1)..(379): Xaa is any amino acid
MAKYSKRFDGLKPAKLRIPPAEIAARARHASAELKNAIRETVRRLRQYHGCQGLQMFKVSTPDGEMRQAVRALNRVGLYIPGGRTVYPSSVLMNVVPALSAGVKEIAAVTPPQKDGLDAGVAFALNFLGVSEVYQVGGAQAIAALAYGTETIAPVDKIVGPGNAYVAAAKRLVYGKVDIDCVAGPSEVAIVADKSVDPQLVALDLLAQAEHGSGDEIAVCIVESKVTANKIAAALAKEINVSPSKQTFMKLPPHAITIFVTTSRAESLELCDTIAPEHLQLMTTEANDDAWHVANAAAIFIGSDTPTALGDYFIGTNHVLPTGGTARFASPLGVESFQKRISIAKVSLKGLKSAMDIVPTFARAEAFHHHALSVEARGK

SEQ ID NO: 40789 - DNA, 336 bp, Unknown
  Obtained from environmental sample
  misc_feature (1)..(336): n is a, c, g, or t
ttgcgagggcggcggcgatcttattcgccgttaccttgctctctactatgcagacggcgatctcgtcgccggagccgtgctccgcctgcgccaacagatcgagcgcgacgagctgcggatcgacgctcttgtcggcgactatcgccacttcgctcgggccggccacgcagtctatgtccaccttgccgtagacgagccgcttcgccgccgcgacgtaggcgttgccgggccccacgatcttgtccaccggcgcgatggtctccgtgccgtaggcgagcgcggctatcgcttgcgccccgccgacttggtagacctcggagaccccgaggaagttga

SEQ ID NO: 40790 - protein, 111 aa, Unknown
  Obtained from environmental sample
  misc_feature (1)..(111): Xaa is any amino acid
MRGRRRSYSPLPCSLLCRRRSRRRSRAPPAPTDRARRAADRRSCRRLSPLRSGRPRSLCPPCRRRAASPPRRRRCRAPRSCPPARWSPCRRRARLSLAPRRLGRPRRPRGS

SEQ ID NO: 40791 - DNA, 594 bp, Unknown
  Obtained from environmental sample
  misc_feature (1)..(594): n is a, c, g, or t
ttgcacaaaagcccccggggactgcggttcttgggggcttttttttattgtaatgaacacctattccggcaatgccagcgccagtacttcttcgaagcgctctaccggatggaagctgatgcccttcttcacatggtcgggaatctcgtcaagatcgcgctcgttctgcttggggataataatgtgacgggccttgttccgcctcgcggcgactgttttttccttcaggccgcctatgggaagcaccttgcctgtcagggaaagctcgcctgtcattaccagccgttcggtaaccaccttgtcacgcataagcgaaagcagggccgtggccattgttattcccgccgaagggccgtccttgggcgtcgcgccttcgggaatgtgcagatgtatatggttggaatcaaaccagtcctgcgcgacccggtaacgttctacggccagcttgcgcgccacggtcatggcgatggcggcgctttccttcatcgtatcgcccattttgcctgtaagggtcagcccttccttgcccggaaccgaagtcgcctcgattaccagggtgtcgccgcccatgcttgtccaggcaagccccactga

SEQ ID NO: 40792 - protein, 197 aa, Unknown
  Obtained from environmental sample
  misc_feature (1)..(197): Xaa is any amino acid
MHKSPRGLRFLGAFFYCNEHLFRQCQRQYFFEALYRMEADALLHMVGNLVKIALVLLGDNNVTGLVPPRGDCFFLQAAYGKHLACQGKLACHYQPFGNHLVTHKRKQGRGHCYSRRRAVLGRRAFGNVQMYMVGIKPVLRDPVTFYGQLARHGHGDGGAFLHRIAHFACKGQPFLARNRSRLDYQGVAAHACPGKPH

SEQ ID NO: 40793 - DNA, 2070 bp, Unknown
  Obtained from environmental sample
  misc_feature (1)..(2070): n is a, c, g, or t
atgcgcctcaacatgataaacatagatcatccgggcaagatcgccgattttatcgccagtattctgaatattgacaaggcggagatgcagaagattctggagatcctcaacgtgcgaaagcgcatggaacaggtgctggtgttcatcaaaaaggaacaggagcttctgcggattcaaaaaaagatacagaaagagataaatgaaaaaatagaaaagtcgcaaagggattattttcttaaagaggagttgaaggcgataaagggcgagctgggaatgaccaccgacgccaaaagctccgactaccagcgctttaaggatattattgaaggttttaaatttgaaggcgaggtaaaagaagcggtagagcaggaacttgagaaattcaacctgatggagccgaactcgcccgaattcattgttacgcgcaattaccttgaccttatcgtcagccttccatggaaagatcctgagcctgaaaacttcagcatgaaaaacgccagggagattctggaagcggatcattacggacttgaggacgtaaagaaccgtatcacagagtacctcgcagtgagaaaactgcggggctataacgccgaaagttcttccgctccggcccccgcgcctgccgcgccagcggcggaaacgaaacccgccgaaggcgctgccgccggatctgacagccaaaaaaaacagccccgggtttccgttgattcccctgcgggctccataatctgccttgtagggccgcccggcgtgngaaagacctctgtcggcagatcaatagcccgcgccctgggcaagcagttcttccgtttttcggtgggcggcatgagggacgaggccgagataaaaggccaccgccgcacttacataggggccatgcccggcaaaatactccaggggcttaagatcgtcaaaacaaaggcgcctgtgttcatgatcgacgagattgacaaaatgggggcgagttaccagggcgatccggccagcgcccttcttgaagtgctggatccggagcagaatgtcgctttcagggatcattatctggatatgccttttgatatttcccatattttctttattgttacagctaacaccctggacacaattccccctccgcttctggaccgcatggagataatacagcttcccggctatattgacacggaaaagctggaaatcgcccgcaggtaccttgtccccaaaagccttgagaaaaacggcttgaaaaaaaaccaggtcaaatacaccaaggacagccttttgcacatagccaattcctacgcccgcgaggccggcgtcagaaattttgaaaaaaaccttgacaagattcaccgcaagctggcgaaacagatagtcgaggagagggagaaagccgatgggaccggcgttcccgatgggaccggcgtttccggagaagacgccgctgtcgcgaagcccgtcatattccccatagataaaaagctgattgagaagcatttgggcaagccgatttttcctgaaggcgacataaaaaaagcggacaggccgggaatgtcagtggggcttgcctggacaagcatgggcggcgacaccctggtaatcgaggcgacttcggttccgggcaaggaagggctgacccttacaggcaaaatgggcgatacgatgaaggaaagcgccgccatcgccatgaccgtggcgcgcaagctggccgtagaacgttaccgggtcgcgcaggactggtttgattccaaccatatacatctgcacattcccgaaggcgcgacgcccaaggacggcccttcggcgggaataacaatggccacggccctgctttcgcttatgcgtgacaaggtggttaccgaacggctggtaatgacaggcgagctttccctgacaggcaaggtgcttcccataggcggcctgaaggaaaaaacagtcgccgcgaggcggaacaaggcccgtcacattattatccccaagcagaacgagcgcgatcttgacgagattcccgaccatgtgaagaagggcatcagcttccatccggtagagcgcttcgaagaagtactggcgctggcattgccggaatag

SEQ ID NO: 40794 - protein, 689 aa, Unknown
  Obtained from environmental sample
  DOMAIN (244)...(380): ATPase family associated with various cellular activities (AAA)
  misc_feature (1)..(689): Xaa is any amino acid
MRLNMINIDHPGKIADFIASILNIDKAEMQKILEILNVRKRMEQVLVFIKKEQELLRIQKKIQKEINEKIEKSQRDYFLKEELKAIKGELGMTTDAKSSDYQRFKDIIEGFKFEGEVKEAVEQELEKFNLMEPNSPEFIVTRNYLDLIVSLPWKDPEPENFSMKNAREILEADHYGLEDVKNRITEYLAVRKLRGYNAESSSAPAPAPAAPAAETKPAEGAAAGSDSQKKQPRVSVDSPAGSIICLVGPPGVXKTSVGRSIARALGKQFFRFSVGGMRDEAEIKGHRRTYIGAMPGKILQGLKIVKTKAPVFMIDEIDKMGASYQGDPASALLEVLDPEQNVAFRDHYLDMPFDISHIFFIVTANTLDTIPPPLLDRMEIIQLPGYIDTEKLEIARRYLVPKSLEKNGLKKNQVKYTKDSLLHIANSYAREAGVRNFEKNLDKIHRKLAKQIVEEREKADGTGVPDGTGVSGEDAAVAKPVIFPIDKKLIEKHLGKPIFPEGDIKKADRPGMSVGLAWTSMGGDTLVIEATSVPGKEGLTLTGKMGDTMKESAAIAMTVARKLAVERYRVAQDWFDSNHIHLHIPEGATPKDGPSAGITMATALLSLMRDKVVTERLVMTGELSLTGKVLPIGGLKEKTVAARRNKARHIIIPKQNERDLDEIPDHVKKGISFHPVERFEEVLALALPE

SEQ ID NO: 40795 - DNA, 702 bp, Unknown
  Obtained from environmental sample
  misc_feature (1)..(702): n is a, c, g, or t
atgcttctcaatcagctttttatctatggggaatatgacgggcttcgcgacagcggcgtcttctccggaaacgccggtcccatcgggaacgccggtcccatcggctttctccctctcctcgactatctgtttcgccagcttgcggtgaatcttgtcaaggtttttttcaaaatttctgacgccggcctcgcgggcgtaggaattggctatgtgcaaaaggctgtccttggtgtatttgacctggttttttttcaagccgtttttctcaaggcttttggggacaaggtacctgcgggcgatttccagcttttccgtgtcaatatagccgggaagctgtattatctccatgcggtccagaagcggagggggaattgtgtccagggtgttagctgtaacaataaagaaaatatgggaaatatcaaaaggcatatccagataatgatccctgaaagcgacattctgctccggatccagcacttcaagaagggcgctggccggatcgccctggtaactcgcccccattttgtcaatctcgtcgatcatgaacacaggcgcctttgttttgacgatcttaagcccctggagtattttgccgggcatggcccctatgtaagtgcggcggtggccttttatctcggcctcgtccctcatgccgcccaccgaaaaacggaagaactgcttgcccagggcgcgggctattga

SEQ ID NO: 40796 - protein, 233 aa, Unknown
  Obtained from environmental sample
  misc_feature (1)..(233): Xaa is any amino acid
MLLNQLFIYGEYDGLRDSGVFSGNAGPIGNAGPIGFLPLLDYLFRQLAVNLVKVFFKISDAGLAGVGIGYVQKAVLGVFDLVFFQAVFLKAFGDKVPAGDFQLFRVNIAGKLYYLHAVQKRRGNCVQGVSCNNKENMGNIKRHIQIMIPESDILLRIQHFKKGAGRIALVTRPHFVNLVDHEHRRLCFDDLKPLEYFAGHGPYVSAAVAFYLGLVPHAAHRKTEELLAQGAGY

SEQ ID NO: 40797 - DNA, 417 bp, Unknown
  Obtained from environmental sample
  misc_feature (1)..(417): n is a, c, g, or t
atggcggaaaaactaaaaattgaaatcggaaacgcctctcccgacagaatgatcgataaaatggaagttaaaggcaacgatgccatcacagggcttccgcgcaggctggaaattgattccgtcgaggtaagagaagctcttaaagatccaataacgcaaattatcgatgaaattaaaacagtgcttggaaaaacgccgccggaacttgccgcagatattgtagaccgcggaattgtaatgacgggaggcggttctcttcttaaagggcttgataaacttattcaaaaagaaacgggcgtccccgcgataatcgcggaacagccggaactttgcgtcgcgcttggagcgggaaaatattttgattacataaaaggcgcagaccttaccaaaaatatttatgacagattaaacggataa

SEQ ID NO: 40798 - protein, 138 aa, Unknown
  Obtained from environmental sample
  DOMAIN (1)...(128): MreB/Mbl protein
  misc_feature (1)..(138): Xaa is any amino acid
MAEKLKIEIGNASPDRMIDKMEVKGNDAITGLPRRLEIDSVEVREALKDPITQIIDEIKTVLGKTPPELAADIVDRGIVMTGGGSLLKGLDKLIQKETGVPAIIAEQPELCVALGAGKYFDYIKGADLTKNIYDRLNG

SEQ ID NO: 40799 - DNA, 816 bp, Unknown
  Obtained from environmental sample
  misc_feature (1)..(816): n is a, c, g, or t
atgcagcgtggattctttggtaaatcgccgaggcagggcggcaataaattaccgggagcgcagatcaattcttctgtctttgtatttgtaattttaatcattatttcaacattaatgcttttagtctccagcagaaattttattttcggcgttaaaaatacgggactgtccctgttttcgggagtaagaggcggcatatacgaattatcttctcttgtttcaagaactgtgctgtctattaaagagcttacaaatttaagaaaagaacacgccgaccttttaaaacagcttgatcgttatgaagaactggaacgaagcaacgcggaaatttatcaggagaatatcaggttaaaagaacagcttgatttttcaaagactcttagatacaggcgaataccggcgcaaatatcgggaagagacccgaataatcttttttccgctcttgtcattaataagggaagctactcgggagtttcaaataacatgactgtcgtcgcgtggcaaaacggcgttcaggcattagtgggaaaagtaatacagacaggcgtatttgaaagccttgttatgcctgtttttgacatcaattctttagtatcgtgccgtttttccgtttcgcgttttgagggaatcgtagaagggcagggaagttccgaatcttctttgataatgcgttttgttcccagacgcgcgagagatgaagtgaatatcggggatataattattacaagcggaatgggcggaatatatccgtcgggaattaacttgggacgcgtcagcagtataaatgttcttgaatatgaaacaacttggaaatga

SEQ ID NO: 40800 - protein, 271 aa, Unknown
  Obtained from environmental sample
  DOMAIN (134)...(269): rod shape-determining protein MreC
  misc_feature (1)..(271): Xaa is any amino acid
MQRGFFGKSPRQGGNKLPGAQINSSVFVFVILIIISTLMLLVSSRNFIFGVKNTGLSLFSGVRGGIYELSSLVSRTVLSIKELTNLRKEHADLLKQLDRYEELERSNAEIYQENIRLKEQLDFSKTLRYRRIPAQISGRDPNNLFSALVINKGSYSGVSNNMTVVAWQNGVQALVGKVIQTGVFESLVMPVFDINSLVSCRFSVSRFEGIVEGQGSSESSLIMRFVPRRARDEVNIGDIIITSGMGGIYPSGINLGRVSSINVLEYETTWK

SEQ ID NO: 40801 - DNA, 384 bp, Unknown
  Obtained from environmental sample
  misc_feature (1)..(384): n is a, c, g, or t
ttggcccgccactgcgttcaggggaacgagggagctgcatttcacgcctcgcttgacctaaagccggtgaaccttattgtccgaaaaggcttccggcgcggcctggactcgtactcggctttttttgaaaacgaccgcaaaacttccaccggccttgacggctacctaaaagccctttctattgatacacttgtatttgggggcctggcgactgactactgtgtcctttacagcgcccttgacgccgttggtcttggctataaaaccattgtcgccgccgacgcggtgcgcggagtggactaccccgccggttcgacagagcgggcgcttaaaacccttgaagaagcgggggttatttttgccgcctccggagagatacaatga

SEQ ID NO: 40802 - protein, 127 aa, Unknown
  Obtained from environmental sample
  DOMAIN (1)...(114): Isochorismatase family
  misc_feature (1)..(127): Xaa is any amino acid
MARHCVQGNEGAAFHASLDLKPVNLIVRKGFRRGLDSYSAFFENDRKTSTGLDGYLKALSIDTLVFGGLATDYCVLYSALDAVGLGYKTIVAADAVRGVDYPAGSTERALKTLEEAGVIFAASGEIQ

SEQ ID NO: 40803 - DNA, 648 bp, Unknown
  Obtained from environmental sample
  misc_feature (1)..(648): n is a, c, g, or t
gtgatgtattgttgtatatttatgttttacgttcgtgatggtttgtgtggttcgtggtcaattattgtttttggacactttatgctaaaatcaaacatcgtaatcaccgtccccgaaggactatgcccattcctgaaaacggaggtagagtccctaggcctgcccgtaacctccgtcacgccgacaagcctctcgaccgagggcgcgtccgccgaggccatgctgctcaacctgcacctccgcaccgcgcaccacgtgctctttcagatcgccgcgttccgctgccgcgacgccgacgaactttacaaggaactctcgaaaatactgtgggagacgattataccgtcggacgagtatctgacggtggtctcgaacgtccgcaacccgaccatccgcgacgcccgctttgccaatatgcgctgcaaggacgcgattgtcgaccgtattcaggcgcgcaaagggcgccgtcccgactccgggccggagcagacaggggcggtcgtcagcctctattggcgcgacgagcgctgcaccgtctacctggacacctccggagaaccgctgtcgagacgcggttaccgccgcataccattgggcgcgcctatgcaggagacgcttgccgccggcgtcgtcatggccgcagaataa

SEQ ID NO: 40804 - protein, 215 aa, Unknown
  Obtained from environmental sample
  misc_feature (1)..(215): Xaa is any amino acid
MMYCCIFMFYVRDGLCGSWSIIVFGHFMLKSNIVITVPEGLCPFLKTEVESLGLPVTSVTPTSLSTEGASAEAMLLNLHLRTAHHVLFQIAAFRCRDADELYKELSKILWETIIPSDEYLTVVSNVRNPTIRDARFANMRCKDAIVDRIQARKGRRPDSGPEQTGAVVSLYWRDERCTVYLDTSGEPLSRRGYRRIPLGAPMQETLAAGVVMAAE

SEQ ID NO: 40805 - DNA, 1167 bp, Unknown
  Obtained from environmental sample
  misc_feature (1)..(1167): n is a, c, g, or t
gtgtggttcgtggtcaattattgtttttggacactttatgctaaaatcaaacatcgtaatcaccgtccccgaaggactatgcccattcctgaaaacggaggtagagtccctaggcctgcccgtaacctccgtcacgccgacaagcctctcgaccgagggcgcgtccgccgaggccatgctgctcaacctgcacctccgcaccgcgcaccacgtgctctttcagatcgccgcgttccgctgccgcgacgccgacgaactttacaaggaactctcgaaaatactgtgggagacgattataccgtcggacgagtatctgacggtggtctcgaacgtccgcaacccgaccatccgcgacgcccgctttgccaatatgcgctgcaaggacgcgattgtcgaccgtattcaggcgcgcaaagggcgccgtcccgactccgggccggagcagacaggggcggtcgtcagcctctattggcgcgacgagcgctgcaccgtctacctggacacctccggagaaccgctgtcgagacgcggttaccgccgcataccattgggcgcgcctatgcaggagacgcttgccgccggcgtcgtcatggccgcagaataaaaacaggcgacagctttgtcaaccccatgtgcggcagcgggacaatggccatagaggcggcgctgtcgctgagcggcagggtgcccggattgacaaggcaaaacttcggtttcatgcacttattggggtttgaccttagggcttgggaagagatgagggcagcggcaaaaggtaaagtattgaaaaccatacagtcgcagatcattgccaccgataataatgaaaaggccgtagaagccgcccgcaaaaacgcggcgaccgcgggggtggagcagctgatacgttttgaagtgtgcgactatgcagatacgccggtcccgccgcccccgggcgcggtgatacttaatccggcctacggaatgaggctgggagacgacaaagaactcatagaaacctaccgagacataggcgcctttttcaaacaaaaatgcaagggctatcgtggaggcgtattcacagcaaacacagggctggcggggcaggtcgggcttaaagccaagcgaaagatcccgtttgttaacgggaaaatagagtgtaaactttatgtttacgatttatattga

SEQ ID NO: 40806 - protein, 388 aa, Unknown
  Obtained from environmental sample
  DOMAIN (193)...(384): Putative RNA methylase family UPF0020
  misc_feature (1)..(388): Xaa is any amino acid
MWFVVNYCFWTLYAKIKHRNHRPRRTMPIPENGGRVPRPARNLRHADKPLDRGRVRRGHAAQPAPPHRAPRALSDRRVPLPRRRRTLQGTLENTVGDDYTVGRVSDGGLERPQPDHPRRPLCQYALQGRDCRPYSGAQRAPSRLRAGADRGGRQPLLARRALHRLPGHLRRTAVETRLPPHTIGRAYAGDACRRRRHGRRIKTGDSFVNPMCGSGTMAIEAALSLSGRVPGLTRQNFGFMHLLGFDLRAWEEMRAAAKGKVLKTIQSQIIATDNNEKAVEAARKNAATAGVEQLIRFEVCDYADTPVPPPPGAVILNPAYGMRLGDDKELIETYRDIGAFFKQKCKGYRGGVFTANTGLAGQVGLKAKRKIPFVNGKIECKLYVYDLY

SEQ ID NO: 40807 - DNA, 708 bp, Unknown
  Obtained from environmental sample
  misc_feature (1)..(708): n is a, c, g, or t
atgaagcctcaaaacgtgggggagcttcttgaacttggcagccacgacgccggttttaccggcatagactggataaaggaaagcggagcggatatcgaggaaatactcgatcttggttttgacaaggttcgcattgtcgccgccgttccgcaggattacgatgagacaaaactgcgctcaaaaaaacttgtagtagccacagaatatgtaaaccttgcggaaacatggcttaaatcctccggctatgagtaccgtatcctgcgcacttacggagcgaccgaagttttcccgccggacgacgctgatatgattattgacaacacttcttccggtcagacactgcgcgacaacgggcttaaaattatcggaacgatacttgaatcttccacacgttttgcggcatctcgttccgcccttgccgatcccgaaaaacgccgccgtattgaggagcttgctatgcttttccgcgccgttcttgacgggcacgagcgtgtaatgcttgaaatgaacattcccaaagaacagtttgaatcgcttgcgagccttccggcgatgcgaagcccgacagtcgctccgctttacggagacgcgggctacgccgtaaaaatcgccgttaagaaacacgaagttcccgatattattccgaagttaaaaaacctcggcgctttggatattgttgaatacgatttgcggaaagtggtgctgtga

SEQ ID NO: 40808 - protein, 235 aa, Unknown
  Obtained from environmental sample
  DOMAIN (160)...(233): HisG, C-terminal domain
  misc_feature (1)..(235): Xaa is any amino acid
MKPQNVGELLELGSHDAGFTGIDWIKESGADIEEILDLGFDKVRIVAAVPQDYDETKLRSKKLVVATEYVNLAETWLKSSGYEYRILRTYGATEVFPPDDADMIIDNTSSGQTLRDNGLKIIGTILESSTRFAASRSALADPEKRRRIEELAMLFRAVLDGHERVMLEMNIPKEQFESLASLPAMRSPTVAPLYGDAGYAVKIAVKKHEVPDIIPKLKNLGALDIVEYDLRKVVL

SEQ ID NO: 40809 - DNA, 795 bp, Unknown
  Obtained from environmental sample
  misc_feature (1)..(795): n is a, c, g, or t
atgttaggcaaagagatcagcccgaccgcgtacataaaaaagaccaccctccaaaacgtgctgtcaagcggcaaactcaacgacctgtcgtttatgttggacgataaactcgttgtcttaatcgagcatcaatcgacaatcaataaaaatatgcctttgcgtatgttgcactatatatccgagatatacaaccgcctatacgaaaagaaagatttatacaagaaaaagaagatactcattcccaagcctgtatttatcgttctctacaacggtgaagaagatatagtggattttcaggagtatctgttatcggatttattcaaagatttcgacatatccaaagacccgctgtacttggaattgagggtgcaggtgcgcaatatcaacaaaggccacagcgtagagatagtggagcaaagcccgctcctccgcgattacgttgcgtttgtagaggaagtacgcgaagtaggcaaagaagagggcatgacccccgaattggcgatggagaaagccatagaaaactgcataaaaaaagggatattaaccgattttttgaaccaccataaaacggaggttatgaaaatgctcgtaacggagtgggattacgatttagaaaaggaagtcttaaaagaagaagcccatgagaagggcctatcgaaaaaccgggaggaaggccgggaggaagaacgcgccatactcatcaagagtatgtacgaaaacggactaaccgttgcgcaaagggtacaaagtacaaatatttcagaaacggtcgtcaagcagaaaaaggaagtgtaa

SEQ ID NO: 40810 - protein, 264 aa, Unknown
  Obtained from environmental sample
  misc_feature (1)..(264): Xaa is any amino acid
MLGKEISPTAYIKKTTLQNVLSSGKLNDLSFMLDDKLVVLIEHQSTINKNMPLRMLHYISEIYNRLYEKKDLYKKKKILIPKPVFIVLYNGEEDIVDFQEYLLSDLFKDFDISKDPLYLELRVQVRNINKGHSVEIVEQSPLLRDYVAFVEEVREVGKEEGMTPELAMEKAIENCIKKGILTDFLNHHKTEVMKMLVTEWDYDLEKEVLKEEAHEKGLSKNREEGREEERAILIKSMYENGLTVAQRVQSTNISETVVKQKKEV

SEQ ID NO: 40811 - DNA, 657 bp, Unknown
  Obtained from environmental sample
  misc_feature (1)..(657): n is a, c, g, or t
atgcagcaggatataatgaccgttaatactattgatactgcaaataccgttcggcgcgtttatgttgagaagcggcctgagtatgatgtccactcggctcgtttgatggctgatttgcgggataacctcgggatttcggggcttgacggcgttcggacgctcaatcggtacgacgtggaggggctgaccggcgattactacggggcggctcgggacagtatcttcgcggagcttccggtggacttggtctacgatgaggagatgcccgtacgttccggcgagcgcgtctttgccgtcgagtatctgccggggcagtacgatcagcgggctgacggggcggcgcagtgcgttcaactgttgacgcacgccgcgccgcctaaggtcgcctcggcgcgtatcgtcgtcgtcaggggcgatattgacgagtatgattttcagaggataaagagttactgcatcaaccccgttgactcccgcgaggcctcgcttgacaaacctgtcagcctcgatatgcgagccgaatcgccgccggacgtggcggaactgcgcgggttcgttgatcttgataacgacgggatcgataaggtcaggaaagatctcggcttggcgatgaagattgacgatctgctcttttgccaacaatattttccgcgatag

SEQ ID NO: 40812 - protein, 218 aa, Unknown
  Obtained from environmental sample
  misc_feature (1)..(218): Xaa is any amino acid
MQQDIMTVNTIDTANTVRRVYVEKRPEYDVHSARLMADLRDNLGISGLDGVRTLNRYDVEGLTGDYYGAARDSIFAELPVDLVYDEEMPVRSGERVFAVEYLPGQYDQRADGAAQCVQLLTHAAPPKVASARIVVVRGDIDEYDFQRIKSYCINPVDSREASLDKPVSLDMRAESPPDVAELRGFVDLDNDGIDKVRKDLGLAMKIDDLLFCQQYFPR

SEQ ID NO: 40813 - DNA, 879 bp, Unknown
  Obtained from environmental sample
  misc_feature (1)..(879): n is a, c, g, or t
gtgcttgacacatactggtctgatcactgccgacatacaacttttttaactgaactggacgatgtaaaaatcgaggacgacgcgttatgcgaaagctataaaaattatcttgaaacgagggtttttacaggaagggacaaaaagcccgtaacattgatggatatggcaactataggcgcaaaagcgcttaaaaaactcaggtttttgcctgatttggacgaatcagaggaaattaacgcctgttccgtgaaaataaaggcggatgttgacggagttgaacaggactggcttttaatgttcaaaaacgaaacacacaaccaccctaccgaaattgaacccttcggaggggcggctacctgtctgggaggggcgattcgggacccgctttcgggccgcgcttttgtttatcaggctatgcgcgtaacgggggccgccgacccgcttcaaagcgcgtcttgcgccatagaaggcaaattgccccagcgcaagatttgcaggacggcggcggcgggttacagctcttacggcaaccagataggtcttgccacagggcacgttcatgaaatttatcatcccggttacgcggcaaaacgcatggaaataggggcggtaataggggccgcgcctgcggaaaatgttatacgcaatacgccgcagccgggagacgtagtaatacttctgggcggacgtacgggacgggacggcataggaggggcgacaggctcttccaagtcgcacacttccctctctcttgaaaccctgggcgctgaggtacagaaaggaaacgcgccggaagagcggaaacttcaaaggctttttcgcaatcctgatgccgcgcgcctgataaacgatgtaacgatttcggcgccggcggcgtga

SEQ ID NO: 40814 - protein, 292 aa, Unknown
  Obtained from environmental sample
  DOMAIN (47)...(209): AIR synthase related protein, N-terminal domain
  misc_feature (1)..(292): Xaa is any amino acid
MLDTYWSDHCRHTTFLTELDDVKIEDDALCESYKNYLETRVFTGRDKKPVTLMDMATIGAKALKKLRFLPDLDESEEINACSVKIKADVDGVEQDWLLMFKNETHNHPTEIEPFGGAATCLGGAIRDPLSGRAFVYQAMRVTGAADPLQSASCAIEGKLPQRKICRTAAAGYSSYGNQIGLATGHVHEIYHPGYAAKRMEIGAVIGAAPAENVIRNTPQPGDVVILLGGRTGRDGIGGATGSSKSHTSLSLETLGAEVQKGNAPEERKLQRLFRNPDAARLINDVTISAPAA

SEQ ID NO: 40815 - DNA, 2274 bp, Unknown
  Obtained from environmental sample
  misc_feature (1)..(2274): n is a, c, g, or t
atgagacgattccgcatcgatccgaacaaaaaacatacaatcgcaggtcgtgggtcgcaccgtttggtcaactcccccaccgttacgtcgcggctcactgaatcaatcgagacggcgctgtcggtgagcgccgaggagaccgtgattgtagacgtcgccggcaaagaggagctgctgttctcacagcgcctggcctgcccgatctgcggaatcagcagcgaggagcccagcccggccatgttctcgttcaacaacccgctgggcgcctgcgaagagtgccacgggttgggctttctaatggaagtagacccggaccttgtggcgcccgaccaaacgaaaactatccttgacggcgcgataatcccgtggaacggcgcctacatagacggcgggtggaacaaccacatgctccacgcggtttgcaaacgatacaagatacctatggacaaaccctataagtcgctctcccaaaagcataaagacatcctgctgtacggaagcgacggcgagaaagtggaggtgcaattcgagggcaaggacgggaaaagccacgcacgtttcaatcgcgcctttgagggagtcgcgccaaacctattacgccgctacagagacaccgcttccgaagatatgcgccgctggatagagggcttcatgacgcaaagggcgtgtccggcctgcaaggggacacgctacaagaaacaaccgctggcggtgctcatagacgagaaaaatatcgccgaggtctccgccatgtcgatagaatcggcgctcaaattttttaaaggctacagccccaaaggcaacgctaaggagatatcanagcccgtcgtccgcgagatattgcaacggctgggttttttaaacgacgtaggcctatcctacataacgctggacagggcggcggccacgctctccggcggcgagtcgcaacgcatccgcctcgccacgcagatagggtcgaggctgaccggcgtgctctacatactagacgaaccgagcatcgggctgcaccccagagacaacgcgcgcctgctggctaccctgacagcgctgcgcgacctcgacaacacggtggtcgtcatagaacacgacatggagaccatggaggccgccgactacctcatagacataggccccggcgccggcgtgcacggcggcttgcttacggcctgcggcacaccggccgaagtggccaagtcggcaaactcgcttaccggccagtacctatccggcaaacgctcgatccccgtccccaaaaagagacgcaacggcagcggactctccgtaaaaataaaaggcgcctccggccacaacctcaaacacatagacgccgcatttccccttggtatgcttatctgcgtaaccggcgtctccggctccggcaaaagctcgctcatcaaccaaaccctatacccggccctgcaaaaaaaactctacggctcaagggtctccccgctgccgcacaaaggaatcgacggactgtcacacttagacaaggtaatcgacatcgaccagtcccccatcggccgcaccccgcgctccaacccggcgacctacacaaaggtgttcgacgctatacggcacctcttcacaatgctgccggagagcaaaatccgcggctacctgcccgggcgcttcagcttcaacaccaaaggcggacgctgcgaagcctgcgagggcgacggcgaactgcggatagagatgcacttcctgcccgacgtctacgtcaaatgcgaaacgtgcggcggaagacgctacaacagagaaacgctggaggtactctataaagggaagtccatcgcggacgtactggagatgacggtggacgaggcgctgatctttttcgacaatctctccgcgatacggcaaaaactgcaagtactgtcgcaagtaggcctcggctacatcaaattgggccaatcagcgacgacgctctccggcggcgaggcgcaaagaatgaaattagcctccgaactgtcaaaaagagctaccgggaaaacgctttacattctggacgaaccgaccacgggattacactttgaagatatcagaatgctgatgtccgtcatacaagaactagttgataaagacaattctgtaatcgtcatagaacacaacttagatgtgataaaatgcgccgactacatagtagacttaggccccgacggaggcgacaaaggcggcaccatagtagccgtaggaacgccggaagagatagcgaagaacccggcgtcggttacggggaagtatttgaaggggtatctgaaaatataa

SEQ ID NO: 40816 - protein, 757 aa, Unknown
  Obtained from environmental sample
  DOMAIN (449)...(723): ABC transporter
  misc_feature (1)..(757): Xaa is any amino acid
MRRFRIDPNKKHTIAGRGSHRLVNSPTVTSRLTESIETALSVSAEETVIVDVAGKEELLFSQRLACPICGISSEEPSPAMFSFNNPLGACEECHGLGFLMEVDPDLVAPDQTKTILDGAIIPWNGAYIDGGWNNHMLHAVCKRYKIPMDKPYKSLSQKHKDILLYGSDGEKVEVQFEGKDGKSHARFNRAFEGVAPNLLRRYRDTASEDMRRWIEGFMTQRACPACKGTRYKKQPLAVLIDEKNIAEVSAMSIESALKFFKGYSPKGNAKEISXPVVREILQRLGFLNDVGLSYITLDRAAATLSGGESQRIRLATQIGSRLTGVLYILDEPSIGLHPRDNARLLATLTALRDLDNTVVVIEHDMETMEAADYLIDIGPGAGVHGGLLTACGTPAEVAKSANSLTGQYLSGKRSIPVPKKRRNGSGLSVKIKGASGHNLKHIDAAFPLGMLICVTGVSGSGKSSLINQTLYPALQKKLYGSRVSPLPHKGIDGLSHLDKVIDIDQSPIGRTPRSNPATYTKVFDAIRHLFTMLPESKIRGYLPGRFSFNTKGGRCEACEGDGELRIEMHFLPDVYVKCETCGGRRYNRETLEVLYKGKSIADVLEMTVDEALIFFDNLSAIRQKLQVLSQVGLGYIKLGQSATTLSGGEAQRMKLASELSKRATGKTLYILDEPTTGLHFEDIRMLMSVIQELVDKDNSVIVIEHNLDVIKCADYIVDLGPDGGDKGGTIVAVGTPEEIAKNPASVTGKYLKGYLKI

SEQ ID NO: 40817 - DNA, 432 bp, Unknown
  Obtained from environmental sample
  misc_feature (1)..(432): n is a, c, g, or t
ttggcccaatttgatgtagccgaggcctacttgcgacagtacttgcagtttttgccgtatcgcggagagattgtcgaaaaagatcagcgcctcgtccaccgtcatctccagtacgtccgcgatggacttccctttatagagtacctccagcgtttctctgttgtagcgtcttccgccgcacgtttcgcatttgacgtagacgtcgggcaggaagtgcatctctatccgcagttcgccgtcgccctcgcaggcttcgcagcgtccgcctttggtgttgaagctgaagcgcccgggcaggtagccgcggattttgctctccggcagcattgtgaagaggtgccgtatagcgtcgaacacctttgtgtaggtcgccgggttggagcgcggggtgcggccgatgggggactggtcgatgtcgattaccttgtctaa

SEQ ID NO: 40818 - protein, 143 aa, Unknown
  Obtained from environmental sample
  misc_feature (1)..(143): Xaa is any amino acid
MAQFDVAEAYLRQYLQFLPYRGEIVEKDQRLVHRHLQYVRDGLPFIEYLQRFSVVASSAARFAFDVDVGQEVHLYPQFAVALAGFAASAFGVEAEAPGQVAADFALRQHCEEVPYSVEHLCVGRRVGARGAADGGLVDVDYLV

SEQ ID NO: 40819 - DNA, 477 bp, Unknown
  Obtained from environmental sample
  misc_feature (1)..(477): n is a, c, g, or t
ttgactgcggtaggactgctggtgctgttaggcgtaatcgtaaacaacggcatagtgctggtggactacaccaacctgctgcgcaagcggggttatgctttgcaagatgcctgcatcgaagccgccggcaaccgcctccgcccgattctgatgacaaccctaaccacggtcttcggattgattcccatggcgttcttccccggcgaaggctcggaactggtagcgcccatcggcaaaacggtactcggcggccttaccatcggcacgctgatgaccctgttcctgatgccgaccgtgtacgccgtactgaacaagcgttccgatgaaagggcagctcgtgccgaagcgcggcgtgaaggtatcgcgttgggagaaggcggacgcgccaggcaaaagaaagcccaatcggctgcggccgcagccgcgtcagccattgtcggtgagacaggattaaataatttggaggccggaaaatga

SEQ ID NO: 40820 - protein, 158 aa, Unknown
  Obtained from environmental sample
  misc_feature (1)..(158): Xaa is any amino acid
MTAVGLLVLLGVIVNNGIVLVDYTNLLRKRGYALQDACIEAAGNRLRPILMTTLTTVFGLIPMAFFPGEGSELVAPIGKTVLGGLTIGTLMTLFLMPTVYAVLNKRSDERAARAEARREGIALGEGGRARQKKAQSAAAAAASAIVGETGLNNLEAGK

SEQ ID NO: 40821 - DNA, 831 bp, Unknown
  Obtained from environmental sample
  misc_feature (1)..(831): n is a, c, g, or t
atgcagtgcgattttgacatcatcggaagcgacagtcccgcggctgattttgaaattatccttttaatccataccgccatgaaaaatctcggcgttgacgttaccattcatgtaaaccaccgcggccttttcaaccgctttttatcgcacatagggcaaagcgaaaaatccgtcgaagttctccgcgcggtagacaaactcggcaaggtgggagaagacgaaactcttaaaagccttacggaacttgcgggcgttgcaaacgcgaataaaataatcgagtatataaacgcgaaaggcagtttctcaaaagtgcttgaccgtttaacggaattgtccggcggcagttgtctcgaatccgaacggttggcttcccttcgtcaatttatggctgattctctcggcgtcgattattcaaacgaaccttttgttctcaacccctcgattacccgcggcctggattactacaccggagtagtttttgaaaccttcctgaacgatttgcctgacataggctccgtctgttccggcggccgttacgacaacctcgccggcctgtactcaaaagataaaaactctatcagcggcgtaggcgcgtccataggccttgaccgcctgattgccggtcttgagagccttaacaaactgccagccgcggactattgccgcgcggccattgcctgcgtagacattgaaaaatcggggcagtatcaagcgttcgccggaagactgcgccaggccggaatcccctgcgagngtgttactgaagcctgcggcgaaaaacagcttgtaaacaatatgtgctggcagagaaaaaaggactgcgttatgtga

SEQ ID NO: 40822 - protein, 276 aa, Unknown
  Obtained from environmental sample
  misc_feature (1)..(276): Xaa is any amino acid
MQCDFDIIGSDSPAADFEIILLIHTAMKNLGVDVTIHVNHRGLFNRFLSHIGQSEKSVEVLRAVDKLGKVGEDETLKSLTELAGVANANKIIEYINAKGSFSKVLDRLTELSGGSCLESERLASLRQFMADSLGVDYSNEPFVLNPSITRGLDYYTGVVFETFLNDLPDIGSVCSGGRYDNLAGLYSKDKNSISGVGASIGLDRLIAGLESLNKLPAADYCRAAIACVDIEKSGQYQAFAGRLRQAGIPCEXVTEACGEKQLVNNMCWQRKKDCVM

SEQ ID NO: 40823 - DNA, 813 bp, Unknown
  Obtained from environmental sample
  misc_feature (1)..(813): n is a, c, g, or t
atgcaggccgaggttgacgtaatcattttgggcggcatgggtttaaaattcgacgattacctctactttaaggacaccctggaacagggcggctccctttcaaagactgtcatgtttgtgcataccgcagccgacccaaccgtagagtgccttatgatcccggacataagccttgccgtggccgagcagttcgcccttcagaacaaggacgtgctggttctcctcaccgacatgacgagctttgccgacgcgatgaaggaaattgccatttcccaggagcaggtgcccagtaaccgcggctaccccggcgatctctacagccagctcgcctcccgttacgaaaaggccgttgactttgatacggcgggttccatcaccgttttgggcgtaaccaccatgcctggcgacgacgtgactcacccggtaccggacaataccggttacatcacggaggggcagtactacctgcgcggcgggcgcattgagcctttcggttccctttcccgccttaagcagcaggtgaacggcaagacccgcaaggatcaccgcgcgctcatggacggtatgataaaactctactcggcctacaaagatacgctggaaaagaaatccatgggctttaacatgagcgcatgggacgggaagctgctccaatacggcgagcgttttgaaaaggagatgatggatctttccgtaaacattccgctggaaagggccctggatttgggctgggaaattttggcggactgttttaaaagcgatgaaaccgggctccgttcagagctcatcaacgagttctggccaaaaaaatag

SEQ ID NO: 40824 - protein, 270 aa, Unknown
  Obtained from environmental sample
  DOMAIN (1)...(168): ATP synthase alpha/beta family, nucleotide-binding domain
  misc_feature (1)..(270): Xaa is any amino acid
MQAEVDVIILGGMGLKFDDYLYFKDTLEQGGSLSKTVMFVHTAADPTVECLMIPDISLAVAEQFALQNKDVLVLLTDMTSFADAMKEIAISQEQVPSNRGYPGDLYSQLASRYEKAVDFDTAGSITVLGVTTMPGDDVTHPVPDNTGYITEGQYYLRGGRIEPFGSLSRLKQQVNGKTRKDHRALMDGMIKLYSAYKDTLEKKSMGFNMSAWDGKLLQYGERFEKEMMDLSVNIPLERALDLGWEILADCFKSDETGLRSELINEFWPKK

SEQ ID NO: 40825 - DNA, 603 bp, Unknown
  Obtained from environmental sample
  misc_feature (1)..(603): n is a, c, g, or t
atggcaaaaataaagctcaccaagaatgagcagaaaaagcagaaagacagcctcaagaggtttcagcgttacctcccgaccctgatgctgaaaaaacagcagcttcaggcggagatccgcgtggtagatatacggacagcggaagtgcgggcggcaaaagaaaagatagacgccggcattaaaaagtgggttgccattttcggccaggagggggtgtttaccacagatatactgcggatcaccaagttggtgtccggagaaggaaacgtcgccggcgtagccattccggtttttgaaaccgtcgagttcgaagtaaacgattatgacattgtggtaaagcccctttggcttgacatcgctgtggacagcatgaagaaaaatctcttttttgatctggaactgcggtgccttgaagagcaacagcgccgtttaagaaaggagctccagaccaccagtcagcgggtgaacctctttgaaaagatcaaaatccccgaggccgaggccaacatcaagaaaattgccgtgtatttgggcgatcagcaaactgcggctgtggtgcggggaaaaatttccaaacggggcatggagagggcaggatcatga

SEQ ID NO: 40826 - protein, 200 aa, Unknown
  Obtained from environmental sample
  DOMAIN (2)...(196): ATP synthase subunit D
  misc_feature (1)..(200): Xaa is any amino acid
MAKIKLTKNEQKKQKDSLKRFQRYLPTLMLKKQQLQAEIRVVDIRTAEVRAAKEKIDAGIKKWVAIFGQEGVFTTDILRITKLVSGEGNVAGVAIPVFETVEFEVNDYDIVVKPLWLDIAVDSMKKNLFFDLELRCLEEQQRRLRKELQTTSQRVNLFEKIKIPEAEANIKKIAVYLGDQQTAAVVRGKISKRGMERAGS

SEQ ID NO: 40827 - DNA, 714 bp, Unknown
  Obtained from environmental sample
  misc_feature (1)..(714): n is a, c, g, or t
atgccccatgccggctggtactacagcggcagaaccgccgctcttggggcggcaagccttcagcgggatgccgaaaccgtagttattctgggcggtcatttaggagcggaaaatccacccctttttgccatggaagacgctgtaagaaccccttttggctccatgtccatagacgcctctttacgctccgccttgttaaaagagattgggggcgcaaaggacggctatcgcgataacaccgtagaagttcttttgccaatggcgcattatttcttcccaaaggcgaatttactgtggctgcgccttcccgcttcaatttcatcttttgaaagcggaaaaaccctatcgcgaattgcggcgaaattaaaccgtaaaatagcagtctttggttccacggacttaacccattatggacgcaattacggcttttcgccgcatggcagcggggaggcagccctgcgctgggttcgcgaagtaaacgacgcttcttttataaaagcggttgaatccgggaacggcgaagaagtcctgcgccgcgctgaggaggactcctcttcatgctccgccggcgctgtgttgggtgcgatgggttttgctgaggcggaaggattgcaaaaagcgcggcttttggcgtatgccacgagcgctgatgttgataagagtgtggttcccgattcatttgtggggtatgcggcgtttgcgtttgatgagtga

SEQ ID NO: 40828 - protein, 237 aa, Unknown
  Obtained from environmental sample
  DOMAIN (1)...(234): Protein of unknown function DUF52
  misc_feature (1)..(237): Xaa is any amino acid
MPHAGWYYSGRTAALGAASLQRDAETVVILGGHLGAENPPLFAMEDAVRTPFGSMSIDASLRSALLKEIGGAKDGYRDNTVEVLLPMAHYFFPKANLLWLRLPASISSFESGKTLSRIAAKLNRKIAVFGSTDLTHYGRNYGFSPHGSGEAALRWVREVNDASFIKAVESGNGEEVLRRAEEDSSSCSAGAVLGAMGFAEAEGLQKARLLAYATSADVDKSVVPDSFVGYAAFAFDE

SEQ ID NO: 40829 - DNA, 969 bp, Unknown
  Obtained from environmental sample
  misc_feature (1)..(969): n is a, c, g, or t
gtggctaagaaatccaacattaacccgaaaaagagcgggcgtaagaaaatgacggaacaaaaatcgcggtttaacgacggcttgccggagatactgccgccggtatacgacattgtgttcaaattagtcttcgccaaccggctcgatttgctcaaatcgttgctgaaatccgcgatcaacctgccggacgacgactacggggagattacggtcgtagacccgcacgtataccctgaccaggttggcgggagactgggggttttggacatcaaagtaacattgaagtctaaaacgattgtggacgtggagatgcagcaaaaaaaaatagcgcatttgcgtgagcgcgtattattttattgttcagggatggtccgggagcagacggagtcaggcgacggtaactacgaaaaaatcaaaccggtcgtcagcgtaacgataacgaaccatgtaatgatacctgaggacggcgcgtatcatcaccgttataccttgtacgatcctgagacgcgctcggagtttacggatttgctggaggtgcatatcctcgaactgccgaagttgtcgcgtacggacgacggcagtgagttgtggtggtggatgaggtttttaaccgtgagaacgaaggaggagttggccatgatagccgagaagagtccggtattggagcaagccgccgcccgtctgaccgaggtgtcggaggacatgcacacgcgtcaccgtctggagagttaccgtctctacgagatggaccagcgggtcaaggcgaaggtggcgaagagggaggcggaggaggagatgaggaagctgagggaggaggctaggaagctgagggaggaggctaggaaggcggaggagaacggcaggttagaaggcatggaaaagaccatggaactcctcgaacaagggtacaccttcgacgaaattaaaaagatactgcgggacggtagcggtcaagggcgggaagcgtga

SEQ ID NO: 40830 - protein, 322 aa, Unknown
  Obtained from environmental sample
  misc_feature (1)..(322): Xaa is any amino acid
MAKKSNINPKKSGRKKMTEQKSRFNDGLPEILPPVYDIVFKLVFANRLDLLKSLLKSAINLPDDDYGEITVVDPHVYPDQVGGRLGVLDIKVTLKSKTIVDVEMQQKKIAHLRERVLFYCSGMVREQTESGDGNYEKIKPVVSVTITNHVMIPEDGAYHHRYTLYDPETRSEFTDLLEVHILELPKLSRTDDGSELWWWMRFLTVRTKEELAMIAEKSPVLEQAAARLTEVSEDMHTRHRLESYRLYEMDQRVKAKVAKREAEEEMRKLREEARKLREEARKAEENGRLEGMEKTMELLEQGYTFDEIKKILRDGSGQGREA

SEQ ID NO: 40831 - DNA, 2004 bp, Unknown
  Obtained from environmental sample
  misc_feature (1)..(2004): n is a, c, g, or t
ttggataatcttcaggaggagattactatggataaaaaagctttggaaaaagccgcgctctctgtgcgttcactcgcgatggacgcgattcaaaaggcaaattcgggacaccccggcgttgtgcttggcgcagccgaattgggggcggtgctttacggtgaaatactacgccatgatccttccgactccagatggcctgaccgcgatcgttttgtgctttcggcgggacacggttccatgtttctctattctctgctttatctttccggttacgccgggatgacaatggacgcgataaaatccttccgccaggttggctccgccgcggcggggcaccccgagtacggcgccgctgagggcattgagatgactaccggcccgctggggcaggggtttgctaccgcggtgggtatggccgtcgcggaaaccatgcttgccgcccgcttcaatacgcctgcgcataaaatcgtggatcactatacctatgtgctgtccggcgacggctgtttacaggaaggagtctcaggcgagggcagttccctggcaggccacctgggcttgggtaagctcatcgtctattacgattccaacaagatcacgattgacggttccaccgatctttcctttaccgagaacagcgcaaaacgctacgaagcttacggctggcaggttctntccggttcaatgtacgattntgatgaaatcgcgaaactgaccgctcaggcgaaggccgaaacaaaaaagcccagccttatcattctgacctccgttatcggcaagggtgcgccaaacaagcagaacactgcggatatacacggcatgccccttgggatggaagagttggcgctggcgaggaaagccctgggcattccaggcgatcccgccactttgaatttctatgtgtctcaggaagctgaagcttatttcaaagccaaacgggatgagtggaaaaagacaagggaaaagtggctcgccgagtttgacgcctgggcaaaggagaatcccgacaaaaaaaaggaatgggacgctttttattccggcaagcccgttaaagcggcgctgccttcctttgccgtgggagaaaaaatcgcaacgcgcagcgccggcaacaaggcccttaacgccgtagccaacgccaatcccaatctggtgggaggctccgccgatctcaaaggccccaacgccgtgggcctttccaacgccgcggtttattcggcttcggagcgaagcggccgctatattcatttcggcatccgcgaattcgccatggcggctatctccaacgggatttcccttcacggcggtttccgtcccttctgctctaccttcatggtcttttccgattacctgcgtccggccctgcgcctttcggctttaatgaaacagccggtgatttacgtgcttacccacgattcgatcctcgtaggcgaggacggctccacccatcagccgattgaacacctcgccagtatgagagccatgcccggccttctggttctccgtcccggcgatgccgaggaatgcgccgaagcctgggcaatggcgatggaatacacaaaaggccccgttgttctcggcttatcccggcagaatattacagtcttccccaaagccgaccccgactggcggaacacgatccgcgtgggcgcgtacatcgccaaacaggttgagggagagcccgagattgtaatcatcgccacaggctcggaagtaaacacggccctggacgcggcggcaaaggcgacaaataaaaagatccgcgtggtctcgatgatcggcaaagagcttttcgagtcccagcccgcggccatccgcgacgccatgatcccccccggcgcacgggtcatagtctgcgaggcgggggtgaagttcggctgggaacgctgggcaaaaccggaagacatccactcaatagaccgcttcggcgagtccggtcccgcggcaaaagccgccgaacatttgggaatgacggcggaagggctgttgaagatagttaacaggtag

SEQ ID NO: 40832 - protein, 667 aa, Unknown
  Obtained from environmental sample
  DOMAIN (550)...(661): Transketolase, C-terminal domain
  misc_feature (1)..(667): Xaa is any amino acid
MDNLQEEITMDKKALEKAALSVRSLAMDAIQKANSGHPGVVLGAAELGAVLYGEILRHDPSDSRWPDRDRFVLSAGHGSMFLYSLLYLSGYAGMTMDAIKSFRQVGSAAAGHPEYGAAEGIEMTTGPLGQGFATAVGMAVAETMLAARFNTPAHKIVDHYTYVLSGDGCLQEGVSGEGSSLAGHLGLGKLIVYYDSNKITIDGSTDLSFTENSAKRYEAYGWQVLSGSMYDXDEIAKLTAQAKAETKKPSLIILTSVIGKGAPNKQNTADIHGMPLGMEELALARKALGIPGDPATLNFYVSQEAEAYFKAKRDEWKKTREKWLAEFDAWAKENPDKKKEWDAFYSGKPVKAALPSFAVGEKIATRSAGNKALNAVANANPNLVGGSADLKGPNAVGLSNAAVYSASERSGRYIHFGIREFAMAAISNGISLHGGFRPFCSTFMVFSDYLRPALRLSALMKQPVIYVLTHDSILVGEDGSTHQPIEHLASMRAMPGLLVLRPGDAEECAEAWAMAMEYTKGPVVLGLSRQNITVFPKADPDWRNTIRVGAYIAKQVEGEPEIVIIATGSEVNTALDAAAKATNKKIRVVSMIGKELFESQPAAIRDAMIPPGARVIVCEAGVKFGWERWAKPEDIHSIDRFGESGPAAKAAEHLGMTAEGLLKIVNR

SEQ ID NO: 40833 - DNA, 1662 bp, Unknown
  Obtained from environmental sample
  misc_feature (1)..(1662): n is a, c, g, or t
gtggaaaagtacataaattggaaagcggcggaggagcataaagtcgcctccatggtgacgggttctttgatattaaaaaaacatatcgacgcgattaagagggctttgacgggttttaggggccctgaagacgataaatttaacacagagaaaaatcatgagcttgccatggttttaagagcggccttgggcgataagattccgccgtcctatctgtaccagcaacttcgtcgccttgagcagggcgatgaagaggtcgatgtttcccagtactccaccgcatgggacgatgaggcttataataccgtttcaggtcagagttccaacaacagtctgcgccttagcgatgattttatgaaggcggtgctgaacgatgaagactggcaattaaaaagcagaacggtgggggatacgataaaaatcgtaaaggcgcgaaagctttggtcggatatagcgaaaacaagctggcagtgcgccgaccccgggcttcagtaccacacgacgattaacgactggcacacatgccccgcgggcggcgagatacgcgcctccaatccgtgttcggaatatatgttccttgacgataccgcctgcaacctcgcctcgataaacctcgccgcgttatacgacaaaagaaaaaaagaatttaatgttgaagggtatcttcacgcgattgacatctggacaacgattcttgaaatttccgtagtaatggcgcaatttccgtcttcgcgcatcgcggaactttcttaccaataccgtactttgggactcggttacgccaatcttggaacgctcctcatgattatggggcttgcctacgattccgatcagggacgttcggtgtccgcggcgctttccgcgctcctatcgggcgaagcgtacgctcaatccgcccgcatggcgcaagaacacggctctttcgcgcgttacggtgaaaatgccgagaatatgttgcgcgttatccgcaaccacaggcgggcggtcaacaacgccgttgacagtgaatatgagggtcttcacacgattcccaggggaatagataccgcccattgccctgcctatcttttaaactcggcgaaatcagcgtgggacagggctcttgatttgggcaaggcgcacggataccgcaacgcgcaggttaccgcaatcgcgcccaccggaacaatcggtcttttaatggactgcgacaccaccggtattgaacctgatttcgcccttgttaaatttaaaaaactcgccggcggcggctactttaaaattatcaatcagtccgtgcctccagcccttgaaagtttaggctattcgccgcaggctatcgaagaaattgtcgcctacgcgacagggagaaaaactttaaaaggcgcgcccgcgatcagtcatgagactcttaaaacaaaaggttttacaaacgaagcccttgccgcagttgaagaatccgtaaaaacggccattaattttgaaggcgtttttaatccctatgtgcttggcaaatcgtttgttgaagaaacccttaacatccctgaatccacatggtctcttcagggattcagtcttcttaagcacctcggtttcagcttgcaggatattgaagacgctgaattgtttgcctgcggtacgatgggtcttgagggcgcacccggccttaaaaaagaacattaa

SEQ ID NO: 40834 - protein, 553 aa, Unknown
  Obtained from environmental sample
  DOMAIN (12)...(457): Ribonucleotide reductase, barrel domain
  misc_feature (1)..(553): Xaa is any amino acid
MEKYINWKAAEEHKVASMVTGSLILKKHIDAIKRALTGFRGPEDDKFNTEKNHELAMVLRAALGDKIPPSYLYQQLRRLEQGDEEVDVSQYSTAWDDEAYNTVSGQSSNNSLRLSDDFMKAVLNDEDWQLKSRTVGDTIKIVKARKLWSDIAKTSWQCADPGLQYHTTINDWHTCPAGGEIRASNPCSEYMFLDDTACNLASINLAALYDKRKKEFNVEGYLHAIDIWTTILEISVVMAQFPSSRIAELSYQYRTLGLGYANLGTLLMIMGLAYDSDQGRSVSAALSALLSGEAYAQSARMAQEHGSFARYGENAENMLRVIRNHRRAVNNAVDSEYEGLHTIPRGIDTAHCPAYLLNSAKSAWDRALDLGKAHGYRNAQVTAIAPTGTIGLLMDCDTTGIEPDFALVKFKKLAGGGYFKIINQSVPPALESLGYSPQAIEEIVAYATGRKTLKGAPAISHETLKTKGFTNEALAAVEESVKTAINFEGVFNPYVLGKSFVEETLNIPESTWSLQGFSLLKHLGFSLQDIEDAELFACGTMGLEGAPGLKKEH

SEQ ID NO: 40835 - DNA, 822 bp, Unknown
  Obtained from environmental sample
  misc_feature (1)..(822): n is a, c, g, or t
gtggaaaaagacggtaaaattgagattgtgcattaccataacacttacgctaatactaatttcgggacattaagtgtaatgcttggcgaagctgtacggcaggggcttattgcggctaacccttgcgaaaaagtgaagcggcttaaaaatgacaggaaaaaaatggaaattctgacggttgaggaagttcaaaaattgtttcctgaaaattataaaacggtttggggcgataaagttatagcctatgccgcttgccgccttgcttcgcttactggtatgaggattggggaaattttggggcttcggggtgaatatgtttttgacgattatattcacgtttgcgcgcaatccggtggcagggagggctttagaatgcataccaaaactaaagagaataggagtatacccctgatacctgaaatgatcgcgctgttgcgggggttgaataacggcaaggggtttgtgttctcattggacggcggggtgtctccgactacggcgaattatgtgcgtgtttgttttggcgaggcgttgaaaaatatcggtataaacgaagcggagagggcgcggaggtctataactattcatagctggcggcatttcctgaataccgaattgttaaggcagggtatgacggttatgcaggtgcagagtgttacggggcataaatcacagagaatgacggaaatgtataaccaccccggcgaagggcaaataagcgatgttataaaagcgcaggcggctattatcggggctaaagaaacggaaggggacgaaaagggtttgaagctggttaaaggttccggacggaaatcagcatag

SEQ ID NO: 40836 - protein, 273 aa, Unknown
  Obtained from environmental sample
  DOMAIN (57)...(241): Phage integrase family
  misc_feature (1)..(273): Xaa is any amino acid
MEKDGKIEIVHYHNTYANTNFGTLSVMLGEAVRQGLIAANPCEKVKRLKNDRKKMEILTVEEVQKLFPENYKTVWGDKVIAYAACRLASLTGMRIGEILGLRGEYVFDDYIHVCAQSGGREGFRMHTKTKENRSIPLIPEMIALLRGLNNGKGFVFSLDGGVSPTTANYVRVCFGEALKNIGINEAERARRSITIHSWRHFLNTELLRQGMTVMQVQSVTGHKSQRMTEMYNHPGEGQISDVIKAQAAIIGAKETEGDEKGLKLVKGSGRKSA

SEQ ID NO: 40837 - DNA, 780 bp, Unknown
  Obtained from environmental sample
  misc_feature (1)..(780): n is a, c, g, or t
atgaagcgcaggtttgccgttttctttttttttaccttcgttatcccctgtgttttttctgtcccgcttgaggaactgacagggtctgaaaacgctaaccggctgcgttcaggctctgtttcagagactcagatggggaaacccgtgctaaaattactgcccgctttgcctgaattacggcaatttgtagtcaattccatgaccgaccttgagcctactctggcggtcgagacgctgtacctttataaaaaaccgggctctaccgccggttgggacgcttccgggcgggccgccttattcaatcaaatgctggctatcggtactcttaccggtattgagtacttttccgcaagccgtaacgctatgaggactttttatgaatattccgcggttatagactcgccgtcgtccaaaaaaccgcttcctgaccctgtttttgaacagccgccggctcaatataccctttacgcaaggcaaaaagaccttacttttggggataatatctaccgttacgaatacaccgcggcggaaaacgccttattttttattcaggagaatatgacctcccttacttacgggataatcccggcggtgggcaaaaacaggcttagatcggttttggcggtaatagactgcggcgattccctgttaatttatgccgtttcaatggcaaaagccgcctctgttccgggaatgacggaaaagataggcaattccttcagaaatcgcgcggatgcggtctataaatggtttgcctcaggcgcggataaaatgttttaa

SEQ ID NO: 40838 - protein, 259 aa, Unknown
  Obtained from environmental sample
  SIGNAL (1)...(20)
  misc_feature (1)..(259): Xaa is any amino acid
MKRRFAVFFFFTFVIPCVFSVPLEELTGSENANRLRSGSVSETQMGKPVLKLLPALPELRQFVVNSMTDLEPTLAVETLYLYKKPGSTAGWDASGRAALFNQMLAIGTLTGIEYFSASRNAMRTFYEYSAVIDSPSSKKPLPDPVFEQPPAQYTLYARQKDLTFGDNIYRYEYTAAENALFFIQENMTSLTYGIIPAVGKNRLRSVLAVIDCGDSLLIYAVSMAKAASVPGMTEKIGNSFRNRADAVYKWFASGADKMF

SEQ ID NO: 40839 - DNA, 909 bp, Unknown
  Obtained from environmental sample
  misc_feature (1)..(909): n is a, c, g, or t
atgagattattaaccagatctgactttgacggactagcttgcggagcgcttctagtatatttgggactgattgatgaatggaaatttgtacatccaaaagatattcaagacgggttaattgaagcaacagataacgatatattggccaatattccatatattaagggctgtaaactttggtttgatcatcattcaagcgaatccgaacgattaggaaaaaatatatattttgagggagtatcaaaacccgccccaagctgcgcaagggtagtttatgaatattacggaggcgataccaaactgagcagatttgcggagatgattcattttgttgacaaagtggattccggcaatcttactcctgatgaaattttggatcctaaaggatgggtgcttcttggttttatcatggatccgcgcaccggtcttggccgcttcaggaattttaccatcagtaactacgatttaatgaaagaactggccaaagcgtgttccgaaaaaagtattgatgaaatacttgtaatgccggatgtaaaagaacgtctggatttgtactttgaacagacaaagaattataaagagatggttcttaagtatgctaaacccgttggtgatgttatcatgatagacttgcggaatgtggaaacaatctatgcgggaaacagattttttctttacacgcttttcccggatcaaaatatttcagtctgggtcgtggatggccggaataaagtaaatgtcgccattactgtcgggtacagcattataaaccggactgcaactgcggatgtcggagcgctcttgctccgttacggcggcggcggccacaagcaggttggaacatgtcaggttccctacgatgatgccgacaagatcattgccgaaattgtagaaaatttaaaacgctaa

SEQ ID NO: 40840 - protein, 302 aa, Unknown
  Obtained from environmental sample
  misc_feature (1)..(302): Xaa is any amino acid
MRLLTRSDFDGLACGALLVYLGLIDEWKFVHPKDIQDGLIEATDNDILANIPYIKGCKLWFDHHSSESERLGKNIYFEGVSKPAPSCARVVYEYYGGDTKLSRFAEMIHFVDKVDSGNLTPDEILDPKGWVLLGFIMDPRTGLGRFRNFTISNYDLMKELAKACSEKSIDEILVMPDVKERLDLYFEQTKNYKEMVLKYAKPVGDVIMIDLRNVETIYAGNRFFLYTLFPDQNISVWVVDGRNKVNVAITVGYSIINRTATADVGALLLRYGGGGHKQVGTCQVPYDDADKIIAEIVENLKR

SEQ ID NO: 40841 - DNA, 1632 bp, Unknown
  Obtained from environmental sample
  misc_feature (1)..(1632): n is a, c, g, or t
ttgggattgctgtattacagcatgggcgattacgccaaagcggagcggtattatttggaggcggcagccattcgggaaaaagcgctgggtagggagcatccaaattatgccacgtcgttaaacaacctgggagtgctgtataagagcatgggcgattatgcgaaagcggaacgctatatgcttgagacgacagccatccaggaaaaagcgctgggtaaggagcatcccgattatgccctgtctttaaacaacctgggagcgttgtatcagagcatgggcgattatgcgaaagcggaacgctatcatctggaggcgacagccatccgggaaaaggcgctgggtaaagagcaccccgattatgccacgtcgttaaacaacctgggagaattatatcgaaatatgggtgattatatccaagcggaacgctatatgctggaagcgacagccatccgggaaaaggcgctgggtaaggagcaccccgattatgccctgtcactaaacaacctgggagcgctgtatgcaagcatgggcgattataccaaagcggaacagtattatctggagacgacagccatctgggaaaaggcgctgggtaaggaacatctcaattatggcctgtcgttaaacaatctgggagaattatatcaaaatatgggcgattatgcccaagcggaacgctataagctggaggcggcagccatccgggaaaaagcgctgggtaaggagcatcccgattatgccacgttattaaacaacctgggagcgctgtaccgtagcatgggcaattacgcgaaagcggaaagttatatgcttgaggcggtagccatccgggaaaaggcgctgggcaaagagcatccctcttatgccacgtcgttaaacaacctgggagcgctgtattggaacatgggcgattacgcgaaagcggaacggtattatctggaagcggcagcaatccgggaaaaggcgctgggtaaagggcatcccgattatgccacgtcgttaaacaacctgggatcgctctatgacgacatgggcgattacgcgaaagcggaacgctataagttggaggccacggccatccgggaaaaagcgctgggtaaagagcatcccgattatgccacctcgttaaacaacctgggatcgctgtatcaccgcatgggcgattacgcaaaagcggaacgctataagctggaggcggcagccatccgggaaaaggcgctgggaaaagagcatcccgattatgcccaatccttaaacaacctgggaacgctgtatgaagacatgggcgattacgcgaaagcggaacggtattatctggaggcggcagccatccgggaaaaggcgctgggaagagagcatcccgattatgccttttcgttaaacaacttgggagtgctgtattggaacatgggcgattacgcgaaagcggaacggtattatctggaagcggcagctataaatgaaaaagcgctgggaaaagagcatcccgattatgcgacatcgttaaacaacctgggtttgctgtatgacagcatgggcgaatatgcaaaagcggaacgctatatactggaggcggcagccatccgggaaaaggcgcgggaaaagagcatcccgatatctcggccgatctga

SEQ ID NO: 40842 - protein, 543 aa, Unknown
  Obtained from environmental sample
  DOMAIN (247)...(280): Tetratricopeptide repeat
  misc_feature (1)..(543): Xaa is any amino acid
MGLLYYSMGDYAKAERYYLEAAAIREKALGREHPNYATSLNNLGVLYKSMGDYAKAERYMLETTAIQEKALGKEHPDYALSLNNLGALYQSMGDYAKAERYHLEATAIREKALGKEHPDYATSLNNLGELYRNMGDYIQAERYMLEATAIREKALGKEHPDYALSLNNLGALYASMGDYTKAEQYYLETTAIWEKALGKEHLNYGLSLNNLGELYQNMGDYAQAERYKLEAAAIREKALGKEHPDYATLLNNLGALYRSMGNYAKAESYMLEAVAIREKALGKEHPSYATSLNNLGALYWNMGDYAKAERYYLEAAAIREKALGKGHPDYATSLNNLGSLYDDMGDYAKAERYKLEATAIREKALGKEHPDYATSLNNLGSLYHRMGDYAKAERYKLEAAAIREKALGKEHPDYAQSLNNLGTLYEDMGDYAKAERYYLEAAAIREKALGREHPDYAFSLNNLGVLYWNMGDYAKAERYYLEAAAINEKALGKEHPDYATSLNNLGLLYDSMGEYAKAERYILEAAAIREKAREKSIPISRPI

SEQ ID NO: 40843 - DNA, 603 bp, Unknown
  Obtained from environmental sample
  misc_feature (1)..(603): n is a, c, g, or t
gtgcaatgcctgccgctaaattttttggcttcttcttatttagacatgggcgaatatgcgaaagcggaaatctgttatctggaagcggcagccattgaggaaaaggcgctgggtaaagagcatccctcttatgccacatcgttgcacagcctgggagtggtgtaccacagaatgggcgattatgccaaatcaaaacggtattatctggaggcgatagccattgaggaaaaggctcagggtaaagagaatccctcttatgccgtgtcgttagacaccctgggttttctgtattacagcatgggcgattatgccaaagcggaacgttgttttctggaggcaagaactatctttgaaaagaaacttggtaaagagcattccgattatgccgtatcgttaaacaacttgggaatattgtatgacagcatgggcgattatgccaaagcggaacgctattatctggagtcgacagccatcaaggaaaaggtgtttggtaaagaacatccccgttatgccgcgtcgttaaacaacctgggattgctgtataaggaaatgggtgaatatgccaaagcgggaacgctattatctggaggcgacagcaattaa

SEQ ID NO: 40844 - protein, 200 aa, Unknown
  Obtained from environmental sample
  DOMAIN (45)...(78): Tetratricopeptide repeat
  misc_feature (1)..(200): Xaa is any amino acid
MQCLPLNFLASSYLDMGEYAKAEICYLEAAAIEEKALGKEHPSYATSLHSLGVVYHRMGDYAKSKRYYLEAIAIEEKAQGKENPSYAVSLDTLGFLYYSMGDYAKAERCFLEARTIFEKKLGKEHSDYAVSLNNLGILYDSMGDYAKAERYYLESTAIKEKVFGKEHPRYAASLNNLGLLYKEMGEYAKAGTLLSGGDSN

SEQ ID NO: 40845 - DNA, 1146 bp, Unknown
  Obtained from environmental sample
  misc_feature (1)..(1146): n is a, c, g, or t
atgcaatgtgccttgccgcagtacagaaaaacagtcaggtgcttcaatacgtccccgacgcacaaaagaccgaggccatgtgccttgccgcagtgcagaaagacagtcaggtactgcaatacgtcccagatacacaaaagactgaggccatgtgccttgccgcagtacagcaaaacggccgtgtgctcgaatgtgtccccgaggcgcggaagaccgaggccgtctgcctggccgcagtacaaaaagaaggccatgtgctggaatacgtccccgaggcgcggaagaccgaggccgtctgcctggccgcagtgcagaaaagcggctttgccctgcaattcgtccccgaggcgcggaagaccgaggccgtctgcctggccgcagtgcaaaaagaaggctatgcgctgcaatacgtccccgacgcacagaagaccgaggccatgtgccttgccgcagtgcagaaagacggacgggcgatgcaatttgtccccgacgctagaagaccgaggccctctgcctgcccgctgtgcaaaaagattggtgggcgttgaatacgtccccgaatcgttgaggaccgaggcagtctgccatgccgcttttaatgaagactntgaggcgctggattatattccggaaggcttaaaagcccctttcgaagcggtgttaaataacgctttctcgacagaggcgctctgccttgccagagttcagcaaaaaggaaacgcgcttcgatatgtccctgaagagcttaagactgaagccgtctgccatgccgcagtgcaaaaagattggtgggcgcttcaattcgtacctatagcacttaaaactgagaccctctgccttgccgcagtgcaacaagacggcgacgcgctggaatacgttcccgaagcgcttaagacaaaagacctttgtattgaagcagtgcggcacggtctttcttttcgtaacagtggtaaaggatatgacaaatcgcctacagggttaagatttgtccccgatgcgctgaaggacatagtgcttaattcacctgagggacgtgcgtcagctcagggacgcttggcagaataccttgtttcagtgctcggttccggaatttcttcagggtcaggcggttcgggatacggcatagagttaataaagccggtataa

SEQ ID NO: 40846 - protein, 381 aa, Unknown
  Obtained from environmental sample
  misc_feature (1)..(381): Xaa is any amino acid
MQCALPQYRKTVRCFNTSPTHKRPRPCALPQCRKTVRYCNTSQIHKRLRPCALPQYSKTAVCSNVSPRRGRPRPSAWPQYKKKAMCWNTSPRRGRPRPSAWPQCRKAALPCNSSPRRGRPRPSAWPQCKKKAMRCNTSPTHRRPRPCALPQCRKTDGRCNLSPTLEDRGPLPARCAKRLVGVEYVPESLRTEAVCHAAFNEDXEALDYIPEGLKAPFEAVLNNAFSTEALCLARVQQKGNALRYVPEELKTEAVCHAAVQKDWWALQFVPIALKTETLCLAAVQQDGDALEYVPEALKTKDLCIEAVRHGLSFRNSGKGYDKSPTGLRFVPDALKDIVLNSPEGRASAQGRLAEYLVSVLGSGISSGSGGSGYGIELIKPV

SEQ ID NO: 40847 - DNA, 1071 bp, Unknown
  Obtained from environmental sample
  misc_feature (1)..(1071): n is a, c, g, or t
atggcgttaagtaaagaacaagaggaatggcttggtagtattggttctgagcctgaaaatgtcgatgaagtcccgaaagaacttcttacagaagaattttgtattgccgcagtgcgacaagacggcttggcgcttgaatatgtgcctgaagagcttaagaccgaagctgtctgtcttgccgcagtgcaagaacacggctgggcactggaatacgttcccgaggcgctgaagaccgaggccgtctgccttgccgctgtgcggcaaatcggtaatgcgctgaaatacgtccccgaggcgctgaaaaccgaagcggtctgcctggccatagtgcagaaagactaccatgcgtttatattactccctgacgcacagaagaccgaagccgtctgcctggccgcagtgcagaaaagcggctgggtgctggaatatgtccccgaggcgcagaagaccgaggccgtctgcctagccgccgtgcagcaagactgctgggcgcttaaattcgtccccgaggcacaaaagaccgatgcaatgtgccttgccgcagtacagaaaaacagtcaggtgcttcaatacgtccccgacgcacaaaagaccgaggccatgtgccttgccgcagtgcagaaagacagtcaggtactgcaatacgtcccagatacacaaaagactgaggccatgtgccttgccgcagtacagcaaaacggccgtgtgctcgaatgtgtccccgaggcgcggaagaccgaggccgtctgcctggccgcagtacaaaaagaaggccatgtgctggaatacgtccccgaggcgcggaagaccgaggccgtctgcctggccgcagtgcagaaaagcggctttgccctgcaattcgtccccgaggcgcggaagaccgaggccgtctgcctggccgcagtgcaaaaagaaggctatgcgctgcaatacgtccccgacgcacagaagaccgaggccatgtgccttgccgcagtgcagaaagacggacgggcgatgcaatttgtccccgacgctagaagaccgaggccctctgcctgcccgctgtgcaaaaagattggtgggcgttga

SEQ ID NO: 40848 - protein, 356 aa, Unknown
  Obtained from environmental sample
  misc_feature (1)..(356): Xaa is any amino acid
MALSKEQEEWLGSIGSEPENVDEVPKELLTEEFCIAAVRQDGLALEYVPEELKTEAVCLAAVQEHGWALEYVPEALKTEAVCLAAVRQIGNALKYVPEALKTEAVCLAIVQKDYHAFILLPDAQKTEAVCLAAVQKSGWVLEYVPEAQKTEAVCLAAVQQDCWALKFVPEAQKTDAMCLAAVQKNSQVLQYVPDAQKTEAMCLAAVQKDSQVLQYVPDTQKTEAMCLAAVQQNGRVLECVPEARKTEAVCLAAVQKEGHVLEYVPEARKTEAVCLAAVQKSGFALQFVPEARKTEAVCLAAVQKEGYALQYVPDAQKTEAMCLAAVQKDGRAMQFVPDARRPRPSACPLCKKIGGR

SEQ ID NO: 40849 - DNA, 492 bp, Unknown
  Obtained from environmental sample
  misc_feature (1)..(492): n is a, c, g, or t
atgaccgttaccctggcgagtagtactatggataaaaatcgcaaaccttccggtagttcacacaccttcaagcagactattaaagacggcgtaatggtcatggacattaaccagatgatgtctgaattccaaagcgggagcgcggtggattttaagggagcgccgatagagctgccaaacgaccttaagcccggtcagtcgttcaagattccagagatgaacatgacaacaggcgttggtgccgagaaggtgaaaagcgtaataaagatggagggaaaatgctcagccattgaagacgtaaaagttcctgccggaacattcaaatgccgcaaaattactatgaaagttagcacaaccgccatgggcattaccactgttataacaagtgttatgtgggaagcgcccaatatcggttctgtaaaatcagaaacctggcacgacaagatagggctgctttcccgctcggaattggtggagataaagggcaagtaa

SEQ ID NO: 40850 - protein, 163 aa, Unknown
  Obtained from environmental sample
  misc_feature (1)..(163): Xaa is any amino acid
MTVTLASSTMDKNRKPSGSSHTFKQTIKDGVMVMDINQMMSEFQSGSAVDFKGAPIELPNDLKPGQSFKIPEMNMTTGVGAEKVKSVIKMEGKCSAIEDVKVPAGTFKCRKITMKVSTTAMGITTVITSVMWEAPNIGSVKSETWHDKIGLLSRSELVEIKGK

SEQ ID NO: 40851 - DNA, 786 bp, Unknown
  Obtained from environmental sample
  misc_feature (1)..(786): n is a, c, g, or t
atgcatcagatcggccgagatgattgggccgcaaagaaaaaagtcatccctgccgacccgacaggggatgtcattctgcttaaaaacgaccggaagccgctaaagataattacccaggacgaattcaaggctttgtttgttaaggattggcggaaggtatgggaaggcgatttgatggcctgcctggggaacaagctggcggcattgactggcatgagggccggtgaagtgctgggcctgcgcggggaaaatgtgcgggaatcccacatccaggtttacaagcagtacgacaaattcggctaccgggacactaaaacaaaggacaggcgcaacatcccgttgccgccgcaagtgatgggcgagctgcgggagctgatggctttaaacggggacggctatttgttttcccataacggcggctcgaagcccgtgccgacccggtatttttacgacgctttccttgaggcgctggaaaaaatcgggatgggcaaggaagaaataaaggagaggggcctgtgcttccatgcttggaggcatttctgcaatacggagctgcaaaaggcggggctgaccatccaaaaggtgcaggcggttactgggcacaagaccgaccgtatgtcggaatggtacagccattttgacccgatggattttgccgaagtgccgaagatacaggaaggctggctgtcgggcgaaccgggcaatgggcctgaaggcggcggggaatcgatgcgccctgtcgaattgcggatagtgaagcctgaaccggaacggaagatggcctag

SEQ ID NO: 40852 - protein, 261 aa, Unknown
  Obtained from environmental sample
  DOMAIN (50)...(220): Phage integrase family
  misc_feature (1)..(261): Xaa is any amino acid
MHQIGRDDWAAKKKVIPADPTGDVILLKNDRKPLKIITQDEFKALFVKDWRKVWEGDLMACLGNKLAALTGMRAGEVLGLRGENVRESHIQVYKQYDKFGYRDTKTKDRRNIPLPPQVMGELRELMALNGDGYLFSHNGGSKPVPTRYFYDAFLEALEKIGMGKEEIKERGLCFHAWRHFCNTELQKAGLTIQKVQAVTGHKTDRMSEWYSHFDPMDFAEVPKIQEGWLSGEPGNGPEGGGESMRPVELRIVKPEPERKMA

SEQ ID NO: 40853 - DNA, 1164 bp, Unknown
  Obtained from environmental sample
  misc_feature (1)..(1164): n is a, c, g, or t
gtggtgcaggaaccccagaatgcgaggtataagctcgacaactggcctgacgagctggaagcctcctcaaacaacatcaccggcgtactcgacggcgtgaccatcacgatcttcgacaccggcaaggcgcagctctccatagccacggatacggattcggtgcagcagaacatccagaattttctggacgccctgaactccgtgcgcatggccatcagggaacttaccaaggtggacaacagcacctcgggctacaatttttccgtggtgaagaaagacgaaaaaagcaccagcaacgcgcaacaaacgggttcgctgctgaccggcaactacggcgtacagttgctcgactcgcgcatgaagtctctggccgcgaccatgcctccgggatttcaaaaaatcgcgggcagtgacctgttttccggggatctcatttcctcgctttcgcaaatcggcatcaaaaccatcagtgaccgggacgaccccaactacgggctgctcgtcatcgcgccgcccagcgccaccggcggcatgcgggacctggacgcgcgggcctttgacgaggcgctgaccacaaagctcgacgccctgctcaacttcttcgccagcgatgacgagggcagcagcacctcggcggatttccgctacgcttcgcacgtcaagggcagcaccaaggccggaacctacgatgtgaggtacacggtcagctatgaccccctgacgcccgatgtgcccatcattgacgtgtacattgacggtaaaaaggcggtgcgggacagcgccatggaggggtattggtttacttccgccaacggcccttccgccggtatagccgtacagatcgacaatctcaacgaaggcgcccattccggcaaggtatccatcaagcagggcaaagtccgtgagatggaagactttttcaccttcgagaccaaaggctatgacgccatcaacaagacgggcggcgcgctggaagtgttgaagcgcaactatgcggccatcatggagaatattgataaaaagatcgagcgcgaacagacgcgtcttgaggtctgggaacgaacgcaaaagcttgccttcgcgcgtctggacaccttgctttccaagtacaacgccaaccagcagcgtctggagagcgaaatcgccaaactcaatcaatcatga

SEQ ID NO: 40854 - protein, 387 aa, Unknown
  Obtained from environmental sample
  DOMAIN (5)...(372): Flagellar hook-associated protein 2 C-terminus
  misc_feature (1)..(387): Xaa is any amino acid
MVQEPQNARYKLDNWPDELEASSNNITGVLDGVTITIFDTGKAQLSIATDTDSVQQNIQNFLDALNSVRMAIRELTKVDNSTSGYNFSVVKKDEKSTSNAQQTGSLLTGNYGVQLLDSRMKSLAATMPPGFQKIAGSDLFSGDLISSLSQIGIKTISDRDDPNYGLLVIAPPSATGGMRDLDARAFDEALTTKLDALLNFFASDDEGSSTSADFRYASHVKGSTKAGTYDVRYTVSYDPLTPDVPIIDVYIDGKKAVRDSAMEGYWFTSANGPSAGIAVQIDNLNEGAHSGKVSIKQGKVREMEDFFTFETKGYDAINKTGGALEVLKRNYAAIMENIDKKIEREQTRLEVWERTQKLAFARLDTLLSKYNANQQRLESEIAKLNQS

SEQ ID NO: 40855 - DNA, 402 bp, Unknown
  Obtained from environmental sample
  misc_feature (1)..(402): n is a, c, g, or t
atggaagcgcttcgcgaagctgtttacctgcgccattacgcccagaaaaaccccctgacggaatacaaggtggaaggcttccagatttttgacagaatggttgacgacatacgccaggagatagcgtcgcgcctgcaccttgtgaggattcaagtcggtcccccgggcggcagcggcggcgcgagccgtcccggcaggacaataacctctcagtcggcgagccacagcagtatggcctctttcggcggtgccgctcccggagccaaaagctcaggctctcccatggggggggcgagcagtcccgacggcgcgaccgttatacgcagccagcccaaggtaggccgcaacgatccctgcccctgcggcagcggccggaaatacaaacactgccacggaaagtga

SEQ ID NO: 40856 - protein, 133 aa, Unknown
  Obtained from environmental sample
  DOMAIN (115)...(133): SEC-C motif
  misc_feature (1)..(133): Xaa is any amino acid
MEALREAVYLRHYAQKNPLTEYKVEGFQIFDRMVDDIRQEIASRLHLVRIQVGPPGGSGGASRPGRTITSQSASHSSMASFGGAAPGAKSSGSPMGGASSPDGATVIRSQPKVGRNDPCPCGSGRKYKHCHGK

SEQ ID NO: 40857 - DNA, 1806 bp, Unknown
  Obtained from environmental sample
  misc_feature (1)..(1806): n is a, c, g, or t
ttgcatngtgnacgagatcgattccatcctattcgacgaggcccgcactccgctgatcatctccggcgccgcagaggacgatacctcaaattcgccgaggttgacaggcttttaggcagcctgaaggaagtcgaaaaaaaggaaaacggcgaataccccgatgaaacccagggcgaacaggttgtcggcgattacaagatcaacgaaaaaaataaaaacatttctttcagcaaccagggccttgccgctattgaggagattctgcagaagcgcggacttatccagggggccattgttgacgagggcaattttgaatacatacattattttacccaggcgctgaaagcccacaaactttttcatctggacgttgactatgttgtgcaggacggccaggtgcagattgtcgatgaatttaccgggcgcattttgcacggcaggcgttattccgacggcctgcaccaggcgatagaggcaaaagaacggattaaaatagcccagcgtaaccgcacgctggcgactatcaccttccagaattatttcaggctctactcgaaaatatccggcatgacgggcactgcggacaccgaggcagccgaattcaacaagatttacaagcttgaggttgtggttatcccgaccaacctgccggtcgcgcgtcaggacgaggacgacgtggtgtacctgaatgaaaatgacaagtacaaagccctttgcgatgaaatcgcggatacaaacaaaaagggccagcccatgcttgtaggcacggtctcaatcgaaaaatcggagaaaatttccacgctgctgacaaggcgcggcgtgcgccacgaggtgctgaacgccaagaaccacgcgcgcgaggcgctgatcatcgcggaggcgggcgcgaagggcgcggtgacaatcgccaccaatatggcgggccggggcacggatatcaagctgggcggcagccccgaatcncgcgccagaagacgcgccggaacccaggccagccccgagcaatacgccgccatctacaatgaagaatacgaaaaatggaagagagactatgaagaagtaaaatcgctcggcggcctgtatgtcatcggcaccgagcgtcacgagagccgccgtatcgacaaccagcttaggggccgctcgggcaggcagggggatcccggcaggagcaagttcttcatttcaatggatgacgagctgatgaggctgttcggcggcgagaaaatgaagagcgtcatgtccagaataggcatggaagccggcgagccgatttaccatccctggctgaacaaaagcatagagaacgcccagaagaaagtagaggaacggaactttgagattcgcaagcatcttctggattacgacgatgtgctgaaccagcagcgcaaatttatctatgagcagcgcgacgcgatcctgcttgacaaggagctgaaaaacagggtgaacgacgccaccgccggccttgtgggggaattgattgacgaattcaaccgggagcagcggcaggacacggcggcggccttaaagaatttgaacgaacagctccgaaccaaattcggctatcagttaacgcttgatcagaacgaaaccaaaaatcccgaatcgcttgaaaagaaaataatcgccgatcttgaaaaggacatgagcgacaaggaagcccttatcggaccggattaccttaacatgattatcagggacagctaccttcacgccatgacaacaaatggcttgatcatcttgaaaatatggaagcgcttcgcgaagctgtttacctgcgccattacgcccagaaaaaccccctga

SEQ ID NO: 40858 - protein, 601 aa, Unknown
  Obtained from environmental sample
  DOMAIN (34)...(202): SecA DEAD-like domain
  misc_feature (1)..(601): Xaa is any amino acid
MHXXRDRFHPIRRGPHSADHLRRRRGRYLKFAEVDRLLGSLKEVEKKENGEYPDETQGEQVVGDYKINEKNKNISFSNQGLAAIEEILQKRGLIQGAIVDEGNFEYIHYFTQALKAHKLFHLDVDYVVQDGQVQIVDEFTGRILHGRRYSDGLHQAIEAKERIKIAQRNRTLATITFQNYFRLYSKISGMTGTADTEAAEFNKIYKLEVVVIPTNLPVARQDEDDVVYLNENDKYKALCDEIADTNKKGQPMLVGTVSIEKSEKISTLLTRRGVRHEVLNAKNHAREALIIAEAGAKGAVTIATNMAGRGTDIKLGGSPESRARRRAGTQASPEQYAAIYNEEYEKWKRDYEEVKSLGGLYVIGTERHESRRIDNQLRGRSGRQGDPGRSKFFISMDDELMRLFGGEKMKSVMSRIGMEAGEPIYHPWLNKSIENAQKKVEERNFEIRKHLLDYDDVLNQQRKFIYEQRDAILLDKELKNRVNDATAGLVGELIDEFNREQRQDTAAALKNLNEQLRTKFGYQLTLDQNETKNPESLEKKIIADLEKDMSDKEALIGPDYLNMIIRDSYLHAMTTNGLIILKIWKRFAKLFTCAITPRKTP

SEQ ID NO: 40859 - DNA, 774 bp, Unknown
  Obtained from environmental sample
  misc_feature (1)..(774): n is a, c, g, or t
atggccgttaattcagcgacaagcggccttcatcttgcactggaagcggtcggaatcggaaacggggacctggttcttatcccttccatgacctttacttccaccgccgaggttgtgcgttaccttggggcagaagtggtgtttatcgatgtaacaaaaggcggctaccacatggatcccgccgcgcttgaacgtacgctcgggaaactcgaaaagggtgagactcccttcgggaatctcaaggcaaaggcggttgttcccgttcattacggcgggcttccttgcgatatggacgctataatcccgatagcgcgaaaacacggacttaaaataatcgaggacgctgctcattcctttccttcgtttgttgagtctattggagacaaaatcaacccggcgaaagggcgctgggcgggcctttcaggcgatgcgggagttttttccttttacgccaccaaaacaatcaccaccggagagggcggcatggttgtaacaagggacaaggcaatcgctgaccgggtaaaaatcatgcgctcccacggcatcgataggagcgtttgggatcgttatacggatataaaagcttcctggtactaccaggtggttgaaccaggctataaatacaatataccggatatactctcagcgctgggaagggcccagctccgccgggcttacgatctcctttccatgcgggaaaagatcgcttcagtttacgatgaagcttttcgcggtgacaggcattttttaactccccctaccggaaagcggtga

SEQ ID NO: 40860 - protein, 257 aa, Unknown
  Obtained from environmental sample
  DOMAIN (1)...(257): DegT/DnrJ/EryC1/StrS aminotransferase family
  misc_feature (1)..(257): Xaa is any amino acid
MAVNSATSGLHLALEAVGIGNGDLVLIPSMTFTSTAEVVRYLGAEVVFIDVTKGGYHMDPAALERTLGKLEKGETPFGNLKAKAVVPVHYGGLPCDMDAIIPIARKHGLKIIEDAAHSFPSFVESIGDKINPAKGRWAGLSGDAGVFSFYATKTITTGEGGMVVTRDKAIADRVKIMRSHGIDRSVWDRYTDIKASWYYQVVEPGYKYNIPDILSALGRAQLRRAYDLLSMREKIASVYDEAFRGDRHFLTPPTGKR

SEQ ID NO: 40861 - DNA, 528 bp, Unknown
  Obtained from environmental sample
  misc_feature (1)..(528): n is a, c, g, or t
atgaaacgggaaattacccctctgtccggcaggctgctcatagtataccgggcctttgttgtgttggctcttgctttggtcgtggtattggcggcaggcagtctctatgccctgttccgctcaccgaattccgggccgttgtttcgtatcggcaacgccaacggcgccgccaacaacaaaaaacaaggtcaaaaccctgatacgggaccaaatccggccttgcccaatgtattttccggtatcggcaggctcagaataccgctggccggggaaccggctgccgccgtcattctctccatcagctttccctattccgcggacgaccggccttttgccgaagagcttgcctcccgtatcggcgactttcgatccattgccgccgaatattttgcgtctcttccgcgggaaaaagtagtcaatctggacgaggaagccgcaaaagccgggattttaggacgttacaatagcgtgctgcgtctggggaaaatcaaaaccctgtactttggcgatttaatgattgtagaatag

SEQ ID NO: 40862 - protein, 175 aa, Unknown
  Obtained from environmental sample
  DOMAIN (17)...(174): Flagellar basal body-associated protein FliL
  misc_feature (1)..(175): Xaa is any amino acid
MKREITPLSGRLLIVYRAFVVLALALVVVLAAGSLYALFRSPNSGPLFRIGNANGAANNKKQGQNPDTGPNPALPNVFSGIGRLRIPLAGEPAAAVILSISFPYSADDRPFAEELASRIGDFRSIAAEYFASLPREKVVNLDEEAAKAGILGRYNSVLRLGKIKTLYFGDLMIVE

SEQ ID NO: 40863 - DNA, 708 bp, Unknown
  Obtained from environmental sample
  misc_feature (1)..(708): n is a, c, g, or t
atggcacaaggcaaaaagagaaatttttttaaaaattattttaagggcagactcaaggtggcggaatttgccgttaccaattcatgtattgcaaaatgttcgttttgtgaaatttggaaacagcagcctaaagtttctgttgaccgggaaaaggcgctggaagttattgaccgtctggcggatcacggaacagttcatatcactatcaccggcggcgaaccgctgcttcatcctcatatagttgatcttgtccgccgggcaacggaacgaaggatgcacaacgccgttcttgtcgccgccccccagcttttgttgagaaacgatatagtcaaacgactggaagacgccggaaatgacatgatctgtatttcctttgattccggcgaccccaagattatggccgaatcgcggcagattccgaatatcatggaggatatggcaaaggccgtagaacttatcagcacaacaaagataaaaaccatggcatcggtgctgatctggaacaataattacgacaaacttgaagaagtctgcatcagcgcaaagaatatgggctttgatattgtttccctgaactacccgaccttttcacaatcgcaggtttatcctttgggaggggaagggatcagtctttcacgggaaagcgtaatccaggggctggagtcggccataaattaccaagacaaaaaaatngctcggccgatctga

SEQ ID NO: 40864 - protein, 235 aa, Unknown
  Obtained from environmental sample
  DOMAIN (23)...(181): Radical SAM superfamily
  misc_feature (1)..(235): Xaa is any amino acid
MAQGKKRNFFKNYFKGRLKVAEFAVTNSCIAKCSFCEIWKQQPKVSVDREKALEVIDRLADHGTVHITITGGEPLLHPHIVDLVRRATERRMHNAVLVAAPQLLLRNDIVKRLEDAGNDMICISFDSGDPKIMAESRQIPNIMEDMAKAVELISTTKIKTMASVLIWNNNYDKLEEVCISAKNMGFDIVSLNYPTFSQSQVYPLGGEGISLSRESVIQGLESAINYQDKKXARPI

SEQ ID NO: 40865 - DNA, 399 bp, Unknown
  Obtained from environmental sample
  misc_feature (1)..(399): n is a, c, g, or t
atgaaatacgcccttgataccaatattataacttactatttgaaaggggacgaaaagatattaggcaaagtggacaaagaagcagagaatgataatattatcattccgccttttgcctactttgaaattaaaaaatggctaatggcaataaattcaaagaccaaattacaggcgtttgaaaaactgtttgaaaaattcggtatagacgctattgaaaaagaaacactggatttatccctgtcaatctatataaaattacgcaagaacggaattactattgatgatggtgatttactcatagcggcatattgtattcagaataattatatccttgtgtccaacaatcaaaaacattatgaaaagattgagaatatacaggttgttaattggatgagctaa

SEQ ID NO: 40866 - protein, 132 aa, Unknown
  Obtained from environmental sample
  DOMAIN (3)...(130): PIN domain
  misc_feature (1)..(132): Xaa is any amino acid
MKYALDTNIITYYLKGDEKILGKVDKEAENDNIIIPPFAYFEIKKWLMAINSKTKLQAFEKLFEKFGIDAIEKETLDLSLSIYIKLRKNGITIDDGDLLIAAYCIQNNYILVSNNQKHYEKIENIQVVNWMS

SEQ ID NO: 40867 - DNA, 636 bp, Unknown
  Obtained from environmental sample
  misc_feature (1)..(636): n is a, c, g, or t
atgcagaactcaaaggacagcttaaagagcattataaattggcataaatacaccctaccactcacagtgatgctctgtatttccttgctttcctcttgcacaaccgaaaactcgccctcgtctgtattgtcttgcgatataagtggttacagaaccgaacgaataggtaaccaagtttggatggcggagaatttgaactgcgatgttgctggtagcgtatgctatgacaaagaccctgccaactgcgcaaaatacggcaggctttacacttgggcagcggctaagacggtatgcccatctccttggcgtttgcccagcgatgctgaatgggcagcgttggtgacggaagttggcggctcctcctcgacagctggaaccaaattgaaagcagactctcctttgtggaacggcaatggcaaaggcacggacgaattcggcttttcggctttgcctggcggtgtcggcggttccgatggcagtttccttgatgtcggcaacggcggcggttggtggtctgctacggagtacggtgcttcctacgcgtacgtccggggcatggtctacgactacgcgggtgtgggcaggggccacggcgataagacctcctttttttcagtgcgttgcgtccaagattaa

SEQ ID NO: 40868 - protein, 211 aa, Unknown
  Obtained from environmental sample
  misc_feature (1)..(211): Xaa is any amino acid
MQNSKDSLKSIINWHKYTLPLTVMLCISLLSSCTTENSPSSVLSCDISGYRTERIGNQVWMAENLNCDVAGSVCYDKDPANCAKYGRLYTWAAAKTVCPSPWRLPSDAEWAALVTEVGGSSSTAGTKLKADSPLWNGNGKGTDEFGFSALPGGVGGSDGSFLDVGNGGGWWSATEYGASYAYVRGMVYDYAGVGRGHGDKTSFFSVRCVQD

SEQ ID NO: 40869 - DNA, 402 bp, Unknown
  Obtained from environmental sample
  misc_feature (1)..(402): n is a, c, g, or t
atggcaaaaattgtagagaaagaacaactttcaagcgatgtgcataagttagttgttgaggctccccttatagcagaagagaggctggcggggcagtttataattttgcaaacagatttagaggcaggggagagaattccgctcacaatagcagacgcaaacagagaaaagggcacaataactttgattgttcaggcggttggcaaaacaacaatagatttatcgcagttaaatgcaggtgatgatattcccgttttaacaggcccgcttggttcgcccactcatatagagaattttgggcacgcggtttgcgtttgcggcggcattggggctgcacccatgtaccctatagcacaagctcttaaaaagctggcaacaagtgagcgtaattttgggagctag

SEQ ID NO: 40870 - protein, 133 aa, Unknown
  Obtained from environmental sample
  DOMAIN (1)...(96): Oxidoreductase FAD-binding domain
  misc_feature (1)..(133): Xaa is any amino acid
MAKIVEKEQLSSDVHKLVVEAPLIAEERLAGQFIILQTDLEAGERIPLTIADANREKGTITLIVQAVGKTTIDLSQLNAGDDIPVLTGPLGSPTHIENFGHAVCVCGGIGAAPMYPIAQALKKLATSERNFGS

SEQ ID NO: 40871 - DNA, 1350 bp, Unknown
  Obtained from environmental sample
  misc_feature (1)..(1350): n is a, c, g, or t
atggctgagtattacaccggagggaaagagtattttccaaaaataaaaaagattaaattcgaggggagcggaagcgacaatcctcttgcgtttaagtactacgatcctgagaaaaagatcggcaagaagaagatgagggatcacctgcgttttgccatcgcgtactggcacagcttttgcgcggacggaacagatcctttcggcgccgcgactcatgtgcatccctggattgcagacgcaaagactcccatggaagccgcggaacacaaaatggacgcggcctttgagtttttcacaaaactggacgccgacttctattgctttcatgaccgcgacatggctcctgaaggcgcaaacccggcggagagcgaaaagaacctgtttgctttagttgcaaaggcgaaaaagcttcagaaagccaccggcgtaaaactcctgtggggaacggctaacctctttagccacccacgtttcatgaacggcgctgccacaaaccccgaattcggcgttgtcgcccttgccgcaacacaggtaaaagccgcgattgacgcgacaatagagcttggcggcgaaggctacactttttggggtgggcgtgaaggttacatgagccttcttaacacagacctaaaaagagaaaaagaaaatcttgcgcgtttccttacaatggcaagggactatgctcgcaaacagggctttaagggcgtgttctacattgaaccaaagccaatggaaccgacaaaacatcaatacgattttgacacggaaaccgttatcggcttcctgcgccagtggggtcttgataaagatttccgcatgaacatcgaagccaaccacgcggaacttgccggacacgaatttgcgcacgaactggaaacagccgctgttgcaggtttctttggctcggtggacgctaaccgcggcgatgcacaaaacggctgggacacagaccagttccctattagctactacgaaaccgcaatggcaatgtatacaatacttaaaatcggcggctttacaacaggcggccttaattttgactcaaaaattcgcagaaactccgtagacccggcggatctctttatagcccatatcggcggtatggacgcattcgcggtagggttacaagttgcccaaaggattattgacgacggagttatcccgaactttgtgagagatcgttatgcgtcattcagttcgggagacggcgcgaagttcagcaagggagaacttacgctggaacagcttgcgaagattggaacagacgcgggttacggcaagacaggacttacaagcggcaaacaggaatatcttgaaagtgttctgaacagttatttactgggactttaa

SEQ ID NO: 40872 - protein, 449 aa, Unknown
  Obtained from environmental sample
  DOMAIN (91)...(310): Xylose isomerase-like TIM barrel
  misc_feature (1)..(449): Xaa is any amino acid
MAEYYTGGKEYFPKIKKIKFEGSGSDNPLAFKYYDPEKKIGKKKMRDHLRFAIAYWHSFCADGTDPFGAATHVHPWIADAKTPMEAAEHKMDAAFEFFTKLDADFYCFHDRDMAPEGANPAESEKNLFALVAKAKKLQKATGVKLLWGTANLFSHPRFMNGAATNPEFGVVALAATQVKAAIDATIELGGEGYTFWGGREGYMSLLNTDLKREKENLARFLTMARDYARKQGFKGVFYIEPKPMEPTKHQYDFDTETVIGFLRQWGLDKDFRMNIEANHAELAGHEFAHELETAAVAGFFGSVDANRGDAQNGWDTDQFPISYYETAMAMYTILKIGGFTTGGLNFDSKIRRNSVDPADLFIAHIGGMDAFAVGLQVAQRIIDDGVIPNFVRDRYASFSSGDGAKFSKGELTLEQLAKIGTDAGYGKTGLTSGKQEYLESVLNSYLLGL

SEQ ID NO: 40873 - DNA, 453 bp, Unknown
  Obtained from environmental sample
  misc_feature (1)..(453): n is a, c, g, or t
ttgacgcgccgggaattgaattattgtatccatgagattgcttccgcccttgggcttgtccagcttgaaaaacttgaagaggcgaacaacaaacgcagaaaacttgtagagcattattacaagcggctggatagttttaaacaggtaaagattccctacagaaactttttgcgcggaaaaccgaattatcacgtaatgccgattttgctttcggattcaattgacagggcggcggtaatagaaaccatgaagcaggacggtatccagacaagcatacattatcctgcaattcagaatttcagcgcttataaaggcagggttaattctactccaaaagcggaacatgtttgcgctcacgaattgacgctgccactgtatcctgacatgacagacgaagaagtcgatattgtgtgtgatgcgctaattagcggaattgaaaagaatggaaaataa

SEQ ID NO: 40874 - protein, 150 aa, Unknown
  Obtained from environmental sample
  misc_feature (1)..(150): Xaa is any amino acid
MTRRELNYCIHEIASALGLVQLEKLEEANNKRRKLVEHYYKRLDSFKQVKIPYRNFLRGKPNYHVMPILLSDSIDRAAVIETMKQDGIQTSIHYPAIQNFSAYKGRVNSTPKAEHVCAHELTLPLYPDMTDEEVDIVCDALISGIEKNGK

SEQ ID NO: 40875 - DNA, 429 bp, Unknown
  Obtained from environmental sample
  misc_feature (1)..(429): n is a, c, g, or t
atggcggattcaattcattccatcgaatcggtcaacatcctttcggctgaacccatagaagggaaagtgctatggattgtcgatgatatgatagatacggcaggatccgttgaagggcttattaaagcgctggccgcccagaagccaaaggaaataaatatcgttgccgtccacgcgcttttttctcatccggcgcctatgcgtttgaacaggttttcggaagaaggattgcttaaccggatcatcgttgccgatacggtagggtattccgctcttaccgaatcaatcccccggctggagatagttccgtcagcggaattatcatccagaatcgttaccaacctgatcatcaacgaatcaatcgggaaaattatgcggcctttcaatgcggaaaaatacctgaaatcaccgactctttttaattcttga

SEQ ID NO: 40876 - protein, 142 aa, Unknown
  Obtained from environmental sample
  misc_feature (1)..(142): Xaa is any amino acid
MADSIHSIESVNILSAEPIEGKVLWIVDDMIDTAGSVEGLIKALAAQKPKEINIVAVHALFSHPAPMRLNRFSEEGLLNRIIVADTVGYSALTESIPRLEIVPSAELSSRIVTNLIINESIGKIMRPFNAEKYLKSPTLFNS

SEQ ID NO: 40877 - DNA, 474 bp, Unknown
  Obtained from environmental sample
  misc_feature (1)..(474): n is a, c, g, or t
ttggagcaaacaatatcggatattggattaaatcacgcttcccgttacataggggaaatgtttattcccacagcaagggatctgataaaaagcggccttgtacgtgaaataaagaagcacgcaaacggcgaacctgctttttacaaaaaggcgctggaaagcattgccgtgagatacccggggattaccctcggagactttctgtcaatgcgggataacagaaaacgaaagatcgattatttgctggcggagaagataacggacacgctggatgaaaatatagaaggcgcactttcttcggtaaacgtaaaaacccttgtgtccgaaaggatagattcacttgatatgttgaaggtagaaaaaattgtcctggatgtcatggcgggacagcttaaatggattaacatctttggcgcaattcttggcgcgctcatcggttctttggaagttatagtatcatttcttacacggtaa

SEQ ID NO: 40878 - protein, 157 aa, Unknown
  Obtained from environmental sample
  misc_feature (1)..(157): Xaa is any amino acid
MEQTISDIGLNHASRYIGEMFIPTARDLIKSGLVREIKKHANGEPAFYKKALESIAVRYPGITLGDFLSMRDNRKRKIDYLLAEKITDTLDENIEGALSSVNVKTLVSERIDSLDMLKVEKIVLDVMAGQLKWINIFGAILGALIGSLEVIVSFLTR

SEQ ID NO: 40879 - DNA, 1668 bp, Unknown
  Obtained from environmental sample
  misc_feature (1)..(1668): n is a, c, g, or t
ttgtcggtgtctaatccgaacgcttctcttcaaagcagtttactgcaagggagcttgctgccaacctgccgccgcgatatggacgagcgcggctgggaagaatgcgatttcatctttgtttcgggcgacgcttatgtagaccacccttcttttgcggcggcgattttatgccgcgcgttggaagcggcgggtttccgcgccggaataattcctcagcctgattgtaaaaatccctcatcatataccgtattgggaagacctcgtcttgcttttctggtcggcgcaggcaatatggattccatggtcgctcattacaccgccgcaaaacgcaaacgctccgatgatgcgtattcgccgacaggaaaaagcggtatgcgccccgaccgcgccactttggtttatgtcgaaggaatacggcgcgcgtataaagatgtgccggtaatcatcggcgggatcgaagcaagccttcggcgctttgcccattatgattattggtcggatactgtgcgccgctcgattttacttgattcaaaagcggatatgcttgtctttggaatgggagaaaagcctctgctgagtatagcgcgccggttagcggagggtgaagcaataggcagtattcgtgacgagaggggaacttgcgtccgtgttcacggaagagtcgctattgagcaatggaaagacgtgtgtttcctgcccggatatgaaacagtaaaagagaaagacgaagcttcattacgcgcatacgccgaacattttatgatacagaaacagaacgccgatcccttaagcgcaaaaccgctggcggaagaaaacgacggagatcgctgggttatccaaaatccccccgctgtgcccctctcaaccaaagaactggataatttgtacgaacttccattcacgcgaaaagcccacccaatgtatgacgcgcaaggcggcattaacgcgttaaaagaagtttccttttcgctggtctcaagccggggctgttttggcggctgttctttttgcgcgattaccgctatccaggggagagctgtcatcgggcgcagcaaagaaagcctgctccgcgaagcgcgcgctcttgccgctcatcccgattttaaaggatacatccacgatgtcggcggccccactgccaactttttccgcccggtttgcgaaaagcaggagcgcggcggtttttgcgcaaacagggaatgtatgtatcctcaagtttgcctaaaattaaaagcggatcacagtcaatatttaaaaacattaaaagcgctgcgtgaaattcccggtattaaaaaagtatttatccgctcggggctgcgcttcgattttattcagtatgatcaaaaacacggaaaagaatttttggaaaccttatgtcaattccatgtcagcggccagttaaaagcagctccggaacacatctgcgcgaatgtgttggaagcgatgggcaaatgcccccactcaaggtatgaagaattcagaaaagattttacggcagtaaacaaacggcttggattgaaaacatacctgctgccgtattttataacgtcccaccccggcgcagccatgaaagaagcggaagaacttgcgcggtacttnaaaaaaacgcgcttcgtccccgacaaacgcaggacttctatcccaccccgggaactctgtccacggtga

SEQ ID NO: 40880 - protein, 555 aa, Unknown
  Obtained from environmental sample
  DOMAIN (19)...(323): Radical SAM N-terminal
  misc_feature (1)..(555): Xaa is any amino acid
MSVSNPNASLQSSLLQGSLLPTCRRDMDERGWEECDFIFVSGDAYVDHPSFAAAILCRALEAAGFRAGIIPQPDCKNPSSYTVLGRPRLAFLVGAGNMDSMVAHYTAAKRKRSDDAYSPTGKSGMRPDRATLVYVEGIRRAYKDVPVIIGGIEASLRRFAHYDYWSDTVRRSILLDSKADMLVFGMGEKPLLSIARRLAEGEAIGSIRDERGTCVRVHGRVAIEQWKDVCFLPGYETVKEKDEASLRAYAEHFMIQKQNADPLSAKPLAEENDGDRWVIQNPPAVPLSTKELDNLYELPFTRKAHPMYDAQGGINALKEVSFSLVSSRGCFGGCSFCAITAIQGRAVIGRSKESLLREARALAAHPDFKGYIHDVGGPTANFFRPVCEKQERGGFCANRECMYPQVCLKLKADHSQYLKTLKALREIPGIKKVFIRSGLRFDFIQYDQKHGKEFLETLCQFHVSGQLKAAPEHICANVLEAMGKCPHSRYEEFRKDFTAVNKRLGLKTYLLPYFITSHPGAAMKEAEELARYXKKTRFVPDKRRTSIPPRELCPR

SEQ ID NO: 40881 - DNA, 435 bp, Unknown
  Obtained from environmental sample
  misc_feature (1)..(435): n is a, c, g, or t
gtgaaaaaaacattcttttttctgtttttagttttctctttttacggcgtctgtttttctcaaactgataattccgtaaatgttattgtagaaattaacaatattgtcgctaacggcggaaaagtttatttggtcgttttttttaacagtgaaagtttcaagaatgaaaaaccggatttggcggttgaaattccgtccgataaaccctcggcaataaaagaagggtcattgccgcgcggggaatgtgtattatttgtttttcaggacgcgaataacaacataaaacttgattgcgggcttttcgggattccaaaagaaaaattcggcatatccaattattttgggaaaggaattcccacaagaaattttgacaaacaaaaaataaagatcgatgaaaaaaccggaagaatagttcttggtttgtataaattttaa

SEQ ID NO: 40882 - protein, 144 aa, Unknown
  Obtained from environmental sample
  SIGNAL (1)...(20)
  misc_feature (1)..(144): Xaa is any amino acid
MKKTFFFLFLVFSFYGVCFSQTDNSVNVIVEINNIVANGGKVYLVVFFNSESFKNEKPDLAVEIPSDKPSAIKEGSLPRGECVLFVFQDANNNIKLDCGLFGIPKEKFGISNYFGKGIPTRNFDKQKIKIDEKTGRIVLGLYKF

SEQ ID NO: 40883 - DNA, 777 bp, Unknown
  Obtained from environmental sample
  misc_feature (1)..(777): n is a, c, g, or t
gtgcgggtaacctcggtggtactaagcacaatagaaaacagcgtggtaataaacggcgacgtgctggctgtaaaccaggtttcaattttccccaccgttgccggaaaggttacaagaacaaattaccaggttggagacgcaataaaacagggagctgtagtcgctatggtagatccctcgcgtcccggccaggtttactcggaaagccccgtggtgagtacaatcggcggtacggtattgcagtcgccggtacacaagggggacaccgtttcaacccagaccgctatattggttgtgggcgatctttccacgttgatggtggagacctttgtgccggaaaggttcagcatcgcagcacagagggggcttaaagcacaggtttccctcgccgcctttcccggggaaacttttgaggctactgtacaggaagtcagccccgtgcttgatccctcgagcagaaccgtacgtatacgcctgggcttcgcaaacccgatggacgccagaatcaaagcggggatgtacgcgacagtaagccttgttacaaattcccgcgtgaatgtgcctgtgattccccgcacatcggtaatcaatacttatggctcctggattgtgtttgccgtgcatgacagaaacatcgcgatacgcaaggttattttccttgggcttgaagacgagaactatgttgaagttttggacgggcttgaagtgggagagaaagtagtcagcgccggacaaaattttctttccgatggcgattctgtccgaatagtggaatga

SEQ ID NO: 40884 - protein, 258 aa, Unknown
  Obtained from environmental sample
  misc_feature (1)..(258): Xaa is any amino acid
MRVTSVVLSTIENSVVINGDVLAVNQVSIFPTVAGKVTRTNYQVGDAIKQGAVVAMVDPSRPGQVYSESPVVSTIGGTVLQSPVHKGDTVSTQTAILVVGDLSTLMVETFVPERFSIAAQRGLKAQVSLAAFPGETFEATVQEVSPVLDPSSRTVRIRLGFANPMDARIKAGMYATVSLVTNSRVNVPVIPRTSVINTYGSWIVFAVHDRNIAIRKVIFLGLEDENYVEVLDGLEVGEKVVSAGQNFLSDGDSVRIVE

SEQ ID NO: 40885 - DNA, 621 bp, Unknown
  Obtained from environmental sample
  misc_feature (1)..(621): n is a, c, g, or t
atgaccatttccgaatattcggttaaacacccggtaacaattataatgatctttgccctggtaataggcatggctgttaccatgattccaactttggcggtagatctttttccatctgttcaaaatccggttctttcggtctcggtgagctttccgggagcgggacctacggacgttgaaaagaacgtaacagaacgacttgagagagcgcttgccggttcccggaaccttgccaatatgacaagcagttcgcagtttgaaagttgttttgtcattcttcaattcgcctacggcactgacatggacaaagcggcggctgacacccaaaccatcataagccgtctggccaattccctgcccgacggagcgggaactccggttgtaaggcgttttgatatgtccgcttcgcccatcatgcgcctttcggtcaggggaaactatcccccggatcagttaagaatttttgcggaagatgaaattcaatcacaaatagaacggattgaaggggttgccctcgcggaggtaacaggcggtaccactcagatagtcaaagtggcggtggcgctgaaccggctggcggcttttaaccttaccctgtcggacgtaagcgccgccctttag

SEQ ID NO: 40886 - protein, 206 aa, Unknown
  Obtained from environmental sample
  misc_feature (1)..(206): Xaa is any amino acid
MTISEYSVKHPVTIIMIFALVIGMAVTMIPTLAVDLFPSVQNPVLSVSVSFPGAGPTDVEKNVTERLERALAGSRNLANMTSSSQFESCFVILQFAYGTDMDKAAADTQTIISRLANSLPDGAGTPVVRRFDMSASPIMRLSVRGNYPPDQLRIFAEDEIQSQIERIEGVALAEVTGGTTQIVKVAVALNRLAAFNLTLSDVSAAL

SEQ ID NO: 40887 - DNA, 825 bp, Unknown
  Obtained from environmental sample
  misc_feature (1)..(825): n is a, c, g, or t
atgacccaggaggagctggtcagtctgaatcagataaagcggcttgtggtaaaaacaatcaaccttggcgctataggccccaaccaggcaaaccgctcccaggcggtcaggcttgaggacatcgccgacgtaaccctcagttacaacgaaaacgccgctcgtgtttacaataacggccagagcggggtttacatccaggttacaagcgaggcggacagtaaccaggtgcaggtgtccaaccgcgtaaaagcggctctgagcggcatcaacaatgcattgcctaccggcattaccctggaagtgctttcggataataccaccatgatcacggcgactttggatcaggtatataaaaacgccattcagggagcgctcctggcaatgctgattctttttatttttcttagaaacataaagggaaccatgattatcggccttgccattcccatttccattttgcttaccctaatgtgcatggccttttttggctttaccctgaacctcctgaccctgaccggccttataatgggtttgggcatgacagttgacggttccatagtaatgcttgaaaacatccatagttaccgcctgcgcggcgcgaaaccggaaattgccgcgatactcggaagcagggaaatgctcagggcaattatcgcttcagcggcaaccaccctttgcgtatttattcctcctattatttacaagaacagcctggaaatgattgggcaatttgccagtgatttaattttcactgtggtaatttccctgacctgctctcttgtagtagcggttaccctcgtacccagcctctgcggcagtatttga

SEQ ID NO: 40888 - protein, 274 aa, Unknown
  Obtained from environmental sample
  misc_feature (1)..(274): Xaa is any amino acid
MTQEELVSLNQIKRLVVKTINLGAIGPNQANRSQAVRLEDIADVTLSYNENAARVYNNGQSGVYIQVTSEADSNQVQVSNRVKAALSGINNALPTGITLEVLSDNTTMITATLDQVYKNAIQGALLAMLILFIFLRNIKGTMIIGLAIPISILLTLMCMAFFGFTLNLLTLTGLIMGLGMTVDGSIVMLENIHSYRLRGAKPEIAAILGSREMLRAIIASAATTLCVFIPPIIYKNSLEMIGQFASDLIFTVVISLTCSLVVAVTLVPSLCGSI

SEQ ID NO: 40889 - DNA, 342 bp, Unknown
  Obtained from environmental sample
  misc_feature (1)..(342): n is a, c, g, or t
ttgattgaaaatgcccggaaacaaataaacaacgaacccaatctgtctcccggaataaaagcgttagttgagatgctcgtcgcagtgatacaacttctggccggaaagaggcttgccaaaaactcaaagaatagcaacattcccccatcaatggatccaaaccgggaaaagaagccgaaaccgaaacggggaaagaagcccggaggtcaacccggtcatgcagactttacgctgcgacagatagaaaatcccgacaagatagttaaaataaaagtagactggaataatctgcctcccggcgattggaagcatgcaggttatgagaaacgcccaggtttttga

SEQ ID NO: 40890 - protein, 113 aa, Unknown
  Obtained from environmental sample
  misc_feature (1)..(113): Xaa is any amino acid
MIENARKQINNEPNLSPGIKALVEMLVAVIQLLAGKRLAKNSKNSNIPPSMDPNREKKPKPKRGKKPGGQPGHADFTLRQIENPDKIVKIKVDWNNLPPGDWKHAGYEKRPGF

SEQ ID NO: 40891 - DNA, 567 bp, Unknown
  Obtained from environmental sample
  misc_feature (1)..(567): n is a, c, g, or t
atgttttcacgcaccggtctgcggattgtaggcatcaaggttcaccgcttctcgcttgccgaagccatggagttttacggccctgtggaagaggtgctgaaggaaaagctcgcccctgttttcggcaagagggcaaagaccctgctggaaagggaattcaattttacgttaagcgaagaagccgcaaaagcccttaccggatctttcggcattgaatgcgcgaaagaccagtttgcgcagattatcgaattcatgtcgggcaaaaggccgccgaccaaagacgccggctaccgctatatggaagaaataaaaaaactcgacgatcccaaatgtatgatcctgatctacgagggagaaaacgcggtaaagaaaacccgcgacgtgcttggcccaacagaccccctcaaagcgcccaaaggcacggtacgccgggagttcggctcaaacgtgatggtcaacaccgcccacgcgtccgattcggtggaaagctataaccgtgaaaaaaatattgtcaaagtaaacgaaaattcatttgccaaaataatcagggagcagttggggcactga

SEQ ID NO: 40892 - protein, 188 aa, Unknown
  Obtained from environmental sample
  DOMAIN (50)...(175): Nucleoside diphosphate kinase
  misc_feature (1)..(188): Xaa is any amino acid
MFSRTGLRIVGIKVHRFSLAEAMEFYGPVEEVLKEKLAPVFGKRAKTLLEREFNFTLSEEAAKALTGSFGIECAKDQFAQIIEFMSGKRPPTKDAGYRYMEEIKKLDDPKCMILIYEGENAVKKTRDVLGPTDPLKAPKGTVRREFGSNVMVNTAHASDSVESYNREKNIVKVNENSFAKIIREQLGH

SEQ ID NO: 40893 - DNA, 966 bp, Unknown
  Obtained from environmental sample
  misc_feature (1)..(966): n is a, c, g, or t
atgttcactcttatggaaaacaacaaacccgccatgatccttttggacattgaaatgccgcagatgaacggttacgaggcgattaagatactcaagtcaaatccggaaacaaaagatattccggttatttttcttaccggaaaaacaaaatcggatgacgaacttaccggtttatcccttggggccattgattatattactaagccgttccagccggccctgcttcttaaacgtattgaagtacaccttttggttgaagcccagaaaaaagagcttctatacttcaatgaaaatttacaaaaaatggtggaagacaaaacacaaagcgtaattgaactgcaaaacgccctgttaaaaactatggctgaattggtggaatgtcgcgatgacattacgggcggacacatagagcgcactcaacgtggaataaaaatcctgctggaagaaattgaaaaaagcggcctttatcctgacgaggcgaagggatgggaccttgaccttattcttcagtccagccagcttcatgatgttggcaaaatatcaattaatgacgttattctaaaaaagcgtgaaaaactcaatgaacaggaatttaacgaaatgaaaaaacacgcgagttttggcgagaagataattgaaaaaattgaaacccttgcaaaggaaagcgactttttaaaatacgcgaaaatttttgccgcaagtcaccatgaaaaatgggacggcacaggttacccacggggacttaaaggggacgaaataccgttgttgggccgcataatggcgattgcggacgtttatgacgcgcttacgtcaatgcgcccatataaagaagccttctcccacgaagaagcggtgcggatcattgttgaaagcagcgggaagcagtttgatcccgccctgatcgaagtattcctccgggcggcggatcaattcagggaaataatcagtgccccaactgctccctga

SEQ ID NO: 40894 - protein, 321 aa, Unknown
  Obtained from environmental sample
  DOMAIN (1)...(80): Response regulator receiver domain
  misc_feature (1)..(321): Xaa is any amino acid
MFTLMENNKPAMILLDIEMPQMNGYEAIKILKSNPETKDIPVIFLTGKTKSDDELTGLSLGAIDYITKPFQPALLLKRIEVHLLVEAQKKELLYFNENLQKMVEDKTQSVIELQNALLKTMAELVECRDDITGGHIERTQRGIKILLEEIEKSGLYPDEAKGWDLDLILQSSQLHDVGKISINDVILKKREKLNEQEFNEMKKHASFGEKIIEKIETLAKESDFLKYAKIFAASHHEKWDGTGYPRGLKGDEIPLLGRIMAIADVYDALTSMRPYKEAFSHEEAVRIIVESSGKQFDPALIEVFLRAADQFREIISAPTAP

SEQ ID NO: 40895 - DNA, 852 bp, Unknown
  Obtained from environmental sample
  misc_feature (1)..(852): n is a, c, g, or t
atggcggctgaagccaaaaaagcaaaaataccgcctcctgccgcaggcaatgccggtggggcgcttcttgacaaaattcccaatccgcagccgattgtgtccgaaacaaccgacagcgaaaccggggccattcgctggaagcttggcaacggcgctgaaataatccttaaagatacgaagaacaaaaacagcgagataagcctttacgcccaggcgcggggaggaaccatgagcgcttccgacgatacagcgatctccgcttatctggcggcggaaatgcttaacgcttcggggcttggcccttattcaagggcggagctgacaagggctctcctggataagcaggtgtcgttttctttctggactcaaaattacctccggggttttcagggaggtgccgctgtaaaggatcttcagaccctgttcgagatgctctatatcagtttcaccgagccccgtttcgatcccgaagcgataaaagccatgctggatcagtacaggtcgagcatggcctttcaggaaaacgatcccaacgcggttttccagcgtgaaataacccgtactataaacaggaatccccgctttcacccgcttgaaaaggaggatctggaaaaagtagataacaacgcggctcttgcctttatcaaaaaatcccttaaccccggcgattacacattcgtctttaccggaaacctggatgttcctctgctccgttccctgacagaaacatatctggcttcaattccggcttccgctccttttaacgcatgggccgacattgacgcgggccgcccgtctgatacggtcagggagattaaaaaggaagggaagaaagaagcacggtttacatga

SEQ ID NO: 40896 - protein, 283 aa, Unknown
  Obtained from environmental sample
  misc_feature (1)..(283): Xaa is any amino acid
MAAEAKKAKIPPPAAGNAGGALLDKIPNPQPIVSETTDSETGAIRWKLGNGAEIILKDTKNKNSEISLYAQARGGTMSASDDTAISAYLAAEMLNASGLGPYSRAELTRALLDKQVSFSFWTQNYLRGFQGGAAVKDLQTLFEMLYISFTEPRFDPEAIKAMLDQYRSSMAFQENDPNAVFQREITRTINRNPRFHPLEKEDLEKVDNNAALAFIKKSLNPGDYTFVFTGNLDVPLLRSLTETYLASIPASAPFNAWADIDAGRPSDTVREIKKEGKKEARFT

SEQ ID NO: 40897 - DNA, 1560 bp, Unknown
  Obtained from environmental sample
  misc_feature (1)..(1560): n is a, c, g, or t
ttgatgacggagaataattcccgcatttatgtccttccgcccgaagaggcaaggcgcattgccgcgggcgaagtagtagaccgtcccgccgcccttgtccgggaatttcttgacaacgcgatagacgcaaatgcggctaacatagaaatctctgttgaggaaggcggctgtaaaaaagttgaagtttccgacgacggagacggaatgatacgcgaagatttggaactttgcacgcttacccacgcgacaagtaaaatacgcaagttagacgatcttgacacagcggtaacgcttggtttcaggggggaagccctttctgcggcggcggctgtcagcagggtggaaattgcaagcagtacggacggaagaacggcgtggctttttgaaacaggaccgggagaaagccgcccgtccaaagttgaacagacgcgccgcacaaaaggcacaaccgtaagagcgcttaacatttttgaaagcatcccggcgcgaaaacgttttttaaaaagggaaggaagcgaagcggccctatgccgccaggtttttattgacaaagcgcttgcattcccctcaattaatttccgttttattcaagacggcaagttaaaagattttttccccgccgtttcttcaaagaaggaacgttntgccgccgccgtgttacaaacaggcgaagaaaatttcctgcatgaaataaatgtaacgggcgacggcttnttcgccacagtcgtcatcggcggaccggaactttacagaaacgacagacggcagctttttgttttcgcgaacggcagaagggtacaggattattcgctgattcaggccgttgaatacggctcccaaggctggttcccaaacggcacccaccccgtctccgcggtctatgtggaaatagacccgtcccttgccgattttaacattcaccccgcaaaacgcgaagtacgcttccgcaactcaggctccattcatcaggcgatctcaggcggagttaaaaacttttttcacagtttgtaccttaaaaattctcgcaaagacaacgaatctgcggctggagatgagcaaacagagaaagataattttcttttcttaaacaataactttgtatcaaagcacagcccagaagaacacgataatatatcaaacaacaactttgcgtcacataccgaaggtacagcgcgcctgtgcgagagttctttttcgtattcaagccaaaacgaaaaatcttcttcaagcgtatcaactcccgcttatggcgatatgcgctatgccggaagaatatttgatttgttcattttgatggaatggggggacaaattatacataattgaccaacacgccgcgcatgaacgaatactctacaacaaattccttagggaaccgatacccaaacaggaactgcttgcgcccattaccttcaccacggaaagcgacgaggaagacgcgtttctttcagctaacagcggggaactgtcgcgcctggcgttgaaattgaaaaagacgcggaaagctggaggattgaagccctgcctgcggattggcgaatgggcgacgccgacaccgtga

SEQ ID NO: 40898 - protein, 519 aa, Unknown
  Obtained from environmental sample
  DOMAIN (24)...(158): Histidine kinase-, DNA gyrase B-, and HSP90-like ATPase
  misc_feature (1)..(519): Xaa is any amino acid
MMTENNSRIYVLPPEEARRIAAGEVVDRPAALVREFLDNAIDANAANIEISVEEGGCKKVEVSDDGDGMIREDLELCTLTHATSKIRKLDDLDTAVTLGFRGEALSAAAAVSRVEIASSTDGRTAWLFETGPGESRPSKVEQTRRTKGTTVRALNIFESIPARKRFLKREGSEAALCRQVFIDKALAFPSINFRFIQDGKLKDFFPAVSSKKERXAAAVLQTGEENFLHEINVTGDGXFATVVIGGPELYRNDRRQLFVFANGRRVQDYSLIQAVEYGSQGWFPNGTHPVSAVYVEIDPSLADFNIHPAKREVRFRNSGSIHQAISGGVKNFFHSLYLKNSRKDNESAAGDEQTEKDNFLFLNNNFVSKHSPEEHDNISNNNFASHTEGTARLCESSFSYSSQNEKSSSSVSTPAYGDMRYAGRIFDLFILMEWGDKLYIIDQHAAHERILYNKFLREPIPKQELLAPITFTTESDEEDAFLSANSGELSRLALKLKKTRKAGGLKPCLRIGEWATPTP

SEQ ID NO: 40899 - DNA, 525 bp, Unknown
  Obtained from environmental sample
  misc_feature (1)..(525): n is a, c, g, or t
ttgtcaataaaaacctggcggcatagggccgcttcgcttccttccctttttaaaaaacgttttcgcgccgggatgctttcaaaaatgttaagcgctcttacggttgtgccttttgtgcggcgcgtctgttcaactttggacgggcggctttctcccggtcctgtttcaaaaagccacgccgttcttccgtccgtactgcttgcaatttccaccctgctgacagccgccgccgcagaaagggcttcccccctgaaaccaagcgttaccgctgtgtcaagatcgtctaacttgcgtattttacttgtcgcgtgggtaagcgtgcaaagttccaaatcttcgcgtatcattccgtctccgtcgtcggaaacttcaacttttttacagccgccttcctcaacagagatttctatgttagccgcatttgcgtctatcgcgttgtcaagaaattcccggacaagggcggcgggacggtctactacttcgcccgcggcaatgcgccttgcctcttcgggcggaaggacataa

SEQ ID NO: 40900 - protein, 174 aa, Unknown
  Obtained from environmental sample
  misc_feature (1)..(174): Xaa is any amino acid
MSIKTWRHRAASLPSLFKKRFRAGMLSKMLSALTVVPFVRRVCSTLDGRLSPGPVSKSHAVLPSVLLAISTLLTAAAAERASPLKPSVTAVSRSSNLRILLVAWVSVQSSKSSRIIPSPSSETSTFLQPPSSTEISMLAAFASIALSRNSRTRAAGRSTTSPAAMRLASSGGRT

SEQ ID NO: 40901 - DNA, 825 bp, Unknown
  Obtained from environmental sample
  misc_feature (1)..(825): n is a, c, g, or t
ttgatgcggtttttgcctcgggatgtttgcgcttatctgggaatgacgggcggcattacagtcctcagttctcaagcgggaaattcccttaaacagacttacacggaaacgctctatgaaaacaaaaccgtaaccgtgcgcggcgttgatacaaattcgttaattacggttccgggagaaaacggggcggaaacttatatctgggtgcagggaagaaacgggccgacccttgaaaaatttgttcctcaaaggcttgacggtagcaattatacccatattccggttaagggagcaatgtcctcaaggtttgggataattggcgcatatataattatacttgtcattgttttctttctgggattctttgcgatctttgcggaacctggtcttgccgttactgcggttaccgtggaagagatgaccaccggcacatttaggcgctcaaaattgataaagattgcggctatgggcgtcggcggcggtatggtgattggttttgcgcgtgtactgttcagcaatacgttgccctacggaggcatacatctttcatggattttggctccatgttatgcgattgccctgatactgacaatatttgcccctgaagatttttcttcgatagcgtgggatgtcgccggcattgccacaggtcccatctcagttcccatcattataactacggggcttggactcggacatgattcacttcgcgcggacggcgctttcggtattgtggcgacggcgagtgtttttccgattatcgtaatccttatatcgggtattattgataaagcaagatcgaaacgtatgttaaaaaatatgtag

SEQ ID NO: 40902 - protein, 274 aa, Unknown
  Obtained from environmental sample
  SIGNAL (1)...(26)
  DOMAIN (76)...(264): Protein of unknown function (DUF1538)
  misc_feature (1)..(274): Xaa is any amino acid
MMRFLPRDVCAYLGMTGGITVLSSQAGNSLKQTYTETLYENKTVTVRGVDTNSLITVPGENGAETYIWVQGRNGPTLEKFVPQRLDGSNYTHIPVKGAMSSRFGIIGAYIIILVIVFFLGFFAIFAEPGLAVTAVTVEEMTTGTFRRSKLIKIAAMGVGGGMVIGFARVLFSNTLPYGGIHLSWILAPCYAIALILTIFAPEDFSSIAWDVAGIATGPISVPIIITTGLGLGHDSLRADGAFGIVATASVFPIIVILISGIIDKARSKRMLKNM

SEQ ID NO: 40903 - DNA, 1125 bp, Unknown
  Obtained from environmental sample
  misc_feature (1)..(1125): n is a, c, g, or t
atggaaacttttatttcatgtatcatctgtattgccgacatgaatatagtccccctcgtggatcaggtgcttaccgatcttgagctttccgaagtttttgtacaacgcgccaagcaaacatttcttcaggacaaacgcgagcttcttggtcttcgctccgttactaaacttgatgaaagccgcgcgttaatttacagagtgtacgttccggcgatgtatgaagaaagtgttatgcgccgtattatcgaagcgactgatcttggaatgggcggacgcggcagtattttttcccagcatatcgacattttaagggggacgcctttttcttttgacatggaaaaactcagtaaactctgtaaaaaaaacgatgagctttcccatgaggaacacgcccttatcacttgtacggtttcaaggggctcgggcgacgcgttggctcaggcaatattagagcttggtatcggcgtacctgttgtttttttcggtacgggcgcggggttgagggacagattagggcttatgaggataaccattccggtagaaaaagaaatcatctggtttcttgtttcccgttccgatgcggacttggtggaaaaaagcataattccgcgcgcccgtcttgacattcccggcaacggctttttgtaccggtgctttgttcacgcgcccgtagttaacttaaggattaggcacagggagcgtcttcatgccgcgactatggaacaggtcattgccgcattggacgaggttcgcggttcaaacgattggcgtcgttttggatcgcgtaaacatgaacacaagagcggcgaaaaaaagtcagtcaataccagagggcttttctttatcggcgatgaagaagaaattgaattattccgtaaagaagcaatagaaaatggggcgcgcggagcgacctttaaccctgttgaaatgcgctcatacagagcttttacgcatggaaaagacatggaatcaaactcacgccaactctgcgacattatcactaccccggaaacagaagaaaaaatacgcgctgctgctgtgaaaaacggcctttttgacgaaggtaaaacctgcgtacttaaaactttcaatgtagaaatgccgactattatccataaaaaataa

SEQ ID NO: 40904 - protein, 374 aa, Unknown
  Obtained from environmental sample
  misc_feature (1)..(374): Xaa is any amino acid
METFISCIICIADMNIVPLVDQVLTDLELSEVFVQRAKQTFLQDKRELLGLRSVTKLDESRALIYRVYVPAMYEESVMRRIIEATDLGMGGRGSIFSQHIDILRGTPFSFDMEKLSKLCKKNDELSHEEHALITCTVSRGSGDALAQAILELGIGVPVVFFGTGAGLRDRLGLMRITIPVEKEIIWFLVSRSDADLVEKSIIPRARLDIPGNGFLYRCFVHAPVVNLRIRHRERLHAATMEQVIAALDEVRGSNDWRRFGSRKHEHKSGEKKSVNTRGLFFIGDEEEIELFRKEAIENGARGATFNPVEMRSYRAFTHGKDMESNSRQLCDIITTPETEEKIRAAAVKNGLFDEGKTCVLKTFNVEMPTIIHKK

SEQ ID NO: 40905 - DNA, 378 bp, Unknown
  Obtained from environmental sample
  misc_feature (1)..(378): n is a, c, g, or t
ttgcgtttctatgttgtatatgttacaatatttaaagtagtttttaaggagacttgtatgcctttaatcaatcaattttcaattcaactttattcattacgcgatataatcggaaacgattttaaaggtacattaaaaaaactggctgatataggatacacaggcgttgaatttgcaggttacggcggactttccgcgcaggaaatgaagcagacacttgattcatgcaatctaaaacctgtcggcagtcatatcggtcttgaagggcttaccaaacgccttgacgaagaaatcgcataccataaagtcctgggtactgaatattttgtctgtcccaagccgacattaaaacaaaagaagatgtttcggaactggtaa

SEQ ID NO: 40906 - protein, 125 aa, Unknown
  Obtained from environmental sample
  misc_feature (1)..(125): Xaa is any amino acid
MRFYVVYVTIFKVVFKETCMPLINQFSIQLYSLRDIIGNDFKGTLKKLADIGYTGVEFAGYGGLSAQEMKQTLDSCNLKPVGSHIGLEGLTKRLDEEIAYHKVLGTEYFVCPKPTLKQKKMFRNW

SEQ ID NO: 40907 - DNA, 798 bp, Unknown
  Obtained from environmental sample
  misc_feature (1)..(798): n is a, c, g, or t
ttgaaaagaaaggttaaaaaagctatgacatatcctgcgatggtagccgtagtggcaattcttgttgtgataataatgctcacttttgttattcctcagttcgtatcaatattcaaagatgcaggcatttcgttgccctggcccacaaggatggttatgggagcttctgatttgataagagataatgtttttatttggattaccgccgttattgcatttattcttgtgttcagatatctgttgaagcttcccagatttcgcttaatatttgatggcttaatgcttaaagccccgctctttggagatttgctaacaaaatcaactattgcccgtttttcgcgcacacttggtacgcttttgaatgcaggtgttgcaataacagatgcattaaccgtaacagccaaaacggcaggcaatactgctgttgaaaaagctataatgcatatacaaagttcaatatctggtggaaagcccatagccgagcctatgaacgagcctttgtcttttaaatacgataaaaaacaatccatactcaacgatttttatggatatttgcccaaaataaagatttttccgccaatggttgtgcaaatggctgcagtaggcgaaaaaaccggcgggcttggcaatatgctgattaaggttgcagatttttatgatgaagaagtggatgcggcagttgatactttgacttctatgatagaaccgttgattatagtgttccttggcgggttcataggtttcatactagtagccatgtatatgccgatgttcagtttgtcagatgcggtgcaataa

SEQ ID NO: 40908 - protein, 265 aa, Unknown
  Obtained from environmental sample
  SIGNAL (1)...(30)
  DOMAIN (112)...(256): Bacterial type II secretion system protein F domain
  misc_feature (1)..(265): Xaa is any amino acid
MKRKVKKAMTYPAMVAVVAILVVIIMLTFVIPQFVSIFKDAGISLPWPTRMVMGASDLIRDNVFIWITAVIAFILVFRYLLKLPRFRLIFDGLMLKAPLFGDLLTKSTIARFSRTLGTLLNAGVAITDALTVTAKTAGNTAVEKAIMHIQSSISGGKPIAEPMNEPLSFKYDKKQSILNDFYGYLPKIKIFPPMVVQMAAVGEKTGGLGNMLIKVADFYDEEVDAAVDTLTSMIEPLIIVFLGGFIGFILVAMYMPMFSLSDAVQ

SEQ ID NO: 40909 - DNA, 537 bp, Unknown
  Obtained from environmental sample
  misc_feature (1)..(537): n is a, c, g, or t
ttggattatatttctccaataggagtattgcgcatagaaacttctgatagaggtttaagtgccataaaatttttatcgcaggaccaggaagcaagtgcctttgaagttcctcaaagcgagtatgcgaggaattgcatggcactctgcgtttctgctcttaacagctattttgccaagcaatggggcgtgttcagccaactgcgttcaaaaatacctttagacataaaaggcacggattttcaaaagagagtttggggagtaatctattctatgccaaacacttatcccatagtaggtatgcattatttggagcttgcgcatttagctggcaaaccgagcgcagtaagggcatgtgctagaatttgtgggcaaaataccattccaatcataataccatgccacagagtaatggcagtaaacgggcttggcggttatggaggcggaatttccaaaaaatcctggcttttatggcatgagggcataaccaaaggctcaaaagcaaacttttattccagcaacccccctcaagcgaggtga

SEQ ID NO: 40910 - protein, 178 aa, Unknown
  Obtained from environmental sample
  DOMAIN (77)...(164): 6-O-methylguanine DNA methyltransferase, DNA binding domain
  misc_feature (1)..(178): Xaa is any amino acid
MDYISPIGVLRIETSDRGLSAIKFLSQDQEASAFEVPQSEYARNCMALCVSALNSYFAKQWGVFSQLRSKIPLDIKGTDFQKRVWGVIYSMPNTYPIVGMHYLELAHLAGKPSAVRACARICGQNTIPIIIPCHRVMAVNGLGGYGGGISKKSWLLWHEGITKGSKANFYSSNPPQAR

SEQ ID NO: 40911 - DNA, 456 bp, Unknown
  Obtained from environmental sample
  misc_feature (1)..(456): n is a, c, g, or t
gtggcaagtaaaatatatttggacacttctgtttgtagtgctttatttgacgatagaactccagaacgaaaatctgctacagaactagcttggttaaaattgaaagataaaagcattagcgatgtatatgtatcagaattagtgttagaagaattgcaaagagctactgaacctttaaaaagttccttattatctgccatatcagattttaatgtattaccgctcacagaaaatactaaacatttggcaagtatttatgtaaaacaaggaattttcccagaaaaatattttgacgatgctttgcacgtagcggtcgcggcattaaatgaaattggaattctgttgagctggaattttactcatcttgtcaaattaaaaactagacgtatgatttcgcttgtaaatgcaatggaatttattttccccgtagagattatatctccgccagaaatataa

SEQ ID NO: 40912 - protein, 151 aa, Unknown
  Obtained from environmental sample
  DOMAIN (5)...(130): PIN domain
  misc_feature (1)..(151): Xaa is any amino acid
MASKIYLDTSVCSALFDDRTPERKSATELAWLKLKDKSISDVYVSELVLEELQRATEPLKSSLLSAISDFNVLPLTENTKHLASIYVKQGIFPEKYFDDALHVAVAALNEIGILLSWNFTHLVKLKTRRMISLVNAMEFIFPVEIISPPEI

SEQ ID NO: 40913 - DNA, 924 bp, Unknown
  Obtained from environmental sample
  misc_feature (1)..(924): n is a, c, g, or t
ttgatgaagaagatatttcccattcttgaagacaggcccgaggacagggatgcggcttcaagcgtcagcgagggggttaaatctccggctattgaagccatagctcccgatacgccgattttccggctgcggctctcctattcccatgaaacctttctcgccatttaccgcgacgattcgttataccccggctccatggttataattccaacccgttacggcaaagaccttgcccacgtgatagggcccgtgtgctgcagacactacgtttctgacattggctggattgagcgtgcagctgaaaaggaagacctggacaaggcgaatcataaccacatactggaaaaggacgcgtttaacatctgcaaagagaaaattttaagccaccagcttgaaatgaaactggtgcatgtccactatttgctggaagagccaaagatactgttcttctttaccgcggaaaaccgcgtggacttccgcgaacttgtgaaagatcttgtcagcgtttttaaaacccgtattgagctgcgccagatcggcgtccgtgacgaagccagggtggtaagcgggcttggcatttgcgggcggggctactgctgccattccgtttccgacaaattaaaacccgtgtcaataaaaatggcgaaagaccagaacctttcgtttaactcgatgaaaatatccgggccctgcgggaggctgctctgctgtctttcttacgagcacggcttttactgcgaacagatccgccgtatcccgcaggaaggcgcaagggtaagccatgaaaacgaaacatgggctgttaccgaagcgaatatggtcaccggccaggtaaaactctccaacagcgacggccgcctggtaaccctccccgccgacaggtttgagaaaattgataaccattggcgcactaagggcaaataa

SEQ ID NO: 40914 - protein, 307 aa, Unknown
  Obtained from environmental sample
  DOMAIN (92)...(179): PSP1 C-terminal conserved region
  misc_feature (1)..(307): Xaa is any amino acid
MMKKIFPILEDRPEDRDAASSVSEGVKSPAIEAIAPDTPIFRLRLSYSHETFLAIYRDDSLYPGSMVIIPTRYGKDLAHVIGPVCCRHYVSDIGWIERAAEKEDLDKANHNHILEKDAFNICKEKILSHQLEMKLVHVHYLLEEPKILFFFTAENRVDFRELVKDLVSVFKTRIELRQIGVRDEARVVSGLGICGRGYCCHSVSDKLKPVSIKMAKDQNLSFNSMKISGPCGRLLCCLSYEHGFYCEQIRRIPQEGARVSHENETWAVTEANMVTGQVKLSNSDGRLVTLPADRFEKIDNHWRTKGK

SEQ ID NO: 40915 - DNA, 978 bp, Unknown
  Obtained from environmental sample
  misc_feature (1)..(978): n is a, c, g, or t
atgcagatttatgcggaccggcaaatacgccccaagtacgcctgcccccaatgcgaggggaccgaagacgaagacaagccgacagtccgcatagcgcccgtggaaaaggcaatgattcccaggagcatagcgagcgacagcgtgctggtcatgatcatcacgcagaagtttgaaatgcacctgccgtattacaggcaggagaagcaatttgaacagataggggtaacgataagccggcaagacatggcgaactggcagcagcaggtatttaacgtgctgaaaccgttattcattttattaaaagcgatgataaaaagcgggcctgtgctgcggatggacgagaccccggtgcaggtaatgggggaagaagggcgtgaagacacgcagaaaagctatatgtggctcgccctcggcgggccgcccggcaaaacagtggcatggtacgaataccacccgacccgcgcagcgtataacgcgaaagagtttctggaagggtattcgggctatctgcaaacggacgggtatgatgcctatgacagcgcggtgaaagacatgcccggcattattcacgtggggtgcctagctcattcgaggaggcgattctttgaggcggcgaaagcaagcaaagaagccaaatccgcgcaggaagggataaaacatatacgcaacctgtacgatatagaaaatgaattacggaaaacaattacagataacgatgataaatttctgtccgaacggaaagcccgcgccgggcccgtgcttgaaaagtttaaggcatggcttgagaaacggaaatgcgaagtgccgccaagccttcttttagggaaagcaattaattacagcctcgcccagtgggacaagctggtcaggtatctggaaagcccgtacctacgcctgacaagaatacttgcgaaaacgcgatacggccttttgtcatcggaaaactggttattctgccagagcgtaggcggggcttaa

SEQ ID NO: 40916 - protein, 325 aa, Unknown
  Obtained from environmental sample
  DOMAIN (1)...(187): Transposase IS66 family
  misc_feature (1)..(325): Xaa is any amino acid
MQIYADRQIRPKYACPQCEGTEDEDKPTVRIAPVEKAMIPRSIASDSVLVMIITQKFEMHLPYYRQEKQFEQIGVTISRQDMANWQQQVFNVLKPLFILLKAMIKSGPVLRMDETPVQVMGEEGREDTQKSYMWLALGGPPGKTVAWYEYHPTRAAYNAKEFLEGYSGYLQTDGYDAYDSAVKDMPGIIHVGCLAHSRRRFFEAAKASKEAKSAQEGIKHIRNLYDIENELRKTITDNDDKFLSERKARAGPVLEKFKAWLEKRKCEVPPSLLLGKAINYSLAQWDKLVRYLESPYLRLTRILAKTRYGLLSSENWLFCQSVGGA

SEQ ID NO: 40917 - DNA, 351 bp, Unknown
  Obtained from environmental sample
  misc_feature (1)..(351): n is a, c, g, or t
atggccgcctataacatgaccggaacaaaatgggcctatgatgaccgtttcgccataaaaaatactgtcaactttttcggcatgttatctttgtccctgggggctatcaatccattagaaggcgataaaacccttgtaaaagaagacagaaataattaccataaactcattttaagggacggtattccggttgggattattcttcagggcgaaatcggcgaaagcggtttctggctctaccttattaaaaacaagatacgcatagacaatctgggcaagagtccctggaatgtgagttacgctgatttttacggggtggaagcaaacggcgagtacaagtgggttgtttag

SEQ ID NO: 40918 - protein, 116 aa, Unknown
  Obtained from environmental sample
  misc_feature (1)..(116): Xaa is any amino acid
MAAYNMTGTKWAYDDRFAIKNTVNFFGMLSLSLGAINPLEGDKTLVKEDRNNYHKLILRDGIPVGIILQGEIGESGFWLYLIKNKIRIDNLGKSPWNVSYADFYGVEANGEYKWVV

SEQ ID NO: 40919 - DNA, 1599 bp, Unknown
  Obtained from environmental sample
  misc_feature (1)..(1599): n is a, c, g, or t
gtgacggccagagaaaaaatattagataaatattcggcgaaagtttataaaaacaggaaagaccacgttattcagcttgaagaagaagctaaaacgcattctatcgccgccaatacccgcgccattccgggcgtgatgacggcaagaggatgctgttacgccggttgtaagggcgttgtggtcggaccgctgaaagatgtttgcgtaattacacacggacctgtcggctgcgggttttacagttgggggacgcgccgtaacaaggcgaaacccgacgaacacacagacaaaaattttattccttactgcctgtccacggatatgcaggagagcgacattgttttcggcggtgagaagaaactggagaaggcaatcagcgaggcaatggagattttcagtcccaaatgcataatgatctgctccacctgcccaatcgggcttataggcgacgacgtgcaggcggttgcgagacgaaccgaggaaaagtacggcgttaaagcaatcggcttttcatgcgaagggtataaaggcgtttcccagtcgggcgggcaccacattgccaacaacggcgtaatgcgttacgtcatcggcaccggcgataaaaaaccgaaaacaaagttttccgtaaatattttgggcgaatacaacatcggcggagacggttgggaagaggaacgtatattaaaaagatgcggtattgaggttttaaacctgttcaccggagacgcgtcctacgaatcgcttaaatcatcgcatttggctcatttgaatctggtaatgtgccaccgctcaattaactatatcgccgaaatgatgaaaaccaaatacggcatcgactggataaaggtgaatttnatcggtgttgaggcaacgtgcaaatctttgcgagatattgcaaaatatttcaacgattccgaactcacaaaaagggttgaagaagtaatagccgatgaagttgcaaccattaaaagcgatatggagcattacaaagccaagctaacgggcaaaactgcgggtattttctccggtggttctcgttctcatcactatcaggttcttttggaagaactcggcatgaaaaccataattgctggttatgaattcgctcatcgcgatgattacgaagggcgagacataattccgcaaatcaaagaagatgccgacaacaaaaacattgaaagcatagtcgttgcaaaagacgaaaagttctatagagaaacttacaccgaagaaaaaattgccgccttaaaaagcggaggcattgagttagacacctacggtggcatgattcccgaaatggatgcagaatctgttgttgttgatgactacaaccactttgaaacggatgagcttatcaaagctatgaaaccagatattttcctgtctggcatcaaagacaaatattccatacaaaaagctggcacagcctctaggcaaattcattcctacgattactcaggtccctattctggttttcgcggtgcggtgacttttggaagagatgttgctatggctatatttaccagtgcatggcccttggttactccgccctggaaaaacaaacctatgcttatgggcaaattgaaggaggcaggataa

SEQ ID NO: 40920 - protein, 532 aa, Unknown
  Obtained from environmental sample
  DOMAIN (43)...(508): Nitrogenase component 1 type Oxidoreductase
  misc_feature (1)..(532): Xaa is any amino acid
MTAREKILDKYSAKVYKNRKDHVIQLEEEAKTHSIAANTRAIPGVMTARGCCYAGCKGVVVGPLKDVCVITHGPVGCGFYSWGTRRNKAKPDEHTDKNFIPYCLSTDMQESDIVFGGEKKLEKAISEAMEIFSPKCIMICSTCPIGLIGDDVQAVARRTEEKYGVKAIGFSCEGYKGVSQSGGHHIANNGVMRYVIGTGDKKPKTKFSVNILGEYNIGGDGWEEERILKRCGIEVLNLFTGDASYESLKSSHLAHLNLVMCHRSINYIAEMMKTKYGIDWIKVNXIGVEATCKSLRDIAKYFNDSELTKRVEEVIADEVATIKSDMEHYKAKLTGKTAGIFSGGSRSHHYQVLLEELGMKTIIAGYEFAHRDDYEGRDIIPQIKEDADNKNIESIVVAKDEKFYRETYTEEKIAALKSGGIELDTYGGMIPEMDAESVVVDDYNHFETDELIKAMKPDIFLSGIKDKYSIQKAGTASRQIHSYDYSGPYSGFRGAVTFGRDVAMAIFTSAWPLVTPPWKNKPMLMGKLKEAG

SEQ ID NO: 40921 - DNA, 606 bp, Unknown
  Obtained from environmental sample
  misc_feature (1)..(606): n is a, c, g, or t
ttgagaaccggagcgataattaccgcggcaggcagttcttcaaggatgggcgttttcaagcctctgttaaaaattggaagccttacggcaatagagcgtataataaccagtttcatggccgcttctgtcaataacatcgttatcattacaggaaacaacgcgcaggagcttgaaaacagtttaaaggacttaaatatcgtgtttcttaaaaacgacatgtacgagcataacgaaatgcttgattcgataaaaatcggtcttgattatcaaaaagaaaaatgtgacaaaatttttatcactcctgttgatgttcccatctttacttccgataccgtgaaagcgctgcttgattgtaaatcggacgcgggtattccgacttgtgaaggaagaacagggcatccaattattctgggcagcgacgccgttaccaggatacttaaatattcgggaagcggcgggcttcgtaacgccataacagatctttctctggagcttgagtatatagaaaccgaagaccagggcatattatacgatatgaatacacaggaagattacgccggtattttaaaattgttttccgggttgtccggcggaggacaaaaataa

SEQ ID NO: 40922 - protein, 201 aa, Unknown
  Obtained from environmental sample
  misc_feature (1)..(201): Xaa is any amino acid
MRTGAIITAAGSSSRMGVFKPLLKIGSLTAIERIITSFMAASVNNIVIITGNNAQELENSLKDLNIVFLKNDMYEHNEMLDSIKIGLDYQKEKCDKIFITPVDVPIFTSDTVKALLDCKSDAGIPTCEGRTGHPIILGSDAVTRILKYSGSGGLRNAITDLSLELEYIETEDQGILYDMNTQEDYAGILKLFSGLSGGGQK

SEQ ID NO: 40923 - DNA, 1080 bp, Unknown
  Obtained from environmental sample
  misc_feature (1)..(1080): n is a, c, g, or t
atggtatacctggtgcggcatggtgaaccactgtttccgggcggcaggagtctgtgtatcggcaggacagatttgcccctaagcgaacggggaaaacgccaggcttctgacctggcaacttatttttcagataaaaatattaagtccgtatatcatagtcgtttattgcgctcgaaagaaacggcggaattattggcagacaataaaaatccggttattcaggcagacggcctggaagaaattgccatgggtgaatgggaaggtctgacatttcaggagatccgcgaaaaataccctgaaatctacgaaaaacgcggaaaagacattatgcacataacgcctcccggagccgagagtttcacagaggtgctgtccaggttctcccgcgcggttaaacgcattctcaatgacgatattgttattgtgggacacgcgggtgttaataaggtttttttatgcgaaactcttggtttggattacagcgaaattcaggaaatgccccagccttacgggtgcgttaatgtacttgctgcgaaaagctgttgtcttttcgttgattcatacggaagaatgccattggacgcgcctgacgatgaggagtgcggctatttattgaaacaaaatgaaacccccgataatattgtggcgcattgcatggccgtatcgcgtaaagcgttacaaatcgcggaatcattgaagcctgactgcctgattgaccgtgatctgataagagccgcggcgcttctgcacgatattacaagaacggaagaaaatcacgataaggcgggttataaatacttgcttaaatgcggttatccgcgtatcgcgaatattgtactttcacatcacggactcgcgcctgaggatttggagactataaccgaaagtacaatagttttttacgccgacaagcttgtttacgggacagaagagctgagccttgaggaacgcttttcaaaaagccgtgaaaaatgcctgacacccgaagcgcgggcttcgcacgagcttcaatatgatcaggcgaagaaggcgcgggaattgattaacgcttttctccgcactccccttccctgcagctga

SEQ ID NO: 40924 - protein, 359 aa, Unknown
  Obtained from environmental sample
  DOMAIN (214)...(308): HD domain
  misc_feature (1)..(359): Xaa is any amino acid
MVYLVRHGEPLFPGGRSLCIGRTDLPLSERGKRQASDLATYFSDKNIKSVYHSRLLRSKETAELLADNKNPVIQADGLEEIAMGEWEGLTFQEIREKYPEIYEKRGKDIMHITPPGAESFTEVLSRFSRAVKRILNDDIVIVGHAGVNKVFLCETLGLDYSEIQEMPQPYGCVNVLAAKSCCLFVDSYGRMPLDAPDDEECGYLLKQNETPDNIVAHCMAVSRKALQIAESLKPDCLIDRDLIRAAALLHDITRTEENHDKAGYKYLLKCGYPRIANIVLSHHGLAPEDLETITESTIVFYADKLVYGTEELSLEERFSKSREKCLTPEARASHELQYDQAKKARELINAFLRTPLPCS

SEQ ID NO: 40925 - DNA, 738 bp, Unknown
  Obtained from environmental sample
  misc_feature (1)..(738): n is a, c, g, or t
gtgcagatgtacggtatccgtgaaacagttntcaggcgcggcgctgtaaacagcggcgcggtaaattacgaggcaatgaaaagacagcttccgggcgaaggcggcgccctgttacgcgacatggacaaatgcgttaaatgcggccgctgcgtggaagcctgccaaacaatacagacagtccgcgcaatcaacagttcccgcaggagcgtcaattatacaataacaacggcttataaccagaaccttgaagacagcccctgtgttttatgcgggcagtgcgcggcggtttgtcctgttggcgcgatcagtgaaaacgatcaaagcgccgaagcctggaccgcgattaacgacagtgaacgccgcacagccgttcaattcggcaagacactgtgcgcggaattggacatcgcgcttggccttcccgggggaacagtcagcgagggtaaagcggttacagccctaaaacggctcggctttgataaagtttatgacgcccaattcgcgatagaccttgcggcggaggaactaagccttgaactgaaaaaccgggttaataaaggcggcaactctttgcaaggtaaacaaaacttaccgattatcagcgcctgttcgcaaagcgcggttaaatttatcgggaatttctaccctgacctaagcccccgcctttcgccctgcagaaacccaagagaaatattctgttcgctggtaaaagaagaaaaaacaacagtatctctatga

SEQ ID NO: 40926 - protein, 245 aa, Unknown
  Obtained from environmental sample
  DOMAIN (109)...(245): Iron only hydrogenase large subunit, C-terminal domain
  misc_feature (1)..(245): Xaa is any amino acid
MQMYGIRETVXRRGAVNSGAVNYEAMKRQLPGEGGALLRDMDKCVKCGRCVEACQTIQTVRAINSSRRSVNYTITTAYNQNLEDSPCVLCGQCAAVCPVGAISENDQSAEAWTAINDSERRTAVQFGKTLCAELDIALGLPGGTVSEGKAVTALKRLGFDKVYDAQFAIDLAAEELSLELKNRVNKGGNSLQGKQNLPIISACSQSAVKFIGNFYPDLSPRLSPCRNPREIFCSLVKEEKTTVSL

SEQ ID NO: 40927 - DNA, 660 bp, Unknown
  Obtained from environmental sample
  misc_feature (1)..(660): n is a, c, g, or t
atgccgacgcttgtgaacaatgtcgaatcgcttgccggtatcccggcgattattgaaatgggaggggatgaatacctgaaaatcggccatcccgactcaggggggacaaaactgatatgcctgtccggccatgttcagaaccgcggagtcttcgagattccgcttggcaagctgaccctgcgtgagattatttacgatcctgaattgggcggcgggattccgcagggcaaaaagttaaaattcttccacctcggcgggcagagcggccctataggcgggcccgaactcctggacaccgtatacagttacaccgatttgagaaaagccggccttggcgtcggttccggcgcaatcgtcgtcatggacgagactgtttcgatcctcgaatacctgcaatgtgtcagtgaatttttcatccatgaatcctgcggcaagtgcataccctgccgcgagggcagcaggcagatattaaagatactcaaaaaaatagcagacgccggtgcagccggcgccggcgcagactcatgcgatttggataccctgcgccggcttatccgaacaatgacagacgcttcgttctgcggcctgggacagacggcggccaaagccctggaaagcgcgtggaaatgctttaaacctgaaatcgaggtgaaacaatga

SEQ ID NO: 40928 - protein, 219 aa, Unknown
  Obtained from environmental sample
  DOMAIN (1)...(87): Respiratory-chain NADH dehydrogenase 51 Kd subunit
  misc_feature (1)..(219): Xaa is any amino acid
MPTLVNNVESLAGIPAIIEMGGDEYLKIGHPDSGGTKLICLSGHVQNRGVFEIPLGKLTLREIIYDPELGGGIPQGKKLKFFHLGGQSGPIGGPELLDTVYSYTDLRKAGLGVGSGAIVVMDETVSILEYLQCVSEFFIHESCGKCIPCREGSRQILKILKKIADAGAAGAGADSCDLDTLRRLIRTMTDASFCGLGQTAAKALESAWKCFKPEIEVKQ

SEQ ID NO: 40929 - DNA, 849 bp, Unknown
  Obtained from environmental sample
  misc_feature (1)..(849): n is a, c, g, or t
ttggaattgttggaatcaactcccgatgatccggacgctaaaaaatttcttgccgcgtgcgagaacggcttaaaagattatacgttttttattgacgagatgcatgtaactatcggagaaatactgacaggcgcgttattctcattgccgactcaatccggcagggcggtgatgcgttttaacaatctttcaacatcggcggattttgcttacggtatgggatttgagtatatggagttcgacgtattttcccgtccgtatataagtatcagagcgccttacgcgaaacttttgcctgttaccgtcggaggaaaagacaaaataatggttattactcatgctctggaccgttataataaagatatcagttgggagagcgaattgcttcttggtaataaaaagattcctgttataatgctggatacaacttttgaggatttcctgcttttatccaccgtgcgccgcggcctttcaacccttcaggtagacgagctttttaccgcttccaaaaaactaggctcgctgggatatgtctcgcaaatatttgaagccgagatactgaaccgtataagttccactgtatttttccttcctatggctatttttgttatagttataggctggcgatacagaacaaaaaaaagaccgaggtattttttcttcctgctccttcccgttctgcccatagttttcagcggctttgttttcttttaccgaaatttattaaacacggtaggcatctggcttgtcatcagcttgggatttgcggcggcgcttacaataattatcgtcgctcttgctgttatattgtttatttctttgataacgcttgccgcgcagcatgggtaa

SEQ ID NO: 40930 - protein, 282 aa, Unknown
  Obtained from environmental sample
  misc_feature (1)..(282): Xaa is any amino acid
MELLESTPDDPDAKKFLAACENGLKDYTFFIDEMHVTIGEILTGALFSLPTQSGRAVMRFNNLSTSADFAYGMGFEYMEFDVFSRPYISIRAPYAKLLPVTVGGKDKIMVITHALDRYNKDISWESELLLGNKKIPVIMLDTTFEDFLLLSTVRRGLSTLQVDELFTASKKLGSLGYVSQIFEAEILNRISSTVFFLPMAIFVIVIGWRYRTKKRPRYFFFLLLPVLPIVFSGFVFFYRNLLNTVGIWLVISLGFAAALTIIIVALAVILFISLITLAAQHG

SEQ ID NO: 40931 - DNA, 555 bp, Unknown
  Obtained from environmental sample
  misc_feature (1)..(555): n is a, c, g, or t
atgaagtacatatatttttataaatatcagataaataaaaaaatcgtcataaaacttggaattgctgaagacagcggcgacaaatcttccggtaaaacagcgatctgcggagttttcttaaatgccgtcaatgcgcctaaaggttatgaaaaaaaggaaactccgttgataaaaaaagcggctctgcaattcggcgaatatttcaaaggcaaacgaaaaagttttaatctgcccttaactttgcaagggacggcctttcaaatgaaggtatggaacgcgcttaaaaaaattccctacggaaaaaccatcagttacggagaactagccgcgatgatcggcaatccaaaagcctgccgcgccgtaggcatggcaaacaaccgtaacccaatcgcgattattattccatgccacagagtaataggctgcgatggaagtttaacaggttacggcggagggcttaaattaaaacaacagttactggaattagagaaaattcacacaaagaacacgaaggaagagaagatcacaaagaagaatagagattcttgttcgtaa

SEQ ID NO: 40932 - protein, 184 aa, Unknown
  Obtained from environmental sample
  DOMAIN (83)...(168): 6-O-methylguanine DNA methyltransferase, DNA binding domain
  misc_feature (1)..(184): Xaa is any amino acid
MKYIYFYKYQINKKIVIKLGIAEDSGDKSSGKTAICGVFLNAVNAPKGYEKKETPLIKKAALQFGEYFKGKRKSFNLPLTLQGTAFQMKVWNALKKIPYGKTISYGELAAMIGNPKACRAVGMANNRNPIAIIIPCHRVIGCDGSLTGYGGGLKLKQQLLELEKIHTKNTKEEKITKKNRDSCS

SEQ ID NO: 40933 - DNA, 1458 bp, Unknown
  Obtained from environmental sample
  misc_feature (1)..(1458): n is a, c, g, or t
ttgtttattgaattctcccagcgggaaattaaacgctccggcgggccgttctcactggtgtggatgcgccgcagcctccgcgcctggctgcatggaagcaggccatgggaaagtttgctgctggtgccgtctatcgataagatcaaacaaaaactggcggaagacagccgttattttgaatcgcttatacaaaaatatctgctggacaatccccaccgcgcattggtgacagtggagccgcaggaagatttccttccgaagcaggaagcgcgtcttgcagaaaaactcgccagggcggagcagggtttcagcgaggcggacagacagcttatcattgacaaggccagggccctggaaaaaatccagagcgagggcgacagtccggaggcgctcgcgacaatcccgcatctttccagaaaagatctttcccccgaaccggaaataatcccccgccggattgaagacctgacgggcctccccgcattgtgccatgacatttataccaacggcataagctacatcgaccttgcctttccgctggatatactcagccgggaagactaccagtggattccgttttttacacgggctgttaattccgtaggtctgcccggaatggattacgccgaagtatccagcctccttgcacgtaccgtaggcggctttaatgtcatgacccacacgggttccgcggccggcagcggcagtcccattattaaaacacccgcgggaaaattcgacattatcggccgcgactggatcgtctaccgtcttaaatgcctggacgaaaaaaccgcggcgtcgctggacacggttctgcgccttgttagtgaagcggatttttccgatttaaggcgaatccatgaccttgttatggaaatgaaaaatggcgcgcgttccagcctcgcgcctaacgggcatcattacgcgtcttcaagggcaaaccgtttcgcgtcggcttccacgcggacggatgaaatatggagcggtttaacgcagcttttatttgtccaccgccttgccgaaatggataccgctgaaatatccgctaagttaaataatctgcgcgacgcgatagcctcaggcggccttatcgccaaccttgctggttcagccgacgcacttaaatccaatggcggcttgatcgcacatcggttcaaagactttggccctcccaaaaacagattggcgggcaaaagggcggcaggcgccgcttccaggcccgaagtgtttgcctcgccgtcactgcaggttggctttgccgccatgacattgaaagccgcgaaatatgacacaacggcgcaaattgccgaaacagtgcttgcccaccagctttccaccggcgctttatgggaaaatatccgcatgaagggcggggcttacggagcccatgcttccagcagcggcctgaacgctgttctcccgtcaactaccggatcctcggccaatctgtcatga

SEQ ID NO: 40934 - protein, 485 aa, Unknown
  Obtained from environmental sample
  DOMAIN (78)...(340): Peptidase M16C associated
  misc_feature (1)..(485): Xaa is any amino acid
MFIEFSQREIKRSGGPFSLVWMRRSLRAWLHGSRPWESLLLVPSIDKIKQKLAEDSRYFESLIQKYLLDNPHRALVTVEPQEDFLPKQEARLAEKLARAEQGFSEADRQLIIDKARALEKIQSEGDSPEALATIPHLSRKDLSPEPEIIPRRIEDLTGLPALCHDIYTNGISYIDLAFPLDILSREDYQWIPFFTRAVNSVGLPGMDYAEVSSLLARTVGGFNVMTHTGSAAGSGSPIIKTPAGKFDIIGRDWIVYRLKCLDEKTAASLDTVLRLVSEADFSDLRRIHDLVMEMKNGARSSLAPNGHHYASSRANRFASASTRTDEIWSGLTQLLFVHRLAEMDTAEISAKLNNLRDAIASGGLIANLAGSADALKSNGGLIAHRFKDFGPPKNRLAGKRAAGAASRPEVFASPSLQVGFAAMTLKAAKYDTTAQIAETVLAHQLSTGALWENIRMKGGAYGAHASSSGLNAVLPSTTGSSANLS

SEQ ID NO: 40935 - DNA, 729 bp, Unknown
  Obtained from environmental sample
  misc_feature (1)..(729): n is a, c, g, or t
gtgatgaatttgattctttcgccgcccggaaagatcgttggtggtgaagtaatttttcacggcgaagatatcctgaagctgaaggaaaaacagctccagaagatacgcggagcaaaaatctccatgattttccaggacccaatgacaagcctgaatccgtttttaagaatttctacccagttaatcgagaccataaggctgcaccaaaacctggacaaaaagcaggcacgcgagaaagccattgagatgctggaaatggtagggatcccggctgccgtggaaaggatcgactcttatcctcaccagttctcgggtggaatgtgccaaagggtaatgatagctatggccctctcatgcaaccctgaaattcttatcgcggatgaaccgactacggcgttagacgtaacaattcaggcgcagatccttgatttgattaaggacttaacccaaaaactcggcacggcggtggtccttatcacacactctcttggagtagtggctggaatgtgcgacaacatctatgtcatgtacgcggggcgtgtagtcgagttaggcgccgcagagcanatttttgagacgccgatgcacccgtatacccgcggtcttatcaagtcggtgccgcggctggacaagcggaaccgggacaggctattttcattccaggtcagccccccacgtgataacctggcgccctgctgtcccnttctccgcgctgtcccgaggtactga

SEQ ID NO: 40936 - protein, 242 aa, Unknown
  Obtained from environmental sample
  DOMAIN (182)...(240): Oligopeptide/dipeptide transporter, C-terminal region
  misc_feature (1)..(242): Xaa is any amino acid
MMNLILSPPGKIVGGEVIFHGEDILKLKEKQLQKIRGAKISMIFQDPMTSLNPFLRISTQLIETIRLHQNLDKKQAREKAIEMLEMVGIPAAVERIDSYPHQFSGGMCQRVMIAMALSCNPEILIADEPTTALDVTIQAQILDLIKDLTQKLGTAVVLITHSLGVVAGMCDNIYVMYAGRVVELGAAEXIFETPMHPYTRGLIKSVPRLDKRNRDRLFSFQVSPPRDNLAPCCPXLRAVPRY

SEQ ID NO: 40937 - DNA, 717 bp, Unknown
  Obtained from environmental sample
  misc_feature (1)..(717): n is a, c, g, or t
atgacaatatcaaaagaacaatacgcatctcaaataattgaatctgtccgctctgttttgccgacggataaaaaaaatattgttttgcacgagcctgtctttggcggcaatgagcagcggtatgtcaaagagtgcattgatacaggctgggtttcttcagtaggcagttttgtcgataagtttgaggcggatttagctcaatttgccggcgtaaaaagagctgttgcggttgtcaacggaacggcggcattgcatgtgtgccttatgatctcaggcgtagaagcagcagatgaagtgattgttccagcgcttacttttatcgctaccgtcaatgcggtaacttactgtggcgctatagcgcattttgcggacagcgagtatagttctctgggcattgacgctaaaaagctgcgcgttcatcttgaaaaaaccgctcaaatgaaaaacgggcgctcttataacagcacaaccgggcgcaggataaaagccgttttgccgatgcatactttcgggcatcctgttgatttggacgaattattaagcgtttgtcaagactttaacttgacattgatcgaagattgcgcggagtccatcggttcttattataaagacaagcatacaggcaatgcgggaatagtcgccgcgcttagttttaacggcaataaaattattaccacaggaggcggcggtgcggttttgacaatgatgaagaattag

SEQ ID NO: 40938 - protein, 238 aa, Unknown
  Obtained from environmental sample
  DOMAIN (32)...(238): DegT/DnrJ/EryC1/StrS aminotransferase family
  misc_feature (1)..(238): Xaa is any amino acid
MTISKEQYASQIIESVRSVLPTDKKNIVLHEPVFGGNEQRYVKECIDTGWVSSVGSFVDKFEADLAQFAGVKRAVAVVNGTAALHVCLMISGVEAADEVIVPALTFIATVNAVTYCGAIAHFADSEYSSLGIDAKKLRVHLEKTAQMKNGRSYNSTTGRRIKAVLPMHTFGHPVDLDELLSVCQDFNLTLIEDCAESIGSYYKDKHTGNAGIVAALSFNGNKIITTGGGGAVLTMMKN

SEQ ID NO: 40939 - DNA, 1545 bp, Unknown
  Obtained from environmental sample
  misc_feature (1)..(1545): n is a, c, g, or t
atgattttctttacatctcggcttgaaaacggatggattttgtgtttctcaatacccaaaaccgagtattacagtaaattacacttgatgatactgatgcttatcgttcttggtacaattctggctgcggttttgattatcattttaatacgcgttgacaaaacgaaaaacaaacttgatgatgaaaacaggcataagaatacattgctggcaactatagaagcggaacgagaggcggataaagttacccagcttatgcttgacgctatgcctctatgttgtatgttatgggacgagaattgcaatcttatatcatgcaataaagaggcgataagactgtttcagttatcaagcaagcaggaatttttagacagattttacgagctttctcccgaataccaacccaacggaaggttaacaaaagagttggcggctgagtatatcaaaaaaacttttgaaataggacatctgcgttttgagtgggcgcaccaatctttgacctgcgaacccattccggtggatatgactctggttcgcataaagcatagggaaaaatacatcgtcgcgggatacgcaaaagatttaagaaaagataacgcaatgtttgatgaaatgcaaaaagcgcaagatgaattacgcgaggcgcgcgacgcttcggaagccgccaatcacgccaaaacggttttccttgccaacatgagccatgaaatacgaacgcctatgaacagcatcatcggattctccgaactcgctctcgattgcgagatacccgaagagcntaaatcgtacctgcgcctgataatagagaactcgaaggggcttttgcagataataaacgacatccttgacgtctccaaaatagaagccggaaaattgacgctagagacaatcgctttcgacatacatgaggtattcgcgctctgccgctcggcgaccatccccaaagctatggagaaggggctgttgctccacttctacgcggagccggtaataaacaagaggctgttaggagaccccacgaggctgcgccaaatattcatcaatctcatttccaacgcggtgaagtttacgaacagcggggtcgtaaaagtattggccactatcttgtcaaccaccgccgacaccatcaccatacgcttcgaggtgaaagattctggaataggaatgaccgccgatgagctaaagagggtgatggagccgttcacgcaagccgaccacagcaccactcgcaaatacggcggcacggggcttgggctttcaatcgtcaatagcttagtggatatgatgggcggaaagcttgaagtggagagcacccccggcatcggcagcagattccgctttgatttgactttcggcatgattaacgccgcaagcaacgcgccgaagagcaaaccggagaccggcgacgacgatctggagaagcccgatctcgacggggaggttttggtttgcgaagacaaccacatgaatcaagaggtcatccgcaaacatttggagagagtcggcctgcgaattacgattgccgccaacggcaaggagggctga

SEQ ID NO: 40940 - protein, 514 aa, Unknown
  Obtained from environmental sample
  DOMAIN (225)...(290): His Kinase A (phosphoacceptor) domain
  misc_feature (1)..(514): Xaa is any amino acid
MIFFTSRLENGWILCFSIPKTEYYSKLHLMILMLIVLGTILAAVLIIILIRVDKTKNKLDDENRHKNTLLATIEAEREADKVTQLMLDAMPLCCMLWDENCNLISCNKEAIRLFQLSSKQEFLDRFYELSPEYQPNGRLTKELAAEYIKKTFEIGHLRFEWAHQSLTCEPIPVDMTLVRIKHREKYIVAGYAKDLRKDNAMFDEMQKAQDELREARDASEAANHAKTVFLANMSHEIRTPMNSIIGFSELALDCEIPEEXKSYLRLIIENSKGLLQIINDILDVSKIEAGKLTLETIAFDIHEVFALCRSATIPKAMEKGLLLHFYAEPVINKRLLGDPTRLRQIFINLISNAVKFTNSGVVKVLATILSTTADTITIRFEVKDSGIGMTADELKRVMEPFTQADHSTTRKYGGTGLGLSIVNSLVDMMGGKLEVESTPGIGSRFRFDLTFGMINAASNAPKSKPETGDDDLEKPDLDGEVLVCEDNHMNQEVIRKHLERVGLRITIAANGKEG

SEQ ID NO: 40941 - DNA, 939 bp, Unknown
  Obtained from environmental sample
  misc_feature (1)..(939): n is a, c, g, or t
ttgactcccagctcaatcgccctatggataagagcaacgctcttatcctcgtcgaaaacagtcttgccgtcttccatgttactcggcaggcgcatacatcccatgcccagacgcgaaactttaatgcctgtttttccgaaatccacatactgcataataattcctctttttcatcatctgaaaaagatgctgtccaaaaagaaatacttcccggacagcatcgcatgtaattactttaccttctttgccgtcggaccagaggtccgcaacttctttgcgggcttcacgggcgctttcttcactaccgttttctttgccgccggaccggaggtcctcggtttctttagcggcattgttctggttttcggatttttggcagcagggtttttaaccgccggttttttgacaaccgcttttttgacagcgggcttcttcgccatcggaccggaggcccgcgcctttttgtctgctgcctttttaaccgctggttttttggccactgccttcttaacagccgactttttgtccgccgcctttttcgcagtcgcctttttgtccgatgcttttttagttgccggaacggaagcctgcgctttccttgccgctggtttcatggccgctacttttttggccgccggaccggaggtccgcggtttcttagctaccggaccggaggcccgcagtttctttgcaaccggtttcttcaccgttggtgctttagccgccggctttttatccgctggcttttttgccgctgtttttttgactgccggaatggaggtccctggtttctttgccgccgattttttgtctgccggaacggaggtctcangtttcttaacaaccgaaccggaagttcgcggtttcttgtcccgcttctttttttaccgccgttttggacgcggtaggcgctttggctttctccggctggtttcttaa

SEQ ID NO: 40942 - protein, 312 aa, Unknown
  Obtained from environmental sample
  misc_feature (1)..(312): Xaa is any amino acid
MTPSSIALWIRATLLSSSKTVLPSSMLLGRRIHPMPRRETLMPVFPKSTYCIIIPLFHHLKKMLSKKKYFPDSIACNYFTFFAVGPEVRNFFAGFTGAFFTTVFFAAGPEVLGFFSGIVLVFGFLAAGFLTAGFLTTAFLTAGFFAIGPEARAFLSAAFLTAGFLATAFLTADFLSAAFFAVAFLSDAFLVAGTEACAFLAAGFMAATFLAAGPEVRGFLATGPEARSFFATGFFTVGALAAGFLSAGFFAAVFLTAGMEVPGFFAADFLSAGTEVSXFLTTEPEVRGFLSRFFFYRRFGRGRRFGFLRLVS

SEQ ID NO: 40943 - DNA, 477 bp, Unknown
  Obtained from environmental sample
  misc_feature (1)..(477): n is a, c, g, or t
gtgaagaaaccggttgcaaagaaactgcgggcctccggtccggtagctaagaaaccgcggacctccggtccggcggccaaaaaagtagcggccatgaaaccagcggcaaggaaagcgcaggcttccgttccggcaactaaaaaagcatcggacaaaaaggcgactgcgaaaaaggcggcggacaaaaagtcggctgttaagaaggcagtggccaaaaaaccagcggttaaaaaggcagcagacaaaaaggcgcgggcctccggtccgatggcgaagaagcccgctgtcaaaaaagcggttgtcaaaaaaccggcggttaaaaaccctgctgccaaaaatccgaaaaccagaacaatgccgctaaagaaaccgaggacctccggtccggcggcaaagaaaacggtagtgaagaaagcgcccgtgaagcccgcaaagaagttgcggacctctggtccgacggcaaagaaggtaaagtaa

SEQ ID NO: 40944 - protein, 158 aa, Unknown
  Obtained from environmental sample
  misc_feature (1)..(158): Xaa is any amino acid
MKKPVAKKLRASGPVAKKPRTSGPAAKKVAAMKPAARKAQASVPATKKASDKKATAKKAADKKSAVKKAVAKKPAVKKAADKKARASGPMAKKPAVKKAVVKKPAVKNPAAKNPKTRTMPLKKPRTSGPAAKKTVVKKAPVKPAKKLRTSGPTAKKVK

SEQ ID NO: 40945 - DNA, 396 bp, Unknown
  Obtained from environmental sample
  misc_feature (1)..(396): n is a, c, g, or t
atgacttttgccttcagccgcgacgatgtcgcttcattcctgcctgcttacctggaaaaaaccgtactggacgttgacccatttaaatccattgacgaagaaggcgtgggctaccttctcgcttatgcgacgcagcagggaagggcggtcaaccccaacctgcaagtgggcatatgcggcgaacagggaggcgatccgttaaccatcgacttctgttaccgcgccggacttacctatgtttcctgctcacccttccgcgttccggtggctcgtcttgctgctgcccaggcggtgttaagaaaccagccggagaaagccaaagcgcctaccgcgtccaaaacggcggtaaaaaaagaagcgggacaagaaaccgcgaacttccggttcggttgttaa

SEQ ID NO: 40946 - protein, 131 aa, Unknown
  Obtained from environmental sample
  misc_feature (1)..(131): Xaa is any amino acid
MTFAFSRDDVASFLPAYLEKTVLDVDPFKSIDEEGVGYLLAYATQQGRAVNPNLQVGICGEQGGDPLTIDFCYRAGLTYVSCSPFRVPVARLAAAQAVLRNQPEKAKAPTASKTAVKKEAGQETANFRFGC

SEQ ID NO: 40947 - DNA, 1368 bp, Unknown
  Obtained from environmental sample
  misc_feature (1)..(1368): n is a, c, g, or t
atgaaaaagactttcgagagcggagtcaccacgcttaacggcgaggtttcgttttgtgatgccttttccgcgtttgtaaggggtctgcttattggatcgagagggaactcaggttttattctatcgcagtatttcttaggtatttatgattatacaaaggggaaagatgccgtttctgtcgccgatttaagctccgcactgccgcatgcgtatcaggttgcttaccgggcggtgcttaatcctgtcgaggggactatacttacgataatgcgcgaggggccgaaaagaacgctgcagaaaatagacgacaaaacgtctgttcaggagttttttgacattttagcgggtgaaatgtttatttgcgtgcgggaaacggtaaatcaaatgaacctgcttcacgacaacaatgtattggatagcggcgcggtcgggctcttcctgattttcgacggaatgaggagcgcgtttcacggggatttaccgtgttttgattgcgaggaaagccccgctcttcccagccgcagcataacccaaattaaaaccttttcgttcttccgctattgcaccgaaattattataaatatgcacaatgtacaaagcagggattactttgtcagccagcttacaaacagaggggattctattgttgttgcaacggatgagaatcttttgaatgtacatatacataccaacgagccgcaaaaaatattggacgagtttggaaaatacggagacatcgtcacaatgaaggttgacgacctctttttatcgcatgaatttgacagactaaagcagcgaaagcacgcgggctttgctgttgccgcgtttacatacggcgagggcaatgcggctgccctggagaacctgggcgcagacggcgtcttttgcgttcccaacggccacgatccgggcgaggaaaatttgcagaagctgttggaggggtttttaacggaaaacctgatagtttttgcatgcgatagggaaataagagaaaagcttagaagaattaagcagttcgcaaatttgcagaacatttatgtcgcggagtcggacagcctggcaaatacattctttatgctgtcctccctgatttttgccgatgaatacaagaatgtcattgaatctcttgaaattcttaaaaagcggaaagtttttgagacgagcattaagactgtggttgattataatcatacgcaatactcgggcaatttggacgggcaagctataactatgaacgattttgaggagctgttaaatgcngtattaagcgaaacggtcttatctccgtattcgacagttggtggtttcggcggaaaaaattggcaacagaagaacttgattgtgtctgcccgcacttcgggaaaataa

SEQ ID NO: 40948 - protein, 455 aa, Unknown
  Obtained from environmental sample
  DOMAIN (1)...(154): DAK2 domain
  misc_feature (1)..(455): Xaa is any amino acid
MKKTFESGVTTLNGEVSFCDAFSAFVRGLLIGSRGNSGFILSQYFLGIYDYTKGKDAVSVADLSSALPHAYQVAYRAVLNPVEGTILTIMREGPKRTLQKIDDKTSVQEFFDILAGEMFICVRETVNQMNLLHDNNVLDSGAVGLFLIFDGMRSAFHGDLPCFDCEESPALPSRSITQIKTFSFFRYCTEIIINMHNVQSRDYFVSQLTNRGDSIVVATDENLLNVHIHTNEPQKILDEFGKYGDIVTMKVDDLFLSHEFDRLKQRKHAGFAVAAFTYGEGNAAALENLGADGVFCVPNGHDPGEENLQKLLEGFLTENLIVFACDREIREKLRRIKQFANLQNIYVAESDSLANTFFMLSSLIFADEYKNVIESLEILKKRKVFETSIKTVVDYNHTQYSGNLDGQAITMNDFEELLNAVLSETVLSPYSTVGGFGGKNWQQKNLIVSARTSGK

SEQ ID NO: 40949 - DNA, 855 bp, Unknown
  Obtained from environmental sample
  misc_feature (1)..(855): n is a, c, g, or t
ttgatggccaagacggattttcttcacacttacagccatatttcctttgtcgatttcttcctgattgaagaactggagcttgaactcgaacagtttacgcggaccctggaccatgcagagacaggttttttttcggatcgtgacccttccctcgcgaggattccgttactcatcatggatcttaaaaaactttttgacgtgattcatccggcaagggacgacgccctgaaaagttgttccgatgaatcgttcaaaacctatgtggattgccgccggataaaccggggcctgatgcgggaaattcttaacctcgatcccgaagctaagttgaaggtcctccttcccgaacttgaggaacagtttcctgatagtgcaggcgcaattcgtgaagaggccgaatatttatcggccctggcggggtacctccgcgtaaacctggacagatacgaaagcctcagcggtaaaattgaaagcatggttaacaacaaattatgcattctgggccgcgccgacagcggctcaacggatacaggctcaaatccgttctacggcgaatacgccaacacgggaatccacggggtggtaatggacatgatcctttccggttctttcatatctccgctgggagtatattggcaggcgttttttgcgcttgtcttcgtgatattgtttttgttcgccggttcgaagctttcgcctgtggcaagggcgtcctccggtttcatgttaatcgtcatttttaccggcctgacactattactgttccgttttaccgggttgtttctcagccccctcacggcggttttttccattgcctcagcggttgttctcanggagattgtagtatctgcctga

SEQ ID NO: 40950 - protein, 284 aa, Unknown
  Obtained from environmental sample
  misc_feature (1)..(284): Xaa is any amino acid
MMAKTDFLHTYSHISFVDFFLIEELELELEQFTRTLDHAETGFFSDRDPSLARIPLLIMDLKKLFDVIHPARDDALKSCSDESFKTYVDCRRINRGLMREILNLDPEAKLKVLLPELEEQFPDSAGAIREEAEYLSALAGYLRVNLDRYESLSGKIESMVNNKLCILGRADSGSTDTGSNPFYGEYANTGIHGVVMDMILSGSFISPLGVYWQAFFALVFVILFLFAGSKLSPVARASSGFMLIVIFTGLTLLLFRFTGLFLSPLTAVFSIASAVVLXEIVVSA

SEQ ID NO: 40951 - DNA, 1053 bp, Unknown
  Obtained from environmental sample
  misc_feature (1)..(1053): n is a, c, g, or t
atgctgcgtataggaattgtcgggattggcaagatcagcgggatttatcttgacaacttgacaagaatgttcggcaagcgggttaagctgactgcgttatgcgatgttatttttgaacggtcggaaaaagccgcggctgattatcatgttaaagcgtacagaactctcgacgaaatgctcaaggcggatgttgatatagttcttaacctgagccagccaaagtatcattttgatattgccctcgcgtcgataaaagccggaaagcatatctacaatgaaaagcccctgtgtaccaaacgcgaagaagcgactgaactgctcaaagccgcagcagagaagaaggttagggtaggcggcgcgccggacactttccttggcgctggtcttcagacctgccgcaaattaattgatgacggcagtataggcagtccggtggcggcgaccgcctttatgatgaaccacggccctgagcattggcatccatccccggaatttttctacaaacagggcggcggccctatgtttgatgtggggccgtattaccttaccgccctggtacatcttttggggccggtcgcgcgtgtttcaggaagcgccaaaatcagcagtccgacgcggaccatcaccagtgaaccgcttaacggcgcgataatcaatgtagaagttcccacccatgtcgccggagtccttgaatttgcgggcggagcgataggaaccatcatcaccagttttgacgtttattcccacaccttaccctgcattgaaatttacggaacagaaggaaccatgcgcgttcccgatcccaacactttcggcggccctgtctacgttaggcgattccgtgaggaagaatggacgcagataccattaattaacacttatacggaagattgccgcgggttaggcgtcaccgaaatggccgaagcgatagaacaaggccgtccgcaccgcgcttcggcggagcttgcttaccatgtgctggacattatgcacggcatacacgacgcggccgcttcaggcagatactacaatctccntgagaacaaccgctga

SEQ ID NO: 40952 - protein, 350 aa, Unknown
  Obtained from environmental sample
  DOMAIN (2)...(121): Oxidoreductase family, NAD-binding Rossmann fold
  misc_feature (1)..(350): Xaa is any amino acid
MLRIGIVGIGKISGIYLDNLTRMFGKRVKLTALCDVIFERSEKAAADYHVKAYRTLDEMLKADVDIVLNLSQPKYHFDIALASIKAGKHIYNEKPLCTKREEATELLKAAAEKKVRVGGAPDTFLGAGLQTCRKLIDDGSIGSPVAATAFMMNHGPEHWHPSPEFFYKQGGGPMFDVGPYYLTALVHLLGPVARVSGSAKISSPTRTITSEPLNGAIINVEVPTHVAGVLEFAGGAIGTIITSFDVYSHTLPCIEIYGTEGTMRVPDPNTFGGPVYVRRFREEEWTQIPLINTYTEDCRGLGVTEMAEAIEQGRPHRASAELAYHVLDIMHGIHDAAASGRYYNLXENNR

SEQ ID NO: 40953 - DNA, 447 bp, Unknown
  Obtained from environmental sample
  misc_feature (1)..(447): n is a, c, g, or t
gtgcgcctcggctggacggttgttccggcggagcttaaatatgaaggcggcgagagcgtcaatgccgactggagccgcgtctgttccacgatattcaacggcgcttccaatatagcccaggccggcggccttgccgcgttagacgacgagggtttaaaagaaatcagagaacttacagatttttacctcggtaacgcgaagctgatacgcgaggccctgaaaacattaggcattgaatccgcaggcggcgacaattcgccgtatatatgggcatatttcccgggtaaggacagttgggaagttttctcgcaaatactcgaaaaatgccaggtagttacaacgcccggcgccgggtttggccccgccgggaacggctacatccgcttctccgccttcggccaccgcgccgacgttgaagaggcgtgcgccaggctgaaaaagttatga

SEQ ID NO: 40954 - protein, 148 aa, Unknown
  Obtained from environmental sample
  misc_feature (1)..(148): Xaa is any amino acid
MRLGWTVVPAELKYEGGESVNADWSRVCSTIFNGASNIAQAGGLAALDDEGLKEIRELTDFYLGNAKLIREALKTLGIESAGGDNSPYIWAYFPGKDSWEVFSQILEKCQVVTTPGAGFGPAGNGYIRFSAFGHRADVEEACARLKKL

SEQ ID NO: 40955 - DNA, 1005 bp, Unknown
  Obtained from environmental sample
  misc_feature (1)..(1005): n is a, c, g, or t
atgatcgccttcacaaaaacgctgggcagctattttgaaaagaaaaaagcgaatacgctttacgctgttctacgcgattattacaccgaaaacagtccctacctgataattgataccgccagaggaagaaaaataaacgaaaattcaaggcgaattttacatggatttatcatcaatagttttattccgtttttgcaaaaaaataaaataaagcggttcagcaatataaagcctgtcgttatgcgtaactttcaaaactacctgctcattgaaaaaaagatgctcccgcagtctattaaccggcagatgggcggaatcaaggcaatattcagtcatttatttatggcgggcataatcaaacacaatatcgtaaaagacatatcgcccttgagatccgccaatagcaagataagggggtgctattcggttgatgagctaaaaggaatattcaaagatacatggaaagacaaaaaatcttatttgctgtgttcgattatatattccaccggaatcagaaacagcgaattacagaaactcaaagtcaaagaccttattgtcagggaaaacgtggattttcttaacattgtaaaaagcaaaacctcaagcggtatacgaaccataccccttcatcctaaagtacgaaaaacacttcaggaatggatagatgagaaaaagctttcgggcgaagattatctttttgtaagcagctgcaataagcggatatttaaaaccgcaaaaaaggccggcatattaatgggttcacttttggggaagggaaaaaacgatcttgaaaatgaaaatatcactttttattcaggacgccatttttataaaaccatgctgaacctgtacaatatgggtgatgttgaggaagtgttcatgggccacaaggtcagtaaaaatgtcagcgagcgttataatcacaaagacaagagaggagaaaaagaactcctcgcagcggcaagaagagcaatagaaataattgatgattcgctgtttcaatga

SEQ ID NO: 40956 - protein, 334 aa, Unknown
  Obtained from environmental sample
  DOMAIN (130)...(316): Phage integrase family
  misc_feature (1)..(334): Xaa is any amino acid
MIAFTKTLGSYFEKKKANTLYAVLRDYYTENSPYLIIDTARGRKINENSRRILHGFIINSFIPFLQKNKIKRFSNIKPVVMRNFQNYLLIEKKMLPQSINRQMGGIKAIFSHLFMAGIIKHNIVKDISPLRSANSKIRGCYSVDELKGIFKDTWKDKKSYLLCSIIYSTGIRNSELQKLKVKDLIVRENVDFLNIVKSKTSSGIRTIPLHPKVRKTLQEWIDEKKLSGEDYLFVSSCNKRIFKTAKKAGILMGSLLGKGKNDLENENITFYSGRHFYKTMLNLYNMGDVEEVFMGHKVSKNVSERYNHKDKRGEKELLAAARRAIEIIDDSLFQ

SEQ ID NO: 40957 - DNA, 1452 bp, Unknown
  Obtained from environmental sample
  misc_feature (1)..(1452): n is a, c, g, or t
ttggacgcctccggcaatgtcgcaatttacgccagccaaagctttcgcccgcgcctttacaaacttgactggacaagcaaaagttggaattttttgtggtcaggaggctcggctacggcatttgggccgatcgattcccttcagtccaggggcaattctcttatttttgtgcgggagagcggggtttttgagctcgatatgagctttggatataatgctctccgcaatcgacaggacctgatggaagctataaactctatatccggaagggtaaactgcgccgcttttagccagggggatagattctgcctttctgaactctggcttttgacagaacgaagctccgccgaaggccgagggcttagcacagctttcccgcaggcggtcggcaaagaaggcctttacctgccggtaaaccacgccggggatccgggcagtctccggccttaccttcaaaccatagaaaaaagcaagctcaatatggtggtcatcgacatgaaagatgactatggcaggctgcgttttaccccaagtaacccttcgatgctaaatttggggcgggttttccggcctatagacatcgacgtttttttaaagacaatgaaggagcgcggcatttatacggtcgcgagaattgtggttttcaaagacccggaggcggcaaataaagagagcggaaggtacgctgtctgggatgccgtaaccaacaaagcatgggagggctactacgacactcgtcggaaaaaaaccaatgagccagaggaacccaattccgcccacgttaccgcggtttttcaaacggacgatccgaattacgaaatactaagaacatggtacgacgagaaatgggtagacccttactcagaggtaatttgggattacaacgcctcggtagcggaagaactttgccgcaggggctttgacgaaattcaatttgactatattcgctttcccactgacggcataaacataggcgatgcacgttaccgttggcgggaaggcggaatggacatggacagcgccattgagtcgtttttaaaacacacgcgttccaggataggtaagccaatttccattgacatctatggcgccaatggatggtacagaacgggagccagaacgggccaggaagtcgaactgctttacccttatgtggatataatctgcccgatgtactacccaagccactttgaacagaccttccttgcccaaaacccgcctgaagatcgcccatacaggatttattatttaggaacacgaagaacttatattattgcccgcggcaaaataattgtccgcccatgggcgcaggctttttaccttaacgtttcctatgaccgaaagtattacaacagcgactatgtccgccggcagcttgaaggagtccgcgaagccggcagaggcggacttacctattggaataacagcggccgctacgatgatctgccgtag

SEQ ID NO: 40958 - protein, 483 aa, Unknown
  Obtained from environmental sample
  misc_feature (1)..(483): Xaa is any amino acid
MDASGNVAIYASQSFRPRLYKLDWTSKSWNFLWSGGSATAFGPIDSLQSRGNSLIFVRESGVFELDMSFGYNALRNRQDLMEAINSISGRVNCAAFSQGDRFCLSELWLLTERSSAEGRGLSTAFPQAVGKEGLYLPVNHAGDPGSLRPYLQTIEKSKLNMVVIDMKDDYGRLRFTPSNPSMLNLGRVFRPIDIDVFLKTMKERGIYTVARIVVFKDPEAANKESGRYAVWDAVTNKAWEGYYDTRRKKTNEPEEPNSAHVTAVFQTDDPNYEILRTWYDEKWVDPYSEVIWDYNASVAEELCRRGFDEIQFDYIRFPTDGINIGDARYRWREGGMDMDSAIESFLKHTRSRIGKPISIDIYGANGWYRTGARTGQEVELLYPYVDIICPMYYPSHFEQTFLAQNPPEDRPYRIYYLGTRRTYIIARGKIIVRPWAQAFYLNVSYDRKYYNSDYVRRQLEGVREAGRGGLTYWNNSGRYDDLP

SEQ ID NO: 40959 - DNA, 1335 bp, Unknown
  Obtained from environmental sample
  misc_feature (1)..(1335): n is a, c, g, or t
atgggagtaagaagcgttatgcgtaaaaaagcgtcagtgctattggcaatcgttttggcatcaggctgcgcgacgaattcaactctcaggaattccgtattatcggtaccgccgccgcgccaggcatccttcccggccataccggagggaggctacacatggcagcaccttgtgaagatcgtgttcgcggcaaacccggattacgccgccatcctggcggaggcccgggcggaatactaccgttcaaattcaaagccagatccagatgatctccggctttcatttgaatactcatccctttccgaggatatacggcataatcaatacggaataggactccgtttgcctatccctaaccctttcgtgaacaaacatatcacccgcacaggcgaagctgcccgccgtgaaacggaaaccgaagcggaagcgcttaaggcgaaaattgcgtcgactatctatgaacttgtccaggaagccctgataggggaacgggagctgtcggtcctgcttcagcgggagaaggtcctgtccggctgggcggagtatttaaaaatgcgccgtgatgcgcgcatggctacacaggcggacatgcgcgcgtttgatattcagcgtttgcgcctcaaagccgctatccagcaggcgcagttcaagacgcatacagcccgcaggagccttcaggtactggttcaaattccaggtgagcaactggtactaaacccaatcccttccgactgggacgctctactcgcggtacttgaggatgaacggatgttcattgaggacgcgttctcccgctccgccgaactttcaggcgcaaatgccgcttacgagaaagcctgcgccgcgcttgataccgtcagggcaaagcaaattccctggttcaattccatccagttgtctttcattccaaacaccacagaaagcataaattacatctatggcggaggaatagtcacatcgcaggagaaaacacataaatggatatttggactgaatgtgaatctgcctgtttttgtctggttcggatccgagaagaaaatggccgctgccgaagttgaggcggcatttctacggataagcggtatacatcagcgaatccgcgagaaaataacaggggttatttcggatctgcgcgagaccttatctcttctcgccgaataccaatccgcatttgattccatacctgaaccgacccgcgagacaattccggattccgaatcctactataaacttctggatgcccgtctttcggcatctgaatacgcccttaaaaccgagctggaatgcgcgtatatttacagtgaattgctaaaaataaccggcggatgggaatag

SEQ ID NO: 40960 - protein, 444 aa, Unknown
  Obtained from environmental sample
  SIGNAL (1)...(26)
  misc_feature (1)..(444): Xaa is any amino acid
MGVRSVMRKKASVLLAIVLASGCATNSTLRNSVLSVPPPRQASFPAIPEGGYTWQHLVKIVFAANPDYAAILAEARAEYYRSNSKPDPDDLRLSFEYSSLSEDIRHNQYGIGLRLPIPNPFVNKHITRTGEAARRETETEAEALKAKIASTIYELVQEALIGERELSVLLQREKVLSGWAEYLKMRRDARMATQADMRAFDIQRLRLKAAIQQAQFKTHTARRSLQVLVQIPGEQLVLNPIPSDWDALLAVLEDERMFIEDAFSRSAELSGANAAYEKACAALDTVRAKQIPWFNSIQLSFIPNTTESINYIYGGGIVTSQEKTHKWIFGLNVNLPVFVWFGSEKKMAAAEVEAAFLRISGIHQRIREKITGVISDLRETLSLLAEYQSAFDSIPEPTRETIPDSESYYKLLDARLSASEYALKTELECAYIYSELLKITGGWE

SEQ ID NO: 40961 - DNA, 591 bp, Unknown
  Obtained from environmental sample
  misc_feature (1)..(591): n is a, c, g, or t
ttggagaataaaatgcttgaaagcctgcaggaaaagtgcggagtcttcggaatatactccaataacggaaacaccgatgttactgcaatggcgtatctttcgctcttcgcgcttcagcaccgggggcaggaaagctgcggcattgccgtttgtaatgaaggggtaatgcaataccataccgacattgggcttgttccggatgtttttaccagagaaactcttgaaaaactggggaaaggaaatatggccgtgggacacgtccgctattccacaaccgggcagaaaagcagggcaaacgcccagccgcttgtagtaatgcacatcaaaggcagcatggctattgcgcataacggaaacataacaaacgcgtcggaacttcgcgagaaacttgagttggacggcgccctttttcattccaccaacgacacggaaataatactgcacataattacaaaaaaaaggatacagtcgccgtctatagaaaccgcaattgaacaggctatgtacgagatacagggcgcttattcgcttgtgataatgtcgccaagcaagctgatagcggtgcgcgacccctgcggattccgcccttga

SEQ ID NO: 40962 - protein, 196 aa, Unknown
  Obtained from environmental sample
  DOMAIN (13)...(196): Glutamine amidotransferases class-II
  misc_feature (1)..(196): Xaa is any amino acid
MENKMLESLQEKCGVFGIYSNNGNTDVTAMAYLSLFALQHRGQESCGIAVCNEGVMQYHTDIGLVPDVFTRETLEKLGKGNMAVGHVRYSTTGQKSRANAQPLVVMHIKGSMAIAHNGNITNASELREKLELDGALFHSTNDTEIILHIITKKRIQSPSIETAIEQAMYEIQGAYSLVIMSPSKLIAVRDPCGFRP

SEQ ID NO: 40963 - DNA, 447 bp, Unknown
  Obtained from environmental sample
  misc_feature (1)..(447): n is a, c, g, or t
atgaagaaactcgaacagctctatgagggaaaggcaaaaaaagtttttgccaccgacaatcccgatcttctcattgttgattacaaagacgacgcaaccgcctttaacggtgaaaaaaagggaacaatcgccggaaagggagttattaacaaccgcgttaccaaccatctaatgaaacttttggaatcaaaaggtataccgactcattttgtcgaagaaatctccgaacgagaaaccgtagtaaaaaaagtaaaaataataatgctggaagttattgtccgcaatatcgcggcaggctctctgtcaaaaagactcggccttcctgaaggtacaaaacttgcatcaaccgttcttgagtactgctataaagacgatgcgttaggcgatccgattgtaaacgattatcatatagcggcgctcaaacttgccgaaaaagcgggaacttga

SEQ ID NO: 40964 - protein, 148 aa, Unknown
  Obtained from environmental sample
  DOMAIN (3)...(148): SAICAR synthetase
  misc_feature (1)..(148): Xaa is any amino acid
MKKLEQLYEGKAKKVFATDNPDLLIVDYKDDATAFNGEKKGTIAGKGVINNRVTNHLMKLLESKGIPTHFVEEISERETVVKKVKIIMLEVIVRNIAAGSLSKRLGLPEGTKLASTVLEYCYKDDALGDPIVNDYHIAALKLAEKAGT

SEQ ID NO: 40965 - DNA, 318 bp, Unknown
  Obtained from environmental sample
  misc_feature (1)..(318): n is a, c, g, or t
gtgattattgcggcggcgggcaaagccgctcatcttgccggagtagtcgccgcgcatactacactgcccgttatcggcataccggttaaatcttcaactttggacggacttgacgcgctgttatcgacagtgcagatgccttcgggaattcctgttgcggcagtagccatagacggagcggacaatgccggaattcttgcggctcagattttatctttggaagatgattcgattgcggataaacttttaaagatgaaatctgaaatgacggaacaggttatccaaaaagacaaacaactccaggagaaaattaaatga

SEQ ID NO: 40966 - protein, 105 aa, Unknown
  Obtained from environmental sample
  DOMAIN (1)...(100): AIR carboxylase
  misc_feature (1)..(105): Xaa is any amino acid
MIIAAAGKAAHLAGVVAAHTTLPVIGIPVKSSTLDGLDALLSTVQMPSGIPVAAVAIDGADNAGILAAQILSLEDDSIADKLLKMKSEMTEQVIQKDKQLQEKIK

SEQ ID NO: 40967 - DNA, 2310 bp, Unknown
  Obtained from environmental sample
  misc_feature (1)..(2310): n is a, c, g, or t
atgttcataaaagaggaaaaaagagaaatgacacataaacttagattaaacatcatgataatagccgttataacgcttgtggtaacggctgttgccgcgatagtggttaaacatatatccaaaatagacatggagtacaatctccgcaacctaagatatttagctcaggagcaagccagattctggcaaggacgggaaaacggctatttaaaacagttaaccggaattgcggacataatgggcgaatatgaaaccttgcccgcaggaatccggcgtgacacttatgacaatatgctgctggctaccctgaacaataatccggacttcgtcagaatatattccatttggaaaccaaacgccctggacggcatggacgcccgatttataggtcgtccggggtcaacttcgacggggcagtacgcaatgacctataccagagaacacggcaagattgagataacgaaaaacctcgtccttaatgaagtgaacgcgtggataaacggtcccgacgcgctcaaagacaaaattgatcatcccacgcctttcaatattaacagaaaagacacctttattatcagaatgggagttcccataaccagaagcactacaaacgaagtagtcggacacctggctgttttaatggacattgcgacaatacaggaaacagtaaatcaaactctccatgattacgaagaaatatcccagatgtctatttactcaggcaacggaataattatggggaatctgcgtcctgaacgggtaggaaaatctctgatcgaggtggaaatgttatacggcgttcatcagaaagacgcctatcatgctgttcttgacggcaagccgttcagttgttcaagctattcgaattcgttaaaatcgaacgtgaaaattgaaatggcgtctttccagataggtaactcaacaaacaactggagcgtaatgatcgcggctacagagaaatatgttatgagaaatgtcatcgtgatgagaaactttttcattgttatggtgtcgattgccattgcggcggcggttataatcatatacctccttctgaaaagacatatcaagcatattattatctacctaaaacgtatccgcggcttattttcatacgcgataattctgctcatcataattgcgtttacgctcatggttatactaagttccatctttatgaccaacatagtttccaaacagttggcggaaaatgcgcttgcggcgcttgactatctggaaaccaatatcgcaatagacctcaaagagcccaggacgctgctgggcggcgcatccgaaactgtgcgcaaaatgatcatacacggcgcaagcgaaaaagaagtgcatacttatattaaagaaatcaccgagttcttactgagtgatgaagagcagcttgcggactttgacgggcttttcggttattttaacgtattcggcggagcgctgctcgacggacaggatcgcacgccgcctgaaggttataacccgcttgaacgcccgtggtacaaagaatcggtttccgcgggcggtaaaataacatttatacagccccatatgagcgtaatgacaactatgcctacgactatcattgcttatgggcgggccatgtttgacgatgacggaaacttgctcggcgtagtcgctttgaatatgaattttgaaagggtcaaagcgtatatcgtccaggcgaatttaggcaaagtgtggttcggagtcttattaaacgaaaattttgacattattttccatagggatcacagactggaaggcacaaattacgcggatgtgaacaggaataccgaagaacttgcggcaatgatgaaatcaggaaatgacagcgtttccgaattcaagatgaataactatttgaatatcccctcaatcacatttatcaggaaactggaaaacggctggtatctgggcatcgtaacgcccaaagacgagtatttcaaggaagtcagaagagtaagatttttccttatattgctgggaacattgctgtcggcaatattcagcttcatactggcccacataatcgcggaaaaccggagaaccgacaaaaagacaaacgaagcggaaaaggcgataatcgctaaccgcgttaaaaccaatttcctggcgaagatgagccatgaaatacgctctcccatgaacgtgattttgggcattgtcgaaatgcagcttgagaaaaaagacctgccgccggatacaatgatagcgctggacagaatgcaaaattccggttatatgctgctcaatataatcaacgacatactagaccttcaaaaatctcggccaatctgtccatga

SEQ ID NO: 40968 - protein, 769 aa, Unknown
  Obtained from environmental sample
  DOMAIN (514)...(596): Cache domain
  misc_feature (1)..(769): Xaa is any amino acid
MFIKEEKREMTHKLRLNIMIIAVITLVVTAVAAIVVKHISKIDMEYNLRNLRYLAQEQARFWQGRENGYLKQLTGIADIMGEYETLPAGIRRDTYDNMLLATLNNNPDFVRIYSIWKPNALDGMDARFIGRPGSTSTGQYAMTYTREHGKIEITKNLVLNEVNAWINGPDALKDKIDHPTPFNINRKDTFIIRMGVPITRSTTNEVVGHLAVLMDIATIQETVNQTLHDYEEISQMSIYSGNGIIMGNLRPERVGKSLIEVEMLYGVHQKDAYHAVLDGKPFSCSSYSNSLKSNVKIEMASFQIGNSTNNWSVMIAATEKYVMRNVIVMRNFFIVMVSIAIAAAVIIIYLLLKRHIKHIIIYLKRIRGLFSYAIILLIIIAFTLMVILSSIFMTNIVSKQLAENALAALDYLETNIAIDLKEPRTLLGGASETVRKMIIHGASEKEVHTYIKEITEFLLSDEEQLADFDGLFGYFNVFGGALLDGQDRTPPEGYNPLERPWYKESVSAGGKITFIQPHMSVMTTMPTTIIAYGRAMFDDDGNLLGVVALNMNFERVKAYIVQANLGKVWFGVLLNENFDIIFHRDHRLEGTNYADVNRNTEELAAMMKSGNDSVSEFKMNNYLNIPSITFIRKLENGWYLGIVTPKDEYFKEVRRVRFFLILLGTLLSAIFSFILAHIIAENRRTDKKTNEAEKAIIANRVKTNFLAKMSHEIRSPMNVILGIVEMQLEKKDLPPDTMIALDRMQNSGYMLLNIINDILDLQKSRPICP

SEQ ID NO: 40969 - DNA, 1344 bp, Unknown
  Obtained from environmental sample
  misc_feature (1)..(1344): n is a, c, g, or t
ttgtcaacaaatgacgccaagcgtaaaatgaacgcgtggcttgatgagaatcatcacggcaaagccaccgtaagttacaaactgcgcgattggatcttctcccgtcaacgctattggggcgagccgatacctattgtccactgcccgcactgcggcgcggttcccgttccggaggacgcgctgccggttatgcttcccgaagttgacaaatacgaaccctctggcaccggcgagtcgccgcttgccaatatcgacgagtgggtcaacacgaaatgccccaaatgcggggccgacgcgaagcgtgagaccaacaccatgccgcagtgggccggttcctgctggtactacctgcgttatctcgacccaaagaacagcgccgaaccgtggagcaaagaggcagagaaacagtggatgaacgtagacctctacgtaggcggcgcggaacacgccgtcctccacctcttgtacgcccgcttttggcacaaggtgctgtatgatttggggtatgtgtctacaaaagagccgttcaagaaactgcgccaccaagggatagtcttggccgcgacataccgcgacgtcgccggcaagtatcacgaattttcggaggtcgatttctcggaaggtaacgcttacctcaaatccacgggcgagaaattgacagccgagatagagaagatggcgaagtcaaagctcaacggcgtcaatcccgacgaggtcgtcgcaaagtacggcgccgatgttctgcgcctctacgagatgttcatgggcgagttcgaactgcccaaaccgtgggatccgagggcgattgagggttgcaaccgtttcttgcgcagattgtgcaaactggttgacgagtttatcgaaaagggcggggtaggggacgaggtcaacgcccgcgtccgccacaagacaatcaaaaaggtgacgggcgaccttgaggccatgaagttcaacaccgcaatcgcggcgatgatggaatttgtcaacgcgcttggatcaaacggcgcgtcaaaagaggatctaatcgcgtttgtcaagctggtaagcccctacgccccgcacttgggcgacgagctgtgggagaagcttggcggggaaggattcttggtcaacgcggaatggcctaagtgggacgaggctatgacgctggacagcgtggtcaccgtggtggtgcaggtcaacggaaaactgcgcggcgagttccaagcggcgcacgacgccggtgaggaagagctgaaagccgcggcaatggcggtggacaaggtcaagcagcttatcgacggtaagacggtgaggaatgtaattgtcgttcaggggaggctggttaatattgtcgtcggataa

SEQ ID NO: 40970 - protein, 447 aa, Unknown
  Obtained from environmental sample
  DOMAIN (294)...(415): Anticodon-binding domain
  misc_feature (1)..(447): Xaa is any amino acid
MSTNDAKRKMNAWLDENHHGKATVSYKLRDWIFSRQRYWGEPIPIVHCPHCGAVPVPEDALPVMLPEVDKYEPSGTGESPLANIDEWVNTKCPKCGADAKRETNTMPQWAGSCWYYLRYLDPKNSAEPWSKEAEKQWMNVDLYVGGAEHAVLHLLYARFWHKVLYDLGYVSTKEPFKKLRHQGIVLAATYRDVAGKYHEFSEVDFSEGNAYLKSTGEKLTAEIEKMAKSKLNGVNPDEVVAKYGADVLRLYEMFMGEFELPKPWDPRAIEGCNRFLRRLCKLVDEFIEKGGVGDEVNARVRHKTIKKVTGDLEAMKFNTAIAAMMEFVNALGSNGASKEDLIAFVKLVSPYAPHLGDELWEKLGGEGFLVNAEWPKWDEAMTLDSVVTVVVQVNGKLRGEFQAAHDAGEEELKAAAMAVDKVKQLIDGKTVRNVIVVQGRLVNIVVG

SEQ ID NO: 40971 - DNA, 591 bp, Unknown
  Obtained from environmental sample
  misc_feature (1)..(591): n is a, c, g, or t
gtgatacttgccggcgacgtcgcggtatgtcgcggccaagactatcccttggtggcgcagtttcttgaacggctcttttgtagacacataccccaaatcatacagcaccttgtgccaaaagcgggcgtacaagaggtggaggacggcgtgttccgcgccgcctacgtagaggtctacgttcatccactgtttctctgcctctttgctccacggttcggcgctgttctttgggtcgagataacgcaggtagtaccagcaggaaccggcccactgcggcatggtgttggtctcacgcttcgcgtcggccccgcatttggggcatttcgtgttgacccactcgtcgatattggcaagcggcgactcgccggtgccagagggttcgtatttgtcaacttcgggaagcataaccggcagcgcgtcctccggaacgggaaccgcgccgcagtgcgggcagtggacaataggtatcggctcgccccaatagcgttgacgggagaagatccaatcgcgcagtttgtaacttacggtggctttgccgtgatgattctcatcaagccacgcgttcattttacgcttggcgtcatttgttga

SEQ ID NO: 40972 - protein, 196 aa, Unknown
  Obtained from environmental sample
  misc_feature (1)..(196): Xaa is any amino acid
MILAGDVAVCRGQDYPLVAQFLERLFCRHIPQIIQHLVPKAGVQEVEDGVFRAAYVEVYVHPLFLCLFAPRFGAVLWVEITQVVPAGTGPLRHGVGLTLRVGPAFGAFRVDPLVDIGKRRLAGARGFVFVNFGKHNRQRVLRNGNRAAVRAVDNRYRLAPIALTGEDPIAQFVTYGGFAVMILIKPRVHFTLGVIC

SEQ ID NO: 40973 - DNA, 750 bp, Unknown
  Obtained from environmental sample
  misc_feature (1)..(750): n is a, c, g, or t
ttggggtttgatcaaaatcttgctccgcgtgtattaaattcggggcttcttgaggcgtaccgtccaaaaggagccgagaaaatttttaaggagcttgttttaagcgcggactttcgcataactccgttcgattacagttatttcgccattgtctacgattcgcaggcggttaaccctcccccgcagtctcttgaagatttaacatccgcccaattcaagcagaagctaatcttaattgatccgcgcacatcatcgcctggtcttggctttttcgcgtgggtaaaggaaatttacggcgcaaactggcaggattactggcagcggcttaaaccttcgatactgaccgttgccggcgggtggagttccgcttacggactttttaccagaggggaagcgccgctggttctttcgtacactacaagtccaggataccatcttgagtacgaaggaacagagcgttacaaagccgctatttttacagacggccacgcaatgcaaatagaagccgccggtcttttgaaaacggcgaaaaacaaagacaacgcaaaagcctttcttgattttatgataagcccggattttcaaaatatcatacctttaacaaactggatgtacacggtaattgatattccactgcctgattctttcaggatcaatccgaaaagcgataagcctcttctgccaagtcccgtttccgaggctgatcttaacgaatgggcggcgttaatgacaagcgggcaaaacagatga

SEQ ID NO: 40974 - protein, 249 aa, Unknown
  Obtained from environmental sample
  misc_feature (1)..(249): Xaa is any amino acid
MGFDQNLAPRVLNSGLLEAYRPKGAEKIFKELVLSADFRITPFDYSYFAIVYDSQAVNPPPQSLEDLTSAQFKQKLILIDPRTSSPGLGFFAWVKEIYGANWQDYWQRLKPSILTVAGGWSSAYGLFTRGEAPLVLSYTTSPGYHLEYEGTERYKAAIFTDGHAMQIEAAGLLKTAKNKDNAKAFLDFMISPDFQNIIPLTNWMYTVIDIPLPDSFRINPKSDKPLLPSPVSEADLNEWAALMTSGQNR

SEQ ID NO: 40975 - DNA, 468 bp, Unknown
  Obtained from environmental sample
  misc_feature (1)..(468): n is a, c, g, or t
ttggaaccgtttagggagctgggcgtggaagcgattgaacaatgcctgccggattgggattttgagggggccgcttatgtccgtgccaaagcgcggggtattcaacttatgctggacgaatccattcattgcccgcaagacgcggccagagcctgcaaacttggcgccgcagatatccttaacatcaaactgatgaaatgcggcgggctttacccggcggagcagataaacgccattgccgcggcaaacggcgttaaatgcatggtcggctgcatgattgaaaccaggctttctcttaccgcggggcttagctttgtggcagccaagagcaacgtgaccgaagcggactgcgacagctttatgtattatgacgacacccagaccggtgtaacaggaggctttacctcggaaggcagcgtatttcgtttaagcgatgctcccgggtttggagtggaagtggatttctaa

SEQ ID NO: 40976 - protein, 155 aa, Unknown
  Obtained from environmental sample
  misc_feature (1)..(155): Xaa is any amino acid
MEPFRELGVEAIEQCLPDWDFEGAAYVRAKARGIQLMLDESIHCPQDAARACKLGAADILNIKLMKCGGLYPAEQINAIAAANGVKCMVGCMIETRLSLTAGLSFVAAKSNVTEADCDSFMYYDDTQTGVTGGFTSEGSVFRLSDAPGFGVEVDF

SEQ ID NO: 40977 - DNA, 921 bp, Unknown
  Obtained from environmental sample
  misc_feature (1)..(921): n is a, c, g, or t
gtggaaatgatgggcggcaggatctggatacagtccgagattggaaaaggctcaacctttgcctttacggttcggctccggcggggcacagaaaaaaaacaggagcttctttcaagcgatataaactggaagaatatccgcctgatggcggtagacgatgacccggacattttgacgtacttcaaagatattatgcaaaggttcggcgtatcctgcgataccgccataagcggagatgaggcgcttgcccttgtgacaaagacaggagattatcacatctactttgtggactggagaatgccgggtatggacggcatacaactgacgtacaaactgaaagcacgggcatcgagaaactccgtagtaataatgatatccgccgccgaatggacaacggttgcggacgaggccaaaaaagctggtgtagacaaattcctttccaagcccctgttcccgtcctccattgcggacataataaacgaatgtctgagcatagacaggcagcatatgcaggaagcgcaaattgatataacgggtcttttttcggggcggcgcatacttcttgcggaagacgtagaaataaaccgcgaaattgtacaggccctgcttgaaccgtcaaagcttgagatagactgcgcggaaaacggcaaggaggccgtgcgtatgttcagcgaagcgcctgaaaaatacgacatgatcttcatggatgtgcagatgcccgaaatggacggctatgaggcgacgcgccgcatcagggcgctggatacgccgaaagccaaaaccatcccgattgtggccatgacggccaacgtattccgcgaagacgttgaaagatgtcttaaagccggtatgaacgatcatgtcggcaaacctattgattttaaagaagtacttgaaaaattgaataaatatctatcttaa

SEQ ID NO: 40978 - protein, 306 aa, Unknown
  Obtained from environmental sample
  DOMAIN (46)...(160): Response regulator receiver domain
  misc_feature (1)..(306): Xaa is any amino acid
MEMMGGRIWIQSEIGKGSTFAFTVRLRRGTEKKQELLSSDINWKNIRLMAVDDDPDILTYFKDIMQRFGVSCDTAISGDEALALVTKTGDYHIYFVDWRMPGMDGIQLTYKLKARASRNSVVIMISAAEWTTVADEAKKAGVDKFLSKPLFPSSIADIINECLSIDRQHMQEAQIDITGLFSGRRILLAEDVEINREIVQALLEPSKLEIDCAENGKEAVRMFSEAPEKYDMIFMDVQMPEMDGYEATRRIRALDTPKAKTIPIVAMTANVFREDVERCLKAGMNDHVGKPIDFKEVLEKLNKYLS

SEQ ID NO: 40979 - DNA, 612 bp, Unknown
  Obtained from environmental sample
  misc_feature (1)..(612): n is a, c, g, or t
ttgtacgctattacggagaaactgccaatctggtttgcggcgaaagacacaatttctaaaatatacgacggccgttttaaaacgctttttaatgaagtgtacgaaactgagtttaaggaaaaatgcgcggccgccggaattgaatattactacacgttgatagacgacgcggtggcgcgcgcggtaaaaagcgaaggcggatttttatgggcgtgcaaaaattacgacggtgatgttcaaagcgacatgatcgccagcgcgtcgggaagccttgcgatgatgacaagcgtccttgtctccccaagcggagtttttgaatatgaggcggctcacgggacggtacaacaacactactaccgctggcaaaaaggggaaaagacaagcacaaaccccgccgctcttatttttgcgtggagcggcgcccttgcaaaacgcgctgaacttgactccctgccggatttggcttctttcgcgaaaaaacttgaaaataccctgcttacgttaatagaagcaggaaacatgacgggagacttagcgaaactttcagatccaccgcccgataaaattttaaattcttgggactttattgatcttgtggctgaacatctttaa

SEQ ID NO: 40980 - protein, 203 aa, Unknown
  Obtained from environmental sample
  misc_feature (1)..(203): Xaa is any amino acid
MYAITEKLPIWFAAKDTISKIYDGRFKTLFNEVYETEFKEKCAAAGIEYYYTLIDDAVARAVKSEGGFLWACKNYDGDVQSDMIASASGSLAMMTSVLVSPSGVFEYEAAHGTVQQHYYRWQKGEKTSTNPAALIFAWSGALAKRAELDSLPDLASFAKKLENTLLTLIEAGNMTGDLAKLSDPPPDKILNSWDFIDLVAEHL

SEQ ID NO: 40981 - DNA, 900 bp, Unknown
  Obtained from environmental sample
  misc_feature (1)..(900): n is a, c, g, or t
ttgggcattgctgcatatttttcaaaggccgactggaacgtgcccttttactgggcagaggggcagtttaaaagcgaattcacatcctgcgggccgtcctatgtgcctgccgaacaaccggagttatgggaaaagtttgtaaactttacacacgatcaggttatggaactggtaacaggatacggcaggctggatattctgtggttcgacgcgggctgggtatgccgcaaaaacgggcaggacatccgcattgaggaattggtggaaaaagcgcgaagggtgcagccgtggcttttgtccgccgaccgtacctgcggcggtgtttgcgaaaactatgtaacacccgagcaaagcgttcccgaaaagccgcttaccgtgccctgggaaagctgtgtaagcatgggcgacggtttcgcgtacagttacgacgataattataaatcgacaaagcgcttgctgcggttattgattgacgttgtggcgaagggcggtaatctggcgcttaacgtcgcgccccaaccggatgggcggctgcccaggcccgcgttacgccgcatggcggaaatgggcgcgtggctgaaaaaatacggcgaagcgatttatggtacccgcgtctgttccccgtatacatcgggcgaatttgccttcacccaaaaggcggcggagggtaaggtgtttgcgttctacctgagcgacagggggtttacgccggagctaagtattccgtatggcgaaaaacgtgttgtcgcggtaaagaacatgacaacaggcgaaaaaattccttttaaaatgaaagatggctgcattgcggttaccgtagacgcgcctgcgcgcagtgaagcttacggcggcgagtttatcgcggaagtgtttgaactgacggtggaggttaaagaataa

SEQ ID NO: 40982 - protein, 299 aa, Unknown
  Obtained from environmental sample
  misc_feature (1)..(299): Xaa is any amino acid
MGIAAYFSKADWNVPFYWAEGQFKSEFTSCGPSYVPAEQPELWEKFVNFTHDQVMELVTGYGRLDILWFDAGWVCRKNGQDIRIEELVEKARRVQPWLLSADRTCGGVCENYVTPEQSVPEKPLTVPWESCVSMGDGFAYSYDDNYKSTKRLLRLLIDVVAKGGNLALNVAPQPDGRLPRPALRRMAEMGAWLKKYGEAIYGTRVCSPYTSGEFAFTQKAAEGKVFAFYLSDRGFTPELSIPYGEKRVVAVKNMTTGEKIPFKMKDGCIAVTVDAPARSEAYGGEFIAEVFELTVEVKE

SEQ ID NO: 40983 - DNA, 813 bp, Unknown
  Obtained from environmental sample
  misc_feature (1)..(813): n is a, c, g, or t
gtgcagggaactgccatgatgctcgcccattggataggcgcaaaagacgaagatgttacatacacctgcgcgggaattaatcaccaggctttttacatagactacaaatggaagggaaaggacgcctatcctcttttaagggaagcgatgaaagatccaaaaatctacaacgaagaaattgtgcgtaatgaaatgtttttgcttttggattattacccgacagaatcttcaggtcataattcagaatataacgcatggttccgcaaacgtcccgatttaatcgaaaaattctgcacccacggaacaggctggaatcctggcgtttacgcttatattctgaatgaataccagacaaagaaagattcgtggcaaaaagaaattgaagactggttaaatgagccaaatgtcaacctgatccgcgggcatgaatacgcggcttacatttttaacgcgatgttcggcgataaaacaatgtttaagtttaacggcaatgttctgaataaaggcttaatcgacaatctcccgcagggagcttgcgtggaagtgcctgtgcttgcgtctcctcacggatttgaagcgataagagcaggcaggcttcccgatcaactggcggctcttgtacacacaagttccatttgcgaagaactggcggttgaaggggcgcttgcccgcgactggcgtaaaatttatcaggcaatcgcctttgatccattaacttcggcggtattgggcattcaggaaataaaggagatgacaaaaaagatgtttaaacaaaacgccgactatctgccggggtataattgcggtttatga

SEQ ID NO: 40984 - protein, 270 aa, Unknown
  Obtained from environmental sample
  DOMAIN (1)...(239): Family 4 glycosyl hydrolase
  misc_feature (1)..(270): Xaa is any amino acid
MQGTAMMLAHWIGAKDEDVTYTCAGINHQAFYIDYKWKGKDAYPLLREAMKDPKIYNEEIVRNEMFLLLDYYPTESSGHNSEYNAWFRKRPDLIEKFCTHGTGWNPGVYAYILNEYQTKKDSWQKEIEDWLNEPNVNLIRGHEYAAYIFNAMFGDKTMFKFNGNVLNKGLIDNLPQGACVEVPVLASPHGFEAIRAGRLPDQLAALVHTSSICEELAVEGALARDWRKIYQAIAFDPLTSAVLGIQEIKEMTKKMFKQNADYLPGYNCGL

SEQ ID NO: 40985 - DNA, 348 bp, Unknown
  Obtained from environmental sample
  misc_feature (1)..(348): n is a, c, g, or t
atggagatatcggtaaataccgctgaaaattccgcgcttaaaatctttacggacggcggctgttccggcaatcccggtcccggcggctgggcttatgtaataatgactcaaacctttcagggagataaaataatcgccaaaaatttcggcgcgcaaatagaaacaacgaacaaccgtatggaattaaccgccgtccttgaagcgttacgcgcccttaaatccatgaatgacgccccgcgaaaagcgacggtaattacagactcccaatatgtgcaaaaaggcatcaccgaatggatacacacatggaaaagaaattcatggagaaccagcgataaaaaaccncgttaa

SEQ ID NO: 40986 - protein, 115 aa, Unknown
  Obtained from environmental sample
  DOMAIN (10)...(115): RNase H
  misc_feature (1)..(115): Xaa is any amino acid
MEISVNTAENSALKIFTDGGCSGNPGPGGWAYVIMTQTFQGDKIIAKNFGAQIETTNNRMELTAVLEALRALKSMNDAPRKATVITDSQYVQKGITEWIHTWKRNSWRTSDKKPR

SEQ ID NO: 40987 - DNA, 384 bp, Unknown
  Obtained from environmental sample
  misc_feature (1)..(384): n is a, c, g, or t
atgaaatctaaccgttatttttttacgtccgaatctgtcggcgagggccatcccgataaattatgcgatcaaatttccgacgccattctggacgcctgcattaaagacgacccgcaaagcagggttgcctgtgaaacttttgcctctacttcgcttgttttaatcggcggcgaaattacaacaaatacatttatagattttcaccatcttgtaagggatgtagcgagggacataggctacaccgatccaagttacggtcttgactgcaattcgatggcggttcttgacatgatccacaaccagtcctccgacatctcgcagggcgtttccgggcaagggcttgaaaaattcaaggccagcagggagccggcgatcagggaatga

SEQ ID NO: 40988 - protein, 127 aa, Unknown
  Obtained from environmental sample
  DOMAIN (4)...(103): S-adenosylmethionine synthetase, N-terminal domain
  misc_feature (1)..(127): Xaa is any amino acid
MKSNRYFFTSESVGEGHPDKLCDQISDAILDACIKDDPQSRVACETFASTSLVLIGGEITTNTFIDFHHLVRDVARDIGYTDPSYGLDCNSMAVLDMIHNQSSDISQGVSGQGLEKFKASREPAIRE

SEQ ID NO: 40989 - DNA, 789 bp, Unknown
  Obtained from environmental sample
  misc_feature (1)..(789): n is a, c, g, or t
atgatgttcggctttgcctgcaacgaaacaaaagaacttatgcctctgcctattatgcttgcccacaaaatcctgattcacgcgacaaaattaagaaaaaacaaaactattaaatggctgcgtcccgattcaaaaagccaggttactattgaatacgagggctttaaaccaatccgcattgacgccgttgtagtttcccatcagcacgatcatgacgtatcatacaaggaaatcgagtcaactattatagaaaaaattattaaaccggtgcttgaacccacaaatcttctggacagcaaaacaaaatattacattaatcccacaggccgctttgtaataggcggacctttcggcgacacaggacttaccggcagaaagatcatagtagacacctacggcggcatgggccgtcacggcggcggcgccttttccggtaaagacccaaccaaagtagaccgttcggccgcttatgccgcccgatatgtggcaaaaaacgtagtcgccgccaaactggccgaccgttgtgagattcagcttgcctacgcgattggcgtacccttccccgtctccatcatggtagacactttcggcacaggcaaagtccccgaacataaaatcgaaaaagcggtggaaaaagtctttgacctttcaccggcgggcattataaagaccttggatttaaggaaaccgattttccaaaaaacggcgtcatacgggcacttcggcaggccggaattcccgtgggaaaagacggataaggtcgaggaactgaagaaagctattggttaa

SEQ ID NO: 40990 - protein, 262 aa, Unknown
  Obtained from environmental sample
  DOMAIN (1)...(111): S-adenosylmethionine synthetase, central domain
  misc_feature (1)..(262): Xaa is any amino acid
MMFGFACNETKELMPLPIMLAHKILIHATKLRKNKTIKWLRPDSKSQVTIEYEGFKPIRIDAVVVSHQHDHDVSYKEIESTIIEKIIKPVLEPTNLLDSKTKYYINPTGRFVIGGPFGDTGLTGRKIIVDTYGGMGRHGGGAFSGKDPTKVDRSAAYAARYVAKNVVAAKLADRCEIQLAYAIGVPFPVSIMVDTFGTGKVPEHKIEKAVEKVFDLSPAGIIKTLDLRKPIFQKTASYGHFGRPEFPWEKTDKVEELKKAIG

SEQ ID NO: 40991 - DNA, 375 bp, Unknown
  Obtained from environmental sample
  misc_feature (1)..(375): n is a, c, g, or t
atgttcggggactttgcctgtgccgaaagtgtctaccatgatggagacggggaagggtacgccaatcgcgtaggcaagctgaatctcacaacggtcggccagtttggcggcgactacgttttttgccacatatcgggcggcataagcggccgaacggtctactttggttgggtctttaccggaaaaggcgccgccgccgtgacggcccatgccgccgtaggtgtctactatgatctttctgccggtaagtcctgtgtcgccgaaaggtccgcctattacaaagcggcctgtgggattaatgtaatattttgttttgctgtccagaagatttgtgggttcaagcaccggtttaataattttttctataatagttga

SEQ ID NO: 40992 - protein, 124 aa, Unknown
  Obtained from environmental sample
  misc_feature (1)..(124): Xaa is any amino acid
MFGDFACAESVYHDGDGEGYANRVGKLNLTTVGQFGGDYVFCHISGGISGRTVYFGWVFTGKGAAAVTAHAAVGVYYDLSAGKSCVAERSAYYKAACGINVIFCFAVQKICGFKHRFNNFFYNS

SEQ ID NO: 40993 - DNA, 987 bp, Unknown
  Obtained from environmental sample
  misc_feature (1)..(987): n is a, c, g, or t
ttgataagatactcaactagagatatgaattaccttgatctgcctgtctacaaacacaaagacatcatccttggcgcccttgaaaaaacccaggccctggtcgtagaaagcccaacgggttcgggaaaaaccacccagcttccggtcattctttaccaggcaggttacgccaggaacggcatgattggggttacccagccccggcgcattgccgccctttcggtaagcgaattcattgcccgccagatgggctgcgcaatgccgggcctcgtgggctacaaaatgcgctttgaagacaagaccgttccgaacacgcaaataaaaatcatgactgacggtattctcctacaagagatgaagctggatccatggctttcaaagtacaactgcctggtggtggacgaggcccacgaacgcagccttaacatcgactttatccttgggctattgaagcgggttttggaagggcgaagggatttcaaggttattatttcttcggctacgataaacgctgaagttttttctgagtacttcggatccgacgcgttcggacaatgcccgattgtaaagatcgacgcacagactttcccggtaaccctcatctacgatcccccggcagtggaaggtatccccggcagccaaattgccggcgaggccctgctttcaaaaatcgaagccatcaccgaacgcttgataaacgcaaagcaaaacgaaaacaacggaggaaagatcgaaggggacatcctcatcttcctttcgggggagaagatgataaaggactgcatgagcacacttgccttttcccaggtcggaaagtaccttcaccttttgccgttatacggaagactcggcaaagaagagcaggaaaaagttttttatcccgccccaaagggaaaagtaaaggcgattatctccaccaacatcgcagagacttccgtaaccatcgacgggataaccgcggttatagattccgggcttcaaaactaa

SEQ ID NO: 40994 - protein, 328 aa, Unknown
  Obtained from environmental sample
  DOMAIN (17)...(177): DEAD/DEAH box helicase
  misc_feature (1)..(328): Xaa is any amino acid
MIRYSTRDMNYLDLPVYKHKDIILGALEKTQALVVESPTGSGKTTQLPVILYQAGYARNGMIGVTQPRRIAALSVSEFIARQMGCAMPGLVGYKMRFEDKTVPNTQIKIMTDGILLQEMKLDPWLSKYNCLVVDEAHERSLNIDFILGLLKRVLEGRRDFKVIISSATINAEVFSEYFGSDAFGQCPIVKIDAQTFPVTLIYDPPAVEGIPGSQIAGEALLSKIEAITERLINAKQNENNGGKIEGDILIFLSGEKMIKDCMSTLAFSQVGKYLHLLPLYGRLGKEEQEKVFYPAPKGKVKAIISTNIAETSVTIDGITAVIDSGLQN

SEQ ID NO: 40995 - DNA, 321 bp, Unknown
  Obtained from environmental sample
  misc_feature (1)..(321): n is a, c, g, or t
gtggcagattgggcgggcgtgccgacaagcgtcattctgagggcgcgggaaatcctgaacaacttggagaacatggaactgacccccgaccacaaaccggcgttagcccgcaaaaaagacggcagtttcggagcagcggcctccgcgtcgtcgtcatcttcgacatcggcagatggagacgaagccgtgcagttaaacgcgattgacgagtacgcgcaatccattatcgcgaaactgaagagcatagacctgaacaccgttacgccgatggacgcgctgacgctgctgtatgagttacggaagaaggcggtcgaggggtga

SEQ ID NO: 40996 - protein, 106 aa, Unknown
  Obtained from environmental sample
  misc_feature (1)..(106): Xaa is any amino acid
MADWAGVPTSVILRAREILNNLENMELTPDHKPALARKKDGSFGAAASASSSSSTSADGDEAVQLNAIDEYAQSIIAKLKSIDLNTVTPMDALTLLYELRKKAVEG

SEQ ID NO: 40997 - DNA, 483 bp, Unknown
  Obtained from environmental sample
  misc_feature (1)..(483): n is a, c, g, or t
ttgacagattcggccgagcgctattgggagaaggagttctcactgttgcgccccaaaaagaacagcggcggaaaacgcgcgtacaaggagaaggatatcgaggttattgtcaagataaaacaaatgttggaggaagagaagtacacattgcacgaagccaaggacaaactattggacgagcggcgcgaacggcgggtagggggaggaaacactaccgacatgaaacgcaggaaagccgacgcggctgacgatgcgaacggatcggaatcaacggatccgacagataccgccgctaaactggcaaagcggaaatctgtaccgaagaagaaaaacaccgtccgcggcgttaataacggcggtattaataatgataatggcaatgatcataatggcgataacaataatcgcggtaatgacaacgctttgatttccggcatacgggacgagcttttggaggttctggggttactggagaggaactaa

SEQ ID NO: 40998 - protein, 160 aa, Unknown
  Obtained from environmental sample
  misc_feature (1)..(160): Xaa is any amino acid
MTDSAERYWEKEFSLLRPKKNSGGKRAYKEKDIEVIVKIKQMLEEEKYTLHEAKDKLLDERRERRVGGGNTTDMKRRKADAADDANGSESTDPTDTAAKLAKRKSVPKKKNTVRGVNNGGINNDNGNDHNGDNNNRGNDNALISGIRDELLEVLGLLERN

SEQ ID NO: 40999 - DNA, 348 bp, Unknown
  Obtained from environmental sample
  misc_feature (1)..(348): n is a, c, g, or t
atggatcaaccggcactgcatacaattgaacatttatgcgcgacatttcttcgttcacacaaggaatggagttcaaaaacagtatactttggtccgatgggctgccgcaccggtttttatttgattttagaaggtgattacaaatccaccgatattcttcccctattaacagaaatggctgaatggatagaaaaatttgatggccccattcccggtgcttctgccgccgaatgcggcaactggcgcgatcaaaacatcgacatggcaaaatgggaatggcgcaaatacattggattgttaaagaaggcgtcaagggagaatttggagtatcctagcgatatggtgtag

SEQ ID NO: 41000 - protein, 115 aa, Unknown
  Obtained from environmental sample
  DOMAIN (1)...(111): S-Ribosylhomocysteinase (LuxS)
  misc_feature (1)..(115): Xaa is any amino acid
MDQPALHTIEHLCATFLRSHKEWSSKTVYFGPMGCRTGFYLILEGDYKSTDILPLLTEMAEWIEKFDGPIPGASAAECGNWRDQNIDMAKWEWRKYIGLLKKASRENLEYPSDMV

SEQ ID NO: 41001 - DNA, 753 bp, Unknown
  Obtained from environmental sample
  misc_feature (1)..(753): n is a, c, g, or t
ttgaaagtgtgcctgctatggcaccaaaaaaggaataatgggatgattggtattattggcgcaatggaagacgaggttagtcttctccgcggcgcgctggaaacgccgcatgtaaccaaaattggcgagttcgagttttacgaaggaaagcttgaagagaaaagcgttgtcctgctgcgctgcggcataggcaaagtcaccgccgcggttggctgcgctctgcttatacacacttttaaaccggattttgtaattaataccggttctgccggcggcattgaccccacccttcattttggcgatgtcattatctccaccggccttgtgtaccatgatgtagatgtcaccgcttttaattacgcgccgggccagcttcccggacagccgcaaattttccccgcggacgaaaacctgatttccaaggcggaacaggcagtaagcgaacttaaacagaaaaatatacttcccgccaatctgaattactgccggggccttattggcaccggcgacacttttatgcaccagccggaaagtatcgcggcggtgcgccgtcagtttccgaatgtcgccgccgtggaaatggaaggagccgctatagcccactgctgccgtttgttctccgttcccgtgctggttatccgcgccctttccgacattgccggcgttgagtcgccggtaaagtttgatgaattcctgccggtcgcttcaaaacattcagcggaaatggtacgctgtattataaggagtaaataa

SEQ ID NO: 41002 - protein, 250 aa, Unknown
  Obtained from environmental sample
  DOMAIN (15)...(247): Phosphorylase family
  misc_feature (1)..(250): Xaa is any amino acid
MKVCLLWHQKRNNGMIGIIGAMEDEVSLLRGALETPHVTKIGEFEFYEGKLEEKSVVLLRCGIGKVTAAVGCALLIHTFKPDFVINTGSAGGIDPTLHFGDVIISTGLVYHDVDVTAFNYAPGQLPGQPQIFPADENLISKAEQAVSELKQKNILPANLNYCRGLIGTGDTFMHQPESIAAVRRQFPNVAAVEMEGAAIAHCCRLFSVPVLVIRALSDIAGVESPVKFDEFLPVASKHSAEMVRCIIRSK

SEQ ID NO: 41003 - DNA, 612 bp, Unknown
  Obtained from environmental sample
  misc_feature (1)..(612): n is a, c, g, or t
atggaatttcttcagcagcttatgtcttttatgtcacatgcgataataaattatttacactatgaaaattccctgcgggatgtaaaaacagggttgtacaaccacggtttttttatgtcccgcctgaaagaagaaattacccatacaaagcacagttcctacgattcttcagttattgtaatggatgtagacaaatttaaaaactttaatgataattatggacaccttgcgggggatcaagtgctggaaaaactggcgcaggtcatccggcagtgtgtacgaaacaaggacgtaccttgtcgttttggcggcgaagaatttaccgttatgctgtctcacgccgatgctgccgccgcaaaaacagttgccgagcggctgcgaaccaacgtggcaaagatgcgggtaccatgggaagagattgttctgcctcaggtaacaatcagtctgggagtatttacttttgggccggatagtgatttagaagcgaccgaaatactccgccgcgctgatgaagcgttgtatgtttccaaaaacaacggcagaaattgcaacactgtttgggaacccggtttagttgaaagtgtgcctgctatggcaccaaaaaaggaataa

SEQ ID NO: 41004 - protein, 203 aa, Unknown
  Obtained from environmental sample
  DOMAIN (21)...(183): GGDEF domain
  misc_feature (1)..(203): Xaa is any amino acid
MEFLQQLMSFMSHAIINYLHYENSLRDVKTGLYNHGFFMSRLKEEITHTKHSSYDSSVIVMDVDKFKNFNDNYGHLAGDQVLEKLAQVIRQCVRNKDVPCRFGGEEFTVMLSHADAAAAKTVAERLRTNVAKMRVPWEEIVLPQVTISLGVFTFGPDSDLEATEILRRADEALYVSKNNGRNCNTVWEPGLVESVPAMAPKKE

SEQ ID NO: 41005 - DNA, 681 bp, Unknown
  Obtained from environmental sample
  misc_feature (1)..(681): n is a, c, g, or t
gtgccacctcctcaaggcctactactacgcggagaacactgccggcgaagttaccaccgaacgcctgatgaagcaaaaggctcacgacgcgaacggaacgctcgccaaggcgatcaagatagtcaaaagttacgaaaagccgtaggaatgccgaacgacaacgaccgatacccgatacaccgcatactcgacgccaacttcaaccgcctccgcgaggcgctgagggtcgtcgaggagtactaccgcttcatacttgaggacgaaagcgcctgcgtcgaactgaagacgatgaggcactcgctatcggatatggagcggactgtcgggcagagcgcgcttttggaggggcgcgacaccggatcagactgcttcgcgtcggcgagccgcccggaagagatggggcgagcaaacgccgaaaccgtcctccgagccaaacttcagcgcgcccaagaggcgtgccgcgtcataaaggagtacgcaaaactgtccgcggaaacggagagcgtcagcaggcgggcccaaggagacgcggttcgcgctttacaccatggagaacgcggcgctgtcgggggagtgagacggggtttaaccccgcccctagcccatctttttgattatgcggactccacgctgagagccacttatgattccgatcgtgtcggcatcaaacggtcaacttga

SEQ ID NO: 41006 - protein, 226 aa, Unknown
  Obtained from environmental sample
  misc_feature (1)..(226): Xaa is any amino acid
MPPPQGLLLRGEHCRRSYHRTPDEAKGSRRERNARQGDQDSQKLRKAVGMPNDNDRYPIHRILDANFNRLREALRVVEEYYRFILEDESACVELKTMRHSLSDMERTVGQSALLEGRDTGSDCFASASRPEEMGRANAETVLRAKLQRAQEACRVIKEYAKLSAETESVSRRAQGDAVRALHHGERGAVGGVRRGLTPPLAHLFDYADSTLRATYDSDRVGIKRST

SEQ ID NO: 41007 - DNA, 705 bp, Unknown
  Obtained from environmental sample
  misc_feature (1)..(705): n is a, c, g, or t
gtgcgtgccgatcagtatgtcaacctttccttcggcgagcttttccaatgtcgtcttgacctctttccccttttgaaagcggctgagtacctcgatgcgcaccgggaagctcgacatgcgttccgagaatgttgcgaagtgctgcgcggcgaggatggtcgtgggcgcaagtaccgccgcttggtggccggacatgaccgccttgaaagccgcccgcatcgcgacctcggtcttgccgaagcccacgtcgccgcagatcaggcggtccataggcttcgccgactccatgtccgccttcacctccttgattgcgcggagctggtcgggcgtctcctcgtagatgaacgagtcctcgaactcccgctgccagacgttgtccggcgcgaagctgatgccctcgaggaactgacgcttggcgtaaagatcgataagctcctgagccatttcgcgcagactctcgcgggtgcgctctttcagcctctcccacgcctgcgtgccgatcttcgagagcggcggcgcaaaaccctccttgcccacgtacttctgcaccttgtggaagtcctctatcggcacgtagaccttcgcgttgtcggcgtagatcagcaccatgcagtcggtgacggagtcgccggccttcacacgctccacgcccacgaaccgcccgatgccgtgctccacgtggactacggtgtcctgcacagatag

SEQ ID NO: 41008 - protein, 234 aa, Unknown
  Obtained from environmental sample
  misc_feature (1)..(234): Xaa is any amino acid
MRADQYVNLSFGELFQCRLDLFPLLKAAEYLDAHREARHAFRECCEVLRGEDGRGRKYRRLVAGHDRLESRPHRDLGLAEAHVAADQAVHRLRRLHVRLHLLDCAELVGRLLVDERVLELPLPDVVRREADALEELTLGVKIDKLLSHFAQTLAGALFQPLPRLRADLRERRRKTLLAHVLLHLVEVLYRHVDLRVVGVDQHHAVGDGVAGLHTLHAHEPPDAVLHVDYGVLHR

SEQ ID NO: 41009 - DNA, 576 bp, Unknown
  Obtained from environmental sample
  misc_feature (1)..(576): n is a, c, g, or t
atgaaatcgctgaaaggaacccgcacggaaaagaatattctgaccgccttcgccggggaatcccaggcccgcaaccgctattcctttttcgccggcgcggcgaagaaagaaggcttcgtgcagattgcggacgcctttctcgaaacggcggagcaggaaaaggaacatgccaagcgcctgttcaagtttctggaaggcggcgatgtggagatcaccgcagcctttccggcgggcgttataggcgcgaccgaagcgaatcttctcgcttcggctgccggagaacaccatgaatacacggaaatgtatccttccttcgccaagatcgcgcaggaagagggtttgggcgaagtcgccgatgtcatgcgggccattgccgcagccgaggccttccatgagaaacgctatctggcctttgcgaagaatatcaaggaagggcgcgtgtttgtccgtgagcagagcgtgacgtggcattgccgcaattgcggatgcaccgttgacgggaagagcgccccggaagcgtgtccggcctgcgcacaccccaaagcgtattttgacgtggcctgcacgaactggtag

SEQ ID NO: 41010 - protein, 191 aa, Unknown
  Obtained from environmental sample
  DOMAIN (11)...(139): Rubrerythrin
  misc_feature (1)..(191): Xaa is any amino acid
MKSLKGTRTEKNILTAFAGESQARNRYSFFAGAAKKEGFVQIADAFLETAEQEKEHAKRLFKFLEGGDVEITAAFPAGVIGATEANLLASAAGEHHEYTEMYPSFAKIAQEEGLGEVADVMRAIAAAEAFHEKRYLAFAKNIKEGRVFVREQSVTWHCRNCGCTVDGKSAPEACPACAHPKAYFDVACTNW

SEQ ID NO: 41011 - DNA, 348 bp, Unknown
  Obtained from environmental sample
  misc_feature (1)..(348): n is a, c, g, or t
ttgagaccccaacgaagtcaggtggtggtggatcgcgacaataacgcgctgtacttctcgcgcgagccgatcccctcgcgcaagaaaggatcggatgtggtgcccatgcgcaagcaggtctgcgtcattcccttccgccgcgactacctgctgcgcttcaacgaaatgccggaaagcccgctggaaatctatgaatccgtagacatgatgcgtattctggagtacggcgaaaaagtgcgcatggtgcccatcaccgaacgcaccgtcagcgtggatactcccgcagacctgctccaggcggaaaagttgatgcaggacgacccgttgcgcaggctgtattcaaagtaa

SEQ ID NO: 41012 - protein, 115 aa, Unknown
  Obtained from environmental sample
  misc_feature (1)..(115): Xaa is any amino acid
MRPQRSQVVVDRDNNALYFSREPIPSRKKGSDVVPMRKQVCVIPFRRDYLLRFNEMPESPLEIYESVDMMRILEYGEKVRMVPITERTVSVDTPADLLQAEKLMQDDPLRRLYSK

SEQ ID NO: 41013 - DNA, 420 bp, Unknown
  Obtained from environmental sample
  misc_feature (1)..(420): n is a, c, g, or t
gtgcgcagacttatggacggtaaggtactttgcggttttgccggcgctaccgcggacgcgtttaccctttttgaccgttttgaagcgaagttaaaagaatattcaggcgatcttgcaaggtctgcggttgaattggcgaaagactggcgcatggaccgcacattaaggcggcttgaagcgcttctgctggtggcggatatatctaaaatactgttaatatcaggcacgggagacgtgattgaacccgcggaagacgcgcttgcgattggatcgggggggaattacgcttacgcggcggcgttggcgttcatggaaggaagccaattttcagcggcgganatagcggaaaaaagtttaaagattgcgggtaacatttgtatttatacgaatatgcaaataacgttggaggagttgggatga

SEQ ID NO: 41014 - protein, 139 aa, Unknown
  Obtained from environmental sample
  DOMAIN (1)...(138): Proteasome A-type and B-type
  misc_feature (1)..(139): Xaa is any amino acid
MRRLMDGKVLCGFAGATADAFTLFDRFEAKLKEYSGDLARSAVELAKDWRMDRTLRRLEALLLVADISKILLISGTGDVIEPAEDALAIGSGGNYAYAAALAFMEGSQFSAAXIAEKSLKIAGNICIYTNMQITLEELG

SEQ ID NO: 41015 - DNA, 927 bp, Unknown
  Obtained from environmental sample
  misc_feature (1)..(927): n is a, c, g, or t
ttgtatttatacgaatatgcaaataacgttggaggagttgggatgatggaggacaaaaaggaatacactccnaggcagatagtggctgaacttgacaagtatatcgtaggtcagaaaaaaggccaaaagagcgtcgcggtggcgttacgcaaccgcgtcagaaggttaaaacttgagcctgagatacgtgaagacatagcccctaaaaatattttaatgattggcccgacgggcgttggaaaaactgaaattgcccgccgtcttgcgaaacttgccgggtccccatttattaaagtggaagccacaaaatataccgaagtgggttatgtcggcagggatgtggagtccatggtacgcgatttaatggccgccgggtttcagatggtaaaacaggaaatgcaggaagcggttaagcaggaagccgaaagacgcgctgaagacgcgttattggatttattgctgccggtcaatgataaaaaacataaagaaaaaaaaccgcgtccaggccctgtaatgaggcctatgggtacttttcaaataagccctgagaattcaaacagcagtattatcgcgacgacattacagttggggtttccggcttttaagaaaaatcaggaaacacagaatgatgaaaataacgcaaatgataaaaacgcggaaatggatgaatccgctgaagaaataaaagaaggcgagaatgagagatttaaggctacaagggaaaaattaagaaccatgcttcgcgaaggtttgcttaatgatagaactgtcgagttgacggtaggacaaaacccgacaatcccggcttttgaaatgatgggcggcagtatggaagatctggaagcgagcctttcaggaattgccgggatgttaggcggcgttcaaaagaaaaaagtggtaaccgttccacgcgcgatggaaatttaa

SEQ ID NO: 41016 - protein, 308 aa, Unknown
  Obtained from environmental sample
  DOMAIN (67)...(255): ATPase family associated with various cellular activities (AAA)
  misc_feature (1)..(308): Xaa is any amino acid
MYLYEYANNVGGVGMMEDKKEYTPRQIVAELDKYIVGQKKGQKSVAVALRNRVRRLKLEPEIREDIAPKNILMIGPTGVGKTEIARRLAKLAGSPFIKVEATKYTEVGYVGRDVESMVRDLMAAGFQMVKQEMQEAVKQEAERRAEDALLDLLLPVNDKKHKEKKPRPGPVMRPMGTFQISPENSNSSIIATTLQLGFPAFKKNQETQNDENNANDKNAEMDESAEEIKEGENERFKATREKLRTMLREGLLNDRTVELTVGQNPTIPAFEMMGGSMEDLEASLSGIAGMLGGVQKKKVVTVPRAMEI

SEQ ID NO: 41017 - DNA, 1158 bp, Unknown
  Obtained from environmental sample
  misc_feature (1)..(1158): n is a, c, g, or t
atgggggaaaaaaatattttagcaacgccgcaaaactcaacaaatatttatgggtatgaaaatgatcccagaggctctatgccgaaaatttatataccgaaagataaacaagtgccaaaagccacagtaattcgtgcgatagaagttgattccggcggcaaacaaagcaaggttgcgactaaaacgtattttattggcaataatctgtctgattacggggataatcgcattatttctttagtttctgacccatataatctggtagatattaattacggcatcatggtcaggggaaacccaagtaataaatggaatagtaaacctccttataattttctcaggaagggagaagaatgggaacgggaagcgtatttggagctttttgagggaaatacaagcggcagaagcgtaaggctgtctacaggagtgggtatccgcattcggggcggatggtcaagggccgcggggcaaaaaagttttaacgtgtactttaaagagcgatacggcataaataatctgaaaaattatgtgttgatacccggcgctgttaaagcagacggaagaacgcctgttacgacatataaaagttttatgctgaggaacggcggaaacgatgttgagtatacaaaattttatgacgtttttttacaagatttgctgagagatcgcagttattctacacaagccgcagttccatgtattgtgtatattaacggtgaatactggggaccttataacattcaggagaggtacagtgacaatcatacggaatataaatacggcgttaaaaaagaaaacgttatctcttatgacaacggagaattagacgacggtacaaaagcggacgaggcattattttggcaaatgatgaatatgaaagataataatatggccgatcccgcaaaatacaacgctttttgcgatgtttttgacatagaaaactttattgattactgggcctccgaaatttacatttacaatgaagattggccgcataacaattatcgcatgtggagaacgcgtaacgctgaggctggtaatccctatggcgacaagaaatggcgttatcagatgttcgatacggaatttgccatgggaatttataacagcggcggacttaccggtcaatccggtaagtccgcctttgatgaaatctga

SEQ ID NO: 41018 - protein, 385 aa, Unknown
  Obtained from environmental sample
  misc_feature (1)..(385): Xaa is any amino acid
MGEKNILATPQNSTNIYGYENDPRGSMPKIYIPKDKQVPKATVIRAIEVDSGGKQSKVATKTYFIGNNLSDYGDNRIISLVSDPYNLVDINYGIMVRGNPSNKWNSKPPYNFLRKGEEWEREAYLELFEGNTSGRSVRLSTGVGIRIRGGWSRAAGQKSFNVYFKERYGINNLKNYVLIPGAVKADGRTPVTTYKSFMLRNGGNDVEYTKFYDVFLQDLLRDRSYSTQAAVPCIVYINGEYWGPYNIQERYSDNHTEYKYGVKKENVISYDNGELDDGTKADEALFWQMMNMKDNNMADPAKYNAFCDVFDIENFIDYWASEIYIYNEDWPHNNYRMWRTRNAEAGNPYGDKKWRYQMFDTEFAMGIYNSGGLTGQSGKSAFDEI

SEQ ID NO: 41019 - DNA, 1581 bp, Unknown
  Obtained from environmental sample
  misc_feature (1)..(1581): n is a, c, g, or t
ttggtcttaaattacgcgatacggaacctatggcagtatgaccctgtttacctgcggggacttgatacaaaacggctggcgattctgatagacggagtacctgtaaattcttccatggacggaaaatttgacattgagcaaattgaccttaattcaatcgagcgcattgaggtaatttacggcggttcggacagtaagttcaatgtttccggcgcaatgggcggggttattaacattgttaccgttaagaaacaaccagccggactgcggctgggcgcttctgtttccaatacaagcgtcctgcccggcgaataccggggtcgtaacggacaaacgcaggggccaaattgggaagatttggcggatacccagaattttgatatttcagccgcttatggcggaagcaagatttcaatatcagctaacgtattcgcaaaccgggcggagaatcattttttatttattgatcgctacaattatacccgcagaaaagacaacaacgaagtatgggatgccggtggctcggtatccgtaacgggggaattacccgatcttttaaaattgattgcctcatcacatttttattatggcgataaaaatgtccccggctccggcttttcaggcaatgtcggcaaacaacaggatattttttcgcgtaacaatgtaatgcttgatatgccccgcgcctttcgggatgatcttgcaatggaagcgtccctggggttttatttcaccagaagggattatacctcgcctgcggatattttttcccgccacgaacaacaaaacataacgctaataaaccgctggaattggtatacaagcaaacagttggtgctaagaatcggttttgattaccgttttatttatcttgattccacggatattggcaaccgaaaccgtcatgacggcggagtctacctgactgcggaatacaaaccggtacaacgatttatgatcatcccttccgtaaaagccgtatttacaagcgaaggggacacgctatttaccgcagttccaaaactgggtctactttggaatgtgacggattctcttgccataaaaaacaactatttccgcagttttaaatttcccgattttgaagaactctactggggtgacggcggtaacgttacgggaaatcccgacctaaaacccgaagacggctggggtggggatattggcttatcatggcgttataaaaatttattcagttttgaaagcacgttttttacacactggctaaaagattcaattcactggtattccggggccaacggtatatggcgacctgaaaatgtgggagaggcaatgttctttggactggacggcaaactgcattttgaaattcctgtgagtctggggcaagtgaaaaaaattattccctcaatttcgtatcagtaccttttaagttacctgttaagttttggttatgactttgcggacaataaaagaatcccctatagtcccacacatacaatcagcggctcctttgaaattccctgggaaagcggttctgtaataattagcggacattatgaaagtttgcgttataatgacagagcgaacattacgcagtaa

SEQ ID NO: 41020 - protein, 526 aa, Unknown
  Obtained from environmental sample
  DOMAIN (339)...(524): TonB dependent receptor
  misc_feature (1)..(526): Xaa is any amino acid
MVLNYAIRNLWQYDPVYLRGLDTKRLAILIDGVPVNSSMDGKFDIEQIDLNSIERIEVIYGGSDSKFNVSGAMGGVINIVTVKKQPAGLRLGASVSNTSVLPGEYRGRNGQTQGPNWEDLADTQNFDISAAYGGSKISISANVFANRAENHFLFIDRYNYTRRKDNNEVWDAGGSVSVTGELPDLLKLIASSHFYYGDKNVPGSGFSGNVGKQQDIFSRNNVMLDMPRAFRDDLAMEASLGFYFTRRDYTSPADIFSRHEQQNITLINRWNWYTSKQLVLRIGFDYRFIYLDSTDIGNRNRHDGGVYLTAEYKPVQRFMIIPSVKAVFTSEGDTLFTAVPKLGLLWNVTDSLAIKNNYFRSFKFPDFEELYWGDGGNVTGNPDLKPEDGWGGDIGLSWRYKNLFSFESTFFTHWLKDSIHWYSGANGIWRPENVGEAMFFGLDGKLHFEIPVSLGQVKKIIPSISYQYLLSYLLSFGYDFADNKRIPYSPTHTISGSFEIPWESGSVIISGHYESLRYNDRANITQ

SEQ ID NO: 41021 - DNA, 741 bp, Unknown
  Obtained from environmental sample
  misc_feature (1)..(741): n is a, c, g, or t
atgaaaatgatgaaatcacctgttatctgccatgagaccgaagacttcgcggttgtgttcaagccgccgcgtatgcactgcgccccgttaaagcaaaatggcaatgaaaatgaaaccctccttgactggtacgcgaagacctttcccccaatcatggaactttcaggcagaaaagaaaacgaaggcggccttctgcaccgactggattttgaaacacagggcttggttcttttcgcgaaaaatcaacaatcactggattatttattgaaactacaggatgaaggaaattttattaaagagtactgcgctatctgccaaaaatcagaacctcagcccggcgctgttgaattttctgtcggcctgagtcccccgccggtaattgaaagttatttccggccttacggttccggcagaaagcaggttcgtcctgtgacaaaagaacatttaaaaggaaaagaaatcgccaaggacggggacgcttattacaaaactgaaattatcggtattgaaaaaacggactatcccggacaggaagaatcatcgtatcatttcaccgtaaggctcaaacgcggtttcaggcaccagatacgctgccaccttgcgtgggttggcttcccggtgttaaacgatccgctttacggcaagggagaggtaaacggtttccttgcgctgaaggcaacggggcttttttttactgatcccaaaagcggcgagcctgtacaatttcgcattgagcaatga

SEQ ID NO: 41022 - protein, 246 aa, Unknown
  Obtained from environmental sample
  DOMAIN (15)...(202): RNA pseudouridylate synthase
  misc_feature (1)..(246): Xaa is any amino acid
MKMMKSPVICHETEDFAVVFKPPRMHCAPLKQNGNENETLLDWYAKTFPPIMELSGRKENEGGLLHRLDFETQGLVLFAKNQQSLDYLLKLQDEGNFIKEYCAICQKSEPQPGAVEFSVGLSPPPVIESYFRPYGSGRKQVRPVTKEHLKGKEIAKDGDAYYKTEIIGIEKTDYPGQEESSYHFTVRLKRGFRHQIRCHLAWVGFPVLNDPLYGKGEVNGFLALKATGLFFTDPKSGEPVQFRIEQ

SEQ ID NO: 41023 - DNA, 555 bp, Unknown
  Obtained from environmental sample
  misc_feature (1)..(555): n is a, c, g, or t
ttggatcgcgacccggtaaagtttaacgcgttaacagacgccgaaaaggccgcacgtctgatttttcttaataagacctgttttaacggtttataccgggtaaattccaaagggctttttaatgtcccttatggcggatataaaaatcccttaatatgcgaagatagcgtattacgtcaaatcagcgcttatcttaattcaaatgatataattcttttgaataatgattttgagcaggcggtattaacggcggataaaaaatcttttatatattttgacccgccttactacagccctgataaaaccaattttaccggataccaggcaaacggttttgacgaaggtgagcatgaaaggctatgcaatgtcatgcaaaaaatgaccaagcggcgcataaaatgcctgttaagcaattctgacacggaatatatccgaacgttatacaatcacgatatttttgatataatatccgtacaggcaaagagaaaaattaattccgattccgcggggcgcggctttgtgaatgaattactaattaaaaactggaaagaatga

SEQ ID NO: 41024 - protein, 184 aa, Unknown
  Obtained from environmental sample
  DOMAIN (1)...(164): D12 class N6 adenine-specific DNA methyltransferase
  misc_feature (1)..(184): Xaa is any amino acid
MDRDPVKFNALTDAEKAARLIFLNKTCFNGLYRVNSKGLFNVPYGGYKNPLICEDSVLRQISAYLNSNDIILLNNDFEQAVLTADKKSFIYFDPPYYSPDKTNFTGYQANGFDEGEHERLCNVMQKMTKRRIKCLLSNSDTEYIRTLYNHDIFDIISVQAKRKINSDSAGRGFVNELLIKNWKE

SEQ ID NO: 41025 - DNA, 957 bp, Unknown
  Obtained from environmental sample
  misc_feature (1)..(957): n is a, c, g, or t
atggcgacttcccccctaattcagcgccacttccttaatccctcggacagggatttgagaaggatcgcttttgatgaaatatacggctaccgccgggctttcaaaagcaactctgttttctggagcagcaatgccgacaaagagttctacttttccgaggataaccattataccatagatactgaaaaccccgataactattggtataaaatgaccctgtacgaaacggaaaaatacaacttcaacatcaatttcaacgcggaactgcagcagaccctgctgtttatcaacgcgccggtttttgacgatcagcataagcccatcggccttgtgggaaccggcatcgaccttaccgaatttgtaaataacatttaccagaattataaaggcggcgcggcgttatacctgtttaacgctcagggggagataaccggcagcaaggacgttgatcaaattaaaaataaaacaacgctggataaagctcttggcgataccggcggaataattcttgaaagggcgaaatcagataaaagccagtatttcaacgtaagcgaaggcgtagccaccgtgattcaggtgccgtcccttgaatggcatttaacggctgttcttccgattacaatagcggataccctcaaaagcggcatgacattgctcttccttctcatgatggcggccatcgcgggtattataataatttcctatctgtttatcgccggccttctcaagcccatgaagaacatggtaaagacgctggatgaaatagcggataacgctgaccttaccaaacggcttcaattcaaacacatggatgaaataggcgttcttgcccatgattttaactctatgatggaaaaaatcagaaccttttgtaggaacataaaatacaaaataaacgcgctgacaatacgggctatgagctttcctcaaatatggctaaaacttcaaaatcggtag

SEQ ID NO: 41026 - protein, 318 aa, Unknown
  Obtained from environmental sample
  DOMAIN (219)...(289): HAMP domain
  misc_feature (1)..(318): Xaa is any amino acid
MATSPLIQRHFLNPSDRDLRRIAFDEIYGYRRAFKSNSVFWSSNADKEFYFSEDNHYTIDTENPDNYWYKMTLYETEKYNFNINFNAELQQTLLFINAPVFDDQHKPIGLVGTGIDLTEFVNNIYQNYKGGAALYLFNAQGEITGSKDVDQIKNKTTLDKALGDTGGIILERAKSDKSQYFNVSEGVATVIQVPSLEWHLTAVLPITIADTLKSGMTLLFLLMMAAIAGIIIISYLFIAGLLKPMKNMVKTLDEIADNADLTKRLQFKHMDEIGVLAHDFNSMMEKIRTFCRNIKYKINALTIRAMSFPQIWLKLQNR

SEQ ID NO: 41027 - DNA, 1323 bp, Unknown
  Obtained from environmental sample
  misc_feature (1)..(1323): n is a, c, g, or t
atggctaaaacttcaaaatcggtagatcaaatctcggcggattttgaaggtatgaagagcgctatgggaaggcaggaagaaagcgccgccgaagctgacagagcggtaaaagttatagaagccagcattgaaagcctgcacaggctgatagaggatcagtccaaaagcataaacacgtcgtcttccgcgattgaggtaatgacaactaacattcattcggtgagaaacacgctgattgaaaacggcaaaaacgtcaatgaattggcggcggcgtccgagaacggaaagagcggccttcagaccgtggcggaaaagatacgggaaatatcccgtgactccgaaggccttctggaaataaacgcggccatagacactatagcaagtcagacaaacctgctttccatgaacgcggcaatcgaggcggcccacgccggagaggcgggaaaaggctttgccgtagtcgccgacgagatccgcaaactcgccgaatcgtcaagcgagcagtcaaaaacgaccgcgacgatgcttaaaaagataaaagcttccatagacagtataacggaatcatccaacgaggtcctttcgggttttgaggtcattgattcaggcgtaaagaccgtttcacgccatgaagaaaatatccgcaacgcgatggaagagcaggaagtgggcggaaagcagatactggaatcgatgagccggctgaaagagataagcgtgtccgtcaaaaaaggcgcggaggatatgctggcgtcaggcgagaagctgaatcagcagacttctgattttatagaaatcagcaatgaatcaatgaacggcatgaacgacatagtaagcggcgcgatgcaggaaataaaaggcgcggtaacagttgtagatgaaatgagcgccgaaaacaacctgaattttgaggaccttaaaaaagaagctgcaaaattcaaagtagaaacaggcaacgaaaagaaaaaaatcattgtggttgacgatgaggaaactgtccttaccatgacaagagcgtctctggaaaataattatgaagttaccacggttaaatccggcaaggaagcgttgaacctgttcttcaagggatatgtgcccaatctggtgttattggatttaattatgcctgaaatgggcggctgggaaacctttatcaagatacgcgacatcagcaagctgcaccaaacccctatagcgatctacacgacatcggatgatccaaaagacaaagcaaaagcgcaggaacttggcgcggttgaatacatacacaagccgatcaataaaaccgaaatgcttgaaagggtgaaaaaacttttaaagtaa

SEQ ID NO: 41028 - protein, 440 aa, Unknown
  Obtained from environmental sample
  DOMAIN (51)...(273): Methyl-accepting chemotaxis protein (MCP) signaling domain
  misc_feature (1)..(440): Xaa is any amino acid
MAKTSKSVDQISADFEGMKSAMGRQEESAAEADRAVKVIEASIESLHRLIEDQSKSINTSSSAIEVMTTNIHSVRNTLIENGKNVNELAAASENGKSGLQTVAEKIREISRDSEGLLEINAAIDTIASQTNLLSMNAAIEAAHAGEAGKGFAVVADEIRKLAESSSEQSKTTATMLKKIKASIDSITESSNEVLSGFEVIDSGVKTVSRHEENIRNAMEEQEVGGKQILESMSRLKEISVSVKKGAEDMLASGEKLNQQTSDFIEISNESMNGMNDIVSGAMQEIKGAVTVVDEMSAENNLNFEDLKKEAAKFKVETGNEKKKIIVVDDEETVLTMTRASLENNYEVTTVKSGKEALNLFFKGYVPNLVLLDLIMPEMGGWETFIKIRDISKLHQTPIAIYTTSDDPKDKAKAQELGAVEYIHKPINKTEMLERVKKLLK

SEQ ID NO: 41029 - DNA, 897 bp, Unknown
  Obtained from environmental sample
  misc_feature (1)..(897): n is a, c, g, or t
atgcaggataccgaaggctgggcattcgcgatcaaccttatcgcgcgctcgtaccaaagagcgcccggctacagcggctatgtgcgtaacgcgatgaagcggaatatcttccagtttttagaaacggaaatatggaccggatttcccgagcgtctgcagaagtttttggttcaagtgtctctgattggacatctgtccgttgaattgctcactatactggcgggaaaggaaaaagatcttgtcgaggaattggaaaaacaaagcgcttatgtgcgcctggacagttatatcaacgcttatgtcattcaccctttgtttcaggagtttttaaagacaaagcaggactctcttccggacaaacaaaaaaagaaaatctacgctgtttcaggcgattggtgcgcccataacggttttaaggtagacgctattacctactatgaaaaggcgggactatatcaggcgatagtgacaatacttgacggattttcagtccaaatgccgttgaatatcgcccaattcacggcgccaattttggataacgcgcctgcggacacgtttgacaaggtggaatacctcgctgaaatgcacctgcgtacccatttgtgccagggccattggcaaaaatcgcttgacttgctgaaattctacgaagcgaaattccttaaactgccggagaacgacattgtcagaaaccgtactctggcgcagttgtatgattgctggacttatatacgcgccttaatgagcacaaccgaagataattatgattttggaattcacataggaaaagccaatatacacgtttccaccctggaagatccgggtaaattcggcccttattatccggggagcatggtccaactatgcgggttcttcaagaaaaggcagtgtggatga

SEQ ID NO: 41030 - protein, 298 aa, Unknown
  Obtained from environmental sample
  misc_feature (1)..(298): Xaa is any amino acid
MQDTEGWAFAINLIARSYQRAPGYSGYVRNAMKRNIFQFLETEIWTGFPERLQKFLVQVSLIGHLSVELLTILAGKEKDLVEELEKQSAYVRLDSYINAYVIHPLFQEFLKTKQDSLPDKQKKKIYAVSGDWCAHNGFKVDAITYYEKAGLYQAIVTILDGFSVQMPLNIAQFTAPILDNAPADTFDKVEYLAEMHLRTHLCQGHWQKSLDLLKFYEAKFLKLPENDIVRNRTLAQLYDCWTYIRALMSTTEDNYDFGIHIGKANIHVSTLEDPGKFGPYYPGSMVQLCGFFKKRQCG

SEQ ID NO: 41031 - DNA, 690 bp, Unknown
  Obtained from environmental sample
  misc_feature (1)..(690): n is a, c, g, or t
atgacaacgatggcgacattagaggacattgtagcccaacttgggttgacaatggtggaaacccgaaaagaaacggagcgtgtttttcaaaaattggcggaaagccaagcggagagccggaaagtgtgggcggaaagccaagcggagagccggaaagtgtgggcggaaagccggaaagagagggaggagagccggaaagagtgggaggaactccggaaagagacggagcgccagatgcaacgcctagaaaagaatataggcgggttgggcaacagcatcggcgaaattgtcgaaatgattgtcattccgggaacaaaggaaaagatgaatctctttgggcacaacttcacaatggcctcgcctgggaaagagtactccgatacagacggcagtacgttaacggaagtagacctgctgcttgaaaattgcgaagaagttatggtggtagaggtaaagacgcaagtttcgataaagtgggtggagcggcacctgaaacgcttagagatattgcgcaaaaaagaacgaataaccggtatgatcggtaaaacaatgtacgccgccgtcgcgggtataggttttgacgaagaggcgcgtgagcttgcggctgataacggtatgtacttgatagacatccatgaggacagcgagaggattgacgtaacgccgccgaaagaggtcggcacgtggtga

SEQ ID NO: 41032 - protein, 229 aa, Unknown
  Obtained from environmental sample
  misc_feature (1)..(229): Xaa is any amino acid
MTTMATLEDIVAQLGLTMVETRKETERVFQKLAESQAESRKVWAESQAESRKVWAESRKEREESRKEWEELRKETERQMQRLEKNIGGLGNSIGEIVEMIVIPGTKEKMNLFGHNFTMASPGKEYSDTDGSTLTEVDLLLENCEEVMVVEVKTQVSIKWVERHLKRLEILRKKERITGMIGKTMYAAVAGIGFDEEARELAADNGMYLIDIHEDSERIDVTPPKEVGTW

SEQ ID NO: 41033 - DNA, 798 bp, Unknown
  Obtained from environmental sample
  misc_feature (1)..(798): n is a, c, g, or t
atggacatcatcggtgattacgacatagtcgccgacgggactgacaactttcaaacgcgctatctcgtgaacgacgcctgcgtgttcttggacaagcccaacgtctacggttcaatattccagttcgagggacagtcgagcgtatttggtgtgaaagagggtccgtgctaccgctgcctatatccctccccgccgccgccgggacttgtgccgtcatgcgccgaaggcggtgtgatgggcgtgctgcccggcatcatcggaacaatacaggcttcggaggtcatcaaactcatagtaggcggggcaaaaccgttagtcgggcgccttctgcacttcgacgcgtggcgcatgaggttccgcgaactcaaattggataaagatcccaactgcccggtatgcggaaaaaatcccaccatacatgaactcatagactacgagcagttctgcggcctgaagaagccccaagacggcgagccgatagagacaatcaccgccatcgacctgaagcaacgcttggacgacggcgacaagatccaattcatagacatccgcgaaccgcacgaacgcgccatagtgaaattccccgacgccataataatgccgctcggtcagctgatacgccgcatggacgagctggaccccgccatagactcggtattcctatgcaaaataggccaacgcagcatactgggaataaaagcgctgcgcgaagcagggtacaagggcagactcctgaatctgcaagacggcctgaacgcctgggcgcgggatgtggacaagtctatgccggtgtattaa

SEQ ID NO: 41034 - protein, 265 aa, Unknown
  Obtained from environmental sample
  DOMAIN (164)...(257): Rhodanese-like domain
  misc_feature (1)..(265): Xaa is any amino acid
MDIIGDYDIVADGTDNFQTRYLVNDACVFLDKPNVYGSIFQFEGQSSVFGVKEGPCYRCLYPSPPPPGLVPSCAEGGVMGVLPGIIGTIQASEVIKLIVGGAKPLVGRLLHFDAWRMRFRELKLDKDPNCPVCGKNPTIHELIDYEQFCGLKKPQDGEPIETITAIDLKQRLDDGDKIQFIDIREPHERAIVKFPDAIIMPLGQLIRRMDELDPAIDSVFLCKIGQRSILGIKALREAGYKGRLLNLQDGLNAWARDVDKSMPVY

SEQ ID NO: 41035 - DNA, 582 bp, Unknown
  Obtained from environmental sample
  misc_feature (1)..(582): n is a, c, g, or t
ttgagagtccttcgggaatttttaaataaggaaaaaagcgttgaattcggaaaaattgcaatcatagtaacggcggtttcaattgttataaaagaaatattggctcagtacgcgttttacatagggcgcaaaaccggcaattccagcgtaaaagccgacggctggcatcacagatcggacgcgctgtcttcggttgttgtattagttggcattctctttgcgcacaaactccggtggatagacagcctgcttggatttgttatcgcattaatgctgttctacgcggcttttgaaattctaaaagaagcggttacaaaaattctgggagaggagccgaaacaaaaattaattgatgatataacaaatgaaataaaaagcatttacaaagacgatttgaatattcatcactttcatattcacaactatatttctcacaaggaattgacttttcatatccggttaaataaggatattacgatagggaaggggcatgttattgcgtcggcaattgaagacagaattctggaaaaatttaaaatgtcggcgacaattcacgttgagccactgcaagacagtgagtag

SEQ ID NO: 41036 - protein, 193 aa, Unknown
  Obtained from environmental sample
  DOMAIN (3)...(193): Cation efflux family
  misc_feature (1)..(193): Xaa is any amino acid
MRVLREFLNKEKSVEFGKIAIIVTAVSIVIKEILAQYAFYIGRKTGNSSVKADGWHHRSDALSSVVVLVGILFAHKLRWIDSLLGFVIALMLFYAAFEILKEAVTKILGEEPKQKLIDDITNEIKSIYKDDLNIHHFHIHNYISHKELTFHIRLNKDITIGKGHVIASAIEDRILEKFKMSATIHVEPLQDSE

SEQ ID NO: 41037 - DNA, 1143 bp, Unknown
  Obtained from environmental sample
  misc_feature (1)..(1143): n is a, c, g, or t
gtggaccgacttagcccgcttttaaatgccgcttcctcggattttaaaaggccggaaaaagcaaattccaacgatgacattatgctgctctactttacgtccggcacaaccggaatgccgaagatggtacgccatgattatacctatccgctgggacatatcgctaccgcaaaatactggcatcaggttgtccccgaaggtttgcacctaacggtagcggacacaggctgggcaaaagccgcatggggctgcatatacggccagtggctctgcggcgcgggcatttttgtgtacgattacgaccgttttgtgcccgccgatatgctgaaagttatcagcaaataccggcttaccagtttttgcgctcctcccacgatttaccgcttctttataaaggaagatttaaagaagtacgatttttccgcgcttaaaacctgcactgtcgccggcgagcctcttaaccctgaaatcttcgaccagtttttggaaggcacggggattaaattgcgcgagtgttacgggcaaacagagcttaccgtaacgctttgtacatatccgtggttaaaaccgaaaccaggttctatgggaaaacccgcgcccggttacgacattgatcttgtactggaagacggtacttcctgcggcatgggtgaagaaggagaaatcgtagtccgcacggataaacgcaagccgtggggaatgttcaacggctattaccgcgatgacgagcttacggcaagcgtgtggcatgataatatctattatacaggcgatgttgcgtggaaagatgaagacggctatttctggtttgttgggcgcaatgacgatgtaatcaaaagttcaggctaccgcatcggcccgtttgaggtagaaagcgcgcttatggaacatccagccgtgcttgaatgcgcgataacgggcgttcccgacgaagatcgcggagcggtagtaaaagcgacagtaatactcgcaaagggatttacagcttccgatgaactcaaggtagaattgcagaatcatgtgaagaanaccaccgcgccttacaagtatccgcgaattatcgaatttgtaaatgagcttcccaagaccataagcggaaaaatccgccgtgtgcagattcgggatgaagacaaaaccaaataa

SEQ ID NO: 41038 - protein, 380 aa, Unknown
  Obtained from environmental sample
  DOMAIN (2)...(305): AMP-binding enzyme
  misc_feature (1)..(380): Xaa is any amino acid
MDRLSPLLNAASSDFKRPEKANSNDDIMLLYFTSGTTGMPKMVRHDYTYPLGHIATAKYWHQVVPEGLHLTVADTGWAKAAWGCIYGQWLCGAGIFVYDYDRFVPADMLKVISKYRLTSFCAPPTIYRFFIKEDLKKYDFSALKTCTVAGEPLNPEIFDQFLEGTGIKLRECYGQTELTVTLCTYPWLKPKPGSMGKPAPGYDIDLVLEDGTSCGMGEEGEIVVRTDKRKPWGMFNGYYRDDELTASVWHDNIYYTGDVAWKDEDGYFWFVGRNDDVIKSSGYRIGPFEVESALMEHPAVLECAITGVPDEDRGAVVKATVILAKGFTASDELKVELQNHVKXTTAPYKYPRIIEFVNELPKTISGKIRRVQIRDEDKTK

SEQ ID NO: 41039 - DNA, 654 bp, Unknown
  Obtained from environmental sample
  misc_feature (1)..(654): n is a, c, g, or t
atggcgttgatcgacaaatatttgccaaaaacagagtttgactcatacgaagatttttataaaaatttcatgattacatatcctgaagatttcaattttgcctacgatgtagttgacgtgcttgcgcgggaaaaaggcggcgcgcgtgcgcttcaatggagcgatgaaaaaggcgcggaagctgtttttacatttaacgaaatgaaagattattccaacaaggccgccaatgtgctgagtgaggccggaatcggcaagggcgatcccgttatgttggtactgaaacgccgctgggaatactggcctgtaatccttgccctgcacaaacttggggcaatcgccattcccgcaacgcacctgcttaccaccaaagacattgtttacaggtgtaatgccgccgatatcaagggaattatctgcgtagacgacactgagcttatgtgccgcataaatgaagctgaggcaaccatagatcgcaattctaattcaaatgggcttgcggctctgcgttacaaagcctttatccgctcggttcacaccccaaaggacagcaacccggcggagattgccgctaagcgtcttgccgaaaaaaaagaagctgcacagccgacggataataaattgttatcgtggaccgacttagcccgcttttaa

SEQ ID NO: 41040 - protein, 217 aa, Unknown
  Obtained from environmental sample
  misc_feature (1)..(217): Xaa is any amino acid
MALIDKYLPKTEFDSYEDFYKNFMITYPEDFNFAYDVVDVLAREKGGARALQWSDEKGAEAVFTFNEMKDYSNKAANVLSEAGIGKGDPVMLVLKRRWEYWPVILALHKLGAIAIPATHLLTTKDIVYRCNAADIKGIICVDDTELMCRINEAEATIDRNSNSNGLAALRYKAFIRSVHTPKDSNPAEIAAKRLAEKKEAAQPTDNKLLSWTDLARF

SEQ ID NO: 41041 - DNA, 906 bp, Unknown
  Obtained from environmental sample
  misc_feature (1)..(906): n is a, c, g, or t
gtggaattggacaatattaatccattaaaaacagattatgaatattccaactgggtaaggtatgggaatacagagcctatcggatggagcttcggcaattaccagccgccccctggccaatggggggagatatgtacgcccgatgatcttagattcagttgggtttggggcaatgactttcgagccaccaacgggcagcttttttccgatgcccagataaaatatttcgttgatatggcagttgccgaaatggaaaggctgttaagcatcaccattaaaaaagtacgggcaagatgcaagccggaagaaagggggctaattaaaggccaggactacgatgaggaagaagccctgtatgaattcaagtattcaaaaatcgcaaggttcggaaaaatcataacaaggaaaaaaccgctgataaaattacaccgccttaacctcctctcccggttcgagggcgtaaggagccttcttgggcgggtagtcgtggataaaacaaaaggggtattgaaattactggaacgccccatccgcccgacagaaaccgtgcggggaattcaagaagcaatcaatatgtacggcactgaaactatgggtatgtacctgttctatgaagttgactacgatgccggatttgagacagccgccgatgtccctctcgatctccgcatggcaataagcaagacagccgcaatagggatattgaacgccgtaggggacggtttaatggccggtttttcttcatcaagcctgtcaatggacggcatgagcgaatctttcagcagtacgcaatccgcaacatcggcatacttcggggcgcggataaaacaatatgaaggggaattaaaaagttttattgaaagcacaaaaagaaagtatgggtttatcgctatagggagtttataa

SEQ ID NO: 41042 - protein, 301 aa, Unknown
  Obtained from environmental sample
  misc_feature (1)..(301): Xaa is any amino acid
MELDNINPLKTDYEYSNWVRYGNTEPIGWSFGNYQPPPGQWGEICTPDDLRFSWVWGNDFRATNGQLFSDAQIKYFVDMAVAEMERLLSITIKKVRARCKPEERGLIKGQDYDEEEALYEFKYSKIARFGKIITRKKPLIKLHRLNLLSRFEGVRSLLGRVVVDKTKGVLKLLERPIRPTETVRGIQEAINMYGTETMGMYLFYEVDYDAGFETAADVPLDLRMAISKTAAIGILNAVGDGLMAGFSSSSLSMDGMSESFSSTQSATSAYFGARIKQYEGELKSFIESTKRKYGFIAIGSL

SEQ ID NO: 41043 - DNA, 741 bp, Unknown
  Obtained from environmental sample
  misc_feature (1)..(741): n is a, c, g, or t
ttgtttcgtataacgacaagcacaatcttgataacggtcgaaaacaacaacgacggcggcaattatgacaacagttataataacggcgtagaaggcaacaccctggacccaattattctttcgatgcgcgagaggcagatgaaaaactatttcgccaccctgctgacttctctgggcactcctatgcttctgggcggcgatgagattggcaggactcaaaaaggaaataacaacgcatattgccaggataatgaaatatcatggtatgactggactttccttgaaaaaaacaagaccttgtaccgctttgcaaaagaaatgatagctttccgcaaaaggcatcccggctttatgcgcccggaattttttacgggccgcggcggagattacaagggcattcccgatataagctggtttaatgaaaaaggcaaaagccctgtttgggaagatatcggctatttcctcgctttaagattatacggcagtaaagcggaaatattcggcgaccgcgatgaaaatgatttctacctgatgtttaacgcaagtcatgacactcaggggtttttactggcggaaccgccgcccaaaaaagaatggctgcgcgttgtggatacggggcttcattctccgaatgatattttgcttccgggaaacgaaaaagcgcttccgtcccagcatgtatatccggtaaaggcccgcagtttgacaattttaatttcaaaggaaataaatcatggataa

SEQ ID NO: 41044 - protein, 246 aa, Unknown
  Obtained from environmental sample
  misc_feature (1)..(246): Xaa is any amino acid
MFRITTSTILITVENNNDGGNYDNSYNNGVEGNTLDPIILSMRERQMKNYFATLLTSLGTPMLLGGDEIGRTQKGNNNAYCQDNEISWYDWTFLEKNKTLYRFAKEMIAFRKRHPGFMRPEFFTGRGGDYKGIPDISWFNEKGKSPVWEDIGYFLALRLYGSKAEIFGDRDENDFYLMFNASHDTQGFLLAEPPPKKEWLRVVDTGLHSPNDILLPGNEKALPSQHVYPVKARSLTILISKEINHG

SEQ ID NO: 41045 - DNA, 615 bp, Unknown
  Obtained from environmental sample
  misc_feature (1)..(615): n is a, c, g, or t
atggataacagcaggtttataatcggcgttgatcttgacggcgtggtaggcgacttttacggggcgatacgaaaaatcgccgccgaatggcttaacaaaccaatggaagcccttacgcctgaagtttcctacggcctgcaggaatgggggattgacgagttcggcggctacgacagactccaccgttttgccgtaacacagaggaacattttccgcgacatgttacctatagaaaacgcgcccgttattcttcgaaaactttcaagacagaacatacgaatccgtatcataacgcaccggctcttcctaaaatattcgcaccgcacttcaatccggcaaaccgtagactggctggacaactacgacattccctactgggacatctgtttcatgaacgacaagggggcggtcggcgctcatatctacattgacgacgctccagaaaacataatcggccttcgcaaacagggatgtaaaacaatcgtattcaacaattccactaaccgcggcttgcccggtccccgcgccaataactggctggaagttgagcgcatggtaatggaagcccttgaggagtggaataccggcactataggcttgtttaccgacgcttaa

SEQ ID NO: 41046 - protein, 204 aa, Unknown
  Obtained from environmental sample
  misc_feature (1)..(204): Xaa is any amino acid
MDNSRFIIGVDLDGVVGDFYGAIRKIAAEWLNKPMEALTPEVSYGLQEWGIDEFGGYDRLHRFAVTQRNIFRDMLPIENAPVILRKLSRQNIRIRIITHRLFLKYSHRTSIRQTVDWLDNYDIPYWDICFMNDKGAVGAHIYIDDAPENIIGLRKQGCKTIVFNNSTNRGLPGPRANNWLEVERMVMEALEEWNTGTIGLFTDA

SEQ ID NO: 41047 - DNA, 393 bp, Unknown
  Obtained from environmental sample
  misc_feature (1)..(393): n is a, c, g, or t
ttgtnnnnnnngggattatggccganagctgtattccttattaaaatgggatttaaagaaaacttaaagtctgagttagcttataaagacatgatgataaaagagcttgccgccaaaacaggcataagccggcacactctggataattactttaatattcgtgaacatacccccactcttgacgcggctgtaaaaatagcccaggccttgggtgtttccgtggaataccttgcgacaggcaaggaatctccttatgcgaatattcccatgaacggcgaaatccgtaatctgctgcaaaattacaaactgctgaatgaggaagaccgaaaaatagtaaccgagtttgtggaattactcaaaaaacaccgccgtaaaagacaaactccccagtaa

SEQ ID NO: 41048 - protein, 130 aa, Unknown
  Obtained from environmental sample
  DOMAIN (22)...(77): Helix-turn-helix
  misc_feature (1)..(130): Xaa is any amino acid
MXXXGLWPXAVFLIKMGFKENLKSELAYKDMMIKELAAKTGISRHTLDNYFNIREHTPTLDAAVKIAQALGVSVEYLATGKESPYANIPMNGEIRNLLQNYKLLNEEDRKIVTEFVELLKKHRRKRQTPQ

SEQ ID NO: 41049 - DNA, 522 bp, Unknown
  Obtained from environmental sample
  misc_feature (1)..(522): n is a, c, g, or t
ttggagggagacgaatttatgaccctccttgaggagctaaagggcggtttttcggttatgactaagacaatcgcgccctgcatagaacgcgcggtcaggtttaagggccgcattgtcgaggaagatccttttgagaagggaagccggcgcatgctgcttaaccttggccatacctttggccacgcgttggaagcctccgtcgggctggggcgcgtatcgcatggggaagcggtcgcctggggcattgcgcgttcctgcgaactgggcctggctttgggcgtctgcccgccggcgagggcaaaaagaataatgtcgctcttaaaagcctttgattatgaaaccgcggcttctgccgcgggcgctgaattaatacaggctctgggcagtgataaaaagaaacgccggggaaagcttatttttatcgtccccgatgaaaaaagcgccaggcccataaccgcggatagccttgagtttatggataccgtcggtcggattatcaaaggagaaatatcatttctataa

SEQ ID NO: 41050 - protein, 173 aa, Unknown
  Obtained from environmental sample
  DOMAIN (2)...(134): 3-dehydroquinate synthase
  misc_feature (1)..(173): Xaa is any amino acid
MEGDEFMTLLEELKGGFSVMTKTIAPCIERAVRFKGRIVEEDPFEKGSRRMLLNLGHTFGHALEASVGLGRVSHGEAVAWGIARSCELGLALGVCPPARAKRIMSLLKAFDYETAASAAGAELIQALGSDKKKRRGKLIFIVPDEKSARPITADSLEFMDTVGRIIKGEISFL

SEQ ID NO: 41051 - DNA, 684 bp, Unknown
  Obtained from environmental sample
  misc_feature (1)..(684): n is a, c, g, or t
ttggccgaggcatggcccctggatgattttcgcaagggcccgttcatgaacttcagccattcgctgggttttgaaaaaatcgactggcatgccaattaccgcgagggcctgtccgtctctatgggtaattcatatcaatatgattttcatcagatgttttattccgtttctttggatatcaccggaattggacaccatattatcagagacttctttgccgtctcctcaaggttcatgtataaatactggcactcttccgacgaatcgtgggagggggagtatgtcagctattatttacgcggagtcgcagataaatccatcaccgcgtaccagatgttttcattaaacatggatttccctttccggatgtttgtctttacgccttcacaatggtttaataaccggaacctcagtttcttcgattttgaaatgcatgcctctcccgttattgatctggccgtgtattaccaaagaggttttgacaaggaaaaactcctgtattaccccggagaaacagccgctacgggcggcattgaattggtgatatttccggcttttatgcggaatttgtacgtgcgcctgggttttgccataaatctgaaggagtttataaccgcgcggccgctcaggcttcctgtcggcgatgaccgggaaatatatttaattatggggcatttcttttaa

SEQ ID NO: 41052 - protein, 227 aa, Unknown
  Obtained from environmental sample
  misc_feature (1)..(227): Xaa is any amino acid
MAEAWPLDDFRKGPFMNFSHSLGFEKIDWHANYREGLSVSMGNSYQYDFHQMFYSVSLDITGIGHHIIRDFFAVSSRFMYKYWHSSDESWEGEYVSYYLRGVADKSITAYQMFSLNMDFPFRMFVFTPSQWFNNRNLSFFDFEMHASPVIDLAVYYQRGFDKEKLLYYPGETAATGGIELVIFPAFMRNLYVRLGFAINLKEFITARPLRLPVGDDREIYLIMGHFF

SEQ ID NO: 41053 - DNA, 1215 bp, Unknown
  Obtained from environmental sample
  misc_feature (1)..(1215): n is a, c, g, or t
ttgaaaatggaaaatattgatattgccgttaatcttgcaagtattgcaaaaaacgcctcgcttgagcttagaactttgagttcggagcttcgcaatagggctttgcaaaaagtggctgtttccattcgcgctaatgaggcaaagattatagaagagaataaaaaagatgtggaagcggcaaaagaaagcggactctctagctatatgatagaccgcctttctcttaactcaaaacgcatagaagatatggcgcgtggtgtagaagaaatagcttcttttgcagaccctcttggcaaagttctagaacacagaaccttaaaaaacggcatagacattagccgcattagcgttccgcttggggcaattttctttatttacgaaagccgccccaatgttactatagatggtgcagctctgtgctttaaagctggaaatgccgttattttgcgtgggggcaaggaatccgtgcattcaagctcttttctctcaaaactattttgccaagccattgctgaagaaggcatttcaaaaaatgcggttcaatacatagacaacccagaccgtgatttgctcgcctgcttgctaaagcagaataattatttggatttggttatacccagaggtggagagggtttaataagggctgtgagtgaacaatcaaaaattccggtgataaagcatttcaatggaatttgccacgtttatatagacaaaagcgcagatttggaaaaagccgcgagcattttatataacgcaaaagtacaacgcccaagcgtatgcaatgccgcagaaaccgtgcttttccacaaggagttgcctagtgaagcagtagagaaagttttggctccattaaaagaagctggcgtaaaatttcattacgataaatttggaatagaatatttggatttgcaaatttcagttggttatgtgaatggggttaaggaagcctgcgagcatatagaaaaatatggcagccaccacacagatgcaatagttgcagaagatagcgaggcacttgcatattttgcaaacaatgttgatagctccagcgttatgctgaatgcgagcactcgttttgcagatggtggcgaatatgggttgggtgcagaggttggaatttccaccgataaactgcacgcaagaggtcctatgggtgtggaaagcctttgcagctacaaatggttgttaaagggtaatgggcaggtgagagggtag

SEQ ID NO: 41054 - protein, 404 aa, Unknown
  Obtained from environmental sample
  DOMAIN (2)...(395): Aldehyde dehydrogenase family
  misc_feature (1)..(404): Xaa is any amino acid
MKMENIDIAVNLASIAKNASLELRTLSSELRNRALQKVAVSIRANEAKIIEENKKDVEAAKESGLSSYMIDRLSLNSKRIEDMARGVEEIASFADPLGKVLEHRTLKNGIDISRISVPLGAIFFIYESRPNVTIDGAALCFKAGNAVILRGGKESVHSSSFLSKLFCQAIAEEGISKNAVQYIDNPDRDLLACLLKQNNYLDLVIPRGGEGLIRAVSEQSKIPVIKHFNGICHVYIDKSADLEKAASILYNAKVQRPSVCNAAETVLFHKELPSEAVEKVLAPLKEAGVKFHYDKFGIEYLDLQISVGYVNGVKEACEHIEKYGSHHTDAIVAEDSEALAYFANNVDSSSVMLNASTRFADGGEYGLGAEVGISTDKLHARGPMGVESLCSYKWLLKGNGQVRG

SEQ ID NO: 41055 - DNA, 600 bp, Unknown
  Obtained from environmental sample
  misc_feature (1)..(600): n is a, c, g, or t
atgcatttctgccacctctccaccaaagccttgggtggaggcccctgcgcgccgccccgggaccggggcctctccgtcaccggcgaaaccgccccccactacctgtttctgacccacgaagacgtgggggattacgaccccaacgccaagatgaagccgcccctgggcacggctgaagaccaggccgccctgcgggccgccctggccgacggcgtcctgtcggccatagccaccgaccatgccccccacggcgtcctggaaaaagaggtggaattcatcgacgcggccttcggcatcatcggcctggagacggccctgcccctggccttggaactcacgcgttccgggctcataaccatctccaggctggcggaactcatgtcccttaacccggcccgcatactgggcgtgcctggcggcagtctggccccgggccggccggccgacataaccgtggtggatcccgacctccgcttcaccctggagccttccgaatccagatccctgagccgcaattcgcccttctggggccggcccctgcaaggccgggccacccacaccatagtggacggcaagctggtcttcgagcttgcggattaa

SEQ ID NO: 41056 - protein, 199 aa, Unknown
  Obtained from environmental sample
  misc_feature (1)..(199): Xaa is any amino acid
MHFCHLSTKALGGGPCAPPRDRGLSVTGETAPHYLFLTHEDVGDYDPNAKMKPPLGTAEDQAALRAALADGVLSAIATDHAPHGVLEKEVEFIDAAFGIIGLETALPLALELTRSGLITISRLAELMSLNPARILGVPGGSLAPGRPADITVVDPDLRFTLEPSESRSLSRNSPFWGRPLQGRATHTIVDGKLVFELAD

SEQ ID NO: 41057 - DNA, 564 bp, Unknown
  Obtained from environmental sample
  misc_feature (1)..(564): n is a, c, g, or t
ttggccgtgatcttggccgtgcttatccgctccttcctcttccaggccttccagataccttcaggctccatgatccccacttttctggaaggggaccgggtgctggtggaaaaattcacctacggcctccgcaatccctggaacaaccggctctggcttgaaaccggccggcccgagcgctgggatgtggtggtcttcatctcgcccgaggaccacgacaaggattttgtgaaaagagtggtgggcctgcccggggagaccgtggccctggctgggggcgaacttttcatcgacggccgccaggtcgaggatccttacgggcactacgacccccgttccatttcgcccctgcgcgaccggccgcccctgcggctcggcgaaaaccagtatttcatgatgggcgacaaccgcgaccattccagcgattcccgggcctggggcccggtggatttcgaccttttgagaggccgggcctggcgcctctactggtcctgggattcccgtgaaggcctgaatcttggcgatcgcctccgcgtcggccgggtaggccaaaaggttgaatga

SEQ ID NO: 41058 - protein, 187 aa, Unknown
  Obtained from environmental sample
  DOMAIN (18)...(100): Peptidase S24-like
  misc_feature (1)..(187): Xaa is any amino acid
MAVILAVLIRSFLFQAFQIPSGSMIPTFLEGDRVLVEKFTYGLRNPWNNRLWLETGRPERWDVVVFISPEDHDKDFVKRVVGLPGETVALAGGELFIDGRQVEDPYGHYDPRSISPLRDRPPLRLGENQYFMMGDNRDHSSDSRAWGPVDFDLLRGRAWRLYWSWDSREGLNLGDRLRVGRVGQKVE

SEQ ID NO: 41059 - DNA, 561 bp, Unknown
  Obtained from environmental sample
  misc_feature (1)..(561): n is a, c, g, or t
atgaacgaggcggtcagcataatgcagcgggtgcgggagcttgccgtgcagggatccaacggaacctattcgcccgaagacctcaaattgatgggagtagaggtcaacgaattgatcaaagagctggcatcccttgccaatactgtcgggccggacggtaaacaggtgtttgcgggggacaaagcgtttaccgaaccgttccgcattgtagaaggcacgatagacggcggcaatgaaagcgttgtcgtcagggtggagtaccggggggcgggagcctcgcggaaaaccgaagtcagcgatcatgcctatatcgatcttgatctgggcggcggtgaagttttctgggcggaaaaaatgcagattttttccaacgtcaacgcgtcaaattaccgggttagtacccccggatcgttctttatagacggggaggagattcaggtaatccccggcgacactctgccctcaatcgtggcaaagataaatgattccggcgcaccggtcaaagcgtatattgatcctgaaaccaggggcttgtgctggagggaaccaacccccatctaa

SEQ ID NO: 41060 - protein, 186 aa, Unknown
  Obtained from environmental sample
  misc_feature (1)..(186): Xaa is any amino acid
MNEAVSIMQRVRELAVQGSNGTYSPEDLKLMGVEVNELIKELASLANTVGPDGKQVFAGDKAFTEPFRIVEGTIDGGNESVVVRVEYRGAGASRKTEVSDHAYIDLDLGGGEVFWAEKMQIFSNVNASNYRVSTPGSFFIDGEEIQVIPGDTLPSIVAKINDSGAPVKAYIDPETRGLCWREPTPI

SEQ ID NO: 41061 - DNA, 492 bp, Unknown
  Obtained from environmental sample
  misc_feature (1)..(492): n is a, c, g, or t
gtgctggagggaaccaacccccatctaatccgcgccgaagacgcggtttccaaagacggcgaagggccgacggtgctgaaagacctcgggattatccgggggaatatggtgaacaacgccccgaattgggacactacacgatcccttatttcgggcggctcaatgtttgatatgctcatacgtctgcgcgacgcgttgtaccgcggcgaccaggattttatcggcagtcaggggattggcggcatggacctcgcgataagcaatctgaccacgcgcatggccgacataggcagccgccaggaaagggcagagtttgtctggcagaggcttaacaaagaaatccccgacgttacagccaacattgtccgcgaatcctccgttgatatgactgacgccgcgacaaccctcaagttcctggagttcgccaacaaggcaagcgttcagactgcggcgcgtcttctgccggtgtcgcttcttgattttctaaggtag

SEQ ID NO: 41062 - protein, 163 aa, Unknown
  Obtained from environmental sample
  misc_feature (1)..(163): Xaa is any amino acid
MLEGTNPHLIRAEDAVSKDGEGPTVLKDLGIIRGNMVNNAPNWDTTRSLISGGSMFDMLIRLRDALYRGDQDFIGSQGIGGMDLAISNLTTRMADIGSRQERAEFVWQRLNKEIPDVTANIVRESSVDMTDAATTLKFLEFANKASVQTAARLLPVSLLDFLR

SEQ ID NO: 41063 - DNA, 321 bp, Unknown
  Obtained from environmental sample
  misc_feature (1)..(321): n is a, c, g, or t
ttgaagatagcgaccaaagcttacggcctgattgacgttgatgaacgccaaaagatcgtctttccacagggcctgtttggttttgagaaactgaaagactacctgctccttgacgctgaacgccagcctttttactggctgcagtcaatggatgaggaagatgtggcattttgtccttgttacccttttctttttccggccgattacgangttaacgtcagtaaacgagaagttgacgggataggcatccgttcaccggaaaaagttctgatttttttcctaaaaacccataccgcaggacggcagccccatgacagctaa

SEQ ID NO: 41064 - protein, 106 aa, Unknown
  Obtained from environmental sample
  DOMAIN (17)...(104): Uncharacterized BCR, COG1699
  misc_feature (1)..(106): Xaa is any amino acid
MKIATKAYGLIDVDERQKIVFPQGLFGFEKLKDYLLLDAERQPFYWLQSMDEEDVAFCPCYPFLFPADYXVNVSKREVDGIGIRSPEKVLIFFLKTHTAGRQPHDS

SEQ ID NO: 41065 - DNA, 363 bp, Unknown
  Obtained from environmental sample
  misc_feature (1)..(363): n is a, c, g, or t
atgtatcagatcggccgagccggctggagctactcggcggcaatagcggaagcggccggcaaggcggcgttggcgaaagctgccgcggcaaggccctcggagcccgtagacgtggaggcgattcttgaagccgccgttaaggccaagggcataaagctgaactggcgcgtatctatagtcgatttgatgaaggcgctcgatctggacagcagtctggcggcgcgcaaagaactggccgctgaactgaaatacaccggcaccgatcccgacggttccgctgaaaagaacatgtggctgcacaagacgctaatgaagacgctcgccgaaaacggcggcaagattccgaaggaactgctgagttaa

SEQ ID NO: 41066 - protein, 120 aa, Unknown
  Obtained from environmental sample
  misc_feature (1)..(120): Xaa is any amino acid
MYQIGRAGWSYSAAIAEAAGKAALAKAAAARPSEPVDVEAILEAAVKAKGIKLNWRVSIVDLMKALDLDSSLAARKELAAELKYTGTDPDGSAEKNMWLHKTLMKTLAENGGKIPKELLS

SEQ ID NO: 41067 - DNA, 1767 bp, Unknown
  Obtained from environmental sample
  misc_feature (1)..(1767): n is a, c, g, or t
ttggccgagcccacaaaattcgagcgggatgccaaatggttaatgatcacccgcttattttatcagttatggcatggcacaactttacagcgtagcgaaaacattaattacccggcggaagggctgtgttttgtcacaagcgaggggtatatcctttgcaaccccaaactccgggccgaacctgagcaatgggcgcgggcattggctcattgcctgttgcatttgggcatggatcattttaaagaaaaagaaaatccggtgttatggaacatagcctgcgattgtgttgttgaaaaattcttggctgatctaaaatttggaaagtcgttacttgacgggtcgttaccggtgggaatcaacgacgaggagcggctttaccgtcgtctgctggaatcacctaataatatggaatatggcggctttggcacggcgggagcttccgtgcctgatatgctgttcgaaaaaaaaccacgataccgctacttcaataaaccgccactgtggacaaaattgttttctgccgggttgtctgccgccgtgcgcagcgccgttcgcgtggcttccggcgaacagaaaactctttccaacaacccggatgaatccgtaaacagcgctgcctaccgtgccaaacaatggtttatttcaaactatccattgttgggggccattgcttccaattttaaagtaattgaagacttttccgtatgccagcgcatggaaatcaccgttgcggcggtttctccctctttgtcggaaatatatattaatccttcataccctttagacgcggaggagattcgttttgtaatggcgcatgagtttcttcacgccgccttacgccacgatgtccggaaggaatggcgggacgcatatctttggaatgtggcctgcgattatgtgatcaatatgtggctgaccgagatgggtgtaggcgaacgtccgagtagcgtgttatatgacgaacagttcaaaggcatgaacgctgaagctatatatgaccgtatcgttagcgatatgcgcacatatcgtaaacttgccactctgcgaggcgtcggcttgggtgatattatacccggtgaacgcagtcactccgcagatattgatttggatgctttttatcgccggtcgctgtcacaggggctttattatcatcaggagcagggacgcggatatttaccggagggcttgattgaagaaatccgagcgctatcccacccgcccattccgtgggatgtggaacttgccccgtggtttgacgaacactttattcctgtcgaaaagatccgctcttatgcccggccaagccgccgtcagtcatccacacccgacattccgcgcccgaattgggttgtttcgcgtatggcgatggacggccgaactttcggtgttgtgctggacacatccgggtcaatggagcgggaactgctggcaacggccttgggcgctatagccagttacagcgccgtgcgggatgtgccggcggcgcgtgtagtgttttgtgacgctgaagcctatgacgcgggttatatgaaaccggaagacatcgccggaaccgttaaggtgaaaggacgcggaggcacggtgcttcaacctggcattgatttattaaacaaatcggaagattttcctaaagaagcaccaatcttaataataaccgacggctattgcgataaagtgattcttcacggcagagaacacgcgtttctggttccgcaaggcgcgattcttccctttgaaccaaagggaaaggtatttaggttgaaataa

SEQ ID NO: 41068 - protein, 588 aa, Unknown
  Obtained from environmental sample
  misc_feature (1)..(588): Xaa is any amino acid
MAEPTKFERDAKWLMITRLFYQLWHGTTLQRSENINYPAEGLCFVTSEGYILCNPKLRAEPEQWARALAHCLLHLGMDHFKEKENPVLWNIACDCVVEKFLADLKFGKSLLDGSLPVGINDEERLYRRLLESPNNMEYGGFGTAGASVPDMLFEKKPRYRYFNKPPLWTKLFSAGLSAAVRSAVRVASGEQKTLSNNPDESVNSAAYRAKQWFISNYPLLGAIASNFKVIEDFSVCQRMEITVAAVSPSLSEIYINPSYPLDAEEIRFVMAHEFLHAALRHDVRKEWRDAYLWNVACDYVINMWLTEMGVGERPSSVLYDEQFKGMNAEAIYDRIVSDMRTYRKLATLRGVGLGDIIPGERSHSADIDLDAFYRRSLSQGLYYHQEQGRGYLPEGLIEEIRALSHPPIPWDVELAPWFDEHFIPVEKIRSYARPSRRQSSTPDIPRPNWVVSRMAMDGRTFGVVLDTSGSMERELLATALGAIASYSAVRDVPAARVVFCDAEAYDAGYMKPEDIAGTVKVKGRGGTVLQPGIDLLNKSEDFPKEAPILIITDGYCDKVILHGREHAFLVPQGAILPFEPKGKVFRLK

SEQ ID NO: 41069 - DNA, 321 bp, Unknown
  Obtained from environmental sample
  misc_feature (1)..(321): n is a, c, g, or t
atgcagtttgcaaaggacgatgactttttgaaaaacgcgtttgtaatggccaaacatcatcacgaaaagtggaacggcagcggctatcctgacggtaaaaaggaaaaagaaatacctcttcttgcgcgtgtaatcgccattgccgatgtttatgacgcattgcgttcggaacgcgcatataaatcgccgttcagccgcgagaaagcaaaatcaatcatattggaagagaatggaattcagttcgatcctgagctggttgatgtttttttagcggtagaacaggagttagacgagttttgtgagtctgttaaaaaagggtga

SEQ ID NO: 41070 - protein, 106 aa, Unknown
  Obtained from environmental sample
  misc_feature (1)..(106): Xaa is any amino acid
MQFAKDDDFLKNAFVMAKHHHEKWNGSGYPDGKKEKEIPLLARVIAIADVYDALRSERAYKSPFSREKAKSIILEENGIQFDPELVDVFLAVEQELDEFCESVKKG

SEQ ID NO: 41071 - DNA, 420 bp, Unknown
  Obtained from environmental sample
  misc_feature (1)..(420): n is a, c, g, or t
atgaaaaccattctgaaaaaaaattacatttttgtcgccgccgccgtattgattgtatccgcttattttataggcggagtccttatttacgctaacagacagtataacgcgatcaatagggaaaatatggaggaggcggtgaatattataaaacggtttacaccgcccgaagttttcacggataacgacgcggcggagcggtggatttcacgtttggatatttccggcaaataccgcataacgttaatcagcaggaacggacgggttattttcgatacggaagcggacagcgcgaatattgagaatcatctggaccggcccgaattccaggatgccgtaaaaaacggccattggaaacgccatccgccgttccgctactttgggaaaatattatatttacaccgccgccgccatttatga

SEQ ID NO: 41072 - protein, 139 aa, Unknown
  Obtained from environmental sample
  SIGNAL (1)...(25)
  misc_feature (1)..(139): Xaa is any amino acid
MKTILKKNYIFVAAAVLIVSAYFIGGVLIYANRQYNAINRENMEEAVNIIKRFTPPEVFTDNDAAERWISRLDISGKYRITLISRNGRVIFDTEADSANIENHLDRPEFQDAVKNGHWKRHPPFRYFGKILYLHRRRHL

SEQ ID NO: 41073 - DNA, 702 bp, Unknown
  Obtained from environmental sample
  misc_feature (1)..(702): n is a, c, g, or t
ttgagcgctgagcggatactgatcatcgaagatgatcctgaaatacaggaaatgcttaaattcgcctttgcccgcgaaggatggcagcttattctggtttcaacaggggaggaagggcttaaaatgcttcaggacaaagaagcggattgtattattctggacgtaatgcttccgggtatggacggccttaaatcccttaaaaaaatacgcgaaaataaaagcctgcaaaccctgccaataatcctgtgtaccgcacgcggcgaggaagccgatattatcgcgggccttgaattgggagcagatgattatgtggttaagccgtacagcccccgcgtattggctgccaggatacgggccgcgctcaggcgaaaagaggcggttgcgacacagggcgaaaccgcccaaaaaaaaattttccggcatgggaagctcagcctggacatcgacaggcatacggttcttctggaaaaaacccctctcgatcttttccccaccgaattcgcgattcttgtccagtttatgagcaaccccgatattgttttttcccgccaaaggcttatcaccgccatacacggaaacgattatcccgtaacggatcgttccattgacgtgcagataatgggattaagaaaaaaactgggggactcaggcgatatgatagaaaccatccggggtatcggttaccggtttaaaaccgaatag

SEQ ID NO: 41074 - protein, 233 aa, Unknown
  Obtained from environmental sample
  DOMAIN (157)...(230): Transcriptional regulatory protein, C terminal
  misc_feature (1)..(233): Xaa is any amino acid
MSAERILIIEDDPEIQEMLKFAFAREGWQLILVSTGEEGLKMLQDKEADCIILDVMLPGMDGLKSLKKIRENKSLQTLPIILCTARGEEADIIAGLELGADDYVVKPYSPRVLAARIRAALRRKEAVATQGETAQKKIFRHGKLSLDIDRHTVLLEKTPLDLFPTEFAILVQFMSNPDIVFSRQRLITAIHGNDYPVTDRSIDVQIMGLRKKLGDSGDMIETIRGIGYRFKTE

SEQ ID NO: 41075 - DNA, 657 bp, Unknown
  Obtained from environmental sample
  misc_feature (1)..(657): n is a, c, g, or t
atggaaagagttgtattgtctgaagaaatgaatcgaatcaagcgagagattgcgatcatggcagcaagggtggaagaagatttgggaaaagcccttgccgtccttcgctcgggcggagaggaactcgcacaggaaataaaagaaagcggcaggatcgttgataatctccagcttaaaattgaagatatggctatgattctgattgccacccagcagcctgttgccagtgatttacgggagcttataactgtttttaagattaccgcaaatcttgagcgcataggcgattacgggattcatctggtaaaagctgcgttgagattgtcaaaaatgcccactttccgttctgttgaaagaattgaacgcatggtagaaaccgcgatacttatgcttaaagacacgatttccgcttgccgtgagaaagattcggcctttgcgagaaaaaccgccgctcttgattccgcgatagatcaagagcataaagctcttaccaatgaactgcttggttgtattaaaaaacaaccaaattttgtgaaagccgccgcccgcttgctgagactttcaggtaatatggaacgtctgggagatcacattaccaatatctgtgaagggatcatttatatgatcgaaggcagtcgtgaggaattaaactattga

SEQ ID NO: 41076 - protein, 218 aa, Unknown
  Obtained from environmental sample
  DOMAIN (120)...(205): PhoU family
  misc_feature (1)..(218): Xaa is any amino acid
MERVVLSEEMNRIKREIAIMAARVEEDLGKALAVLRSGGEELAQEIKESGRIVDNLQLKIEDMAMILIATQQPVASDLRELITVFKITANLERIGDYGIHLVKAALRLSKMPTFRSVERIERMVETAILMLKDTISACREKDSAFARKTAALDSAIDQEHKALTNELLGCIKKQPNFVKAAARLLRLSGNMERLGDHITNICEGIIYMIEGSREELNY

SEQ ID NO: 41077 - DNA, 708 bp, Unknown
  Obtained from environmental sample
  misc_feature (1)..(708): n is a, c, g, or t
atgaagcgttttccaagtcgtgagggtgaaagtccgcgctccatgtcctttactattttcaggtatatcctcggcgaggcgtttttttcttttttaatatcatttctttttttcttttttatttttttcgtgaaccagctccttttaatggcccaggacattttgtccaaacaggttccctttgggcaggttgcccttttggttctgttttctttgccttctgttgtagcgttgtccaccccttttgcttcccttgttggtcttttgatgactgtagggcggctttcaagcgataatgagattctggtatttctgtcgtccgggctttctttcaggaatgtgtttatacccgcaatagtcgtaggtattgttatttccattctttcttttattgccaatgatatactgcttcccggaggttatgtgcaatttgcccagttatacaggcgcatacttgtttccactccggcgctggaactggaggcaaactcggtaaaaaaattcaagaacacggtgatagtcaccggtaacgtgacaggtaacgctatcgacaatgtgttgatattggacaagaccagcgacggcgagcgccgcgttatcatggcggctaacgccgaaatgaaagacgccggcaagagcggcctgagccttgatcttgacagggcttttgtacaatcctcaaaggaaattgcccgcgggggattatga

SEQ ID NO: 41078 - protein, 235 aa, Unknown
  Obtained from environmental sample
  misc_feature (1)..(235): Xaa is any amino acid
MKRFPSREGESPRSMSFTIFRYILGEAFFSFLISFLFFFFIFFVNQLLLMAQDILSKQVPFGQVALLVLFSLPSVVALSTPFASLVGLLMTVGRLSSDNEILVFLSSGLSFRNVFIPAIVVGIVISILSFIANDILLPGGYVQFAQLYRRILVSTPALELEANSVKKFKNTVIVTGNVTGNAIDNVLILDKTSDGERRVIMAANAEMKDAGKSGLSLDLDRAFVQSSKEIARGGL

SEQ ID NO: 41079 - DNA, 645 bp, Unknown
  Obtained from environmental sample
  misc_feature (1)..(645): n is a, c, g, or t
ttgatcttgacagggcttttgtacaatcctcaaaggaaattgcccgcgggggattatgactacgcgtccgccgggaatcttaactactgggttcctcaggaggatcttatccaggccgtgtcctcggtaagcccccgtgagatgagttccattgatgtgtataaggagataaaaaagagaaccattgatcttaacaaccgcatgaatgagaaacggaacaaggttagttctctggcttttgcttttgagaacagcctgcgcgcaggaccctcttcccatgaatggaaccgcagaacaaatcaatttaccgctttccagcgggaagctcaggcgcttcagggtatgagtaaagaccggggcctttcgctgtattggctggaattctataaaaaattctccatgccgttcggggctttctcatttatcttcctttcggtcgcgttggggcttatggcaaagagaagcggtcagacagtcggctttatttttggactgatcatttcggtaatatactgggctctgcttttgggcggacagaccatgggaataaggctgagcactcccccattttggtcaatgtggctgccaaatattctcgcgctgtcgatcgggcttgttctgacggttatcaaggtaacacgatga

SEQ ID NO: 41080 - protein, 214 aa, Unknown
  Obtained from environmental sample
  misc_feature (1)..(214): Xaa is any amino acid
MILTGLLYNPQRKLPAGDYDYASAGNLNYWVPQEDLIQAVSSVSPREMSSIDVYKEIKKRTIDLNNRMNEKRNKVSSLAFAFENSLRAGPSSHEWNRRTNQFTAFQREAQALQGMSKDRGLSLYWLEFYKKFSMPFGAFSFIFLSVALGLMAKRSGQTVGFIFGLIISVIYWALLLGGQTMGIRLSTPPFWSMWLPNILALSIGLVLTVIKVTR

SEQ ID NO: 41081 - DNA, 1635 bp, Unknown
  Obtained from environmental sample
  misc_feature (1)..(1635): n is a, c, g, or t
atggcttccgtaaatgaaatgctggtcatgaccgtcatcatcagcggcatcgtactcgcagttgcaagcgcggcggcgataatcctgtccggaaccatcagcaagcccattgtgaaggtgacagaaacactaaaggatatttccgagggtgaaggcgatttgacacgggttattgcctcaggctcaaaagacgagatcggcgatcttgcccgtttcttcaatcagactttggcgaaaatcagaaatcttgtggcaaacataaaaagggaagctcttaaactgtccgagattggtacggatctgtccagtaatatgacggagacagccgcggcggtaaacgaaattacagccaatattcagaacataaaagggcaggtgataaaccaaagcgccagcctgaacgaaacgaacgccaccatgaaacaggttgttgtaaatatcaacaaactcaacagccatattgaaaaccagagcgataatgtaagccaggcttcgtctgccattgaggaaatagcggcaaatatcaattcggttacctctacccttatcaacaacgcggacaatgttaaaacattacaggaatcttcggaaattgggcggaagggattgcaggaagtcgtatcaaatattatggagatcgcccacgactcggaggggcttctggagattaattcagtgatgaacaatatcgccagccaaaccaatttactgtcgatgaacgccgccattgaagcggcgcacgccggagaatccggaaaaggttttgccgttgtagccgatgaaatacgcaaacttgccgaatcatcgagtaaacaatcaaaaaccactgcggcaatgctcaagaaaataaaagcctccatagatagcattaccaaatcctccgacgatgtattgacgcgttttggcgctatagactcaagcgttaaaacagtttcactgcatgaacaaaatatccttaacgcaatggaagaacaggaaaaaggcggaaagcagatattggaatcaataagccggctgcgggacataacgtactcggttaagaaagggtctgacgatatggaacaatcaggcggcacattggtaaaagaaacagacgcattcataaaaatcagtcaagaaacagtacaaggcatgaatgaaatactgacgggcattaatcagataaatgtttcggttaaccatgtcaatgaaatgagtcttgaaaacaacaaaaactttgaatccttaaaaaatgagacggaaaaatttaacgacactgtcggaaatgaaaagaaaaaaatcctcatggtagatgacgacactatccatcttgaaatggtggatagtgtattacggaatgagtatgacataaccacagccaaatcgggcaaagaagcgctgggcttattctatcagggacttgttcctcagttaattttgctggatttgataatgccgggtatggacggatggaatacatacagcagaataaaagcgataggcggcttgcatgataccccgatagcgtttttcactgtttctgacgatccaagagatataaaaaaggcgcaagaaatgggggcggttgattatatcaaaaagccatttaatgcggatgatctgaaaaacaggataagaaagatactcaaaaattaa

SEQ ID NO: 41082 - protein, 544 aa, Unknown
  Obtained from environmental sample
  SIGNAL (1)...(25)
  DOMAIN (155)...(369): Methyl-accepting chemotaxis protein (MCP) signaling domain
  misc_feature (1)..(544): Xaa is any amino acid
MASVNEMLVMTVIISGIVLAVASAAAIILSGTISKPIVKVTETLKDISEGEGDLTRVIASGSKDEIGDLARFFNQTLAKIRNLVANIKREALKLSEIGTDLSSNMTETAAAVNEITANIQNIKGQVINQSASLNETNATMKQVVVNINKLNSHIENQSDNVSQASSAIEEIAANINSVTSTLINNADNVKTLQESSEIGRKGLQEVVSNIMEIAHDSEGLLEINSVMNNIASQTNLLSMNAAIEAAHAGESGKGFAVVADEIRKLAESSSKQSKTTAAMLKKIKASIDSITKSSDDVLTRFGAIDSSVKTVSLHEQNILNAMEEQEKGGKQILESISRLRDITYSVKKGSDDMEQSGGTLVKETDAFIKISQETVQGMNEILTGINQINVSVNHVNEMSLENNKNFESLKNETEKFNDTVGNEKKKILMVDDDTIHLEMVDSVLRNEYDITTAKSGKEALGLFYQGLVPQLILLDLIMPGMDGWNTYSRIKAIGGLHDTPIAFFTVSDDPRDIKKAQEMGAVDYIKKPFNADDLKNRIRKILKN

SEQ ID NO: 41083 - DNA, 747 bp, Unknown
  Obtained from environmental sample
  misc_feature (1)..(747): n is a, c, g, or t
atgaatgcgtctgtttcttttaccaatgtgccgcctgattgttccatatcgtcagaccctttcttaaccgagtacgttatgtcccgcagccggcttattgattccaatatctgctttccgcctttttcctgttcttccattgcgttaaggatattttgttcatgcagtgaaactgttttaacgcttgagtctatagcgccaaaacgcgtcaatacatcgtcggaggatttggtaatgctatctatggaggcttttattttcttgagcattgccgcagtggtttttgattgtttactcgatgattcggcaagtttgcgtatttcatcggctacaacggcaaaaccttttccggattctccggcgtgcgccgcttcaatggcggcgttcatcgacagtaaattggtttggctggcgatattgttcatcactgaattaatctccagaagcccctccgagtcgtgggcgatctccataatatttgatacgacttcctgcaatcccttccgcccaatttccgaagattcctgtaatgttttaacattgtccgcgttgttgataagggtagaggtaaccgaattgatatttgccgctatttcctcaatggcagacgaagcctggcttacattatcgctctggttttcaatatggctgttgagtttgttgatatttacaacaacctgtttcatggtggcgttcgtttcgttcaggctggcgctttggtttatcacctgcccttttatgttctga

SEQ ID NO: 41084 - protein, 248 aa, Unknown
  Obtained from environmental sample
  misc_feature (1)..(248): Xaa is any amino acid
MNASVSFTNVPPDCSISSDPFLTEYVMSRSRLIDSNICFPPFSCSSIALRIFCSCSETVLTLESIAPKRVNTSSEDLVMLSMEAFIFLSIAAVVFDCLLDDSASLRISSATTAKPFPDSPACAASMAAFIDSKLVWLAILFITELISRSPSESWAISIIFDTTSCNPFRPISEDSCNVLTLSALLIRVEVTELIFAAISSMADEAWLTLSLWFSIWLLSLLIFTTTCFMVAFVSFRLALWFITCPFMF

SEQ ID NO: 41085 - DNA, 654 bp, Unknown
  Obtained from environmental sample
  misc_feature (1)..(654): n is a, c, g, or t
atgctgactaaaattagttctattcttggcgttttattaaactccctgcgtttatttaaacggcgttttccgctcttagcttacataacaaacaggcttataaccatgttggtaatgctcttccttctgggatttgcggtctttggacttatggctcttgcccccggcgacattgttgaccagataatgatgcagcaaatgttcaacgaaaaccaagggaaggccgggcagaactggcagacgatgacggatgatcagcttgccgcccgaagaacggaactcggacttgacaaaccgttttaccaacagtactttctctggctcaaacgcgttattgttgagcataatcttggagtaagtttgatttcccgcgcgcctgtttcttttttgctttccacaagaataataaattcgctaattttaaatattatatcgctaatttttataactattttttcttttgcgctgggcgtttatttttccaccaaggctggaacaaaagccgattacgccgtaacttttttcgcacttgtgcttcatgccttccccggtttattacttcttatactactacagcttttcgcatccgtatcgggactttttcccgttacggcatacccgccattccttctcgcaagctctcggccgatctga

SEQ ID NO: 41086 - protein, 217 aa, Unknown
  Obtained from environmental sample
  misc_feature (1)..(217): Xaa is any amino acid
MLTKISSILGVLLNSLRLFKRRFPLLAYITNRLITMLVMLFLLGFAVFGLMALAPGDIVDQIMMQQMFNENQGKAGQNWQTMTDDQLAARRTELGLDKPFYQQYFLWLKRVIVEHNLGVSLISRAPVSFLLSTRIINSLILNIISLIFITIFSFALGVYFSTKAGTKADYAVTFFALVLHAFPGLLLLILLQLFASVSGLFPVTAYPPFLLASSRPI

SEQ ID NO: 41087 - DNA, 399 bp, Unknown
  Obtained from environmental sample
  misc_feature (1)..(399): n is a, c, g, or t
gtgggagactttttgcttgccgaaaaggatatgtttataacttatagcgaaagtcctgttttatcttctattattgtggttctggacagaaattcagcgcctcttcttatttcccggctttctcctgaagtagcagagtacctttctgcactaatggcccctgttgtgctgggcgaatatatgagttctgccgattacctaagccttgtaaccatgatctatggccgccctctggccgacgaaattgccggggctagaattaaagcgtctattgagtttccccgcgctgttacgtcagtaatagggggaagttccagcggaaggcgggctgaattcgatattccgcttttggatcttctggttatggaaaagccccttcagtacgagattaagtggtaa

SEQ ID NO: 41088 - protein, 132 aa, Unknown
  Obtained from environmental sample
  misc_feature (1)..(132): Xaa is any amino acid
MGDFLLAEKDMFITYSESPVLSSIIVVLDRNSAPLLISRLSPEVAEYLSALMAPVVLGEYMSSADYLSLVTMIYGRPLADEIAGARIKASIEFPRAVTSVIGGSSSGRRAEFDIPLLDLLVMEKPLQYEIKW

SEQ ID NO: 41089 - DNA, 1137 bp, Unknown
  Obtained from environmental sample
  misc_feature (1)..(1137): n is a, c, g, or t
ttggccgaagttttccatgccctgcttgtgagggcggaaaccggcgagcttccggcaagcgcgccgatagtcggcccggtaaacacaccgataagcgattcacaagatgaaatttgggcaggcgatttttcggaagtgcatggccagaagcgctacaagcgcgccctggaaatagccgccgccggaggacacaacctgcttgttttcggcccgcccggctcggggaaaacaatgctggcgcggcgcttcccttcgatcacgccgtctttgctgccggaagaagccgttgaggtaaccaggctccacagccttgcaaggcaggtttcaggcggagaaagcggccttatcaggcagccccctttccgctcaccccatcactcggcaagcaccgagggcgtacttgggggaggaagaaacatcaggccaggtgaaataaccctggcacactttggaacgctctttctggatgaagcgccggaattccgtactcctgtgcttcagtctcttagggaaccactggaggacaaggttatcaccatagtccgcgcggaaaacaaccataggctgcccgcggattttcagcttattctggcggcaaatagctgcccttgcggacgtctgggcgcggttttaccctccggcgatgagacggacgccgcctgctccattgacagcggctgcctctgctccgcagacgaaattcgccgctattggaaaaaactgggcggcgcgcttcttgaccggattgatcttagaattcccgtccgcgcccccggggtgctaaaacccgccggggaaggcgaggaaagaagcgaagaaataaggcaacgggttatcgaggctttagaaatacagagggagcggtttaagggcaacaatatacgccgcaattcgaggatgctgcaaggccaaattgacagatactgccaaatgacaaaaaaggcagaagaagctttcatccttgccgcggccaaactgggtttatcaggccgggcctgccacggcattcttaaaatttcccgtacaatagccgaccttgaaaaaaaagaccttattgataccgttcacgttctggaggccgttcagcaccgccgctttggagacgacccctacgatattctttcatttgaaagctaa

SEQ ID NO: 41090 - protein, 378 aa, Unknown
  Obtained from environmental sample
  DOMAIN (42)...(263): Magnesium chelatase, subunit ChlI
  misc_feature (1)..(378): Xaa is any amino acid
MAEVFHALLVRAETGELPASAPIVGPVNTPISDSQDEIWAGDFSEVHGQKRYKRALEIAAAGGHNLLVFGPPGSGKTMLARRFPSITPSLLPEEAVEVTRLHSLARQVSGGESGLIRQPPFRSPHHSASTEGVLGGGRNIRPGEITLAHFGTLFLDEAPEFRTPVLQSLREPLEDKVITIVRAENNHRLPADFQLILAANSCPCGRLGAVLPSGDETDAACSIDSGCLCSADEIRRYWKKLGGALLDRIDLRIPVRAPGVLKPAGEGEERSEEIRQRVIEALEIQRERFKGNNIRRNSRMLQGQIDRYCQMTKKAEEAFILAAAKLGLSGRACHGILKISRTIADLEKKDLIDTVHVLEAVQHRRFGDDPYDILSFES

SEQ ID NO: 41091 - DNA, 648 bp, Unknown
  Obtained from environmental sample
  misc_feature (1)..(648): n is a, c, g, or t
gtgcgtgttctcgcggatataaaaaaccccgaaaatgtatatcatctgcttacttcattttgccaaagggccggcggtcttttaaacaacgcgaatgttatgaaggaaacggggctggacgcaaagacttacgagaaatacaaagcgctttgcagcagcacattcttaatttacgagctgccatcctgggctaaaccaaacaaattgaacaagcggtttgtaaaacaaaaaaaactatattttacagacaccgccctgctctgccatctgatgcaaagggatatggaagaagtttttaaaaatgacatgacaaccatggggcacattttcgaaaacttcatagccggcgaaattatgaaagcgtcaaaatccctgagttctttcagcgtatcgcattttaaccccgtacagaatcagggccgggaaattgactttgtaatagagaaccagaaaggggaagcaatcgggatagaggtaaagctgggcggaaccattgacgagagagactggtcaaacatgagcgttctggaaaatacagtcggaaacaaattcaaaaaaggaattattatttacaccggcgcagatattgtacagctcgccagaaaaatctgggcagtaccggtgaattatctttgggagaaagagtag

SEQ ID NO: 41092 - protein, 215 aa, Unknown
  Obtained from environmental sample
  misc_feature (1)..(215): Xaa is any amino acid
MRVLADIKNPENVYHLLTSFCQRAGGLLNNANVMKETGLDAKTYEKYKALCSSTFLIYELPSWAKPNKLNKRFVKQKKLYFTDTALLCHLMQRDMEEVFKNDMTTMGHIFENFIAGEIMKASKSLSSFSVSHFNPVQNQGREIDFVIENQKGEAIGIEVKLGGTIDERDWSNMSVLENTVGNKFKKGIIIYTGADIVQLARKIWAVPVNYLWEKE

SEQ ID NO: 41093 - DNA, 306 bp, Unknown
  Obtained from environmental sample
  misc_feature (1)..(306): n is a, c, g, or t
atggtagacaccggagctatgaatctggttatttccgaagagctgtgccaacagttgggcctggaaattcgaagcttaagagaagtaacaatggcgaatgatcaaaccgaagaggccaaggtaaccgaaccggtagaattacactggaaagaccgcgattatatcggtaacgcctgggtcatccctggtttgactgaacctttgatgggattactgccccttgagtacatggatcttatggtggatccggttaatcagactttggtaggcgttcatggagacaaacccattggttttataaagtga

SEQ ID NO: 41094 - protein, 101 aa, Unknown
  Obtained from environmental sample
  misc_feature (1)..(101): Xaa is any amino acid
MVDTGAMNLVISEELCQQLGLEIRSLREVTMANDQTEEAKVTEPVELHWKDRDYIGNAWVIPGLTEPLMGLLPLEYMDLMVDPVNQTLVGVHGDKPIGFIK

SEQ ID NO: 41095 - DNA, 1431 bp, Unknown
  Obtained from environmental sample
  misc_feature (1)..(1431): n is a, c, g, or t
ttgacaataaaactgccggggaacggcagccgcggggtttctttaaactacgttatcccggctccggtatggaaagtctcatacaggcttgatctcggtaacgagaaagcaaaaccccggctccagggctgggctattgttgacaatgacggcgacatggactgggacaaagtcgagctctcattggtagcgggccggccctcatcctttatacaaaacctgtatcccccgtattacgtttctcggcctgtgcaaccccttgccattgccggagccgccgatgccgcgacccacgactcaggctacgccccttctcccgcggtcccacgcgaaagttcggagcggatgatggcgtatgattacgcgccggccgcggcggctaagcctggcgtggaagcggagagcggttctgcaaggtctcgtccctcctccggaggcgttcttgagacaaacataagcggcgcggcggcggccgccgccggcgagcagtttgaatttaccattaaaaacccggtaagcatcgcaaggcagatgagcgccatgctgcccctgacagacgcttttgtcgaggcgcgcaagctgcttatattttctggcaacggtcccgcaaacagaaatcaaaacccgaggctcggcgtggaattgaccaacaccagcgggataaagctccccgccggggccataaccgtatatgacggcggaacttacgccggtgacgcccttatcgaattctggaacgagggcgagaaacggcttatatcctatggcgaggatctttcggttatcggcgctgtaacgaacagcagttcaaatatattttcttctgtaacaatatcaggcggcgtaatgaccattaaccgcagccaggaatacttaagaacttatacttttaaaaacaacgcggcgcaggataagcttctcatcattgaacatcccaaaacccttgggacaacccttgactaccccaaagccgatgaggagactccggcgctttaccgttttaatataactctgccgcctgccgggcttacctttaatgtccgggaattacgtccaatcatgcagcgcgtaaccctggcgcttttaaggcctgatgaatttctgtcattcacaagcagccaggaactacccgcaaacgtgagggaagccctgcaacaggcggtgaacctgcgttcaacgcttaaccgttcacagacagcggtcacggatacggaaaaacaaagaaccggttttgtttcagagcaagacagaataaggaaaaatcttgaagccgccggcggtacaacccagcaggggcaggaatacctgaaaaggcttatatcgcttgacgacagcattgacaaaattgacgcggaactgcaaaaactcagggaaaatgtaaaaactgcgcagaaagcatacgaagattacctgggtaatttgaaactttaa

SEQ ID NO: 41096 - protein, 476 aa, Unknown
  Obtained from environmental sample
  misc_feature (1)..(476): Xaa is any amino acid
MTIKLPGNGSRGVSLNYVIPAPVWKVSYRLDLGNEKAKPRLQGWAIVDNDGDMDWDKVELSLVAGRPSSFIQNLYPPYYVSRPVQPLAIAGAADAATHDSGYAPSPAVPRESSERMMAYDYAPAAAAKPGVEAESGSARSRPSSGGVLETNISGAAAAAAGEQFEFTIKNPVSIARQMSAMLPLTDAFVEARKLLIFSGNGPANRNQNPRLGVELTNTSGIKLPAGAITVYDGGTYAGDALIEFWNEGEKRLISYGEDLSVIGAVTNSSSNIFSSVTISGGVMTINRSQEYLRTYTFKNNAAQDKLLIIEHPKTLGTTLDYPKADEETPALYRFNITLPPAGLTFNVRELRPIMQRVTLALLRPDEFLSFTSSQELPANVREALQQAVNLRSTLNRSQTAVTDTEKQRTGFVSEQDRIRKNLEAAGGTTQQGQEYLKRLISLDDSIDKIDAELQKLRENVKTAQKAYEDYLGNLKL

SEQ ID NO: 41097 - DNA, 606 bp, Unknown
  Obtained from environmental sample
  misc_feature (1)..(606): n is a, c, g, or t
gtgcacggggcacgactgcttcccgccgaggacaagcatcggggggagcgggaacgtctatataaacggaatccccgcgcaccgccagggcgacggctggaagccgcatacctgcaccgatcccaggacgccgcacgggacgcacgcgggatcgcttgccgccggaagctccagcgtcttcgcaaacgggctgccgctcggcagggtcggcgatccggtcgactgcgggtctttggtggcgtcgggctcgcccgacgtttttgcggggtaattatggatacagtgcgcattgagcaatgggacgacatacgcgagctggccctcatgagcatcgggaccgacaagggcacctggtgggccgatccgaattttggcagcgaattgtggctgcttcggaaaaacggcaaggtggacggccagaccgcagggacccttagacggatggtgctcgagagcctgcaatggcttgtccagggttccctcgcaaaaaaaatcgactgcgctgccgagcgcgccggcaaaaacgaaatccgctatagcgtcgccctttaccgcccggacgggagcagcgcccccctcataacggaggcatggcgtgccgtttaa

SEQ ID NO: 41098 - protein, 201 aa, Unknown
  Obtained from environmental sample
  DOMAIN (101)...(198): Phage protein GP46
  misc_feature (1)..(201): Xaa is any amino acid
MHGARLLPAEDKHRGERERLYKRNPRAPPGRRLEAAYLHRSQDAARDARGIACRRKLQRLRKRAAARQGRRSGRLRVFGGVGLARRFCGVIMDTVRIEQWDDIRELALMSIGTDKGTWWADPNFGSELWLLRKNGKVDGQTAGTLRRMVLESLQWLVQGSLAKKIDCAAERAGKNEIRYSVALYRPDGSSAPLITEAWRAV

SEQ ID NO: 41099 - DNA, 300 bp, Unknown
  Obtained from environmental sample
  misc_feature (1)..(300): n is a, c, g, or t
atgccggctgttacaagacaaggcgacgcgtgcacggggcacgactgcttcccgccgaggacaagcatcggggggagcgggaacgtctatataaacggaatccccgcgcaccgccagggcgacggctggaagccgcatacctgcaccgatcccaggacgccgcacgggacgcacgcgggatcgcttgccgccggaagctccagcgtcttcgcaaacgggctgccgctcggcagggtcggcgatccggtcgactgcgggtctttggtggcgtcgggctcgcccgacgtttttgcggggtaa

SEQ ID NO: 41100 - protein, 99 aa, Unknown
  Obtained from environmental sample
  misc_feature (1)..(99): Xaa is any amino acid
MPAVTRQGDACTGHDCFPPRTSIGGSGNVYINGIPAHRQGDGWKPHTCTDPRTPHGTHAGSLAAGSSSVFANGLPLGRVGDPVDCGSLVASGSPDVFAG

SEQ ID NO: 41101 - DNA, 519 bp, Unknown
  Obtained from environmental sample
  misc_feature (1)..(519): n is a, c, g, or t
gtggtcgaacgaagccctgaacgaaaaaccccagcagctccatatcaacggctttatccgcggccccgaatacatccaaacaaggaacgccctggtagaggccctgcgcgtaacgaccgacgacagcactccggggtacgtcgactttccgttctggggccgcttccccgtcgtggtcgcggaatacaaggtatccgaaaccgcagacgaaaagggccagtgcgccgtaacgctcgcattcaagagggccggggcatcgcctgccgaaagggcggcatccgtttcaggcatggcggccgccaacctttccggcacgggcatggccctggaagcggccatggaggacctgcaggccgccgccgccgacagcttcgaaaaggcgctggcggacaacgccgacgcaagcacggccaagacgctttcgcaagggttcggccaaataaaaacggcgctgctgggcgcgctcgggcgcgtccaggcggcgcagacaaagctgaacgccgtctccgccgagattaa

SEQ ID NO: 41102 - protein, 172 aa, Unknown
  Obtained from environmental sample
  misc_feature (1)..(172): Xaa is any amino acid
MVERSPERKTPAAPYQRLYPRPRIHPNKERPGRGPARNDRRQHSGVRRLSVLGPLPRRGRGIQGIRNRRRKGPVRRNARIQEGRGIACRKGGIRFRHGGRQPFRHGHGPGSGHGGPAGRRRRQLRKGAGGQRRRKHGQDAFARVRPNKNGAAGRARARPGGADKAERRLRRD

SEQ ID NO: 41103 - DNA, 909 bp, Unknown
  Obtained from environmental sample
  misc_feature (1)..(909): n is a, c, g, or t
atgttcaccgcgaattccatgaactgcctctgcgaagcgttgggcatggcgctgccgggcaacgggaccattcccgccgtttatgcgcataggctccgcctcgcgaaacaggccgggatgagcgtaatgaatctgttcaaggcggatataaggccctccgccattatgaccgagcaggcgttcaccaatgccttgaccgtcgatatggcgctgggctgttcaacaaactccgtactgcatctgtttgccattgcgcgggaacggggtataagcctttctttgaacaccgttaacgaaatcagtcaaaacaccccaaacctctgccgccttgctccggcgggacggcatcatattcaggatctgcatactgccgggggcgtggccgcggttatgcgggaactgggagatttgctgaacagggacttgataaccgtaaccggaaaaacggttggggacaatatcaaggacgcgtttataaaagataacaacgttatacaaaaatactcccctactggcggccttgcggcgctattcggcaatcttgcgcctaacggcgcggtggtaaagcgcagtgcggtgcggcctgaaatgtacgacttcaccggaacggcgcgggtgtttgacggcgaggagtctgccgccgccgctatttacggcggtcagattaagaagggtgacgttgttgtcatccgctacgaagggccctccggcggccccggtatgcgcgagatgcttcagccgacttcggcgattgtcgggatggggcttgacgccgatgtggcgttgataaccgacgggcgcttttccggcgcgacccgcggtgcggctatcggccatatctccccggaagctgccggcggcggcccgatagcttatatacttgagggcgaaaaatctcggccaatctga

SEQ ID NO: 41104 - protein, 302 aa, Unknown
  Obtained from environmental sample
  DOMAIN (1)...(300): Dehydratase family
  misc_feature (1)..(302): Xaa is any amino acid
MFTANSMNCLCEALGMALPGNGTIPAVYAHRLRLAKQAGMSVMNLFKADIRPSAIMTEQAFTNALTVDMALGCSTNSVLHLFAIARERGISLSLNTVNEISQNTPNLCRLAPAGRHHIQDLHTAGGVAAVMRELGDLLNRDLITVTGKTVGDNIKDAFIKDNNVIQKYSPTGGLAALFGNLAPNGAVVKRSAVRPEMYDFTGTARVFDGEESAAAAIYGGQIKKGDVVVIRYEGPSGGPGMREMLQPTSAIVGMGLDADVALITDGRFSGATRGAAIGHISPEAAGGGPIAYILEGEKSRPI

SEQ ID NO: 41105 - DNA, 534 bp, Unknown
  Obtained from environmental sample
  misc_feature (1)..(534): n is a, c, g, or t
atggcggctaaatggtatgtcgtgcacacgtattcggggcaggagaccaaggtattcgattaccttaacggcattatcgcgtcgggcgactacggcgatcagataaaggccgttctgatgcccacccaagacgtagtgcaggtgaaagacggaaagaagataaaaaccacccggaagttcttcccctcctacgtgctcgtggagatggagatgacgcgggagaccatgcacttggtgcgtgagatcgccggcgttacgggttttgtcggaggcgagaagccgcaggccatacgcgacgacgaggcgaggcggattttgggccaggcggcggaaaagggtccgcgccagcaggtctccgaggtgcctttcgaggtcggcgacgccgtcaaaatcaaagaagggccgttcaaagacttcgacggcgttgtggacaaggtgtcgcccgaaaagggcaaggttatggtgatggttagcgtcttcgggcggtctacgccggtcgaggtcgactttatacatgttgctccaatcagctga

SEQ ID NO: 41106 - protein, 177 aa, Unknown
  Obtained from environmental sample
  DOMAIN (123)...(160): KOW motif
  misc_feature (1)..(177): Xaa is any amino acid
MAAKWYVVHTYSGQETKVFDYLNGIIASGDYGDQIKAVLMPTQDVVQVKDGKKIKTTRKFFPSYVLVEMEMTRETMHLVREIAGVTGFVGGEKPQAIRDDEARRILGQAAEKGPRQQVSEVPFEVGDAVKIKEGPFKDFDGVVDKVSPEKGKVMVMVSVFGRSTPVEVDFIHVAPIS

SEQ ID NO: 41107 - DNA, 741 bp, Unknown
  Obtained from environmental sample
  misc_feature (1)..(741): n is a, c, g, or t
atgtataaagtcgacctcgaccggcgtagaccgcccgaagacgctaaccatcaccataaccttgcccttttcgggcgacaccttgtccacaacgccgtcgaagtctttgaacggcccttctttgattttgacggcgtcgccgacctcgaaaggcacctcggagacctgctggcgcggacccttttccgccgcctggcccaaaatccgcctcgcctcgtcgtcgcgtatggcctgcggcttctcgcctccgacaaaacccgtaacgccggcgatctcacgcaccaagtgcatggtctcccgcgtcatctccatctccacgagcacgtaggaggggaagaacttccgggtggtttttatcttctttccgtctttcacctgcactacgtcttgggtgggcatcagaacggcctttatctgatcgccgtagtcgcccgacgcgataatgccgttaaggtaatcgaataccttggtctcctgccccgaatacgtgtgcacgacataccatttagccgccatccgctacctctaccgcgccctcaaaaagagacctatggccgcctgcaacccctggtcgcaagcgaatacgtaaatcgacaccgccaagctcaaaattataacaagcacggtcgcgccggagacttcggctttggtcggccaatttaccttggcgacctcggctttcacatcccgaaagtattgcattatcttttccataacggttacctcgtcctatcatcctaa

SEQ ID NO: 41108 - protein, 246 aa, Unknown
  Obtained from environmental sample
  misc_feature (1)..(246): Xaa is any amino acid
MYKVDLDRRRPPEDANHHHNLALFGRHLVHNAVEVFERPFFDFDGVADLERHLGDLLARTLFRRLAQNPPRLVVAYGLRLLASDKTRNAGDLTHQVHGLPRHLHLHEHVGGEELPGGFYLLSVFHLHYVLGGHQNGLYLIAVVARRDNAVKVIEYLGLLPRIRVHDIPFSRHPLPLPRPQKETYGRLQPLVASEYVNRHRQAQNYNKHGRAGDFGFGRPIYLGDLGFHIPKVLHYLFHNGYLVLSS

SEQ ID NO: 41109 - DNA, 711 bp, Unknown
  Obtained from environmental sample
  misc_feature (1)..(711): n is a, c, g, or t
ttgagtgaaaataaaaaaatcacaagcggttcaatactttacaacggcatggatttgaccacccttccagaaaagaaaatagaagaagtccgcggaaaagaaatttcgatggtgtttcaggaaccgtttgcctcactaaacccgatcttaaaaatcggccatcaaatcggcgagggccttgcgctccacggggaaaaagacaaggcgttaattaaaaaccgcgcaaaagagcttatggaaaagctgggcctgcccgacacttacccccaccggctttccggcggaatgtgccagcgtgcgatgatcgcgatagcgataatttgcaacccgcagcttttaatagcggatgaacccacaaccgcccttgaccatgacactcaaagcaagataatcgctttattaaaagaaataaaccgtagcatgggaacttctattttatttatttcccacgatatcgaagtaataaaagaactgtgcgacaggattctcgttatgtattcgggacgtatccttgaggaaggaaacacgtacgatgttttttccagtcccgctcatgaatacacccgcggccttttaagctccgtcccttccgccgccatgcgcggaaaggctctggctgccatccccgggaaaatcccctcgcttgaagaaggccgtcccccaggttgccccttccatccccgttgcgaaaaagcccatgccggaatgtaa

SEQ ID NO: 41110 - protein, 236 aa, Unknown
  Obtained from environmental sample
  DOMAIN (171)...(235): Oligopeptide/dipeptide transporter, C-terminal region
  misc_feature (1)..(236): Xaa is any amino acid
MSENKKITSGSILYNGMDLTTLPEKKIEEVRGKEISMVFQEPFASLNPILKIGHQIGEGLALHGEKDKALIKNRAKELMEKLGLPDTYPHRLSGGMCQRAMIAIAIICNPQLLIADEPTTALDHDTQSKIIALLKEINRSMGTSILFISHDIEVIKELCDRILVMYSGRILEEGNTYDVFSSPAHEYTRGLLSSVPSAAMRGKALAAIPGKIPSLEEGRPPGCPFHPRCEKAHAGM

SEQ ID NO: 41111 - DNA, 801 bp, Unknown
  Obtained from environmental sample
  misc_feature (1)..(801): n is a, c, g, or t
atggcaaactattatttcaaaactggagtagtgctgaccctgctcattctgggaatcacgttggcggggattttttttcttcccggtgactacaacgccatgaactccgattcaagatttcttccacctggaacacactaccttatgggcacggacaacttcggaagaaatattttctaccggataatggctggagcgaaatacaccctgcttacggcccttgttaccgtagccggaagcgcgttaatcggttcggcccttgggatgttttctggttttgcaggtgggcttttggatgaggccgtcatccggctcttggatgtccttgcctcttttccggggatactcctcgcgcttttgatggtctcgcttttggacaacagccctggaacgcttgtcgcggccctgcttatcctttttgtccccggctttacgcggatcatgcgaaacggaatgctccgttacaaggatcgcgactttgttctttccgcccgcgttgctggaatctcatatcccaggattatctttgcccacatttttcccaatcttttgccttcgcttctttcaacgtccgtgcttgggctttcaaacgcgattctcgccgaatctacgatgagttaccttggcctcggcattcagccgcctgtgccaagctgggggcgtatgcttgccgaatcccagaccttcctttttaacgccccctggtgcgctcttgttcccggcctcatgattatgctcactgtccttgcctttcactatctgggagaggggcttaatgagcgggctttgcaggagacatga

SEQ ID NO: 41112 - protein, 266 aa, Unknown
  Obtained from environmental sample
  SIGNAL (1)...(22)
  DOMAIN (66)...(264): Binding-protein-dependent transport system inner membrane component
  misc_feature (1)..(266): Xaa is any amino acid
MANYYFKTGVVLTLLILGITLAGIFFLPGDYNAMNSDSRFLPPGTHYLMGTDNFGRNIFYRIMAGAKYTLLTALVTVAGSALIGSALGMFSGFAGGLLDEAVIRLLDVLASFPGILLALLMVSLLDNSPGTLVAALLILFVPGFTRIMRNGMLRYKDRDFVLSARVAGISYPRIIFAHIFPNLLPSLLSTSVLGLSNAILAESTMSYLGLGIQPPVPSWGRMLAESQTFLFNAPWCALVPGLMIMLTVLAFHYLGEGLNERALQET

SEQ ID NO: 41113 - DNA, 588 bp, Unknown
  Obtained from environmental sample
  misc_feature (1)..(588): n is a, c, g, or t
atgataagatacgttgacaagatggactcggctaatctcacagtagatgaaattatgcatccggaaggatgggtgctgctcggcttcatcaccgatccccgcacgggtcttggcaggattcgcaattttacaataagcaacctggatctgatgaagaaactgtcaaaggctacttttcaaaagcccattgacgagatcctcgcgatgcccgacgttaaagaacgcatagatacctattttgaacagcataacctttttattgagatgacaaaaaaatacgcgaaaatcgaagggaacgccattgtttgcgacatgcggaatgtcgatacattatacgcgggcaaccgcttcctgctttatacgctctttcccaaacagaacatttccgtttgggtggtggacgggaaaaagaaagtcaacacggtaattaccgtaggctatagcatcataaacaaaaccgccacggtcgacgtgggcagtttaatgttgaaatacggcggcggcggacacaaggcggtagggacctgccaggtggcttatgaaaataccgataaaattctcagcgaaattatcgccgcggtaaagtga

SEQ ID NO: 41114 - protein, 195 aa, Unknown
  Obtained from environmental sample
  misc_feature (1)..(195): Xaa is any amino acid
MIRYVDKMDSANLTVDEIMHPEGWVLLGFITDPRTGLGRIRNFTISNLDLMKKLSKATFQKPIDEILAMPDVKERIDTYFEQHNLFIEMTKKYAKIEGNAIVCDMRNVDTLYAGNRFLLYTLFPKQNISVWVVDGKKKVNTVITVGYSIINKTATVDVGSLMLKYGGGGHKAVGTCQVAYENTDKILSEIIAAVK

SEQ ID NO: 41115 - DNA, 1194 bp, Unknown
  Obtained from environmental sample
  misc_feature (1)..(1194): n is a, c, g, or t
gtgataattgtatactttgtactggacatcactacaaaaccgatcgttcatgtggccgccaccctcaaagacatatccgaaggcgaaggcgacttgacgcggagcatcgcggtcagttccaaagacgaaatcggtgaccttgcccattacttcaacaaaacgctggaaaagatcaagaacctcgtcttgctcatcaagagagaggcggcgggcctccacaacataggcaatgagcttgccagcaacatgaccgagaccgccgcggctataaatcaaatcaccgccaatatccaaagcatcaagggacgcgtcattaaccagagcgcaagcgttaccgaaaccaacgccaccatggaacaggttgttgcgaacatcaacaaactcaacggccatgtagaaaagcagagcagcaatatttcacaggcttcatcggccattgaggagatggtagccaatatccattctgtaacggagaccctcttcagaaacagtgaaaatgtcaaggtattgcaggaagcctccgaagtgggccgcaacggattgcaggaagtggccactgacattcaagagatagcccgcgagtccgaaggcttgctggagataaacgccgtaatggaaaacatcgccagccagaccaacctgctttcaatgaacgcggcgattgaagcggcgcacgccggagaggcgggtaaaggtttcgcggtagtcgccgacgaaatccgcaaactggcggaaagctccagcgaacagtcaaagaccatcggcacggtactgaaaaaaatcgcggaatcaatcaaaaaaattacagtctccaccgacaacgtgctgaaaaaattcgaggcaattgacttaagcgtaaagacggtgacggaacaggaagaaaacatccgcaacgcaatggaagaacagggcgagggcagcaaacaaattctcgaagtcgtcggcaatgtaaatgaaatcacccgtcaggtaaagagcggttctaatgaaatgcttgaaggagcaaacgaagtaatacaggaaagcaataatttggagaaaataactcaggaaataaccggcggaatgaacgaaatggcatccggcgcggatcagataaacgcggcggtaattcaggtcaacgaaataagtaacaaaaaccgcgaaggcattaatacattgacaaaagaggtttccaagttcaaggtagaataa

SEQ ID NO: 41116 - protein, 397 aa, Unknown
  Obtained from environmental sample
  DOMAIN (1)...(60): HAMP domain
  misc_feature (1)..(397): Xaa is any amino acid
MIIVYFVLDITTKPIVHVAATLKDISEGEGDLTRSIAVSSKDEIGDLAHYFNKTLEKIKNLVLLIKREAAGLHNIGNELASNMTETAAAINQITANIQSIKGRVINQSASVTETNATMEQVVANINKLNGHVEKQSSNISQASSAIEEMVANIHSVTETLFRNSENVKVLQEASEVGRNGLQEVATDIQEIARESEGLLEINAVMENIASQTNLLSMNAAIEAAHAGEAGKGFAVVADEIRKLAESSSEQSKTIGTVLKKIAESIKKITVSTDNVLKKFEAIDLSVKTVTEQEENIRNAMEEQGEGSKQILEVVGNVNEITRQVKSGSNEMLEGANEVIQESNNLEKITQEITGGMNEMASGADQINAAVIQVNEISNKNREGINTLTKEVSKFKVE

SEQ ID NO: 41117 - DNA, 399 bp, Unknown
  Obtained from environmental sample
  misc_feature (1)..(399): n is a, c, g, or t
gtgatttcatttacattgccgacgacttcgagaatttgtttgctgccctcgccctgttcttccattgcgttgcggatgttttcttcctgttccgtcaccgtctttacgcttaagtcaattgcctcgaattttttcagcacgttgtcggtggagactgtaatttttttgattgattccgcgatttttttcagtaccgtgccgatggtctttgactgttcgctggagctttccgccagtttgcggatttcgtcggcgactaccgcgaaacctttacccgcctctccggcgtgcgccgcttcaatcgccgcgttcattgaaagcaggttggtctggctggcgatgttttccattacggcgtttatctccagcaagccttcggactcgcgggctatctcttga

SEQ ID NO: 41118 - protein, 132 aa, Unknown
  Obtained from environmental sample
  misc_feature (1)..(132): Xaa is any amino acid
MISFTLPTTSRICLLPSPCSSIALRMFSSCSVTVFTLKSIASNFFSTLSVETVIFLIDSAIFFSTVPMVFDCSLELSASLRISSATTAKPLPASPACAASIAAFIESRLVWLAMFSITAFISSKPSDSRAIS

SEQ ID NO: 41119 - DNA, 414 bp, Unknown
  Obtained from environmental sample
  misc_feature (1)..(414): n is a, c, g, or t
gtggactatgtatttgacgcatcatttttaggcgcacttattattcctgatgaaaagaatcccagagtggataaaatacataaatctattggacaaaatgaagtgatttttgtgccgcaattgatctggtatgaaatagcaaatgttttcaaaaatttaatgcggcgtaaacgttatcaatttgacgacgttttagaattatcaaaattactgaccgaagatcgcctcacctgtgattttgaaacaggtcccaactatgccgagaaacttctgcgcctgtgcaatgattacaatatcagttcctatgacgccgcctaccttgaactggcgtggcggaaaaaagnccgccctctgtacactggacgaaaacttgtaaccgccgcaaaaaaatacggcgtaacggtattaaaatag

SEQ ID NO: 41120 - protein, 137 aa, Unknown
  Obtained from environmental sample
  misc_feature (1)..(137): Xaa is any amino acid
MDYVFDASFLGALIIPDEKNPRVDKIHKSIGQNEVIFVPQLIWYEIANVFKNLMRRKRYQFDDVLELSKLLTEDRLTCDFETGPNYAEKLLRLCNDYNISSYDAAYLELAWRKKXRPLYTGRKLVTAAKKYGVTVLK

SEQ ID NO: 41121 - DNA, 951 bp, Unknown
  Obtained from environmental sample
  misc_feature (1)..(951): n is a, c, g, or t
gtgatcaggattcggcacgaggcccatcaccggaacattggctactactacgatcgtgtcgccctagactaccacggcagcaactacttgtttagcgttcgttgtgtacaaggcggtagtccaattagcagttccagctcgcgccctgctagctcgtctagtgatggaaaaatcaatttattggaaaatgctacttatagaacaggaaacattcccaccggaacaactggactatttgaagtagaaacgggcaacaccataatttctggaggttcaactatactcacaataaccagcgacagagagcttgacaaactgtatgttcaaattgcagactctcccggctattatgaggtgaaaatatcgcaaaacgatctggcttcttatactaacggcaactacatatataatgtgcttttgcagttcactcaaaatttgctgcaaggagagacttcgcaaacaacaaaagatatacaatttatttttagcggagcattgggttctgctgtgtctccctctgtttcaaaaagcattgaaaccattaaagttggtggagacgctttgcaaatatccttgtcttggactacaatagttgatttggatttgcatgttactcccccttcgggagctactattttttttgacaataaaagagttgacaacggtgaactggatttggatgcgaatgtaggctgtcctggttctgaagataaaagaaacgaaaatatatttttcaccgcaccgcttgaagatggagattataaagttgaggttaatatgtacactaattgcataacaacaccaactagatacattgtttctgcatatctcaatggaaaaatttttgaattttctgccaaccaaaatggggtatttgccgccggcactgataacgataccaaaaaaaccataggcgttataagaataaaaaatggggtagctgttcaataa

SEQ ID NO: 41122 - protein, 316 aa, Unknown
  Obtained from environmental sample
  misc_feature (1)..(316): Xaa is any amino acid
MIRIRHEAHHRNIGYYYDRVALDYHGSNYLFSVRCVQGGSPISSSSSRPASSSSDGKINLLENATYRTGNIPTGTTGLFEVETGNTIISGGSTILTITSDRELDKLYVQIADSPGYYEVKISQNDLASYTNGNYIYNVLLQFTQNLLQGETSQTTKDIQFIFSGALGSAVSPSVSKSIETIKVGGDALQISLSWTTIVDLDLHVTPPSGATIFFDNKRVDNGELDLDANVGCPGSEDKRNENIFFTAPLEDGDYKVEVNMYTNCITTPTRYIVSAYLNGKIFEFSANQNGVFAAGTDNDTKKTIGVIRIKNGVAVQ

SEQ ID NO: 41123 - DNA, 744 bp, Unknown
  Obtained from environmental sample
  misc_feature (1)..(744): n is a, c, g, or t
gtggacatatttttcatatcctgtataatatattgttttttcttgcttttcaaaggaactcgtgctgttcaaatgttttttggcgtggttttgattacggcaatttggtttctttcccagctttttgatttgcgcggattaacttggttaataggcagtttgagtgccttgggcgtggtggctatagttatagtgtttcagccagaaattagaggtatgctcacgagaatagggcaaatagccaatgttttcaaattcagaaccttattttttaaacgtagcggcttagaagatataaccgcaaaaatagtggattctgttttggaattgcaaagaaaaggatatggagcactgattgtgttggaaaaaagagttggtttaaaatcttatgtcgattctggtgaagtgataaatggcgatttttccaaaaaacttttatgttccattttttaccccggaaccgctttgcacgatggtgcagtgatagttttgggaaataaaattatagcagccggctgtgtgttgccaatgccaaccggatctgccgccgccgagcaatctggtggaatgcggcacagggcggctaaagcccttgccttggaaactgatgcttttgtgatagttgtatctgaagaaacaggctatatatccatagcttatcgcgatagctttcgcacaaggcagagcaaaagagaattggaagaagaaataaaacgccattggaaagaactatatgaagactga

SEQ ID NO: 41124 - protein, 247 aa, Unknown
  Obtained from environmental sample
  DOMAIN (103)...(225): Domain of unknown function DUF147
  misc_feature (1)..(247): Xaa is any amino acid
MDIFFISCIIYCFFLLFKGTRAVQMFFGVVLITAIWFLSQLFDLRGLTWLIGSLSALGVVAIVIVFQPEIRGMLTRIGQIANVFKFRTLFFKRSGLEDITAKIVDSVLELQRKGYGALIVLEKRVGLKSYVDSGEVINGDFSKKLLCSIFYPGTALHDGAVIVLGNKIIAAGCVLPMPTGSAAAEQSGGMRHRAAKALALETDAFVIVVSEETGYISIAYRDSFRTRQSKRELEEEIKRHWKELYED

SEQ ID NO: 41125 - DNA, 852 bp, Unknown
  Obtained from environmental sample
  misc_feature (1)..(852): n is a, c, g, or t
atgaaaaaagaaaaagaaatagatatggttgaagaaatgtgcgcctctgttcagggaaaagtgtatgataagatgcatatatattccgaaaaaatacacggatcaacatcccaagtgagttnttctatgcgaggcaaccctacccagagagaattggctgacatggtgttattatcgttaattactaaggatcaagaccttcaatatgcaaaaatagcatttgtgcaaaacaaaaaagagaacgaaaaaaacaatagttggcaaatagatgatgggcaattatttcttttacaatattttcctacatttactggagttagaggaatttttaaaaaaaaaccattcaatgaccaagaaatagtatttccaaatactaccggatcattgggaaattacggcttatttaaatccagaggtgaaataattgtaacgattgcgtctgaaatatctgcaaaaatgaaaggtcataccgtcaaatattccagtcttgttgaagatagttcaagatattcttctaaatcattgataacaccttctttgaaaataggagaacaaataattattgtaaatactcaaggtgaagtatcgtatcagtatccatttcttcaaaatacatccctttcaatgaatgtatatgactttgtcaggaattttactctgtttaacatcggagagcctattccatcgccttatacatcgcaagataatgatttatttaaatatgtaaatgttcttatacaaggtacaacattgaaagataagataaaaataaagaattttcttgatgaacaaatagatatggataaaatcgaaaaccttaatattttgtgtgttcatttagaattaatgtaa

SEQ ID NO: 41126 - protein, 283 aa, Unknown
  Obtained from environmental sample
  misc_feature (1)..(283): Xaa is any amino acid
MKKEKEIDMVEEMCASVQGKVYDKMHIYSEKIHGSTSQVSXSMRGNPTQRELADMVLLSLITKDQDLQYAKIAFVQNKKENEKNNSWQIDDGQLFLLQYFPTFTGVRGIFKKKPFNDQEIVFPNTTGSLGNYGLFKSRGEIIVTIASEISAKMKGHTVKYSSLVEDSSRYSSKSLITPSLKIGEQIIIVNTQGEVSYQYPFLQNTSLSMNVYDFVRNFTLFNIGEPIPSPYTSQDNDLFKYVNVLIQGTTLKDKIKIKNFLDEQIDMDKIENLNILCVHLELM

SEQ ID NO: 41127 - DNA, 1197 bp, Unknown
  Obtained from environmental sample
  misc_feature (1)..(1197): n is a, c, g, or t
gtggaagaaaaccttgacctttttgcgcgtatgcgggcaggggaattccccgacggcgcaaaaaccctcagggctaaaatcgacatggctcacccgaaccttcttctgagagatccggtcatgtaccggattcgccgcgaacaccattaccgcactgccgacaaatggtgcatctatcccatgtacgattttcagcacccgctgtcggacgctaaggaagggattacccattcgctttgttcgcttgaatacgaaattcaccggcccctttacgagtggtttattaacgaggcggaggtctttaagtcgcggcagattgagttcgcgcggcttaacatgacccgcaccgtgatgagcaagcgatggcttttaaggcttgtcgaggaaaagtacgtatccggctgggacgacccgcgtatgcccacaatcgcggggctgcgccgccggggctatacgccggaggccatacgcaattttgtctcgcaggtaggaatcgcaaagaccgacagcatggcggacatcgcttttcttgagtactgcctccgtgaagacctgaacaaaaccagtcggcgtgtgatgacggtgttaaaacctctagcgcttattatcgacaactggcctggactttccgccgagcctgaccactcgcagtggtcaggcgaaggttcccctccggctggcaaggttgaagaagttgaggctgtgaacaaccccgaggatgaatccgccggcaagcggaaaattcccttttccggaaagctgtggatcgaacgggaggattttgaggaaaccccaccgccaaagtattacaggctttatcccggcaacagcgtgcggctgcgttacggttacatcgttacctgtaccggctgcgacaaggatgccgagggaaacgttaccgccgttcactgcacttacgatccggaaacaaaaggcgggaacgcgccggacaacaaaaaagtaaaaagcacaattcactgggtttctgctcctcatgcgattccgattgaagcgcgggtttacgactacctttttgccgccgaaaggccaatggaagtagagcccggcaaaacttttttggataacctgaacaccaattccctggaagtgatagccaacgcctgggccgagccatgtttagcggaagcaaaagccggggatcgctttcagtttgaaagagctgggttacttcgttaa

SEQ ID NO: 41128 - protein, 398 aa, Unknown
  Obtained from environmental sample
  DOMAIN (1)...(187): tRNA synthetases class I (E and Q), catalytic domain
  misc_feature (1)..(398): Xaa is any amino acid
MEENLDLFARMRAGEFPDGAKTLRAKIDMAHPNLLLRDPVMYRIRREHHYRTADKWCIYPMYDFQHPLSDAKEGITHSLCSLEYEIHRPLYEWFINEAEVFKSRQIEFARLNMTRTVMSKRWLLRLVEEKYVSGWDDPRMPTIAGLRRRGYTPEAIRNFVSQVGIAKTDSMADIAFLEYCLREDLNKTSRRVMTVLKPLALIIDNWPGLSAEPDHSQWSGEGSPPAGKVEEVEAVNNPEDESAGKRKIPFSGKLWIEREDFEETPPPKYYRLYPGNSVRLRYGYIVTCTGCDKDAEGNVTAVHCTYDPETKGGNAPDNKKVKSTIHWVSAPHAIPIEARVYDYLFAAERPMEVEPGKTFLDNLNTNSLEVIANAWAEPCLAEAKAGDRFQFERAGLLR

SEQ ID NO: 41129 - DNA, 432 bp, Unknown
  Obtained from environmental sample
  misc_feature (1)..(432): n is a, c, g, or t
ttgttattcttccttatgtttattggcggctgttcactttccactgccgggggtattaaagttatccgctatgttattctggcaaagcaggcgaacaacgaaatgaaaaagatcatccatccgcgcggtgtgtttaacatccggcttgacggcaaaagcgggaacaaagatatggtgtatggagtggcaggttttgtgtttctttatttgttgttaatatttttatgcgctctcctggtaagcagcgccggggaagatattttttcttcattggaaatggcgttggcctgtctggggaatatcggttttattaatccaattccctattttcccgcctatgttaaatggggtcttgccctggcgatgctcattggccgcctggaattgtgggccgtgctggtaatttttacccgtgatttttggaaattatag

SEQ ID NO: 41130 - protein, 143 aa, Unknown
  Obtained from environmental sample
  SIGNAL (1)...(16)
  misc_feature (1)..(143): Xaa is any amino acid
MLFFLMFIGGCSLSTAGGIKVIRYVILAKQANNEMKKIIHPRGVFNIRLDGKSGNKDMVYGVAGFVFLYLLLIFLCALLVSSAGEDIFSSLEMALACLGNIGFINPIPYFPAYVKWGLALAMLIGRLELWAVLVIFTRDFWKL

SEQ ID NO: 41131 - DNA, 522 bp, Unknown
  Obtained from environmental sample
  misc_feature (1)..(522): n is a, c, g, or t
atgctgatactgggcgggtatgtaacgcaaaacgtgaatgacaagaaggaaatggagcctgcggtagcgagcgttgataaagaagcgcgtgaaataaacacgatatgcctggatactggattttacagcgaagaggcggtagcggcggtagaaaatataaatgaagaaggaaagcgggaagggcctgaagtattttgcgcggtagagaaagggcatcacgggaagacggtggaagatttgaaagacaaggggcccaaggggcgtcctcctgcaaacatgagcgcgaaagaaaagatggcgaggaaacttaaaaccaagaaagggaaagatgtatacaagaaacggaaagagacggtagagccggtattcgggataataaaaagcgtaatgggatttcggcaatttatgctgcgggggatagagaaagtgaataccgaatgggcattagtgaggctcgcttataatttcaaaaggctgcatcgtttattaggcggcaaaagcctaaccgaatgtctggcatag

SEQ ID NO: 41132 - protein, 173 aa, Unknown
  Obtained from environmental sample
  misc_feature (1)..(173): Xaa is any amino acid
MLILGGYVTQNVNDKKEMEPAVASVDKEAREINTICLDTGFYSEEAVAAVENINEEGKREGPEVFCAVEKGHHGKTVEDLKDKGPKGRPPANMSAKEKMARKLKTKKGKDVYKKRKETVEPVFGIIKSVMGFRQFMLRGIEKVNTEWALVRLAYNFKRLHRLLGGKSLTECLA

SEQ ID NO: 41133 - DNA, 336 bp, Unknown
  Obtained from environmental sample
  misc_feature (1)..(336): n is a, c, g, or t
atgaagttgaaagacagccaataccgaagaatagaaaaactcctgcccaagcagagaggaaatgtaaaaatagacaacagggcctttctggatgcgattatttatcgttgtaagaacggctgttcctggcgcgacctgcccaaagactttggaaactggcatgtcatatatatgcgcttttcccgttggacgcaaaacggggtgttcgatcgggtatatgcggcgctctccgaagggggattgcaggatgtaacggaatatgggcttgattcgacgtcggcaaaagtacatccggatgcctttggctgtttaaaaaaaacggcaaacaggcaatag

SEQ ID NO: 41134 - protein, 111 aa, Unknown
  Obtained from environmental sample
  misc_feature (1)..(111): Xaa is any amino acid
MKLKDSQYRRIEKLLPKQRGNVKIDNRAFLDAIIYRCKNGCSWRDLPKDFGNWHVIYMRFSRWTQNGVFDRVYAALSEGGLQDVTEYGLDSTSAKVHPDAFGCLKKTANRQ

SEQ ID NO: 41135 - DNA, 384 bp, Unknown
  Obtained from environmental sample
  misc_feature (1)..(384): n is a, c, g, or t
gtgcttggcgtaaaagacacgcacataaagggctttatcctgtccggtggggaggataatgacgcgcctgcagggcgacttttgcttgaaacggttggcaagcaggaaagtaccgttccggttctaatggacagggcctatgcggatttcaagacgcgttttaccgcgtggggcttgtgctttaaggctgttgttcctcccaaatcgaacgcaacgcatcaatgggactacgacaaggaattatacaaaaaacgcaacgagatagaacgctttttccgcaggctaaaagctttcagggctgttttcacccgctatgacaaacttgacaccgtttatgcgtcttttttattttcgctgctactatcatacttttacgttgtgtga

SEQ ID NO: 41136 - protein, 127 aa, Unknown
  Obtained from environmental sample
  misc_feature (1)..(127): Xaa is any amino acid
MLGVKDTHIKGFILSGGEDNDAPAGRLLLETVGKQESTVPVLMDRAYADFKTRFTAWGLCFKAVVPPKSNATHQWDYDKELYKKRNEIERFFRRLKAFRAVFTRYDKLDTVYASFLFSLLLSYFYVV

SEQ ID NO: 41137 - DNA, 693 bp, Unknown
  Obtained from environmental sample
  misc_feature (1)..(693): n is a, c, g, or t
atggcacttttaaccagccaaaaaatcagcacatattatgagctgtttaagacaattgatgttatcttcagcaaggaaataatccaggttacggggctcgtcgctaatcaggtataccttaaaagtgtcggggacttttggccctgcgttatatattcaacttcgtttaacggggcaaaagtcgttgtcaacgttaaaacgggaatattgcagaaacttgaaaaggccaacagcatggccagtttaaggttttgctttaaaagcgcggataccggaaacacggtaactttttttgtaaataccaaagtcgcaggctacactccctatggggcttccggcgaggtagtccttttaacccttcagtttacccagaggccgccggatgatcttattgaaattatgggtcgtattcttgatgccaacgtaaactcaaaaaaacgcagggaagatcggattttaataacccccgattccatgagaaagctgaatataacaaaagaaagttctattttaattcagggagtacccaggcattgcattttacgcgacatgtcattttccggggtgaaaattataatgatgggggtagccaaattccttgcggacaaggaaagcgttctgcgcctggaatttgaagatccaagagaggttttcctcataaaagggaaaatttatccgcagcgaanncggtag

SEQ ID NO: 41138 - protein, 230 aa, Unknown
  Obtained from environmental sample
  misc_feature (1)..(230): Xaa is any amino acid
MALLTSQKISTYYELFKTIDVIFSKEIIQVTGLVANQVYLKSVGDFWPCVIYSTSFNGAKVVVNVKTGILQKLEKANSMASLRFCFKSADTGNTVTFFVNTKVAGYTPYGASGEVVLLTLQFTQRPPDDLIEIMGRILDANVNSKKRREDRILITPDSMRKLNITKESSILIQGVPRHCILRDMSFSGVKIIMMGVAKFLADKESVLRLEFEDPREVFLIKGKIYPQRXR

SEQ ID NO: 41139 - DNA, 1413 bp, Unknown
  Obtained from environmental sample
  misc_feature (1)..(1413): n is a, c, g, or t
ttggaaaagaggaaaaaaatggcaaaaacaggttctatcatccaggttgtaggtcccgtcgtggacgtgagtttcagcgcaagcactacggagcccattccaggaattcttaacgccctggaggtaaacgccggcaataggagggttgtgctggaagtcttgcaacacactggggataaccgtgtccgctgcgttgccatggaagcgacggagggtcttagccggggcatggaagtcagcgacacaggacacgcgattcaggttccggtaggcgatgaaatcctgggaaggatgttcaacgttacaggccgatccattgacgataagggagcattcagcgccaaacaatacgcgtccattcaccgtaaagcgccggactttgccgatcagaagccggctaccgaagtttttgaaaccggcataaaggtcattgaccttatagccccgtacgccaagggcggaaagatagggctcttcggaggcgccggagttggcaaaacggtactcatcatggagctgatccgcaacatcgcgacagagcactcaggttattcggttttttccggcgtaggcgaaagatcccgcgaaggctccgatctctggaaggagatgaacgagtccggggtcatatcaaaaacagcgctggtctttggtcagatgaacgagccgccaggcgcaagaatgcgcgtagcgcttgccgggcttacaatggctgaacatttccgcgacaaagaaggacaggatgtgcttctctttatcgataacattttccgctttatacaggccggtgccgaggtttcagcccttctgggccgcattccaagcgctgtaggctaccagcctactttggccaacgaaatgggctccctacaggaaaggatcgccagcacttccaagggttccatcaccagcattcaggctgtgtacgtccccgccgacgaccttacagatccggcgccggcaacaacctttgcccacctggacgctaccaccaccctctcccgcaagattgtggagttgggcatctacccgtccgttgacccgcttgcttccagctcacggatcctgaaccccgaaatcgtcggcgaggagcattaccgcacagccatgcaggtacagcagacccttcagcggtacaaggagctgcaggatatcatcgcgattctcggtatggacgagctttcgcccgaggacaaaatcaccgtagccagagcgcgaaaggtgcagcgctttttcagccagcctttctttgtcgcagaaaagttctcaggcacccctggctgctatgtgccggtaaaagaaaccgtccgcggtttcagaatgatcctggacggcgagtgcgattccataaacgagcaggctttcttcatggccggttccatagatgatgtcctatcaagagcaggaacctag

SEQ ID NO: 41140 - protein, 470 aa, Unknown
  Obtained from environmental sample
  DOMAIN (13)...(83): ATP synthase alpha/beta family, beta-barrel domain
  misc_feature (1)..(470): Xaa is any amino acid
MEKRKKMAKTGSIIQVVGPVVDVSFSASTTEPIPGILNALEVNAGNRRVVLEVLQHTGDNRVRCVAMEATEGLSRGMEVSDTGHAIQVPVGDEILGRMFNVTGRSIDDKGAFSAKQYASIHRKAPDFADQKPATEVFETGIKVIDLIAPYAKGGKIGLFGGAGVGKTVLIMELIRNIATEHSGYSVFSGVGERSREGSDLWKEMNESGVISKTALVFGQMNEPPGARMRVALAGLTMAEHFRDKEGQDVLLFIDNIFRFIQAGAEVSALLGRIPSAVGYQPTLANEMGSLQERIASTSKGSITSIQAVYVPADDLTDPAPATTFAHLDATTTLSRKIVELGIYPSVDPLASSSRILNPEIVGEEHYRTAMQVQQTLQRYKELQDIIAILGMDELSPEDKITVARARKVQRFFSQPFFVAEKFSGTPGCYVPVKETVRGFRMILDGECDSINEQAFFMAGSIDDVLSRAGT

SEQ ID NO: 41141 - DNA, 567 bp, Unknown
  Obtained from environmental sample
  misc_feature (1)..(567): n is a, c, g, or t
ttgatcagatcggccgagaagattaccttaagtccagaaaactgggtcgttgccacagaatatgtgaatctcgcgaaatcatggcttgggaaatcaggttatcagtaccgtattctccgcacttacggggctaccgaagtttttccgccggatgacgccgacatgatcatagacaatacctcgtcaggccagacgcttaaagataacaagctgagaattatcggcacgatccttgagtcatccacccgctttgtcgcttcccatgccgcccttgccgatccggaaaaaaagaaccgcattgaggagcttgccatgctgtttcacgccgtacttgacggacgcgaccgggtgatgctggagatgaacattcccagggatcaatttgaagctgtggtaaacagccttccggcaatgcgcagcccgaccgtcgcccccttgttcggcgacagcggttatgcggtaaaaatcgcggtaaagaagcgcgaggttcccgatattattccgcgcctgaaaaaactcggcgccgtagacattgtggaatatgatctgcggaaagtggttccgtga

SEQ ID NO: 41142 - protein, 188 aa, Unknown
  Obtained from environmental sample
  DOMAIN (1)...(111): ATP phosphoribosyltransferase
  misc_feature (1)..(188): Xaa is any amino acid
MIRSAEKITLSPENWVVATEYVNLAKSWLGKSGYQYRILRTYGATEVFPPDDADMIIDNTSSGQTLKDNKLRIIGTILESSTRFVASHAALADPEKKNRIEELAMLFHAVLDGRDRVMLEMNIPRDQFEAVVNSLPAMRSPTVAPLFGDSGYAVKIAVKKREVPDIIPRLKKLGAVDIVEYDLRKVVP

SEQ ID NO: 41143 - DNA, 555 bp, Unknown
  Obtained from environmental sample
  misc_feature (1)..(555): n is a, c, g, or t
atgtctcaggaagtcattacctttcctctgctgcccgggcttgacggtaaaaataaaatgagcaaatccctggacaactacatcggcatagatgaacctgcggaaattattttcgaaaaatgcatgaagattccagataatattctgccggtatattttatgttaaccacagacataccggaaaacgattacataaaaattattaataatgatatatggcaggctcatttggtttatgcgcgggagatagtaaagatgtatcacggggaaatttatatttctcgggcggaagaacgttacagggcggtggcaaataaaaaggcgcctgattcaacaagagtctatacaatttacaatgaagagcaaattatccggttacttattcttacggaacttgccgggacaaattcggagtctcgtagattgataaatgagggaggaataaaaattgacggcataacaattaatgattccgctttaatcatacaaaaagattgtattataagccggggaaaaaacaaatttataaaaattcattttgacaaagaaaaataa

SEQ ID NO: 41144 - protein, 184 aa, Unknown
  Obtained from environmental sample
  misc_feature (1)..(184): Xaa is any amino acid
MSQEVITFPLLPGLDGKNKMSKSLDNYIGIDEPAEIIFEKCMKIPDNILPVYFMLTTDIPENDYIKIINNDIWQAHLVYAREIVKMYHGEIYISRAEERYRAVANKKAPDSTRVYTIYNEEQIIRLLILTELAGTNSESRRLINEGGIKIDGITINDSALIIQKDCIISRGKNKFIKIHFDKEK

SEQ ID NO: 41145 - DNA, 846 bp, Unknown
  Obtained from environmental sample
  misc_feature (1)..(846): n is a, c, g, or t
gtgttctttaacaagcgattgttcagagaagcgggactggatcccaatttgccatacgatcttcaaaaagcgggaacatggacatgggataaatttcttgaaatatgtaaaaaacttactagggatacaaacaacgacggtattacagatatatacgcgatgccgaatgatctttctacggagattctggacgctttgatctcaagtaacggcgcaatgtatgtagacaaagacaagaacggaatgcttgttaacgcttcgggaaggccggaattcattgaagctatgcgtttttatgtaactctgagagacgcaaaagttatgaaggaaaaaccgccgggagataatactccgtggaactggtatgtttccgagttttacgacggaaaatgcgccatgcgtattgcccagcagttccaggcgacaaatgatcttcgtcatatgaaagacgattggggcatggttcttccgccgaaaggacccagggtaaagaactatgtcgttttcaatgatgataacgtatgcgtaatccccgccaaaggatacacaaaagaacaggttgacgcgattctttgggcatatcaggcctggtcggctcctatggaaaatactaactggaaagttcaaaattatcccaatttcagagacagaagggccgttgacgaaacgctcgctatgatccgcgaccataaattatggctgtggaaataccatcttcacgttcccgggcttcagcgcggcggcattgcctacgaaatgcgctatcctgacaatcaaccgtctcagttatttgaggcggtttcacagacctggaatgctttaattgatgacgctaatggcctgtaa

SEQ ID NO: 41146 - protein, 281 aa, Unknown
  Obtained from environmental sample
  misc_feature (1)..(281): Xaa is any amino acid
MFFNKRLFREAGLDPNLPYDLQKAGTWTWDKFLEICKKLTRDTNNDGITDIYAMPNDLSTEILDALISSNGAMYVDKDKNGMLVNASGRPEFIEAMRFYVTLRDAKVMKEKPPGDNTPWNWYVSEFYDGKCAMRIAQQFQATNDLRHMKDDWGMVLPPKGPRVKNYVVFNDDNVCVIPAKGYTKEQVDAILWAYQAWSAPMENTNWKVQNYPNFRDRRAVDETLAMIRDHKLWLWKYHLHVPGLQRGGIAYEMRYPDNQPSQLFEAVSQTWNALIDDANGL

SEQ ID NO: 41147 - DNA, 759 bp, Unknown
  Obtained from environmental sample
  misc_feature (1)..(759): n is a, c, g, or t
atgatttccagactttgtcataaagacaatgtcttaaaagacattgtaaggaacattatggaaagaaagaaaaaacatattatggctatcggagcccatataggcgatgcagaactgaccacaggcaaaaccctggcgacccacagcctgctgggtgacaagatcaccaccgtggcggtaacggcgggagaacgcggatcacctcccgaccgggacatcgcggaattcgccgcgtataatatcaaatgcgcggaggattttgccgccgcgctttcaggtaaatttatcaacctgggctaccccgacggtgaagccccggataatgatgaactgcgctacaaaatatgcgacctcatacgggccgaaaaaccgaatgtaatcctgacgcattggcacagcagtcttcataaggatcatattactacttcaagggcagtagacgatgccattttctatgccgccctccgcggtcttgagcgggaagctcctccccactgggccagcggcccctattatgccgaaaattgggaagacgccgaaggttttgaaccctacatctatatcaatgtgactgccggctatgatctctggtttgagcatattcagaaactttggttaacaaacaactccccatggtttaagtacctggagtactacgatgccctttcccgttcccgtggggcattggttcacaaacagcgcgcggaatgttacgccgtaagcccttacagaaagagactggtacaagagagcttttga

SEQ ID NO: 41148 - protein, 252 aa, Unknown
  Obtained from environmental sample
  DOMAIN (28)...(150): GlcNAc-PI de-N-acetylase
  misc_feature (1)..(252): Xaa is any amino acid
MISRLCHKDNVLKDIVRNIMERKKKHIMAIGAHIGDAELTTGKTLATHSLLGDKITTVAVTAGERGSPPDRDIAEFAAYNIKCAEDFAAALSGKFINLGYPDGEAPDNDELRYKICDLIRAEKPNVILTHWHSSLHKDHITTSRAVDDAIFYAALRGLEREAPPHWASGPYYAENWEDAEGFEPYIYINVTAGYDLWFEHIQKLWLTNNSPWFKYLEYYDALSRSRGALVHKQRAECYAVSPYRKRLVQESF

SEQ ID NO: 41149 - DNA, 642 bp, Unknown
  Obtained from environmental sample
  misc_feature (1)..(642): n is a, c, g, or t
atggcatgggggtaccgggaaaatgaaaatctctgcggttatgatccgtattccaacagcaagtcatgcagtgaattggtaacatacagttaccgtaattcattttttcttgatgaaagcgctcctgcaatttccaccgcgcgttccggtaatgtcataggcgggggcgattacgccgaagaccggatcattcccgattgtatccgagcggtaaccgaaaaaaaagaaattattgtgcgtaacccccattccatccgcccctatcaacatgtgttggaatgtctttgcggttatctggttttggcggagaaacaatacggcgacaaaacctttcaaggggcgtataattttggtcctgatgacggaagttgtgttaccaccggggacctggcttctattttctgcgccgcttggggtaatgacgcggcttggcgggttcagggagacggcggcccgcatgaggcgaattttttaaaacttgactgttcaaaatcaaaaaccgtactgggctggaagccttgttgggacatacaaacagcggttggaaaaacagtggaatttgccaaggcccaatccgataatgaacgactggcttgtattgaaaaacaaataagggaatattttaaggatcatcatgtttga

SEQ ID NO: 41150 - protein, 213 aa, Unknown
  Obtained from environmental sample
  misc_feature (1)..(213): Xaa is any amino acid
MAWGYRENENLCGYDPYSNSKSCSELVTYSYRNSFFLDESAPAISTARSGNVIGGGDYAEDRIIPDCIRAVTEKKEIIVRNPHSIRPYQHVLECLCGYLVLAEKQYGDKTFQGAYNFGPDDGSCVTTGDLASIFCAAWGNDAAWRVQGDGGPHEANFLKLDCSKSKTVLGWKPCWDIQTAVGKTVEFAKAQSDNERLACIEKQIREYFKDHHV

SEQ ID NO: 41151 - DNA, 537 bp, Unknown
  Obtained from environmental sample
  misc_feature (1)..(537): n is a, c, g, or t
gtggataaagggaactgcgccctgggcgctctggttaaaatgacgcttgatttttacaaaaataagaaagtttttctaacaggacatacaggttttaagggaacctggctctgcagaattcttttacaagcgggagcgacaataaccggatacgctttggagccgcctaaaacgccttcgctttttgttcaaacaggtacagaaaaagacatattttcaataaacggtgatgtaaggaacagggacgctctaattaaggcggtaaaaaacgcaaaaccggatataatatttcacctggcagcccagcctttagtacggttttcttaccatgaaccggcggctacttacgggatcatgtttatgggaaccgtaaatattcttgaggcggtacggctgactcgccgggtaaaatcttttgtaaatgttaccaccgataaagtatatgaaaacagggaatggcatgggggtaccgggaaaatgaaaatctctgcggttatgatccgtattccaacagcaagtcatgcagtgaattggtaa

SEQ ID NO: 41152 - protein, 178 aa, Unknown
  Obtained from environmental sample
  DOMAIN (24)...(177): NAD dependent epimerase/dehydratase family
  misc_feature (1)..(178): Xaa is any amino acid
MDKGNCALGALVKMTLDFYKNKKVFLTGHTGFKGTWLCRILLQAGATITGYALEPPKTPSLFVQTGTEKDIFSINGDVRNRDALIKAVKNAKPDIIFHLAAQPLVRFSYHEPAATYGIMFMGTVNILEAVRLTRRVKSFVNVTTDKVYENREWHGGTGKMKISAVMIRIPTASHAVNW

SEQ ID NO: 41153 - DNA, 414 bp, Unknown
  Obtained from environmental sample
  misc_feature (1)..(414): n is a, c, g, or t
atgctgacctacggtgacggggtcagtgatgtaaatatttctgaacttgttaagaatcatgataataacggaaagacggtaacattgaccgcagtgcagcctgcggggcgttttggatcaattaagatagcggacggcggaaaagtggaatcatttaaggaaaaacccgttggtgacggagcatggataaacggcggattttttgtgatggaaccgggtgtttttgattatctggccgacggtgacgcgacgattctggaacggaagccgctggaacacctggcggaagccggacagttatatgcgtataaacacaagggtttttggaggcccatggatactctgcgggataaaaatgaattaaacgatatgtggataaagggaactgcgccctgggcgctctggttaaaatga

SEQ ID NO: 41154 - protein, 137 aa, Unknown
  Obtained from environmental sample
  misc_feature (1)..(137): Xaa is any amino acid
MLTYGDGVSDVNISELVKNHDNNGKTVTLTAVQPAGRFGSIKIADGGKVESFKEKPVGDGAWINGGFFVMEPGVFDYLADGDATILERKPLEHLAEAGQLYAYKHKGFWRPMDTLRDKNELNDMWIKGTAPWALWLK

SEQ ID NO: 41155 - DNA, 1344 bp, Unknown
  Obtained from environmental sample
  misc_feature (1)..(1344): n is a, c, g, or t
atgaacgaggcggacttgattgagtcgcttggaacaatagcgcgctccgggacaagaatgttccttgaaaaacttgccgaagacgctaaaaaagattccaatttgataggacagttcggggtgggattttattcggcatttatggtcgcggataaaattgaagtgattagccgcaaggcaaacgaggacgccgcgtggaaatggataagcgacggcaaagaaggttttgaaattgaaggcgcgtcgcgggacgctcaggggacgacagtcatccttcatttgaccgaggaggggacagaatacgccaaccgctggtcaatagaggatattatcaaacgttactccaaccatgtggcattcccgattttcctcacatacgatgaaaaagaatatgacgacaagggtaaagagaagggcggcaaaacaaaaaccgacaggataaattccggaaccgcgctttggcggcgcgcgaagaacgagcttaagcccgaagattacattgaattttacaaacagcttggccatgacagcgaagagcccttggactacattcatacaaaagccgaaggaacattagagtattcaacattatttttcattccgaaaaaagcgccgtttgatttatacaatgtggactacaagcccggcgtaaaactctatgtaaaacgcgtctttattacagatgatgacaaggaactcatgcccacatatctgcgttttgtgcgcggcgtaattgattccgaggacttgcccctgaacgtaagccgcgaaatcctccagcaaaacaaggttttgctcaatattaaaaacgcttccgtaaaaaaacttctttccgaattcaagcagatggcggataacgccgtttccggctctgatgaggcgaaagcaaagtgggaaacatttgtttcccagttcaaccgtccgttaaaggaagggctttatcaggatttttccaaccgcgaattgatacaggagatagtccgctttaagagcagtacggttgacggatggacaagtttcgccgattacgtttcccgcatgaagagcgaccagaagaacatctattacataaccggcggcgatgaaaaaaccctgcgcgcctctccgctgttggaagcctaccgcgcgaaagagattgaagtccttatcatggacgatgatattgacgacatagtaattcccaccctgcacagttaccgcaaggatgttcccggcacggacggaaaaacagaaagccagagttgggatctaaaagcggtaaaccgtgcgggcgccgacgaggagttaggtgaaaagaaagacaaagccgcccgaaaggaggcgaaaccggtcatcgaaaaataa

SEQ ID NO: 41156 - protein, 447 aa, Unknown
  Obtained from environmental sample
  DOMAIN (100)...(446): Hsp90 protein
  misc_feature (1)..(447): Xaa is any amino acid
MNEADLIESLGTIARSGTRMFLEKLAEDAKKDSNLIGQFGVGFYSAFMVADKIEVISRKANEDAAWKWISDGKEGFEIEGASRDAQGTTVILHLTEEGTEYANRWSIEDIIKRYSNHVAFPIFLTYDEKEYDDKGKEKGGKTKTDRINSGTALWRRAKNELKPEDYIEFYKQLGHDSEEPLDYIHTKAEGTLEYSTLFFIPKKAPFDLYNVDYKPGVKLYVKRVFITDDDKELMPTYLRFVRGVIDSEDLPLNVSREILQQNKVLLNIKNASVKKLLSEFKQMADNAVSGSDEAKAKWETFVSQFNRPLKEGLYQDFSNRELIQEIVRFKSSTVDGWTSFADYVSRMKSDQKNIYYITGGDEKTLRASPLLEAYRAKEIEVLIMDDDIDDIVIPTLHSYRKDVPGTDGKTESQSWDLKAVNRAGADEELGEKKDKAARKEAKPVIEK

SEQ ID NO: 41157 - DNA, 492 bp, Unknown
  Obtained from environmental sample
  misc_feature (1)..(492): n is a, c, g, or t
atgcgcttttgccagggcattgggcaacctgatgttcagggtggaaggatgaagactgtccccatcgttgctgtcggcggcgctaaaagcgggggtgcagccggtggcgccactgttggcggcggctttggcgatagctggaacaaccgcgcactgttcagcctgttgtggccgctgatcgtcgagcagttacttgccgtcgccatgggcgctattgataccgtcatggtaagctccgtgggggaacacgccgtgtccggcgttaatattgttgacaatatcaacaatcttttgataatagcctttggcgctttatgcacgggcggggcggttgtggtaagccagtatataggccggaaagattattcaaattccagccttgccgcgaagcagcttgtgtacagcgccgttttaatttcgctgtttacgttggcggttgccgtggtgctgcgccggcctgtcatccggctggttacggcagatcgaagataa

SEQ ID NO: 41158 - protein, 163 aa, Unknown
  Obtained from environmental sample
  misc_feature (1)..(163): Xaa is any amino acid
MRFCQGIGQPDVQGGRMKTVPIVAVGGAKSGGAAGGATVGGGFGDSWNNRALFSLLWPLIVEQLLAVAMGAIDTVMVSSVGEHAVSGVNIVDNINNLLIIAFGALCTGGAVVVSQYIGRKDYSNSSLAAKQLVYSAVLISLFTLAVAVVLRRPVIRLVTADRR

SEQ ID NO: 41159 - DNA, 840 bp, Unknown
  Obtained from environmental sample
  misc_feature (1)..(840): n is a, c, g, or t
atgacgctggggacgatctattcggatatgtaccggtatgacgaggggaaatactggtatgaaaaagcaatcgctcttggcgtgggggcgcggagctttaccgccgtggcgcattacaatctctcgattctggaatcgcgtttttaccgttacgatctttccatggacgaggccaacgcgtctattgacgcgcagaacagggcgtcgggccttcttgccaggggagaactccttatgcgccggcttgatatagaagaagcccacgtggattttcagacagcccgcgagattgatcaatcgccgctggcaaaggtcaaccttgcccaggcttatcaaatttcaggccgtctggaagaagcccgcctgtatgcccttgactgcctgaaagccggcgaccaatcgtggatggcttattacggaatagaccctgttcgctacaaacgcgatattcatgagattctctataagacatattccgggcttgcgaaagccgggcgttttatgccccaggggacgctgagcggcgttatacgatcagccattaaatcaatatcatacaggttttattacgccgttcaccgcaaactttaccagaaatacagccttgcttccggcgacgcctataatatccgcgaagccaatgaccacccccctcttgagcaatatatccnatactataatgcctttgaaacatacccagaccgatccattgtttatttgcgtaaagcccgcgactttgaaaccgccgttattcctgaatcctcgggttcgtattatcttgaagagggcatcctgcttacacgatataaatctgacggcgcaggcattggacagatttga

SEQ ID NO: 41160 - protein, 279 aa, Unknown
  Obtained from environmental sample
  misc_feature (1)..(279): Xaa is any amino acid
MTLGTIYSDMYRYDEGKYWYEKAIALGVGARSFTAVAHYNLSILESRFYRYDLSMDEANASIDAQNRASGLLARGELLMRRLDIEEAHVDFQTAREIDQSPLAKVNLAQAYQISGRLEEARLYALDCLKAGDQSWMAYYGIDPVRYKRDIHEILYKTYSGLAKAGRFMPQGTLSGVIRSAIKSISYRFYYAVHRKLYQKYSLASGDAYNIREANDHPPLEQYIXYYNAFETYPDRSIVYLRKARDFETAVIPESSGSYYLEEGILLTRYKSDGAGIGQI

SEQ ID NO: 41161 - DNA, 342 bp, Unknown
  Obtained from environmental sample
  misc_feature (1)..(342): n is a, c, g, or t
atggattattttttcatcggggacgcggaactggttacagctttccgttttgtaggcatcggcggaatttccgtacagaactccggagaagccgttgaggcgtttcgcagaatcaccgaaagttatgacgaaacctcaggaacgtttctgccggagatggagctttgcagggtgcttataatgacagaggaagttgcggactggctgggaaatacccttgtccaatggcagcttaaagatcgctatccgttgattgtggaaattccggggcttttgggaaggcacgaaggccgtaaaacgctggcggaatcaatccgggaagcaatcggagtcagaatctaa

SEQ ID NO: 41162 - protein, 113 aa, Unknown
  Obtained from environmental sample
  DOMAIN (6)...(108): ATP synthase (F/14-kDa) subunit
  misc_feature (1)..(113): Xaa is any amino acid
MDYFFIGDAELVTAFRFVGIGGISVQNSGEAVEAFRRITESYDETSGTFLPEMELCRVLIMTEEVADWLGNTLVQWQLKDRYPLIVEIPGLLGRHEGRKTLAESIREAIGVRI

SEQ ID NO: 41163 - DNA, 645 bp, Unknown
  Obtained from environmental sample
  misc_feature (1)..(645): n is a, c, g, or t
atggaagagttacgaactaccgaggcgctgggaaatgaaattctggaagacgccaggaggaaagcccaaaaaatcttaaagaccgccgaggaagcccttgcggcgcaggaccacagttgggaaagaaaattaaaacgctcgacggattctatccgaaaaacttttgccgagcggacaaaaaaaaccaacgaggagattcaggcgcgccttccgctagacatgcgccgacttcgatccaaaaccaccgaaggttttttggttaaggccctggatgattttttgcggactctgagccgggaaaaactgcttttcattctggaacgggaacttcactcgcgcttaaaactctgcgccgttgatcttgcccgtcaccgttctatagtccgttattcaggcctcagccttgatgaagccaaaacggttattgaaaaagtgagcggcgctctggaagaaacggacttcctggtaaaacccgaatgggaattcagggaggattcggttgtccgtgaataccccttaatgtttattgaattgagaaccttaagaataattgcttcggtgaaaagcaccgcgaaagctttgctaagggacaagcgcggggaattggccgcggcccttctgggcgagggagtcctcaatgactag

SEQ ID NO: 41164 - protein, 214 aa, Unknown
  Obtained from environmental sample
  misc_feature (1)..(214): Xaa is any amino acid
MEELRTTEALGNEILEDARRKAQKILKTAEEALAAQDHSWERKLKRSTDSIRKTFAERTKKTNEEIQARLPLDMRRLRSKTTEGFLVKALDDFLRTLSREKLLFILERELHSRLKLCAVDLARHRSIVRYSGLSLDEAKTVIEKVSGALEETDFLVKPEWEFREDSVVREYPLMFIELRTLRIIASVKSTAKALLRDKRGELAAALLGEGVLND

SEQ ID NO: 41165 - DNA, 1191 bp, Unknown
  Obtained from environmental sample
  misc_feature (1)..(1191): n is a, c, g, or t
atggcagatgaaatatcagttttaattgtagatgactcagcgctaatgcggaatttaataagtcacatggtcgaagacacaccaggtttaaccgttgccgaaaaagccatgaacggccgttttgcccttcaaaagataccccgtgttaatccggatgttatttgtcttgatcttgaaatgccggaaatgaacggtattgaatttctaaaagaacgaaaaaaacaaggtattgagattcctgttgtaatactttcttctgtcgcttcccgaggcgcggaaataacaatggaagctctttctcttggcgcaagcgactttatacaaaaaccttcaggcgccgtatcagaagacattcacgtagtaaaagacactcttgtaagcaagcttctgggttatggcggagcattccgcaaatcacagggcaaaaaagtacctgtcccttcagccccttcggcggtcccttcggccccttcagctccttcaaaatcttcaaaatctgagtcaccggtttcaactgcaaaaagttcagatgtagattcttattttaaattggcagctcaagctcccaccggtcccgctcaacctcctgtcagagcgcgttatccggctaacacggaaattatagctatcggtatcagtacaggcggacctgacgcgttacgcgtagtattcgccaatatagacgccgatttaaaagtaccgattgtcgtagtacagcacatgccggcaggatttacaaatgaatttgcaaagagccttgaccgtatttgcccgttggatgtaaaagaagcggaagacggcgatgaaattagacctggtagaattcttatcgcacagggcaacaaacatcttgaagtagaaaaaaaagggagcgacaacgcggttgcccgtctttccgactctccacaggtttcgggacacaggccttcggcggacgtgcttttcgcgtcagttgcaatggcgtttacaaatcacgtgcttggagtaatcatgacgggtatgggacgcgacggagcgcagcacttgggtacaatttacagagaaggcggcatgacgctcggtcaggatgaagccagcgcggtcgtttacggaatgccccgtgtcgcttatgagttgggtcatgttatggagcaggtttctttgaataatatggcgcggcgtatttgtgatgtggcgaaacagaagcgttaa

SEQ ID NO: 41166 - protein, 396 aa, Unknown
  Obtained from environmental sample
  DOMAIN (5)...(122): Response regulator receiver domain
  misc_feature (1)..(396): Xaa is any amino acid
MADEISVLIVDDSALMRNLISHMVEDTPGLTVAEKAMNGRFALQKIPRVNPDVICLDLEMPEMNGIEFLKERKKQGIEIPVVILSSVASRGAEITMEALSLGASDFIQKPSGAVSEDIHVVKDTLVSKLLGYGGAFRKSQGKKVPVPSAPSAVPSAPSAPSKSSKSESPVSTAKSSDVDSYFKLAAQAPTGPAQPPVRARYPANTEIIAIGISTGGPDALRVVFANIDADLKVPIVVVQHMPAGFTNEFAKSLDRICPLDVKEAEDGDEIRPGRILIAQGNKHLEVEKKGSDNAVARLSDSPQVSGHRPSADVLFASVAMAFTNHVLGVIMTGMGRDGAQHLGTIYREGGMTLGQDEASAVVYGMPRVAYELGHVMEQVSLNNMARRICDVAKQKR

SEQ ID NO: 41167 - DNA, 819 bp, Unknown
  Obtained from environmental sample
  misc_feature (1)..(819): n is a, c, g, or t
atggctgaaaatgaatttcttaacgatattagttttggattgtaccgcgatcttatctacagggaaagtggcataacttttacaccaacaaaccgttcaatattagaaagcaggttaaaggagcggttacgagaaaaaaacatttcttccgtttctacatattttgatacgatagtgtcgaataaggaggaactcaacggatttttagattctatcacaaccaatcttacgcggttcttcagaaaccaggcgcaatttgacgcgctggaaaaatatgttcttcctgaattgatgaacaacataagaaaaactccgggaacaatcaggatatggagtgccggttgctctacaggagaagaaccctacactcttgccatgttattaactgaagttctcccaaaaaattggaattttgagattcttgcaagcgatatttcacttaaatgtttaatgaccgcaaaagaaggtttttatgccgaaagcaggatcgttggagtccccgataactatcttgcaaaatattttgataaagtagaaggtgggtttaagatacatccggatattcaagcaaaaatcagatttgactatcacaaccttaaaaatgattctatgcaaagaaatcttgatgttgttttttgtcgtaacgtaattatttattttgacgagatggctcagactgcggttatgggtcgtttttgggattccatggcaccaaggtctttcttgttcatcggtcattctgaatctttgtttgggatgaatacaaaatttgaatttgtaaagaccgaatgggcaactttatattgtaaaaaagcttaa

SEQ ID NO: 41168 - protein, 272 aa, Unknown
  Obtained from environmental sample
  DOMAIN (8)...(64): CheR methyltransferase, all-alpha domain
  misc_feature (1)..(272): Xaa is any amino acid
MAENEFLNDISFGLYRDLIYRESGITFTPTNRSILESRLKERLREKNISSVSTYFDTIVSNKEELNGFLDSITTNLTRFFRNQAQFDALEKYVLPELMNNIRKTPGTIRIWSAGCSTGEEPYTLAMLLTEVLPKNWNFEILASDISLKCLMTAKEGFYAESRIVGVPDNYLAKYFDKVEGGFKIHPDIQAKIRFDYHNLKNDSMQRNLDVVFCRNVIIYFDEMAQTAVMGRFWDSMAPRSFLFIGHSESLFGMNTKFEFVKTEWATLYCKKA

SEQ ID NO: 41169 - DNA, 1563 bp, Unknown
  Obtained from environmental sample
  misc_feature (1)..(1563): n is a, c, g, or t
atggtgctgaatatcatcggcgggatcgcgggcgagtttatagcgcctaacgcgcctgctgttgacgaagccggccccaccctggcaaacaaccaggtaacccttcaccccgcgacccgaaaggcgctggatatgctggcaaaagccgacatgatgggtttcgtcattccccggaagtacggcggccttaatatgcccaacacgatcctaagcatcgcggcagagatagtcgccagggcggacgcttcattcctcaatttcggcctgcagcaggacaacgccggaacgatcaacaaatttgcctcggaggatcagaaagaaagatacctgccaaaactctgctcaggcgaatgggattccgcgatggttcttaccgagccggacgcgggaagcgatcttcagtcggtgaacctaaaggccgtgcttggcagtgacggccagtggcggctgaacggggtcaagcgtttcatcacaaacggctgtggcacaatcggcctggtgcttgcccgcagcgaggaaaagggaaagggcgcgcgtggactttcgtttttcatttacaagcgcgacgatnaaatgactgtcagacggcttgaacacaagcttggcatccacggttccccgacctgcgaattgcaattcaacaacgcgcctgcggagcttctgggcgagcggcagaggggcctcaccaagtacaccctgtggctcatgaacaacgcccgtctaggcgtggccgcccaggcggttggcatcgcggaggcggcttatcgtgaggccgacctttacgccgcaaagcgcatccagttcggcgcgcctgtgcgcgaacttccagcggtttttgaaatgctcacggagatgaagatttctgtcgaagcgggccgtagtcttctctacgaaactgcccgcttcgttgacctgaaggaagcgttggaggattattctgaagagcacccggaagacaaaagcgagatagtggaagataaaaagaaatacgccaagtatgccgggttcttcaccccgctggtcaaaggttacgccactgaaatggcaaacaaggtagccaacgacgcgattcaaatccacggcggtacaggctacatgaaggaattcaacgccgaacgccactacagagacgcgaggatcaccaacatatacgagggaaccacccagcttcaggttgtggctgccatcgggccggtaacttcaggcgtagcgcaggccgttttggacgaatacgacaaggcaaactacaaccacagccccgctttgcttgagaaagtcagggaagcccgcaaattttttgaggaagcccttgaatacgcgaagacctacgaaggccaccagcagttcctcacctaccattcccgccgcctcgtggaaatggcaaccgatctcgtcatcagttaccttctgcttcgcgacggcaaccacagcgagcgcaagcaaaaggcggcggctgtcttcatcgccaggatgccttcgcgggtaaaggcgagccgtgatttcatcatgagcgaggatggggctttgctgagaaattacgaagcggtgattgggaagacgtaa

SEQ ID NO: 41170 - protein, 520 aa, Unknown
  Obtained from environmental sample
  DOMAIN (1)...(117): Acyl-CoA dehydrogenase, N-terminal domain
  misc_feature (1)..(520): Xaa is any amino acid
MVLNIIGGIAGEFIAPNAPAVDEAGPTLANNQVTLHPATRKALDMLAKADMMGFVIPRKYGGLNMPNTILSIAAEIVARADASFLNFGLQQDNAGTINKFASEDQKERYLPKLCSGEWDSAMVLTEPDAGSDLQSVNLKAVLGSDGQWRLNGVKRFITNGCGTIGLVLARSEEKGKGARGLSFFIYKRDDXMTVRRLEHKLGIHGSPTCELQFNNAPAELLGERQRGLTKYTLWLMNNARLGVAAQAVGIAEAAYREADLYAAKRIQFGAPVRELPAVFEMLTEMKISVEAGRSLLYETARFVDLKEALEDYSEEHPEDKSEIVEDKKKYAKYAGFFTPLVKGYATEMANKVANDAIQIHGGTGYMKEFNAERHYRDARITNIYEGTTQLQVVAAIGPVTSGVAQAVLDEYDKANYNHSPALLEKVREARKFFEEALEYAKTYEGHQQFLTYHSRRLVEMATDLVISYLLLRDGNHSERKQKAAAVFIARMPSRVKASRDFIMSEDGALLRNYEAVIGKT

SEQ ID NO: 41171 - DNA, 1389 bp, Unknown
  Obtained from environmental sample
  misc_feature (1)..(1389): n is a, c, g, or t
atgggggttatagctcaagattattcgacttacaacgtggaacgtccttataccatgcggattctggatttctcgccgcttctctatagatttcacggggttacgacaggcgatgaggtacaatctttttattatccgcgaataaatcccaattttcgccgcaatgcaggggcgatgattgcggttagccccgttcttgcttttgacctgcgtggaggagaacatttaggcgataccatcaatggctacgagggggggctatttgtgcgggggtataaagattccatggaattttggctggatgccagaattttcagcgaaagacattccgcgaaaatagctaaatcctgggatagggaatttttggagaatcaaggggataaacccaatcagggcagcggtgcgttgaaagaggttaagtattcgagctatgcgaggtacagggggcatttcactttgcgcctaggttttgcaaatttggattttgcgcgtgatgttcagcactgggggcctggctattacagcaaccttacattgaaccaagcgaccgtgccttataatcaagttgtactctcaacaaaaataggcccgctttccgtggtgagcctttatgcggatttggatgctggggaaaacagcatgaaaaaggatgcgagccgcaatttatatgggcatcgctacgagcttgatcttggcaatttaacttttggcttgagcgagattactgttatctacgatttgaaccagccttggctttttgttcccatagtgccgctctttgcggaaaaagggaatttcagcgaagatagcaacaacggtgccatagcctttgattttagctatagattcccgtttgggtttcgcctttactcggagtttttcctagacgacatggaaagccctgcgagcttaatcagaaacgataacatagaggcaaaatgggcttggatggcgggcttgatgtatgctagggatttcggagcgtggaaagctggcagcttggcggaatatgcaagagttgaaccttatgtatatacgcactttaagccctacaccgctcaaattgcgcacctcggctaccctgtaggcaacccgtctgggcctaatagccaaaccataaactggctcatttatgcaaaacacgcaaagcatttccaagcgcagctcaagcaggaatggttctggaagggcaatgatggcggcgagcttaactacccaacgccaacggcagaccaccactcaaccgcaaagcattttttggacggagcaaagatgcagtattcgctaactccggctatatcttatatgagcgatcgttatgcgatcagcgtggagtacactttttttgatagaaacgctttttgttcaagggccatgcttttgtggtag

SEQ ID NO: 41172 - protein, 462 aa, Unknown
  Obtained from environmental sample
  misc_feature (1)..(462): Xaa is any amino acid
MGVIAQDYSTYNVERPYTMRILDFSPLLYRFHGVTTGDEVQSFYYPRINPNFRRNAGAMIAVSPVLAFDLRGGEHLGDTINGYEGGLFVRGYKDSMEFWLDARIFSERHSAKIAKSWDREFLENQGDKPNQGSGALKEVKYSSYARYRGHFTLRLGFANLDFARDVQHWGPGYYSNLTLNQATVPYNQVVLSTKIGPLSVVSLYADLDAGENSMKKDASRNLYGHRYELDLGNLTFGLSEITVIYDLNQPWLFVPIVPLFAEKGNFSEDSNNGAIAFDFSYRFPFGFRLYSEFFLDDMESPASLIRNDNIEAKWAWMAGLMYARDFGAWKAGSLAEYARVEPYVYTHFKPYTAQIAHLGYPVGNPSGPNSQTINWLIYAKHAKHFQAQLKQEWFWKGNDGGELNYPTPTADHHSTAKHFLDGAKMQYSLTPAISYMSDRYAISVEYTFFDRNAFCSRAMLLW

SEQ ID NO: 41173 - DNA, 306 bp, Unknown
  Obtained from environmental sample
  misc_feature (1)..(306): n is a, c, g, or t
atggctccccccgacccagaagccggggatcgtagcctcccgcctatcctacgcgcgcggcacctaaacccagcgccaagatgcagtgaaggttcatggggtctttccgtccaggcgcggggcgccggcatcttcaccggcactgcaatttcgctgagtctcgggaggagacagcgcagaagtcgttacacgattcgtgcaggtcggaacttacccgacaaggaatttcgctaccttaggaccgttatagttacggccgccgtttaccggggcttcggttcgccgcttcgggggttgcccccctga

SEQ ID NO: 41174 - protein, 101 aa, Unknown
  Obtained from environmental sample
  misc_feature (1)..(101): Xaa is any amino acid
MAPPDPEAGDRSLPPILRARHLNPAPRCSEGSWGLSVQARGAGIFTGTAISLSLGRRQRRSRYTIRAGRNLPDKEFRYLRTVIVTAAVYRGFGSPLRGLPP

SEQ ID NO: 41175 - DNA, 366 bp, Unknown
  Obtained from environmental sample
  misc_feature (1)..(366): n is a, c, g, or t
ttggcgaacagccaaacccttgggaccttctccagccccaggatgcgacgagccgacatcgaggtgccaaacctccccgtcgctatggacgcttgggggagatcagcctgttatccccagagtaccttttatccattgagcaacggccgttccacgctgtgccgcgggatcactaagccctgctttcgcatctgctcggcccgtcggcctcgcagtcaagcccccttctgcctttgcgctcgcgcggccggttgccgaccggcccgaggggacctttggatgcctccgttactttttaggaggcgaccgccccagtcaaactggccaccaggcgttgttccggctcccgtaagggagcgcggttag

SEQ ID NO: 41176 - protein, 121 aa, Unknown
  Obtained from environmental sample
  misc_feature (1)..(121): Xaa is any amino acid
MANSQTLGTFSSPRMRRADIEVPNLPVAMDAWGRSACYPQSTFYPLSNGRSTLCRGITKPCFRICSARRPRSQAPFCLCARAAGCRPARGDLWMPPLLFRRRPPQSNWPPGVVPAPVRERG

SEQ ID NO: 41177 - DNA, 795 bp, Unknown
  Obtained from environmental sample
  misc_feature (1)..(795): n is a, c, g, or t
gtgaatccgcttgaagcgaacccccatgcaagcatgaaagaccacggaaaaagacatgtcaaaattgaaaggcagaaatggttcggctgcgcctgctgtcctcccaatcttgcgcgtcttatcgcctcgttgggaacttacattcattcgtcaggtaaagatgtcctctatactcatctttttaccggaagcgaggcaaaggtaaaaatctcaggagcggatgtaactgtcaagatagaaactgaatacccctggaaggaacaggtagacattagttttgccatgaacgcaaaaacaaaatttaaatattatttccgtattcccggatggtgccggaaatacagtatacgcattaacggtatagagcaaacctgcgttgttgaagatggttacgcgcttgttgaccgggaatggtcaactggcgataaaatatcccttgttttcgatatgcccgtaaattttatccgttctaatccccatgtacgggaaaatatcggtaagatcgcggtcatgcggggccctattgtatattgcgcggaagaggaagataacggcaatgaactcttcagactccacacaggaaagccaaacgatataattataaggcatgcaaaagatctgccgggaaatgttacggcaatttcctttaccggcaagcgggaaaaagactgggactgcgatgctttgtatcagactgccgacgcggcttttgaagataaaaaaatcacccttataccgtattacgcgtgggctaaccgcaagaccggagaaatgacggtctggttaaatgagtga

SEQ ID NO: 41178 - protein, 264 aa, Unknown
  Obtained from environmental sample
  DOMAIN (1)...(178): Putative glycosyl hydrolase of unknown function (DUF1680)
  misc_feature (1)..(264): Xaa is any amino acid
MNPLEANPHASMKDHGKRHVKIERQKWFGCACCPPNLARLIASLGTYIHSSGKDVLYTHLFTGSEAKVKISGADVTVKIETEYPWKEQVDISFAMNAKTKFKYYFRIPGWCRKYSIRINGIEQTCVVEDGYALVDREWSTGDKISLVFDMPVNFIRSNPHVRENIGKIAVMRGPIVYCAEEEDNGNELFRLHTGKPNDIIIRHAKDLPGNVTAISFTGKREKDWDCDALYQTADAAFEDKKITLIPYYAWANRKTGEMTVWLNE

SEQ ID NO: 41179 - DNA, 564 bp, Unknown
  Obtained from environmental sample
  misc_feature (1)..(564): n is a, c, g, or t
atggacaatttattggcggaaggcaaagcggagccttgcgttattgtcatgaataacgggatggtacagacggaacaaagcaacgggagccgtgactgggaagcgcttgatattgaaagattgctcttggacgactgtatcccatatatagaaaaacattatcgcgtggccgtcggcaaatggagcagggcaatggcggggttgtcaatgggttccatgcagacgagcgttacaacgcttaaacacccggagttattcggatacgcaggaattttcagtggcttccttggaatgctcggagccctgggtaaaagcgaaaatgcccattttgtcgcgtttgacgacaaaccgaaactgttcgaatcttacaaactattcttccgatgcataggcgacgccgataagtttatcgggcagttcaattccgaaagcgatatgctgaaggaaaaagggcttgcccctgaacaatggccggcatacaaaaagataatttacccgggcggccacgactggaatgtctggcgtccttgcgtgcgggacttccttacgcttgtatttaagtga

SEQ ID NO: 41180 - protein, 187 aa, Unknown
  Obtained from environmental sample
  misc_feature (1)..(187): Xaa is any amino acid
MDNLLAEGKAEPCVIVMNNGMVQTEQSNGSRDWEALDIERLLLDDCIPYIEKHYRVAVGKWSRAMAGLSMGSMQTSVTTLKHPELFGYAGIFSGFLGMLGALGKSENAHFVAFDDKPKLFESYKLFFRCIGDADKFIGQFNSESDMLKEKGLAPEQWPAYKKIIYPGGHDWNVWRPCVRDFLTLVFK

SEQ ID NO: 41181 - DNA, 381 bp, Unknown
  Obtained from environmental sample
  misc_feature (1)..(381): n is a, c, g, or t
atgaaaaaaataccggtttttttgcttttgtgcgtaaccttgtttcttggctgcgtaaaagacaacgcttctcctacgcttgagaaaggcgttctcgctgttggggtggagattgggtatccgcctatggagtactacggggcggatggggctcttttggggtttgatatcgatcttgtaaaagcaatagcggaaaaattggagcttcaggttattttttttgatacggcttgggacgggattcttgcggggctggacgcttcccggtacgatattgcggttaatgttaccattttaccggagaggcgggaaaattataacttttcaaagccctatattaacagttttatgactatcgttacgcgcaaggatcaaaggtaa

SEQ ID NO: 41182 - protein, 126 aa, Unknown
  Obtained from environmental sample
  SIGNAL (1)...(23)
  misc_feature (1)..(126): Xaa is any amino acid
MKKIPVFLLLCVTLFLGCVKDNASPTLEKGVLAVGVEIGYPPMEYYGADGALLGFDIDLVKAIAEKLELQVIFFDTAWDGILAGLDASRYDIAVNVTILPERRENYNFSKPYINSFMTIVTRKDQR

SEQ ID NO: 41183 - DNA, 348 bp, Unknown
  Obtained from environmental sample
  misc_feature (1)..(348): n is a, c, g, or t
atgacatttgatatcagcaaagcaaggatctttatccgtcccggttacacggatttacggaaagcagtaaacgggctttcagtaatggtagagcaacaaatggcaggggaaccttttagcgggaacgtttatttattttgcaaccgtgggaggaagctgctgaaagctctgtggtgggacaggaacgggttttggctgagccagaaaaggctaaaaaaaagacagttcccctggcctgaaacggatgaagagctaagggaattaagcgcggaagaactgtcaatgctgttaagggggatagatttcttcaaagcgcacaaaagcctttattacaaatatgtttcataa

SEQ ID NO: 41184 - protein, 115 aa, Unknown
  Obtained from environmental sample
  DOMAIN (6)...(114): IS66 Orf2 like protein
  misc_feature (1)..(115): Xaa is any amino acid
MTFDISKARIFIRPGYTDLRKAVNGLSVMVEQQMAGEPFSGNVYLFCNRGRKLLKALWWDRNGFWLSQKRLKKRQFPWPETDEELRELSAEELSMLLRGIDFFKAHKSLYYKYVS

SEQ ID NO: 41185 - DNA, 852 bp, Unknown
  Obtained from environmental sample
  misc_feature (1)..(852): n is a, c, g, or t
ttggttatggcaagaacaagtactttagaaataactgaaagcgataaaatttattttgaatcccttgtccgttccaggacaatacaggcacagatattacagagagcaagaataattttactaagagcagaaggtattcctatagatgcaattgctgacaaagtaggactaaatagaaaaagcgtgatgctatgtattgaaaaatacaaagacggcggtgcggaaaacgcactttatgacgcccctggacgaggccgcaaccctgaaataacggatgatgagaaggcatggataataaacatcgcgtgccagaggccttatgaattgggctgcgcggaagaagcatggacatatacgcggcttgcgtcatatataaacaaaaatgctgaagcttcaggctacacaaggctttccagcataagccgctccagcataaaaaacatactggatcacgctgacataaaaccgcataaaatccggtattactgtgagaaaagggacccagattttgataaaaaaatgcatgatgttcttgtcgtttacaagcaagtagaactgcaattcgatgaacaggaacggcatcttgcacctaacaatgccaagggcaaaaaaatcaacacggtatcatatgatgaaaaacctggcatacaggcaattgccaatacatctgaggataggatgcccacagccgctaatgggtataggcagcgcgattttgaatacaaaagactggggacattgtccttgctagcggggattgatttgcttaccggggaagcaataccgcttttaagtgaaacgcacaagagctcagactttatagcgtttttaaaaatgtactgcttatgctga

SEQ ID NO: 41186 - protein, 283 aa, Unknown
  Obtained from environmental sample
  misc_feature (1)..(283): Xaa is any amino acid
MVMARTSTLEITESDKIYFESLVRSRTIQAQILQRARIILLRAEGIPIDAIADKVGLNRKSVMLCIEKYKDGGAENALYDAPGRGRNPEITDDEKAWIINIACQRPYELGCAEEAWTYTRLASYINKNAEASGYTRLSSISRSSIKNILDHADIKPHKIRYYCEKRDPDFDKKMHDVLVVYKQVELQFDEQERHLAPNNAKGKKINTVSYDEKPGIQAIANTSEDRMPTAANGYRQRDFEYKRLGTLSLLAGIDLLTGEAIPLLSETHKSSDFIAFLKMYCLC

SEQ ID NO: 41187 - DNA, 813 bp, Unknown
  Obtained from environmental sample
  misc_feature (1)..(813): n is a, c, g, or t
atgacaacttccccggctgccctttcgcgccccgctgcaaaaaagcccaaagtatctgttcgcaaagtttcccgccccagaaagaaattaacggcgcaaaagttcactgctactatccgtattccggagactgtgatgcctgaaaccaccctgctttcaatccgtaacgtatcatgctcttatgtcagcaaaaggttcggtctttttggaaaaaaagaaataaagcccgtccttaaaaatataaatcttgaactgcggcagggagaaattttcggacttacgggcaaatcaggctgcggcaaaacaactttggcgcgttgtattttaaaactcattgattatgaaggagaaattctgcttgagggacagagagaagaaaaaccaccgccgattcagatggtttttcaggaaacgggcgcgtcgttaaacccatgcaaaaacatcggctggcttatggaagagcctcttgttattcacaaaataggaaataaagaagagcgcaggcacaagattgacagaatgttactgcgcgtcggacttgacccgtcctataaagaacgccgcgttcatgagttaagcggcggacaaaaacagcgcgtctgcatcgcccgcgcattgattctatccccgcgcctattaatcgccgatgaagcgatcagttcccttgacgtatcagccggcgcgcagatactgaacctgttcagggaactgcataaaagcatggatttgacaattctttttatttcgcataacaaggatgcggtagagtatatttgcgacaggatggcggttatggatggcggacggttgtaa

SEQ ID NO: 41188 - protein, 270 aa, Unknown
  Obtained from environmental sample
  DOMAIN (88)...(268): ABC transporter
  misc_feature (1)..(270): Xaa is any amino acid
MTTSPAALSRPAAKKPKVSVRKVSRPRKKLTAQKFTATIRIPETVMPETTLLSIRNVSCSYVSKRFGLFGKKEIKPVLKNINLELRQGEIFGLTGKSGCGKTTLARCILKLIDYEGEILLEGQREEKPPPIQMVFQETGASLNPCKNIGWLMEEPLVIHKIGNKEERRHKIDRMLLRVGLDPSYKERRVHELSGGQKQRVCIARALILSPRLLIADEAISSLDVSAGAQILNLFRELHKSMDLTILFISHNKDAVEYICDRMAVMDGGRL

SEQ ID NO: 41189 - DNA, 393 bp, Unknown
  Obtained from environmental sample
  misc_feature (1)..(393): n is a, c, g, or t
atgcgcgtcgtgaacgaacttatccaatacggaaaagtccgccgaggctggatagacgcgaccgtcgttcaaatttttccaagcctcgtccgttatgcgaaattacccgtggacgcggggcttcttatttcccgcaccaagaagggcggccttgcggaaaaagccggtttgaagcagggcaacgagcccgtgcagtacggacgcagcgtgatttatcttggcggggacattatcacttccgtaaacggcataaaaacaaaaaccctagccgatctttacgcgtctttagaggcaagcaagcccggggatgtggtgaagatggagataattcgcggcggacagacaagtactttgcaagtgacattggcggatagggaagaggtgatgaattga

SEQ ID NO: 41190 - protein, 130 aa, Unknown
  Obtained from environmental sample
  misc_feature (1)..(130): Xaa is any amino acid
MRVVNELIQYGKVRRGWIDATVVQIFPSLVRYAKLPVDAGLLISRTKKGGLAEKAGLKQGNEPVQYGRSVIYLGGDIITSVNGIKTKTLADLYASLEASKPGDVVKMEIIRGGQTSTLQVTLADREEVMN

SEQ ID NO: 41191 - DNA, 1734 bp, Unknown
  Obtained from environmental sample
  misc_feature (1)..(1734): n is a, c, g, or t
ttgacccatacgatactgcggttcgctctcctgagagtactcgttgtaaaaggaagcgcccggcctgctcgtctgaggcgcgctgtcccaatcgtcaacctgccgccgatcccctccgaaactgttgacggacaccctgcccgccttactatccgaaatcctccccgccgtattaatcgatacttttcccgcgttgttaatcgagacccttcccacgctgttattcggcacgcccaatgcccggccaaccccggcggcgccgttttggaagctgtacaactctccgggcacgtcggcgataaaacgcgacggctcgctcggctgtatgctgccgaaacggaaacgcctctcggcgtagcagcactccagcgcgtccatggcgcgggtgctgccgacgtagaagagacggcgctcctcctccactttggccgggtcgtgcaacacttgacgcgatgggattatcccatcctccacgcccacaagaaaaaccaccctaaactccaaacctttggcggagtgcagcgtcatgaagttgacggcgttctcctcccggttccacccgtccacatcggcagcaagcgagacctcctccaaaaaatccgacagcgtaccctcgctgttatccccctgccaagcggccatcgcgttcatcaactcgttcacgttctccacgcgggcggcctcctcctccgacgcggcggcgcgttcggtcagcatatccatgtagccgctctccttaagcataaccctcaacacctccgccggtggggcgggttcgttcataagctccgtaagcaacatatacaactcccgcaaatcggcgaaacctttacggtaacgtgtattcaactcctcggcctcgccggacagaacggcttccagcggcgacacgcccctctcctttgccaaaatgtagagcgcctccatagctttgtctcccaagcccctcgccggaacgttcgctatgcgctcgaagctcacgccgtccttcggattaacgagcagacgcaggtaggccatgcagtccttcacctccgcccgttcgtagaagctcgtgccgcccaccaaaacgtaggggacgcgcctcttcctaaaagcctcctcgaagacgcgcgactgcgagttcgtcctgaacagcaccgcgatctccgttccggccatcctccgcagcagtccctcgcactcgacggcgacgtactccgcctcctggcggtcgtccctgaagcggcagaccgagaccggcgcgccgcccgccgcgcccgtccacagctctttgcgcgcgcgcatcaaattcggcttcaccgcggcgttcgcgaacttcaaaatcgcgcccgtcgaacggtaattctcctccagcttgaatatcttcgtgccggggaacgcctcctcgaaggtcaaaatattctcgatcttcgcgccgcgccagccgtagatgctctgatcgtcgtcgcccaccgcgaaaatcttcccgtgcgcttcggaaagcagccgaaccaagtagaactgcgccttgttcgtgtcttggtactcgtcgaccaatacgtaacggaacatgtcctgatacttcgcgaggacctccttgttcgcgcggaacatatacacaacgttgcttatgaggtcgtcgaagtccatggcctgctgctcccgcagagccttttgatacaagccgtaggccctccgccgcctcgcgctcccacattcccgacgcccgcgcctcgcactcgcccggagtaa

SEQ ID NO: 41192 - protein, 577 aa, Unknown
  Obtained from environmental sample
  misc_feature (1)..(577): Xaa is any amino acid
MTHTILRFALLRVLVVKGSARPARLRRAVPIVNLPPIPSETVDGHPARLTIRNPPRRINRYFSRVVNRDPSHAVIRHAQCPANPGGAVLEAVQLSGHVGDKTRRLARLYAAETETPLGVAALQRVHGAGAADVEETALLLHFGRVVQHLTRWDYPILHAHKKNHPKLQTFGGVQRHEVDGVLLPVPPVHIGSKRDLLQKIRQRTLAVIPLPSGHRVHQLVHVLHAGGLLLRRGGAFGQHIHVAALLKHNPQHLRRWGGFVHKLRKQHIQLPQIGETFTVTCIQLLGLAGQNGFQRRHAPLLCQNVERLHSFVSQAPRRNVRYALEAHAVLRINEQTQVGHAVLHLRPFVEARAAHQNVGDAPLPKSLLEDARLRVRPEQHRDLRSGHPPQQSLALDGDVLRLLAVVPEAADRDRRAARRARPQLFARAHQIRLHRGVRELQNRARRTVILLQLEYLRAGERLLEGQNILDLRAAPAVDALIVVAHRENLPVRFGKQPNQVELRLVRVLVLVDQYVTEHVLILREDLLVRAEHIHNVAYEVVEVHGLLLPQSLLIQAVGPPPPRAPTFPTPAPRTRPE

SEQ ID NO: 41193 - DNA, 606 bp, Unknown
  Obtained from environmental sample
  misc_feature (1)..(606): n is a, c, g, or t
ttgttctgcatgggcattggaatgacggccatgccccttatctgctttctggcggcagaaggcgcgtgttatacgaagaattggaaaaaatatttgctgaaaatatcgctgtgggctgttcccgcgcatatcgcctacacgctggcggcagctaaaccgctaaacccatttgccgcaccctttatcatgcacacaagcgtattgtggacgataagctgcggcataggctcttttttcgcgctgatgcatcggacgcaattcgggatagaactgatgctgttattactggcgctgggactgtacggggactgggggatatgcgcggcggttgcgatactgtgcatggcattgacgcggaatgattttaaaaaacaaatgctggcaatgtcattgtgtttcggtatcgggcttatttacacgtttttacagcaagggttggcgttagccctggtacaggcctgctttttattctcaattcccgtactgaaacggtacaacggtaaattgtataattcaaaaccgctgccgagattcgctttttattggtattatccggcacatttgtttatattggcggggataaggcaaataataaataatagctaa

SEQ ID NO: 41194 - protein, 201 aa, Unknown
  Obtained from environmental sample
  SIGNAL (1)...(18)
  misc_feature (1)..(201): Xaa is any amino acid
MFCMGIGMTAMPLICFLAAEGACYTKNWKKYLLKISLWAVPAHIAYTLAAAKPLNPFAAPFIMHTSVLWTISCGIGSFFALMHRTQFGIELMLLLLALGLYGDWGICAAVAILCMALTRNDFKKQMLAMSLCFGIGLIYTFLQQGLALALVQACFLFSIPVLKRYNGKLYNSKPLPRFAFYWYYPAHLFILAGIRQIINNS

SEQ ID NO: 41195 - DNA, 447 bp, Unknown
  Obtained from environmental sample
  misc_feature (1)..(447): n is a, c, g, or t
atgccagggaagaggttcatgccgaacacaaagccgcgaccttcatcctggaggccggccttatcagggcgacgaaatacgaagagccggatgacagaacgaagaagggaccggatggctatacaaccaattgatctccagaccctttttacccagcttgacaaggtggcaaaaacgcagagcgaccagcgcgaaggcgcggctctgcatcaggctattcagggcgcgcagcttcagcgcaggactgaagatcaaattaaagcggttaaccaggcgcagaatatgggtgaggacggcgccgagaaagtaaaagacagggggccgcaggcgcaaaacggcaatggcaaaggcaaaaaaaaggaagacgaaaaacctcagcaggaggaagcaaaggcggcagttattcatgacctcagcctgggcagaaaaattgacataagcctgtag

SEQ ID NO: 41196 - protein, 148 aa, Unknown
  Obtained from environmental sample
  misc_feature (1)..(148): Xaa is any amino acid
MPGKRFMPNTKPRPSSWRPALSGRRNTKSRMTERRRDRMAIQPIDLQTLFTQLDKVAKTQSDQREGAALHQAIQGAQLQRRTEDQIKAVNQAQNMGEDGAEKVKDRGPQAQNGNGKGKKKEDEKPQQEEAKAAVIHDLSLGRKIDISL

SEQ ID NO: 41197 - DNA, 351 bp, Unknown
  Obtained from environmental sample
  misc_feature (1)..(351): n is a, c, g, or t
ttgatggcgagaaacctcagagcagaggacagccttcctgacgataaagaagccattttgcaggatctgataaccaaacgggatatgctgaccaccgacctgaaaaagatagatgaaggcctgaaaaaaatccaggaatacctcaacagcctgaaagcgcgtggcagggtatcggcttcacaaaagatatatccgggggtaaagataattatccgcgatgccagggaagaggttcatgccgaacacaaagccgcgaccttcatcctggaggccggccttatcagggcgacgaaatacgaagagccggatgacagaacgaagaagggaccggatggctatacaaccaattga

SEQ ID NO: 41198 - protein, 116 aa, Unknown
  Obtained from environmental sample
  misc_feature (1)..(116): Xaa is any amino acid
MMARNLRAEDSLPDDKEAILQDLITKRDMLTTDLKKIDEGLKKIQEYLNSLKARGRVSASQKIYPGVKIIIRDAREEVHAEHKAATFILEAGLIRATKYEEPDDRTKKGPDGYTTN

SEQ ID NO: 41199 - DNA, 900 bp, Unknown
  Obtained from environmental sample
  misc_feature (1)..(900): n is a, c, g, or t
ttgcacggagggttcggggaaaacgggacattgcagacattattggaacagcacaaaatacattttaacggttccggttcaaaagcatccaaactttgcatggataaattcggcacaggccagcatgttgattccctgaaaataaggaaactgcgctcatgtaaaaagaaaaaggttaacgcaaaacaaattaaagagatgacgggctcagagaagaaacattggaaaaagttttgcggttttctgggcggggatacgattgtagtaaagcccaataacgacggctgttccaccggaattgtggttttgcgaagcccggaagatttacaaacatactgtgagctttgttccgaaggcgcgggttttattcccgaaagcacctttaacagccagcctaataaaattaacctgccctctgaattaggcgattttatttttgaggaatacatagaaacgcagaaacttgaagtgaagggaaacaaggttgttaccaaatcaaaggcggactgggtggaattaacagtaggggttttggaaaaacacggaatatatcactcgatgaacccaagcgtaaccgttgcggataacgctgttctttctctggaagaaaagtttcaaggaggaaccggcattaattttacgccgcccccggagaatattattaagcctgaattggttaaaataataaagaaaaacatggaaattaccgcgaaagagtgcggcgttaaagattattgccggatagacatattcgcgaataacaaaacaaacgaaattattgtaatagagataaacagtctgccgggtttgtcaccgtctacagtgttatttcaacaaggggcaaaagaagaacctccgttgtatccaaaggaattattggagtatatcatttcaaggtaa

SEQ ID NO: 41200 - protein, 299 aa, Unknown
  Obtained from environmental sample
  misc_feature (1)..(299): Xaa is any amino acid
MHGGFGENGTLQTLLEQHKIHFNGSGSKASKLCMDKFGTGQHVDSLKIRKLRSCKKKKVNAKQIKEMTGSEKKHWKKFCGFLGGDTIVVKPNNDGCSTGIVVLRSPEDLQTYCELCSEGAGFIPESTFNSQPNKINLPSELGDFIFEEYIETQKLEVKGNKVVTKSKADWVELTVGVLEKHGIYHSMNPSVTVADNAVLSLEEKFQGGTGINFTPPPENIIKPELVKIIKKNMEITAKECGVKDYCRIDIFANNKTNEIIVIEINSLPGLSPSTVLFQQGAKEEPPLYPKELLEYIISR

SEQ ID NO: 41201 - DNA, 585 bp, Unknown
  Obtained from environmental sample
  misc_feature (1)..(585): n is a, c, g, or t
atgaaagaacttttgttatctgaagttataaccgcaatgggagccgtaacggtaaatttcaaacagcagaaaataaccgtaaaaagcgtaagcaccgatactcgtagcctaaaaaaaggcgatatatacattgcccttaaagggaataattttgacggacatgattttgtttctattgcccggacaaagggagcgtgcgccgtagtttgttccaaagacgtggataccgatctgcctgttttaaaagtaaacgatactttagccgctcttcagaaactggcggcttattacagaacaaaattcaatatccccattattgccgttacgggaagcaacggaaaaacaaccacaaagaatatgatagcgactgttctggcttccaaattccgcgttttttttacagataaaaattacaataacgaaatcggccttcctaaatccatgctggaacttgacgattcttacgatgcggctgtttttgaaatgggcatgaaatctttaggagaaatagaaaccctttcccatatcgcaaaacccgatattccagtaattacccatataggtaaagcgcctataggcaactaa

SEQ ID NO: 41202 - protein, 194 aa, Unknown
  Obtained from environmental sample
  DOMAIN (106)...(194): Mur ligase middle domain
  misc_feature (1)..(194): Xaa is any amino acid
MKELLLSEVITAMGAVTVNFKQQKITVKSVSTDTRSLKKGDIYIALKGNNFDGHDFVSIARTKGACAVVCSKDVDTDLPVLKVNDTLAALQKLAAYYRTKFNIPIIAVTGSNGKTTTKNMIATVLASKFRVFFTDKNYNNEIGLPKSMLELDDSYDAAVFEMGMKSLGEIETLSHIAKPDIPVITHIGKAPIGN

SEQ ID NO: 41203 - DNA, 1410 bp, Unknown
  Obtained from environmental sample
  misc_feature (1)..(1410): n is a, c, g, or t
ttgaagcggcgcgaaaagttacgggcaaaactataccggcgaaaatcacgggaagaaggcagggcgaccccgccgccctatacgattcgtcgtccctcgcgtttgaaacactcggctggaaagcgcgttactccgacatggaaacaatacttaaaacaagctgggaagcgtataaaaatgaaagataaattattctcgtggatagacagcgccattcctttggcggtagagcttgaaacagggcttacaaaacaccccgcaatctctcctgaatcaggcggcgagggggaactggacaagtgcctctttcttgaaaactggctgaaagcgcagggcattacaaaccttgaacactatgacgctcccgacaaaagcgcaaaaggcggaattcgccccaatctaatcgcgacaattaccggaaacagcgaaaaacagctgtggattatgagccaccttgacgtagtcccccccggagaggaaaaactctgggaaagcgacccgtggactgttatacgcaaggatgattcaccggggcccagagttatcgggcggggtgttgaggataatcaacaggggttagtatcttccgttattacggctcttgcttttatcagtcaggggttaaagcctctgcggacaatcaagcttttgtttgcggctgacgaagaagtggggtccgcttttggtattgaatggcttgtaaataatcatggcggtttatttaataaaaatgacatggtactggtacctgacggtggggacataaagggcgaatgtattgaaatagcggaaaaacatattttttgggtgaagtttgttacccacggaaagcaggcgcacggttcaatgccggatttgggagccaacgcttttttagcgggagctgacattgccgtacggctttatcagggactttcagctaaatttaataaaaaagattcaatgtttgacccggactactccacttttcaaccgacaaaaaaagaagccaacgtccctaatatcaatactattccaggcgaggatgttttttgtatggatatgcgcgtccttccctgttattcaaaagattcggtatttgcggaaattgacaggataaaaacaaagatagaaaaagaatatcacgttacggttgaatattccttatcgcagtcaacacagtctaaagcgaccgatgtaaaagcgccgattgtcacattactaaccaaagctataccgcaggtttattccgtcaagccgcgccccatcggtattggcggcggcactatggcggcatatcttcgcaacattggtatagattgcgcagtctggacaaagacacaggaaacccttcatcaaccgaatgaatacgcgcttttggaaaatatccttggagacgctaaggttttcgcgttattggcgattagctaa

SEQ ID NO: 41204 - protein, 469 aa, Unknown
  Obtained from environmental sample
  DOMAIN (262)...(375): Peptidase dimerisation domain
  misc_feature (1)..(469): Xaa is any amino acid
MKRREKLRAKLYRRKSREEGRATPPPYTIRRPSRLKHSAGKRVTPTWKQYLKQAGKRIKMKDKLFSWIDSAIPLAVELETGLTKHPAISPESGGEGELDKCLFLENWLKAQGITNLEHYDAPDKSAKGGIRPNLIATITGNSEKQLWIMSHLDVVPPGEEKLWESDPWTVIRKDDSPGPRVIGRGVEDNQQGLVSSVITALAFISQGLKPLRTIKLLFAADEEVGSAFGIEWLVNNHGGLFNKNDMVLVPDGGDIKGECIEIAEKHIFWVKFVTHGKQAHGSMPDLGANAFLAGADIAVRLYQGLSAKFNKKDSMFDPDYSTFQPTKKEANVPNINTIPGEDVFCMDMRVLPCYSKDSVFAEIDRIKTKIEKEYHVTVEYSLSQSTQSKATDVKAPIVTLLTKAIPQVYSVKPRPIGIGGGTMAAYLRNIGIDCAVWTKTQETLHQPNEYALLENILGDAKVFALLAIS

SEQ ID NO: 41205 - DNA, 393 bp, Unknown
  Obtained from environmental sample
  misc_feature (1)..(393): n is a, c, g, or t
atggaaaccgcctgcacaaagagagaggaaatgcaaatattcgggaacgattacgacactaaggacggaacctgcatacgcggttatgtgcatgtaagcgatcttgccgccggccatgttctggcgttagactacatctgcaaaaacagcaagagcctgactgtaaatcttggaagtgaaacaggcttttccgtaacggaagtaattgaagcggcgcgaaaagttacgggcaaaactataccggcgaaaatcacgggaagaaggcagggcgaccccgccgccctatacgattcgtcgtccctcgcgtttgaaacactcggctggaaagcgcgttactccgacatggaaacaatacttaaaacaagctgggaagcgtataaaaatgaaagataa

SEQ ID NO: 41206 - protein, 130 aa, Unknown
  Obtained from environmental sample
  misc_feature (1)..(130): Xaa is any amino acid
METACTKREEMQIFGNDYDTKDGTCIRGYVHVSDLAAGHVLALDYICKNSKSLTVNLGSETGFSVTEVIEAARKVTGKTIPAKITGRRQGDPAALYDSSSLAFETLGWKARYSDMETILKTSWEAYKNER

SEQ ID NO: 41207 - DNA, 513 bp, Unknown
  Obtained from environmental sample
  misc_feature (1)..(513): n is a, c, g, or t
gtgtacagaaaaaacggcgagcctttgcctgatttatgggcgcttgatatcaacggcaaaccctgcacagacgccgcctccgtaatagacaatattatcaaaaaagccggaggcggtatcgctcctcttggcgggatcggcgttttacacggcgggcataaaggttatgggcttagcattatagtcgatcttttttcggctgtaatctcaggcggacttacttctaatcatgttaacagaaaaccggatcataccggcatttgtcattacttcatggcaattgattacggaattttcggcgataaaacttccataaaagcgggaatgtcaaaatttttacaggaactgagagacagtaaaaaagccgaaggacacagccgcatttatacgcacggagaaaaagaagcgcagctaatggaacagcgaatcaaaggacaaattcccgtaaacgaaaaaacctacgaagaaatgaagaaaatcgccggtatgttaaatgtagagttttccttgtag

SEQ ID NO: 41208 - protein, 170 aa, Unknown
  Obtained from environmental sample
  DOMAIN (1)...(160): Malate/L-lactate dehydrogenase
  misc_feature (1)..(170): Xaa is any amino acid
MYRKNGEPLPDLWALDINGKPCTDAASVIDNIIKKAGGGIAPLGGIGVLHGGHKGYGLSIIVDLFSAVISGGLTSNHVNRKPDHTGICHYFMAIDYGIFGDKTSIKAGMSKFLQELRDSKKAEGHSRIYTHGEKEAQLMEQRIKGQIPVNEKTYEEMKKIAGMLNVEFSL

SEQ ID NO: 41209 - DNA, 1077 bp, Unknown
  Obtained from environmental sample
  misc_feature (1)..(1077): n is a, c, g, or t
atgctaaaaataactttcttgggcgcgggcagtacaatctttgtccgtaatgttcttggcgattgtatgtcaagcgaagccttgcgcgaatgtgaaattgccctgtatgatattgacgctcaacgattaaaagaaagcgagcgaattttatccgcgataaataaaggcaagggcgggtattcaaaaatttcctgttacgccggaattgaaaatcttgaaaaggctctcaaagacgctgtgtttgttgtgaacgcgattcaggttggcggttacgaccccgctacaatagcggattttgaaatcccaaaaaaatacggactgcgccagactatcggcgacactctgggcatcggcggaattatgcgcgctctgcggacaattcccgtcttggaacattttgcccgcatcatggaaaaggcttgcccgaacgcgtggttcctcaattacacaaatccaatgtccatgctgacaggttttatgcaaagacacacaggcgtaaaaaccgtaggtctatgccacagcgtgcaggtttgttctttgcacttgcttgaatcgcttgatatgaaagataagctggaagggcgaaatgaattgatagccggaatcaaccacatggcatggcttttggaaatacgcgataaagacggaatcgatctttatcccgaaataaaaaagagggcgaaagaaaagaacgcggcggaaaaacattgggacatggtgcgttacgattatatcgacaaacttggctattactgcaccgaatccagcgaacataacgccgaatacaacccgttttatatcaaatcgaaatacccgcagttaatcgaaaaatttaatattccgttggatgaatatccgcgcagatgtatcagccagattgaaggctggaaagccgagtatgaaagcctgataaaaaaggatacccttgaacacgaacgctcgcgcgaatacgcgtcccacataatggaagccattgttacggggaatccgtataaaatcggcgggaacgtgcttaacacaaacgcaagcgtcgaaaacttacccgcgcaagcctgcgtcgaggttccctgcctgtag

SEQ ID NO: 41210 - protein, 358 aa, Unknown
  Obtained from environmental sample
  DOMAIN (3)...(358): Family 4 glycosyl hydrolase
  misc_feature (1)..(358): Xaa is any amino acid
MLKITFLGAGSTIFVRNVLGDCMSSEALRECEIALYDIDAQRLKESERILSAINKGKGGYSKISCYAGIENLEKALKDAVFVVNAIQVGGYDPATIADFEIPKKYGLRQTIGDTLGIGGIMRALRTIPVLEHFARIMEKACPNAWFLNYTNPMSMLTGFMQRHTGVKTVGLCHSVQVCSLHLLESLDMKDKLEGRNELIAGINHMAWLLEIRDKDGIDLYPEIKKRAKEKNAAEKHWDMVRYDYIDKLGYYCTESSEHNAEYNPFYIKSKYPQLIEKFNIPLDEYPRRCISQIEGWKAEYESLIKKDTLEHERSREYASHIMEAIVTGNPYKIGGNVLNTNASVENLPAQACVEVPCL

SEQ ID NO: 41211 - DNA, 1593 bp, Unknown
  Obtained from environmental sample
  misc_feature (1)..(1593): n is a, c, g, or t
atgtatattcactctccgcgcgatccgttacgtgaaggtcagcgtcttgcacaggcttgcggcgaaaacgcaggcggcgagaaaaaagcggttgtgattctcggctttgggtttggttacgccgctcaagcggctgcggaaatggggtattgcgtaattgtggcggaaaaacataaaagccttctgataaaagcgtttgaggttagagattttagcgagtttcttggtaagaacagaataattttcgtaatcggcggaagcggagaggcgataacaagcgctctttcgatagcggacgaaataatctccggcggaaacacagaagcgaaaaaaattgcgccgtacatcattaacaacaaagcgctgaccgcttttgacgagcagtggtacaaacaggtagaggacaaaattcgttcatggacgatgagggacgatatcaacaccgccacgcacaagcgtttcgggcagagatgggtgcgtaatttttcgcgtaacatcgaggctatccgtgattatcccggaatttcccgattgtcaaatcttgcgtcggcggacgccgaaaataaaccgctccccgtatttcttgccgcagcgggaccgagtttagacaaaattaaacccttgttacacgacatttatgaaaggtgcgtaattgtcgccgtagatacaaaccttcgcttttttgtaaaaaacaacattcagcccgattttgttcttgtagtagaccctcaattttggaacagccgtcatcttgatcgatgtatttgcaaagaaaataaattgcatatggcgttgattgccgagcctgccgtttatccgcccgtattaaaacttcctttcaaaaataaatttctttgcggctctatgcttccgcttggaaaatttatcgaacgcaaagttgacgaaaaaacaaaattaggcgctggcggttctgtcgcttccacggcgtgggatttcgcccgcttcctcggcgctttggaaatttggatagccggtttagacctttcgtttcccgatttgaaaacgcatttccgaggcgcgcgttttgaggaactttccaattccggctcaaatcgttttaaccccgtagaaaaatggatagtgcgggcattgcgcgacggtttccctttcaaagcagtttccgttcacggcggacaagttacaacggacaaacgtctttccctctacgccgtctggttcgaagcgcaatttgcgcaaaacaaacaaattcaaaactacagcctgttccacgaaggattggcaataaaaggactccagccttcggacagccaaaaaattttagccctgccgaaacgccgagaagaaatagaccgccgtattcagcggacattttccgaaatagaaaaagattttaacgcccacgaagaaaaacacaccagagcggaacgttatgacaaagcggttaacgctctgacgcacggattggaaagtataaaaacagccgctgaagaaggagcggaaattgccaaagacagcgaatttaaagaaatagcggatttcttgtcggcgtgtgtggagaaagagcggtatattgcgtatttgaaagaagtgttgaaattgtttatggggtga

SEQ ID NO: 41212 - protein, 530 aa, Unknown
  Obtained from environmental sample
  DOMAIN (176)...(335): Protein of unknown function DUF115
  misc_feature (1)..(530): Xaa is any amino acid
MYIHSPRDPLREGQRLAQACGENAGGEKKAVVILGFGFGYAAQAAAEMGYCVIVAEKHKSLLIKAFEVRDFSEFLGKNRIIFVIGGSGEAITSALSIADEIISGGNTEAKKIAPYIINNKALTAFDEQWYKQVEDKIRSWTMRDDINTATHKRFGQRWVRNFSRNIEAIRDYPGISRLSNLASADAENKPLPVFLAAAGPSLDKIKPLLHDIYERCVIVAVDTNLRFFVKNNIQPDFVLVVDPQFWNSRHLDRCICKENKLHMALIAEPAVYPPVLKLPFKNKFLCGSMLPLGKFIERKVDEKTKLGAGGSVASTAWDFARFLGALEIWIAGLDLSFPDLKTHFRGARFEELSNSGSNRFNPVEKWIVRALRDGFPFKAVSVHGGQVTTDKRLSLYAVWFEAQFAQNKQIQNYSLFHEGLAIKGLQPSDSQKILALPKRREEIDRRIQRTFSEIEKDFNAHEEKHTRAERYDKAVNALTHGLESIKTAAEEGAEIAKDSEFKEIADFLSACVEKERYIAYLKEVLKLFMG

SEQ ID NO: 41213 - DNA, 1242 bp, Unknown
  Obtained from environmental sample
  misc_feature (1)..(1242): n is a, c, g, or t
ttggggcctttttttttggagggtttcggtttgatgtatgaggggcaggcacagccgcaaggcggctgtgttcgtttggacccgccgctctcgcggcttaatgaagggttagtgcggataccgtccggctgcgccatatcgggcattatcgacaaatcaggacggcgaatgagcggcgaggcgatcatcaattccatcgccgtcatgcatgaccgatccaacggactgggcggcggctttgccgcttacggaatctaccccgagtataaagattattacgccttgcatttattttacgagtccgtgtccgcaaaaaaagaatgcgaggaattcctggaacagcattttgacattatcaacctatccaaaattcccaccagaaaaatgaaagaaataaccgatgaacctttgatctggcgttactttgtcacgcccctgcccacaaaactcgccgacagccagcttgacgagcgcgaatttaccgcaaaatgtgtgttccgcgtcaacaccagaattgacggcgcttacgttttttccagcggaaagaatatgggcgtgttcaaggcggtcggcttccccgaagatgtcgggcgtttttacaagcttgaggaatatgagggttggtgctttacggcgcacgggcgttatccgacaaatacgcccggctggtggggcggcgcacaccccttcgccctgcttgattattcagtggtgcataacggagaaatatcttcctacgacaccaaccgcagatccatcgaaatgtacggctacaaatgcacgctccagaccgacaccgaagtcatcacctatattatagattacctgcacagaaaacaaaaactttcttttaccgaaatcgcttcagttatcgcggcctcgttctggcagaccattgagaaacagccgcccaaagaaagggaggcgcatgaatttttgcgcataatgttcagcgcgcagcttataaccggcccgttttcgattattgtaggctttgacggcggactcatggcgttaaacgacaggctcaaactgcgcagcatggtagtcggggaaaaagataatatggtttatatcgcgagcgaagaagcggctatccgcatcatagaaccggaccttaataccgtatgggcgccaaaaggcggccagccggtaatcgcctgtttgaacggctggacagacggtctgcgtgccgcagaattgcgaaccgcgcgccccggcagcatggaaggcaaagaataa

SEQ ID NO: 41214 - protein, 413 aa, Unknown
  Obtained from environmental sample
  DOMAIN (164)...(363): Glutamine amidotransferases class-II
  misc_feature (1)..(413): Xaa is any amino acid
MGPFFLEGFGLMYEGQAQPQGGCVRLDPPLSRLNEGLVRIPSGCAISGIIDKSGRRMSGEAIINSIAVMHDRSNGLGGGFAAYGIYPEYKDYYALHLFYESVSAKKECEEFLEQHFDIINLSKIPTRKMKEITDEPLIWRYFVTPLPTKLADSQLDEREFTAKCVFRVNTRIDGAYVFSSGKNMGVFKAVGFPEDVGRFYKLEEYEGWCFTAHGRYPTNTPGWWGGAHPFALLDYSVVHNGEISSYDTNRRSIEMYGYKCTLQTDTEVITYIIDYLHRKQKLSFTEIASVIAASFWQTIEKQPPKEREAHEFLRIMFSAQLITGPFSIIVGFDGGLMALNDRLKLRSMVVGEKDNMVYIASEEAAIRIIEPDLNTVWAPKGGQPVIACLNGWTDGLRAAELRTARPGSMEGKE

SEQ ID NO: 41215 - DNA, 573 bp, Unknown
  Obtained from environmental sample
  misc_feature (1)..(573): n is a, c, g, or t
gtgcaaatagaggccgactgccgcgccgcgtttgaggctgagagaaaggacgcggaagacgaaggccgcgccgccggcagggaagcgggttttattgagggcaaggctgaagtagaacgccttgttgaaagaacgcagaccattttgcagcgtgcccaggacaaacgcgcagaaatacttgaagagaccgagcaggaaattatcagtctggtacttttaatttccagaaaggtaattaaggttatctccgaaagccaaagaaacgtgatcatatcaaatgtggttcaggcgctgcgcaaagttaagggcaggggaaacattattatccgtgtgaacatggcggatttgaaacttacttccgagcatacaaaggatttcatcaatcttgtggaaggttccaaatcagttcaaattgtggaagatacttcgatagatgaaggcggatgcataattgaaaccgacttcggcgagattgacgcccgcatttcaagccagcttatggaacttgaatcgaagatccttgaaatttctcccataaagtcatgggccaaaagcgaaactgtagagagctaa

SEQ ID NO: 41216 - protein, 190 aa, Unknown
  Obtained from environmental sample
  misc_feature (1)..(190): Xaa is any amino acid
MQIEADCRAAFEAERKDAEDEGRAAGREAGFIEGKAEVERLVERTQTILQRAQDKRAEILEETEQEIISLVLLISRKVIKVISESQRNVIISNVVQALRKVKGRGNIIIRVNMADLKLTSEHTKDFINLVEGSKSVQIVEDTSIDEGGCIIETDFGEIDARISSQLMELESKILEISPIKSWAKSETVES

SEQ ID NO: 41217 - DNA, 1035 bp, Unknown
  Obtained from environmental sample
  misc_feature (1)..(1035): n is a, c, g, or t
atggaaacaagctatattcaaatgctcgctatggaaccgcaatcgataccgggtatatacctctggggtatcgaaattgtaaaggtaattcaaaggttaaaaagccctgccctgacggcggtactgacattcattaccgaatttggaactgattttttttaccttccggcaattttattttttttctggtggattgataaagaaaaaggtgtccgcctgggtattcttatcattttatccgcgtggataaatgcctttcntaaaaacattttcaaacagcccaggcctttcaattttgatccgtccctgggtctggcttatgaaccgacttacggcgctccatcagggcacgcccagttttcgctctgtttttgggttccggtagccgcgtggcttgccggggggaaacctggacgcaggcgtattgtagtttgggccgcggcaatatttttccttctccttattggctttacacgcctttatttgggcgtacacttcccaaccgatcttttagccggctgggcattgggcgctataatccttcttttgatgtatgttttaagccagctttttaaaaaacacttgttcaataaacatttaatcggtcaaacacgctcacaaaacattttggcggctcttgcggcgtttgtcatgatcagcgtttatcccgacgatagatccatgcctgccgttttcctgggcttctgccttggctacaacataatgaataagaattttcctttttgttcacagagcgaaataaaagaaaaaaaactttcagttatgctggtacggtgcattataggctttgcgggccttgttgtcatttaccttgtattgcggcttttgtttcccggcgaggggagccttttcagctacattcccctttggagccagaattccccgttttacgagctggggcgctttatccgctacggtatggtcggactttgggcatccgccggagccccaatgctctttcaacgcatgggactttcattcgcggcaggtaacagtgaagaacccaaaaaatga

SEQ ID NO: 41218 - protein, 344 aa, Unknown
  Obtained from environmental sample
  DOMAIN (69)...(193): PAP2 superfamily
  misc_feature (1)..(344): Xaa is any amino acid
METSYIQMLAMEPQSIPGIYLWGIEIVKVIQRLKSPALTAVLTFITEFGTDFFYLPAILFFFWWIDKEKGVRLGILIILSAWINAFXKNIFKQPRPFNFDPSLGLAYEPTYGAPSGHAQFSLCFWVPVAAWLAGGKPGRRRIVVWAAAIFFLLLIGFTRLYLGVHFPTDLLAGWALGAIILLLMYVLSQLFKKHLFNKHLIGQTRSQNILAALAAFVMISVYPDDRSMPAVFLGFCLGYNIMNKNFPFCSQSEIKEKKLSVMLVRCIIGFAGLVVIYLVLRLLFPGEGSLFSYIPLWSQNSPFYELGRFIRYGMVGLWASAGAPMLFQRMGLSFAAGNSEEPKK

SEQ ID NO: 41219 - DNA, 678 bp, Unknown
  Obtained from environmental sample
  misc_feature (1)..(678): n is a, c, g, or t
gtggatacgggaatgccgcaggtcgcctaccgcgaaacaattacgcagaaagcggaatttaattacacgcataaaaaacagacaggcggagccggacagttcgggcgggtagcgggttatatggaaccctacgcggacggagactacgagtttgttgacatgatcaagggcggatcaatccccacagagtatgtgccaagctgcgacaagggatttaaggaggcggtgaaaaaaggcagccttatcggcttccccattgtaaacatccgctgcgtaatcaacgacggacagagccacccggtagactcgtcggacattgccttccaggcggcggctatcggcgctttccgcgaagcgtacagcaaggcaaaacccgtcatattggaaccgattatgaaagtgtcggtggaaggcccgacggaattccagggaaacattttcggctctatcaaccagaggcgcggaataattttatcgtccgtagaggacgggcttttctcccgcgtcgattccgaagtcccattaagcgaaatgttcggctactccacggcgctgcgctctctgacgcagggcaaggcggaattttcgatggaatttgaaaaatactcaaaagtcccacagggcgtatcagaagcgttaattaaagaagccgaaaagaagaaaaggaaggagagataa

SEQ ID NO: 41220 - protein, 225 aa, Unknown
  Obtained from environmental sample
  DOMAIN (126)...(213): Elongation factor G C-terminus
  misc_feature (1)..(225): Xaa is any amino acid
MDTGMPQVAYRETITQKAEFNYTHKKQTGGAGQFGRVAGYMEPYADGDYEFVDMIKGGSIPTEYVPSCDKGFKEAVKKGSLIGFPIVNIRCVINDGQSHPVDSSDIAFQAAAIGAFREAYSKAKPVILEPIMKVSVEGPTEFQGNIFGSINQRRGIILSSVEDGLFSRVDSEVPLSEMFGYSTALRSLTQGKAEFSMEFEKYSKVPQGVSEALIKEAEKKKRKER

SEQ ID NO: 41221 - DNA, 717 bp, Unknown
  Obtained from environmental sample
  misc_feature (1)..(717): n is a, c, g, or t
ttggacgcctgcccggaattgcgggtgatttcccgttgcggcgccggcatggacagcgtggatctgggagcggccaaggaaaaaggcatcgccgtgcgcaatacgccggacgctccgactcgggccgtggccgaacttaccctggcatacgccctggatctcctgcgcggcgttgcgcgtatggatcgcgacgtgcgcgccggaatctggaaaaaacgcatgggtgttctgctggaagggaaaagggtcggcatcgtgggttttggccgcatcggccgcgctgtcgccacgcttttcgcagccttcggcgcgcagattgcctttgccgatcccgccgcgcacgacagcgttcacccgaaaatggagcttgacgccttgtgcgcctgggcgcagctcgtcagcctgcactgctccacgccgaaggacggcaagccggttatgagcgcgcagcttctggaactcatgcagcccggctcctggctgatcaatgcggcgcgcggcgggcttgttgacgaggaggcgctgtttggcctcttgcagtccggccggcttgccggcgccgcgctggacgtatttgccgaggaaccctataccggcccgcttgcgggtctcgacaacgtcatcctgacgccgcatatcggctcctatgcgcaggaatcgcgcatccgccaggaagtcgaaaccgtcaaaaacctgctggaagaactgcggccgtaa

SEQ ID NO: 41222 - protein, 238 aa, Unknown
  Obtained from environmental sample
  DOMAIN (48)...(214): D-isomer specific 2-hydroxyacid dehydrogenase, NAD binding domain
  misc_feature (1)..(238): Xaa is any amino acid
MDACPELRVISRCGAGMDSVDLGAAKEKGIAVRNTPDAPTRAVAELTLAYALDLLRGVARMDRDVRAGIWKKRMGVLLEGKRVGIVGFGRIGRAVATLFAAFGAQIAFADPAAHDSVHPKMELDALCAWAQLVSLHCSTPKDGKPVMSAQLLELMQPGSWLINAARGGLVDEEALFGLLQSGRLAGAALDVFAEEPYTGPLAGLDNVILTPHIGSYAQESRIRQEVETVKNLLEELRP

SEQ ID NO: 41223 - DNA, 570 bp, Unknown
  Obtained from environmental sample
  misc_feature (1)..(570): n is a, c, g, or t
ttgcccgaacctttcggcgccgaggccgcggacaggctggtcatgtaccatgccgcgcatggaggcgtgagccggtataagaagtttgagtggctgtaccgcgaagtcntgggacgcgagattacacaggaagaacttgcggatcttggccgccgctttgccgaaatagcttttgaggaggtgtgccgttgcgatttggcgcccgggatcgaagacgtcctccggcgctggcagggccggatgcccatgtatgtctgttccggcgcgccgcaggaggaattgcacgacattctgcatcggcgcgggcttgagcgctattttgcgggcatctacggttcgccgcccgccaagaccgagttgctgcgcgagatcatcaggttggccggggtggaccccgccgacgcggtcatggttggggacagcgtgacggatttggatgccgccgaggctgtcggcacgcgtttttacggccgcggcgccgaactgcaaggcggcaacttcccctggggtgaggatcttacgggcctgaacgcctggcttgaagccgtgcaggccggcggcctgccatga

SEQ ID NO: 41224 - protein, 189 aa, Unknown
  Obtained from environmental sample
  DOMAIN (1)...(161): haloacid dehalogenase-like hydrolase
  misc_feature (1)..(189): Xaa is any amino acid
MPEPFGAEAADRLVMYHAAHGGVSRYKKFEWLYREVXGREITQEELADLGRRFAEIAFEEVCRCDLAPGIEDVLRRWQGRMPMYVCSGAPQEELHDILHRRGLERYFAGIYGSPPAKTELLREIIRLAGVDPADAVMVGDSVTDLDAAEAVGTRFYGRGAELQGGNFPWGEDLTGLNAWLEAVQAGGLP

SEQ ID NO: 41225 - DNA, 750 bp, Unknown
  Obtained from environmental sample
  misc_feature (1)..(750): n is a, c, g, or t
atgaatttcgatccaaactttgttccatatccttcgattcgttaccccgtatatgcacgggaaggcatggtcgcaacttcttcgccccaggcgtccctggcagggcttgaggctttaagacagggtggaaacgccgttgacgcggcggtggccgcggcggctgctcttaccgtaaccgagcctgcgtccaacggtataggaagcgatgcctttgccattgtttgggcgggcggaaagctttacggccttaacgcttccggcaaggctccggctaacatctccatagaaaaactaaaagaagcccaaggcggcattggaaagatgcctttttgcggatgggctcctactatggttccgggagcgcccagggcctgggcctgcctggccgagcgtttcgggaggctacccctcaagaaatctatggaaagggcaattcattacgcacgggaaggttatcccatagccgccacaaaagccgccgcttttatccaggcggctgaacgctacaaatcggctggaagagattgcggtcaaagaatttttgatgaatggttcaaaactttcatgcccaaaggagagcttccaaaggcaggtgacatgatcgttctcaggaaccacgccgaaagccttgaagcgattgccgagacaaacggcgaagctttttataaaggcgagcntggcggatcgcattgtggcggactcaagggaactgggagggtttttctgcaaagaagatttttcgtcctatga

SEQ ID NO: 41226 - protein, 249 aa, Unknown
  Obtained from environmental sample
  DOMAIN (36)...(248): Gamma-glutamyltranspeptidase
  misc_feature (1)..(249): Xaa is any amino acid
MNFDPNFVPYPSIRYPVYAREGMVATSSPQASLAGLEALRQGGNAVDAAVAAAAALTVTEPASNGIGSDAFAIVWAGGKLYGLNASGKAPANISIEKLKEAQGGIGKMPFCGWAPTMVPGAPRAWACLAERFGRLPLKKSMERAIHYAREGYPIAATKAAAFIQAAERYKSAGRDCGQRIFDEWFKTFMPKGELPKAGDMIVLRNHAESLEAIAETNGEAFYKGEXGGSHCGGLKGTGRVFLQRRFFVL

SEQ ID NO: 41227 - DNA, 741 bp, Unknown
  Obtained from environmental sample
  misc_feature (1)..(741): n is a, c, g, or t
gtgatagaacgtctttcgtatttttacagacacgaaaattcaaacgttcaccggggagcgcacgagcttgccgcccgttccaccgacgcttacgaagcggcgagggaaacaaccgcaagatttttaggcgctccttcaaaggacaatatcgtatttgtgcggggaacaacggaaggagttaaccttgcagctcaaagttatgtaaaacccctgctgagtccgggcgatgaaataattcttactattcttgaacaccacgccaacattgtcccctggcagttgatagcgcaagaaaccggagcggtaataaaagtagctcccgttgacgatacgggacagatcattttatccgaatacgcgcggcttttctgctcccgcacaaagttcgtttcggtaacgcacgtttcaaacgctcttggaacaattacccctattcgtgagatgattcaaattgcgcacggaaacggagtgcgtattcttatcgacggggcgcaatcggtagcccacacgccgcttaatgtcagcgaattggacgcagacttctttgtgttctcgggacacaagattttcggtcctacgggtataggcgctttatacggaaaagcggacgctcttgaagaagcgcagccgtatcagggcggcggcaatatgataaaggacgtaacctttgaacgaacggtatacaatcccnngcgccttccaaatttgaagcgggaaccggcaatattgccgacgcggtag

SEQ ID NO: 41228 - protein, 246 aa, Unknown
  Obtained from environmental sample
  DOMAIN (2)...(245): Aminotransferase class-V
  misc_feature (1)..(246): Xaa is any amino acid
MIERLSYFYRHENSNVHRGAHELAARSTDAYEAARETTARFLGAPSKDNIVFVRGTTEGVNLAAQSYVKPLLSPGDEIILTILEHHANIVPWQLIAQETGAVIKVAPVDDTGQIILSEYARLFCSRTKFVSVTHVSNALGTITPIREMIQIAHGNGVRILIDGAQSVAHTPLNVSELDADFFVFSGHKIFGPTGIGALYGKADALEEAQPYQGGGNMIKDVTFERTVYNPXRLPNLKREPAILPTR

SEQ ID NO: 41229 - DNA, 468 bp, Unknown
  Obtained from environmental sample
  misc_feature (1)..(468): n is a, c, g, or t
atgcccgacgaccttgacgaacttatttccaaagtatggaaagagcctgcgttctttttagcgcacccgcgcgccgtcgccgctttccagcgggaatgtacgcgcaggggcgtcccccccgctaccacgtcggtattcggcggcaattttattctttggcgcggtattccggttattcctacggacaaattgtttgtggacggtttgaaaaacccgaagagcaaaggcggaaaaaccaatatacttttaattcgcacaggtgaagcaaaacgcggagttgtcggtttgtaccagagcggtttacagaacgaacaaggaaggggactttccgtacgtttcaggggagtggacaacaaaggactcgcgtcctacctcctgtcgctgtactgctcagccgcgattctttcggatgacgccatagccgttcttgaagacgtggaagttggtaactattatgactacacctaa

SEQ ID NO: 41230 - protein, 155 aa, Unknown
  Obtained from environmental sample
  misc_feature (1)..(155): Xaa is any amino acid
MPDDLDELISKVWKEPAFFLAHPRAVAAFQRECTRRGVPPATTSVFGGNFILWRGIPVIPTDKLFVDGLKNPKSKGGKTNILLIRTGEAKRGVVGLYQSGLQNEQGRGLSVRFRGVDNKGLASYLLSLYCSAAILSDDAIAVLEDVEVGNYYDYT

SEQ ID NO: 41231 - DNA, 717 bp, Unknown
  Obtained from environmental sample
  misc_feature (1)..(717): n is a, c, g, or t
atggattcatataaaactctgcgggaagaagcctttctggcaaaccttgaagttcaaaagcggaatcttgccatttatacctggggcaacgcttccgcctttgatcccggaaaggcggtttttgccattaagccgtccggcgttccctacgaagagcttaagcccgattcaatggtacttgttgatcttgatggaaaaatagttgacggcaaactaaagccctcttctgacaccaaaacccatcaggtgctgtaccgcgagttttcgcaaaatacgcccggttccggcattaaaggtattacccacacccattcgccgtacgcggttgcctgggctcaggcaaggaagagcgttcctgttttcggcacgacccacgcggatcacggcgcggaggagattccctgcacggattttataagcgagcaggcgttaaaaaacgactacgagcttgagaccggaaagctcattacggaacatttcaggaaaggcaagttaaaccccgctcatgttacaatggtacttgttgccgggcatgggccctttacctggggagaaagcgcgaccaaatcggtgtataacggcgcagttctggaagaaatctgcaagatggcccttttaaccttgagaatcgatcctgaagcaaaaccgctgcctgagtacattatcagaaagcactgggaacgcaagcacgggcctgacgcgtattacgggcaatag

SEQ ID NO: 41232 - protein, 238 aa, Unknown
  Obtained from environmental sample
  DOMAIN (9)...(225): Class II Aldolase and Adducin N-terminal domain
  misc_feature (1)..(238): Xaa is any amino acid
MDSYKTLREEAFLANLEVQKRNLAIYTWGNASAFDPGKAVFAIKPSGVPYEELKPDSMVLVDLDGKIVDGKLKPSSDTKTHQVLYREFSQNTPGSGIKGITHTHSPYAVAWAQARKSVPVFGTTHADHGAEEIPCTDFISEQALKNDYELETGKLITEHFRKGKLNPAHVTMVLVAGHGPFTWGESATKSVYNGAVLEEICKMALLTLRIDPEAKPLPEYIIRKHWERKHGPDAYYGQ

SEQ ID NO: 41233 - DNA, 579 bp, Unknown
  Obtained from environmental sample
  misc_feature (1)..(579): n is a, c, g, or t
ttggcaatcaattcgcttgttagcacagaggctatgatcaaagaatatttgcaagacaacgaattgtctttggatagcaagcttaaagtaggcgatactttgcacttaaaactgccaaccttcaataacccgcaacataaaacaatgcaaggggcgtggaattttttcacaggtctattgaacgatagccttgcatatatcacagaactatacaacccaaatcaaaccgccactatgcggcgacacgatggaatagatgttgcagggcgcaaaggaacgcgaattttggcaccctttagcggaaccgcctggacaatggaagatgagcgcggcggtttgatgattgcaatagctagggaaaacgatttgcttatttttatgcactgcgaacagcggttttatttgaacggccaatcggttatggaaggagaccctatagcttctgtgggtagctctgggcacacaactgggcctcacgtacacgtagccgctgggaaaatatcaaaaaacggagagcgaaatatcagcggattaagatacaatgctttaaatccatttatatggttcaaggagatgtga

SEQ ID NO: 41234 - protein, 192 aa, Unknown
  Obtained from environmental sample
  DOMAIN (80)...(185): Peptidase family M23
  misc_feature (1)..(192): Xaa is any amino acid
MAINSLVSTEAMIKEYLQDNELSLDSKLKVGDTLHLKLPTFNNPQHKTMQGAWNFFTGLLNDSLAYITELYNPNQTATMRRHDGIDVAGRKGTRILAPFSGTAWTMEDERGGLMIAIARENDLLIFMHCEQRFYLNGQSVMEGDPIASVGSSGHTTGPHVHVAAGKISKNGERNISGLRYNALNPFIWFKEM

SEQ ID NO: 41235 - DNA, 885 bp, Unknown
  Obtained from environmental sample
  misc_feature (1)..(885): n is a, c, g, or t
ttggataaccgttcatttggcggagcacaggttagccgtactttttatgctcgcggacaaaccggtcagcagcttttgctcggcgcataccaggctttgatgaggcaggtagcaaagggcaatgtaaaaatgttcccccgccgcgaaatgatggatttggttttgatagacggcaaagccagaggcattgtgattcgcaatttgattacaggcgagttggaatgccacgaagccgatgctgtttgccttgcaacaggtggttacggaaacgtgttctacctctccacaaacgctaaaggctcaaacgtgggtgcagcttggcgggcacacaaaaaaggtgctctgttcgcaaatccgtgctacacgcagattcacccaacctgcattccggtaactggcgaccaccagagcaaacttacccttatgtccgagtctttgcgcaacgatgggcgcgtatgggttcctcgcaaaaacggcgacccacgcagacctagcgatataccagaatcggaacgttactattacttggaagaaaagtatcccagctttggaaatttggtgcctcgcgacgttgctagccgcaatgcaaaaatggtctgcgataatggccttggcgttggaacttcaaagcgcgctgtgttcttggatttcgcggacgccatcaaacgcattggcgatagcggagtcagcgcanagtacggaaacctcttccagatgtacgaaaaaatcacagacgaaaacccttacagaacaccgatgcgcatctacccagcttcgcattacacaatgggtggcttatgggtggactancatttgcaagcaccattccaggcttgttcgttttgggagaggcaaacttctccgaccacggcgcaaaccgcttag

SEQ ID NO: 41236 - protein, 294 aa, Unknown
  Obtained from environmental sample
  misc_feature (1)..(294): Xaa is any amino acid
MDNRSFGGAQVSRTFYARGQTGQQLLLGAYQALMRQVAKGNVKMFPRREMMDLVLIDGKARGIVIRNLITGELECHEADAVCLATGGYGNVFYLSTNAKGSNVGAAWRAHKKGALFANPCYTQIHPTCIPVTGDHQSKLTLMSESLRNDGRVWVPRKNGDPRRPSDIPESERYYYLEEKYPSFGNLVPRDVASRNAKMVCDNGLGVGTSKRAVFLDFADAIKRIGDSGVSAXYGNLFQMYEKITDENPYRTPMRIYPASHYTMGGLWVDXHLQAPFQACSFWERQTSPTTAQTA

SEQ ID NO: 41237 - DNA, 693 bp, Unknown
  Obtained from environmental sample
  misc_feature (1)..(693): n is a, c, g, or t
atgggtggactancatttgcaagcaccattccaggcttgttcgttttgggagaggcaaacttctccgaccacggcgcaaaccgcttaggagcttctgcccttatgcagggccttgcagatggctactttgttattccatacacaatcggtggttattttgctggcacaaaattggaaaaggtcaattctagccaaacggaatttgtggaagcggcaaagaattcaaaagccttgatagaccgcttgctctccatcaacggcaaaaaaacggtcacggagttctacagagaacttggacacatcatgtgggaaaatgtcggtatgggtcgcaataaagctggccttgaaaaggcaatttccaccattccaaatctgcgcgatgagttttggaaaaatgtcaaggtactcggagacaaaggtacctttaaccaaaatctggaaaatgccatgcgcgttgccgatttcttggaatttggcgaactcttggcaaaagacgctctttacagagaggaatcttgcggaggtcatttccgcgaggaacaccagacccccgataatgaggcaaaacgcgatgacacaaagttctgccacgttgcggcttgggaatggaaaggcgagaataacccgcacgaactcagcaaagaggaattggaatttgagaatgtacaccttattacaaggagctacaaatga

SEQ ID NO: 41238 - protein, 230 aa, Unknown
  Obtained from environmental sample
  DOMAIN (95)...(229): Fumarate reductase/succinate dehydrogenase flavoprotein C-terminal domain
  misc_feature (1)..(230): Xaa is any amino acid
MGGLXFASTIPGLFVLGEANFSDHGANRLGASALMQGLADGYFVIPYTIGGYFAGTKLEKVNSSQTEFVEAAKNSKALIDRLLSINGKKTVTEFYRELGHIMWENVGMGRNKAGLEKAISTIPNLRDEFWKNVKVLGDKGTFNQNLENAMRVADFLEFGELLAKDALYREESCGGHFREEHQTPDNEAKRDDTKFCHVAAWEWKGENNPHELSKEELEFENVHLITRSYK

SEQ ID NO: 41239 - DNA, 900 bp, Unknown
  Obtained from environmental sample
  misc_feature (1)..(900): n is a, c, g, or t
atggacgacctgttttccgcaaaaaacgataaatcatcacaaagcccccttgcggacagaatgcgccccagggtactggaagatattatcggacaggaccacattgtaggcccgggaaggcttctgcggcgcgctattcaggctgaccgtctttcctcaataatcctctacggcccgccgggaacgggaaaaacaagccttgccgccgtaatcgctaacacaacgcgcgccgcttttgaaaaccttaacgcggttctttccggcgttaaggacatacgcgaggtaattgaccgcgccgacgagcgtttcaggctttacggaaaaagaactattctttttgttgacgaggtccaccgctggaacaaggcgcagcaggacgctcttctgccctgggtggaaaacggcactgtaatccttgtcggagccacgacggaaaaccccttttttgaggtaaaccgcgcccttgtaagccgcagccgcattttccagcttaaaacgcttgattcgcgggacatgatggaagccgcccgccgcgccgccgcggacactgaacgcggttacggaaaatggaagatcacttttgaggaaggcgctcttgaacaccttgtggaagtggcgggcggagacgcgcgcactttgcttaacgcgctggagttggctattgagacaagcgatgggtggcccgctccggccggcaatgaaatacaaatctccctttcccgcgcggaagaaagcatacagcgccgcgctcttctctacgaccgcgacggcgattaccattttgacactatcagcgcgtttataaaagcgttaggggaagcgaccccgacgccgccctttactggcttgcgaaaatggtgcgcgccggagaagaccctaaatttattttcagacgaatga

SEQ ID NO: 41240 - protein, 299 aa, Unknown
  Obtained from environmental sample
  DOMAIN (53)...(173): ATPase family associated with various cellular activities (AAA)
  misc_feature (1)..(299): Xaa is any amino acid
MDDLFSAKNDKSSQSPLADRMRPRVLEDIIGQDHIVGPGRLLRRAIQADRLSSIILYGPPGTGKTSLAAVIANTTRAAFENLNAVLSGVKDIREVIDRADERFRLYGKRTILFVDEVHRWNKAQQDALLPWVENGTVILVGATTENPFFEVNRALVSRSRIFQLKTLDSRDMMEAARRAAADTERGYGKWKITFEEGALEHLVEVAGGDARTLLNALELAIETSDGWPAPAGNEIQISLSRAEESIQRRALLYDRDGDYHFDTISAFIKALGEATPTPPFTGLRKWCAPEKTLNLFSDE

SEQ ID NO: 41241 - DNA, 693 bp, Unknown
  Obtained from environmental sample
  misc_feature (1)..(693): n is a, c, g, or t
atggtgcgcgccggagaagaccctaaatttattttcagacgaatgattatcctagcgagcgaagacgttggtcttgccgacccaaacgcaatctccgtcgttatctcctgcgctcaggcttttgagcgaatcggttttcctgagggtaactttccgctttcccacgcctgcctgtacctcgctaccgctcccaaatcaaacacaaccatgtcttactttgacgcgctcaaagcggtggaaagcgaagacgccgaagtcccaaatcatttacgagacgcaagcagagacgcggaaagttttggtcacggagaggggtatgtttatcctcatgcgtaccgcgatcattgggcggctcaacagtacctgcccaattcattgcgaggaagaactttttacattccgtcttcatcgggctatgagggaaaaataaaagaagatgttttaagaaaacgcgaattgcaagcggcgattgtactaggctcgcaaaatgcggataccgacggagaatttttaacatggtctgcggcggcaaaaggacgcgaaggctggtttaaacgccttgaatcgggaagaagcagactgttgttaaacgacaggaacgctattttctcgtctgcttgcgtctcgcggcaggatcgggttttaattcctcttgctaacgacggacttcttctttgggaaagccttcgctaa

SEQ ID NO: 41242 - protein, 230 aa, Unknown
  Obtained from environmental sample
  misc_feature (1)..(230): Xaa is any amino acid
MVRAGEDPKFIFRRMIILASEDVGLADPNAISVVISCAQAFERIGFPEGNFPLSHACLYLATAPKSNTTMSYFDALKAVESEDAEVPNHLRDASRDAESFGHGEGYVYPHAYRDHWAAQQYLPNSLRGRTFYIPSSSGYEGKIKEDVLRKRELQAAIVLGSQNADTDGEFLTWSAAAKGREGWFKRLESGRSRLLLNDRNAIFSSACVSRQDRVLIPLANDGLLLWESLR

SEQ ID NO: 41243 - DNA, 456 bp, Unknown
  Obtained from environmental sample
  misc_feature (1)..(456): n is a, c, g, or t
ttgttcattatcttattaacaggatttgccatttttattgtctggctgattttgtacaaaatgaatttcggcagacagatgcgcgccgttatgcaaaaccgcgcaatggcgcagtgtttgggcattaactcccgcagaatagacaacatcactttcagcatcggttcgggtcttgccgggctggctggttgttccgtcgcgttgttgggttctattgacgcgacagttggacagaactacatcgtaaactcttttatggccgttgtattgggcggcgttggaaaattgatcggcacggttttaggttctctcgtcataggttttgctggcatcagcatcgaaagatttacatcgtcttccatggcgaaagcggcggtgcttttaataataattttatttttacaaaagaaaccgcaggggctctttaccatacgaaccagaagtctggacgaatag

SEQ ID NO: 41244 - protein, 151 aa, Unknown
  Obtained from environmental sample
  misc_feature (1)..(151): Xaa is any amino acid
MFIILLTGFAIFIVWLILYKMNFGRQMRAVMQNRAMAQCLGINSRRIDNITFSIGSGLAGLAGCSVALLGSIDATVGQNYIVNSFMAVVLGGVGKLIGTVLGSLVIGFAGISIERFTSSSMAKAAVLLIIILFLQKKPQGLFTIRTRSLDE

SEQ ID NO: 41245 - DNA, 783 bp, Unknown
  Obtained from environmental sample
  misc_feature (1)..(783): n is a, c, g, or t
atgcatcaagttgataaaaacaccgttcttacaatcagcggcgtttcggtatgcttcgacggtttttacgcccttaccgaagtaaccattgccgtaaaacgcaacaccgtccactttttcatcggcccgaacggggccggcaaaacaacgcttctggatattatctgcgcgaaaacgaagcccacacttggcaatgtcgtattttaccccaaagaaaaagaaaaaatacgccttacaggaatgaaagagtatgagattgcgcgtaacggagtgggcagaaagtttcaggttccgtccgtgtttgtaaaccttacggttttggataacatggttctttcgctgaaaaggcataaaagtattttagattcgattttccacagcccatccgccgaagaattcgcggaaatagatgaaatccttgaaaaggtgggattatcgaaacgaaagaacgtgaaggccggctctctcgcgcacggcgaaaagcagtggctggaaatcgccatgcagatcgccgcaaagccggaactcatcatgcttgacgagcctgtcgccggaatgggcagggcggaaacggacaaaaccgcggaaatacttgccgagataaaaaaggaatgtaccgtaatcgtggtggaacacgacatggaatttgtaaagatggcggcggacactgttacggttctgcacgagggcaaggtgctgaccgagggcgttttctccgacgtgcttgcggacaaaacagtacaggctgtgtatttgggcagaggcggtgaacgtaatgcttga

SEQ ID NO: 41246 - protein, 260 aa, Unknown
  Obtained from environmental sample
  DOMAIN (35)...(230): ABC transporter
  misc_feature (1)..(260): Xaa is any amino acid
MHQVDKNTVLTISGVSVCFDGFYALTEVTIAVKRNTVHFFIGPNGAGKTTLLDIICAKTKPTLGNVVFYPKEKEKIRLTGMKEYEIARNGVGRKFQVPSVFVNLTVLDNMVLSLKRHKSILDSIFHSPSAEEFAEIDEILEKVGLSKRKNVKAGSLAHGEKQWLEIAMQIAAKPELIMLDEPVAGMGRAETDKTAEILAEIKKECTVIVVEHDMEFVKMAADTVTVLHEGKVLTEGVFSDVLADKTVQAVYLGRGGERNA

SEQ ID NO: 41247 - DNA, 510 bp, Unknown
  Obtained from environmental sample
  misc_feature (1)..(510): n is a, c, g, or t
atgtcgccagtcaacaggaaacaatgcctgtacaatttaaaagaactgggctatcaggtggggtgcggctttatggttggctctcctaaccagacttcggatcatcttgtagacgatcttttttttattaatgaactaaaaccgcacatggtaggcatagggccttttatccctcattcggatacgccgtttaaagacaaaacggccggtgatttgcacctaacattgaatctccttgcgattttgcgccttatgcgtccaaaccttctgcttccggcgacaacggctcttgggacgcttgatccaagcgggcgggagttgggagtccttgccggcgccaatgttgttatgcctaacctttcccctgtggatgtgcgtaaaaaatatctgctttatgacaataaaatttgcaccggcgatgaagccgccgagtgtgtcgcctgtatgggcaggcgtattcaaaatacaggctacgaaatcgtagtcgcgcgtggtgattatgctgaataa

SEQ ID NO: 41248 - protein, 169 aa, Unknown
  Obtained from environmental sample
  misc_feature (1)..(169): Xaa is any amino acid
MSPVNRKQCLYNLKELGYQVGCGFMVGSPNQTSDHLVDDLFFINELKPHMVGIGPFIPHSDTPFKDKTAGDLHLTLNLLAILRLMRPNLLLPATTALGTLDPSGRELGVLAGANVVMPNLSPVDVRKKYLLYDNKICTGDEAAECVACMGRRIQNTGYEIVVARGDYAE

SEQ ID NO: 41249 - DNA, 594 bp, Unknown
  Obtained from environmental sample
  misc_feature (1)..(594): n is a, c, g, or t
ttgcgaagttcggccgatttacaggcgtattgcaatctttgcgcttccaaagccggttttattcctgaaaatacttttcccaatcaacctaataaaatacaattgccggaagaatacggcgactttttgcttgaggaatatatagaaacaaaaaaaatggaagtgcaaagctacgaagttgtaccaagtacgaatgcggactgggtggaattgacggttggagtgcttgaaaaacgcggagaataccattcgatgaatccaagcgtaaccgtagcggataatgacgttctttcgcttgaggagaagtttcagggagggaccggaattaactttactcctcccccgaaacacattatcagcgccgagttggttgggataataaagaaaaacatggaagttgccgcaaaagaatgcggcgtagaggattattgccggattgacatatttgcgaataacgataccaatgaaattattgtgatagagataaacagcctgccggggctgtctccgtctaccgttttgtttcaacagggggcgaaagaaaagcctccgctgtatcctacggaattactggaatttattatatcaaagtag

SEQ ID NO: 41250 - protein, 197 aa, Unknown
  Obtained from environmental sample
  misc_feature (1)..(197): Xaa is any amino acid
MRSSADLQAYCNLCASKAGFIPENTFPNQPNKIQLPEEYGDFLLEEYIETKKMEVQSYEVVPSTNADWVELTVGVLEKRGEYHSMNPSVTVADNDVLSLEEKFQGGTGINFTPPPKHIISAELVGIIKKNMEVAAKECGVEDYCRIDIFANNDTNEIIVIEINSLPGLSPSTVLFQQGAKEKPPLYPTELLEFIISK

SEQ ID NO: 41251 - DNA, 810 bp, Unknown
  Obtained from environmental sample
  misc_feature (1)..(810): n is a, c, g, or t
atggtgaaagtcgcggcgcttcagcatttaggcgaatttgccgccgtgccttttctctgttacggagagccgggtgagagaactattggcgtaaagtcttctataattgacgctgtagaatacatcctaaagccgtcgcaaaaaggggccgttttgttcatcggctcttccgagtcgggtgtggaacagcttttcctggagggcggccttgagcagatacacattgattccatgactgcctttaacgagactgtgtccgcgataaccccttcgcttgttgtttttaactcgcttaatattgctggcgcggtggcggtaaggcaacaccccctgacaataatggttcccattgtgatgatcagtagccgcatagacaaagccgccgatgtgatgagattgagccagtatccccggcttattatctgccaccgggcagtttcttcctcccccgaattcagggcgcgcctaaaagccttgattggcagggatgaaattttgcccccgcataccggcgtactggtaaagaaagcgctcctttatttcgaccaacattcagaatctcaaatttcccgctggaaactggcggacagcgttaatgtcaacgaggattacctgacgcggatttttcatcgtgaaatgggaatgtcgccgtgggattaccttaaccgtttaagggttttccttgccgcagaatttctaaggcagacagataagaccattcaggacattgcctggcagaccgggtttaacgatcaggcctatttttgccgtgtttcaagaaaatatacggcgtttcgccaaaacaactaa

SEQ ID NO: 41252 - protein, 269 aa, Unknown
  Obtained from environmental sample
  DOMAIN (176)...(222): Bacterial regulatory helix-turn-helix proteins, AraC family
  misc_feature (1)..(269): Xaa is any amino acid
MVKVAALQHLGEFAAVPFLCYGEPGERTIGVKSSIIDAVEYILKPSQKGAVLFIGSSESGVEQLFLEGGLEQIHIDSMTAFNETVSAITPSLVVFNSLNIAGAVAVRQHPLTIMVPIVMISSRIDKAADVMRLSQYPRLIICHRAVSSSPEFRARLKALIGRDEILPPHTGVLVKKALLYFDQHSESQISRWKLADSVNVNEDYLTRIFHREMGMSPWDYLNRLRVFLAAEFLRQTDKTIQDIAWQTGFNDQAYFCRVSRKYTAFRQNN

SEQ ID NO: 41253 - DNA, 795 bp, Unknown
  Obtained from environmental sample
  misc_feature (1)..(795): n is a, c, g, or t
ttgggcgaccttgatgtgtcggtgatagccgatctgccgccggggcgaaaggccatcaaaacccatctcgcgaaagaatccaatgaagggaaggtttatgattttgtacgccgcgaactggcggcaggacgccaggcatattttgtttatccgctaatcgaaggcgggaatgaatcggcatttatgccgcatgagctaaaagatgcggtgtccatggcggacaggctcgtcaaggaagtgtttcccgatttccctctggcgcttttacattccagggtggacgatgaagaaaagcgaaaaaccatggacgccttccgccgtggggaaataaagatccttgccgccacgagtgtcgtggaagtcggcgtagatgtcccaaacgcaacctgcatggtgattgagcacgccgaacgcttcggcctttccgcccttcaccagctccggggtagggtaggccgtggagaagatcagtcttactgttttttggtttactccgatagcttaaacgaagacggtaaaaagcggctcaaggttatgctggaaaactcttcaggctttgtcattgccgaagaagacctaaagcttcgcgggcccggtcagatagccggcattgagcagtcaggctacctgagactaagcattgccgatcccgtaagggacgcggaagcccttgcccgcgctcgctctgacgcttttgaaattctggaatcggatcccgctcttgaaaagccccagaataagcgaattgccgaggttctccagcgctgcccgcctttcggtgatgtagggttgtaa

SEQ ID NO: 41254 - protein, 264 aa, Unknown
  Obtained from environmental sample
  DOMAIN (78)...(155): Helicase conserved C-terminal domain
  misc_feature (1)..(264): Xaa is any amino acid
MGDLDVSVIADLPPGRKAIKTHLAKESNEGKVYDFVRRELAAGRQAYFVYPLIEGGNESAFMPHELKDAVSMADRLVKEVFPDFPLALLHSRVDDEEKRKTMDAFRRGEIKILAATSVVEVGVDVPNATCMVIEHAERFGLSALHQLRGRVGRGEDQSYCFLVYSDSLNEDGKKRLKVMLENSSGFVIAEEDLKLRGPGQIAGIEQSGYLRLSIADPVRDAEALARARSDAFEILESDPALEKPQNKRIAEVLQRCPPFGDVGL

SEQ ID NO: 41255 - DNA, 957 bp, Unknown
  Obtained from environmental sample
  misc_feature (1)..(957): n is a, c, g, or t
atgatggaatattatcacacgcccgttatgctgaatgaagttctcgacttgcttggcccgaggggtgaaaacgagctttttatcgactgcaataccggcgaaggcggtcacagttattcgatgatgtcaaaatatcccagtttaaaattgatcgccatagacgctgataaagatattcttgagattgcgaaagaacgactccagccgttcgccgaccgtatttatttttactgcggctggtcgtttgacttgcttacggattatccttcacagtttaaaagaccggatataattttctttgatttgggcgtgagtttttatcattacaaaaaaagcggcaagggattcacctttgaaaaagacgaatatcttgatatgcgccttgatacttcaaccgggcttaccgcggcggaacttttggcgcgtcttcctgaaagggaattggcggacttattttacaataacgccgatgagcgttattcgcgcagaatcgcatcgcttatcgttaacgagaggcagaaatcgacaattacgacaacttcggcccttgccaatttggtggaaagggcggtccccgcttcttacaggcatggggccatacatcccgcgacaaaagtatttcaggctttgcgtgtcgcgacaaatggggagctttcacggcttccatcgatccttgaggcggcgttaaggcttctcgagccggaggggaggctcgggattctgacttaccattctatcgaggatagaatcgtaaaaaatttcatgcggactatgaataaagactgtatttgtccgccaaatgcgccgatctgtaaatgtggggggcaccgctcaattaatatcatcacaaaaaagggtgttactgcgggaaaagacgagattgagcggaatccttcttccagaagcgcaagattgcgcgtagctgaaaaagttttagacggggttgataatgattaa

SEQ ID NO: 41256 - protein, 318 aa, Unknown
  Obtained from environmental sample
  DOMAIN (3)...(311): MraW methylase family
  misc_feature (1)..(318): Xaa is any amino acid
MMEYYHTPVMLNEVLDLLGPRGENELFIDCNTGEGGHSYSMMSKYPSLKLIAIDADKDILEIAKERLQPFADRIYFYCGWSFDLLTDYPSQFKRPDIIFFDLGVSFYHYKKSGKGFTFEKDEYLDMRLDTSTGLTAAELLARLPERELADLFYNNADERYSRRIASLIVNERQKSTITTTSALANLVERAVPASYRHGAIHPATKVFQALRVATNGELSRLPSILEAALRLLEPEGRLGILTYHSIEDRIVKNFMRTMNKDCICPPNAPICKCGGHRSINIITKKGVTAGKDEIERNPSSRSARLRVAEKVLDGVDND

SEQ ID NO: 41257 - DNA, 300 bp, Unknown
  Obtained from environmental sample
  misc_feature (1)..(300): n is a, c, g, or t
ttgataatgattaaacggtatttactgctttattttattgtgctcaccataccgctttgccttggtcttttagtgtggcagtcaaaccgttatcagaaccttgtgaaagaattggaacgtctggaacagtcgcagaccgaatggatagagagcaacaaaaggcttattgccggaataggcgagtattcgtcaccggaaagaattgagagcatagcgaagagcgaacttgaattgcaaaagataccgcctgagtattttcttcaggtaaaaataatggggggaaaggagcatggagactga

SEQ ID NO: 41258 - protein, 99 aa, Unknown
  Obtained from environmental sample
  SIGNAL (1)...(27)
  misc_feature (1)..(99): Xaa is any amino acid
MIMIKRYLLLYFIVLTIPLCLGLLVWQSNRYQNLVKELERLEQSQTEWIESNKRLIAGIGEYSSPERIESIAKSELELQKIPPEYFLQVKIMGGKEHGD

SEQ ID NO: 41259 - DNA, 1038 bp, Unknown
  Obtained from environmental sample
  misc_feature (1)..(1038): n is a, c, g, or t
ttgatggccgagccgctggcggtggaacggctaaagatagcaatggttcaggcggaagaatacggccttttaggcaagaacattctcggttcaggttttgactttgaaatagaaatccgcctgggcgcgggcgccttcgtttgcggcgaagagaccgccctgattaagtctgtcgaggggagccggggtatgcccgttcccaaaccgccattccctgcaaacaagggactttggcagcttccgacaattatcaacaacgttgagacattggcgaacattccggtcattacgtcaaggggcggggcatggctcgcgaaaatcggcacggaaaaatccaagggcacaaaagttttcgctcttacaggcaaggtaaagaattccgggcttgtggaggttccgatgggaaccaccctgcgggaaatcattttcgaaattggcggcggcattaagggtggcaagaaattcaagggcgttcagaccggcgggccttctggcggcattctcaccgagaaagcgctggatctgccgattgactttgataccctggcggctaacggttccatgatgggttcaggcggcatgatcgtcatggacgaggatgactgcgttgttgacgtagcccggttctacatggatttctgcgttgatgaatcctgcggcaaatgttcgccatgccggataggtacttctcaagttcttcatattctggagaagattgccgccggaaatggcgaagaggaagatcttgaaaagcttgaagtcattggcaaggcaatggccaaagcgtccctctgcgctttgggccagacagcgccaaatccgacgctttccaccgtaagatttccgggaagaatatatggagcatatcgtggacaaaaagtgccgttcgggcaagtgcaaacatctggtacgctttaccatcgatccggaaaaatgtatcggctgcggcgcctgcgccaagaaatgccccgccgactgtattactgtcgaggaggcctccaggtatccggacaagaagcggccgccctacatcgttga

SEQ ID NO: 41260 - protein, 345 aa, Unknown
  Obtained from environmental sample
  DOMAIN (1)...(163): Respiratory-chain NADH dehydrogenase 51 Kd subunit
  misc_feature (1)..(345): Xaa is any amino acid
MMAEPLAVERLKIAMVQAEEYGLLGKNILGSGFDFEIEIRLGAGAFVCGEETALIKSVEGSRGMPVPKPPFPANKGLWQLPTIINNVETLANIPVITSRGGAWLAKIGTEKSKGTKVFALTGKVKNSGLVEVPMGTTLREIIFEIGGGIKGGKKFKGVQTGGPSGGILTEKALDLPIDFDTLAANGSMMGSGGMIVMDEDDCVVDVARFYMDFCVDESCGKCSPCRIGTSQVLHILEKIAAGNGEEEDLEKLEVIGKAMAKASLCALGQTAPNPTLSTVRFPGRIYGAYRGQKVPFGQVQTSGTLYHRSGKMYRLRRLRQEMPRRLYYCRGGLQVSGQEAAALHR

SEQ ID NO: 41261 - DNA, 552 bp, Unknown
  Obtained from environmental sample
  misc_feature (1)..(552): n is a, c, g, or t
atggtaaatataacgataaacggcaagacggtggaagttgaagacgggacaacaatcctggaagccgccaaaaaagtaaacgtaaagatccccaatctttgttacaacccggatcttcccccgtgggcctcatgcggaatttgcattgtcaggctggcgggatctcccaagatgctccgggcctgtaccactgcctgcgaaaacaatatgaacatcatcacccatgatccggagatcatcgcggtgcggcgcacggtgctggaactgatcctttccaatcatcccaacgactgcctccagtgcccgcgtaacggaagttgcgaactgcaaacccttgccgaagaattcggtatcagggaagcgcccttcaaaaaggtgatgaacggaatcccggtggacgactccaacccggcgattgtgcttaatccggaaaatgtattcngctgcggcgctgcgtcaaggtctgccaggaagtgcagaatgtctgggcgctggaatttttgggaagaggtattaagggaaagatcgccagcgccgccgacgcgccgttag

SEQ ID NO: 41262 - protein, 183 aa, Unknown
  Obtained from environmental sample
  DOMAIN (4)...(68): 2Fe-2S iron-sulfur cluster binding domain
  misc_feature (1)..(183): Xaa is any amino acid
MVNITINGKTVEVEDGTTILEAAKKVNVKIPNLCYNPDLPPWASCGICIVRLAGSPKMLRACTTACENNMNIITHDPEIIAVRRTVLELILSNHPNDCLQCPRNGSCELQTLAEEFGIREAPFKKVMNGIPVDDSNPAIVLNPENVFXCGAASRSARKCRMSGRWNFWEEVLRERSPAPPTRR

SEQ ID NO: 41263 - DNA, 807 bp, Unknown
  Obtained from environmental sample
  misc_feature (1)..(807): n is a, c, g, or t
gtgcagaatgtctgggcgctggaatttttgggaagaggtattaagggaaagatcgccagcgccgccgacgcgccgttaggtgaaagcccctgtattaaatgcggtcagtgcgccgctcattgcccggtcggggcgatttacgaacgggacgatacggtaaaagtctggtccgctttgcacaaccacgatctccatacggtagtgcaaatcgctccggcggttcgcgtcgcgttagccgaagagttcgggcttgagccgggcacagtgtttaccaaaaaaatatacgccgcgctcagacggctcggtttcaaaaccgtattcgacaccaacttctccgccgatttaacgatcatggaggaaggctcggaactggttaggcgtttgggcgaaaaaggcagcgcaattcctctgattacttcctgttgcccggcctgggttgattacatggaaaaatattacgccgacatgatccccaacttctcaacggcgaaatcgcctcagcagatgatgggcgcaatgatcaaggcatattgggcaaacaaggcgggagtcgccccggaaaaagtgtattcggtttcagtaatgccctgtaccgccaagaaatgggaaacccaccgcaacgatgacatgaagagcgccggaaaattcctgggcaaggataccggctacgatgtggacattgtgattaccacccgagagcttgcccgcatgatcaaacaggcgggcattgacgttctgaatcttaaagatgaggaagcggacaacccgttagggccgtacaccggcgcgggcacgatttcggcgtga

SEQ ID NO: 41264 - protein, 268 aa, Unknown
  Obtained from environmental sample
  DOMAIN (24)...(47): 4Fe-4S binding domain
  misc_feature (1)..(268): Xaa is any amino acid
MQNVWALEFLGRGIKGKIASAADAPLGESPCIKCGQCAAHCPVGAIYERDDTVKVWSALHNHDLHTVVQIAPAVRVALAEEFGLEPGTVFTKKIYAALRRLGFKTVFDTNFSADLTIMEEGSELVRRLGEKGSAIPLITSCCPAWVDYMEKYYADMIPNFSTAKSPQQMMGAMIKAYWANKAGVAPEKVYSVSVMPCTAKKWETHRNDDMKSAGKFLGKDTGYDVDIVITTRELARMIKQAGIDVLNLKDEEADNPLGPYTGAGTISA

SEQ ID NO: 41265 - DNA, 1008 bp, Unknown
  Obtained from environmental sample
  misc_feature (1)..(1008): n is a, c, g, or t
atgagcgccaggaatggatggaattcaggggtcgagtcttacctaatgaacgcctctgcgtttgatgaccaaagtggttacggaaccagcgcccgtcgtatgtaccttacagatgcgggcaaagtagaggtcagctataacaaaccggaatggcggcagggcctggaatacttctacaggcttggttccgaaggccttttggatcccttatcgtttacccagaacgaaacggatcttcgcgcttttgtggaacaggccaacgtacccaacagattgggtgccgttactgccggccagcccggtaccttcgccgaactcaacggcgaacgccggaaagactttgtcccgctcgctccccttaaggggcccaatggccgccaggccgcatggtacgacaggttcaggcctgttatgcaaggacgcttcgcaatttcaaaagactgcgagatacccgatgtcgcgatgaaatgggcagacgcgtgctatacaaccgactggtggtcaaggaaccgtttcggcgttctaggccgggactggcgtgttccgcccgcaggaacggtggctgtagacggcggagccgcaaagtacgaagaaattctgaaatggggcgaaccccagaaatcgttctgggcctatgaaaatttctccgtcgcaggctgggcttcctataaccgcgccaaatcactaaccgatccctttgaatttgagtacgttatctggcagcagcgggatctccattggccctaccgtatacagaacggcgtgcccggagctttgccgtataccgtggatgaagccagggaatttaaccagcttaatccgctgttggcccagcgcgttaatacattcttcgccgatgttgcgacaggaaagactcgggtaaccgatgccgtatggaacagctatgtggccgaactcaacaatatggggcttccccaactcttgaatattgtgcagaccgcgtttgaccgcagcgaatgggttaaagctttaggttacaaaaaataa

SEQ ID NO: 41266 - protein, 335 aa, Unknown
  Obtained from environmental sample
  misc_feature (1)..(335): Xaa is any amino acid
MSARNGWNSGVESYLMNASAFDDQSGYGTSARRMYLTDAGKVEVSYNKPEWRQGLEYFYRLGSEGLLDPLSFTQNETDLRAFVEQANVPNRLGAVTAGQPGTFAELNGERRKDFVPLAPLKGPNGRQAAWYDRFRPVMQGRFAISKDCEIPDVAMKWADACYTTDWWSRNRFGVLGRDWRVPPAGTVAVDGGAAKYEEILKWGEPQKSFWAYENFSVAGWASYNRAKSLTDPFEFEYVIWQQRDLHWPYRIQNGVPGALPYTVDEAREFNQLNPLLAQRVNTFFADVATGKTRVTDAVWNSYVAELNNMGLPQLLNIVQTAFDRSEWVKALGYKK

SEQ ID NO: 41267 - DNA, 1023 bp, Unknown
  Obtained from environmental sample
  misc_feature (1)..(1023): n is a, c, g, or t
atggcggaaagcgttaatttggaaatcctttctacccgcaccggttttaacagcgcggttagacacataaagagaacaatggatatcctgtcaaaaaccaatgtgaatcttggcgatattgtttatgaaatgactgatggagaattaacaagtggtcaaattagtctacttttaaaaatgatactagtcgacaaacttggttataagtcagcgtcaaccaatctttcatcaacagtaggcgacattactgttttagcgaaagaatttagaaaatggaacggcgttgatcttgtagccgcttatttccacccggaaatgggacttttaatagcgaatccaaaagttgctgaagaacttgtcggttttggtcagcttcgtcagcatgagttaatggtggtatatgcgggtcttcagggcaaggaaacagatgaaaattgccagaaagccgcagacttggctttaaaactttttgaaggttccaaagttacgtccccgtcctctcttacaaaaggaagatttaccgttaaaaaagtttctaaacctaaaaaagaaagtgaaataaaagcagtaaaagaggtaaaagtaaaaacaacctccaaaggaaaatcctcggctaaacgtgcagcctctgcctctgccgctcctgtaaaaaaatcagcgactatagtgcaggttaaatcatcgggaggacccgcaaggatgactccacgctatgcggttatagtgcaaaatgagcttttccataacggaaacgtagaagcatggaagagaattattgcaagttataaatcaaaacatccaagtttggaagtctttatttactatgaacaggaaagaatactagatattaactcgttgtttaaatggggcaaggtaaaacatggcagcgccattgaatttgccgtagccggaaacgatattcaggatgtggcaaaattacagcgttatctggctcagggagccagtcatcaatttgaagcgtttttgcgcggacctgttaataccgtgcttaaattgttctaa

SEQ ID NO: 41268 - protein, 340 aa, Unknown
  Obtained from environmental sample
  misc_feature (1)..(340): Xaa is any amino acid
MAESVNLEILSTRTGFNSAVRHIKRTMDILSKTNVNLGDIVYEMTDGELTSGQISLLLKMILVDKLGYKSASTNLSSTVGDITVLAKEFRKWNGVDLVAAYFHPEMGLLIANPKVAEELVGFGQLRQHELMVVYAGLQGKETDENCQKAADLALKLFEGSKVTSPSSLTKGRFTVKKVSKPKKESEIKAVKEVKVKTTSKGKSSAKRAASASAAPVKKSATIVQVKSSGGPARMTPRYAVIVQNELFHNGNVEAWKRIIASYKSKHPSLEVFIYYEQERILDINSLFKWGKVKHGSAIEFAVAGNDIQDVAKLQRYLAQGASHQFEAFLRGPVNTVLKLF

SEQ ID NO: 41269 - DNA, 957 bp, Unknown
  Obtained from environmental sample
  misc_feature (1)..(957): n is a, c, g, or t
atggattcaagaatacatttttttagccaaaaggacgttatctccaataaggttgcgccggaattactgggaattcgcggcagacaggcgaatgaatttgccgaacttggttttccgattttgcctggatttattctggatacggagcttgcttctgaccttgacactaaggcgataaaaaaggacgttttggatcttttaggaaaatgcgccaaattagtgggcaagacctacggcgatgttgaaaatcccatgctgttaaaagtaattatttcttcaaacatggcgattacaacttatccggtattgcacaactttgggcttgtaaaacctgtccttgaaggttttgcaaaatgggtaggcaaggattttgccgcgaatgaagttttatttatgatcaacggtatgttgaatatcgaagaaaaaataatggaactggaaggtaaaaccaaagaaaaggaagaaattgccgacaagaacaagcttattaaaaggatattgggcattaaagggccttcaaatgaactgcatagcgaggaggataatattcctctgccaaagaaaaaaaccgccgaagaatatatggacgaatacgccaaatatttccccaaaggtttctttgatgatgcggaatcgcagttaatgataacccttagtgaaatctccaaattgttaaaaatagacgaacaaaataataatgatacagccattgccattcagcctatggtatacggaaactatggcaaggattcctgttcaggcgcttttttcagccgcaatgtcgtaacgggcgaaaagaaactccagggaaattattttgtcggcaagtttaacgaaattggcgccgcagggtacgatataaataaaatcgatcctacgcacctaaaacagctcgaaaaaatcgcctggactcttgaagataaattcaagaaaattcgcaggtgcgctttaccgtaa

SEQ ID NO: 41270 - protein, 318 aa, Unknown
  Obtained from environmental sample
  DOMAIN (3)...(318): Pyruvate phosphate dikinase, PEP/pyruvate binding domain
  misc_feature (1)..(318): Xaa is any amino acid
MDSRIHFFSQKDVISNKVAPELLGIRGRQANEFAELGFPILPGFILDTELASDLDTKAIKKDVLDLLGKCAKLVGKTYGDVENPMLLKVIISSNMAITTYPVLHNFGLVKPVLEGFAKWVGKDFAANEVLFMINGMLNIEEKIMELEGKTKEKEEIADKNKLIKRILGIKGPSNELHSEEDNIPLPKKKTAEEYMDEYAKYFPKGFFDDAESQLMITLSEISKLLKIDEQNNNDTAIAIQPMVYGNYGKDSCSGAFFSRNVVTGEKKLQGNYFVGKFNEIGAAGYDINKIDPTHLKQLEKIAWTLEDKFKKIRRCALP

SEQ ID NO: 41271 - DNA, 867 bp, Unknown
  Obtained from environmental sample
  misc_feature (1)..(867): n is a, c, g, or t
ttgggagttatacttgtttatgtttttagaaaatggaacttaaccattgattttagtatggtagcaccagacttcagaatagtatccccttataatttgtttgttgaagctgtaattgctaataatgctgcattagatactcctgaatgggatagagattacagtaaagtaacagaaactattgaacttgataaaattgtatatactgcaacaataagattagcaaatgcactaataaaaaaacataagaaatataaggacgattatatcaaaaataaagaagtcataggaaaaccatttattattgcagttgccccatttgaacaaccatttttttgggaacaaactcacagagcaataaatcaggttttatatggttataaacgtacattatacagaaacaatgaagaaaaaaatgagcgaataatttttggacatgaatatatagattttattaccaaagaaaatggagccgagattcaattaggctttttttctgaagggcaaatgccagaaatcagtgcaataattttttctaatttagcaactatggggaaaatacgtgctatgacaaaagagattgatactagagaaatgatttttatgttttcaaaatacaatgaaaaaggcttacatccatttcaaggagcagtaaagaagaaagaatatattgaacaactcgaagatggactttcaatattacttaatccgtatgcaaaatatccagtagatgatgaatttattaacctttttccaaattgtacttcatatgatacaatgtcaagatgtgtaacagcaaaagcaaaagatggggatttaataaacagaatggttaatgtatttacgtccatagaagatgcaatatag

SEQ ID NO: 41272 - protein, 288 aa, Unknown
  Obtained from environmental sample
  misc_feature (1)..(288): Xaa is any amino acid
MGVILVYVFRKWNLTIDFSMVAPDFRIVSPYNLFVEAVIANNAALDTPEWDRDYSKVTETIELDKIVYTATIRLANALIKKHKKYKDDYIKNKEVIGKPFIIAVAPFEQPFFWEQTHRAINQVLYGYKRTLYRNNEEKNERIIFGHEYIDFITKENGAEIQLGFFSEGQMPEISAIIFSNLATMGKIRAMTKEIDTREMIFMFSKYNEKGLHPFQGAVKKKEYIEQLEDGLSILLNPYAKYPVDDEFINLFPNCTSYDTMSRCVTAKAKDGDLINRMVNVFTSIEDAI

SEQ ID NO: 41273 - DNA, 600 bp, Unknown
  Obtained from environmental sample
  misc_feature (1)..(600): n is a, c, g, or t
ttggcgggaacaacctttatttgcgagaatatgtattggggtctggacgaaaggtccgtcaccgcgatgacggagacaggcataaaaggagcattagtcgaagatatacgctatgatttttccaattccgattcctttgtccccgcgcagaagctaaaggaaatttcatcggcatgccgcgaggcgggctttgtacccgtcatcgggctgatggcggaggaggactttgagacagatcgtttgcgtaaagctcttgacctgctgcgggacattgacgccatgcaaaccatgcaccttgccgaaaacgagtggcgcagggatcttattctgaaaaaatacaacatgaccccggtagagtacctcgcgcgtaacggttttctcaatagtaaattgataggctcccatgtcgtgtatttaacagataacgaagtcaggctgttaaaagaatccaatgtcaaggtcgccaacactccgttatgtgaaatgaaaatcgccgacgggatcgcccccattccggaatggtcagacagggagtcaccgttggcctgggcacggacggctccctttggaataattcaagcgacattttcagggagatga

SEQ ID NO: 41274 - protein, 199 aa, Unknown
  Obtained from environmental sample
  misc_feature (1)..(199): Xaa is any amino acid
MAGTTFICENMYWGLDERSVTAMTETGIKGALVEDIRYDFSNSDSFVPAQKLKEISSACREAGFVPVIGLMAEEDFETDRLRKALDLLRDIDAMQTMHLAENEWRRDLILKKYNMTPVEYLARNGFLNSKLIGSHVVYLTDNEVRLLKESNVKVANTPLCEMKIADGIAPIPEWSDRESPLAWARTAPFGIIQATFSGR

SEQ ID NO: 41275 - DNA, 453 bp, Unknown
  Obtained from environmental sample
  misc_feature (1)..(453): n is a, c, g, or t
atggtcagacagggagtcaccgttggcctgggcacggacggctccctttggaataattcaagcgacattttcagggagatgaaggctatggctcttttacacacaataagcaaggggattcgaagtctttcaaagaaggacatcctcaatatggcgaccacgggaggcgcggccgtttttggcaaagaaaaagaattcggcatgatcaaagagggcatgaaagccgacatgatccttattgatcctgacaagccgcgtctacaacccctgcttttgggcaaaaacgagaatgtcacctctgccatcgtattcagcgcgacgggcgccgatgttacggacgtgtttgtaaacggcaaaagactggtaaaagacggcaagcttacgagcgtggatgtaaaggccattattgagagggtgaggcaagcggctggaaagatagcaatgagtaattaa

SEQ ID NO: 41276 - protein, 150 aa, Unknown
  Obtained from environmental sample
  misc_feature (1)..(150): Xaa is any amino acid
MVRQGVTVGLGTDGSLWNNSSDIFREMKAMALLHTISKGIRSLSKKDILNMATTGGAAVFGKEKEFGMIKEGMKADMILIDPDKPRLQPLLLGKNENVTSAIVFSATGADVTDVFVNGKRLVKDGKLTSVDVKAIIERVRQAAGKIAMSN

SEQ ID NO: 41277 - DNA, 339 bp, Unknown
  Obtained from environmental sample
  misc_feature (1)..(339): n is a, c, g, or t
gtggaaaaccgtgaattactccgccttgagggaatagcaaaaagttttgggcatattgaggttcttcgggggcttgatctttcggttgaccgcggggagtttatcaccttgctggggtcttcgggctgcggcaagacaaccattctaagaataatagccggactggaaacagccgattcagggcgcgtactgatggacgggatcgatgttaagggcttaagccctgacaaacgcggcgtgaacatggttttccagaattacgcgcttttcccccatatgaaatgtgagcagaatgtcggttacagtcttagattgaaggaatggccgagcctgaaataa

SEQ ID NO: 41278 - protein, 112 aa, Unknown
  Obtained from environmental sample
  misc_feature (1)..(112): Xaa is any amino acid
MENRELLRLEGIAKSFGHIEVLRGLDLSVDRGEFITLLGSSGCGKTTILRIIAGLETADSGRVLMDGIDVKGLSPDKRGVNMVFQNYALFPHMKCEQNVGYSLRLKEWPSLK

SEQ ID NO: 41279 - DNA, 1662 bp, Unknown
  Obtained from environmental sample
  misc_feature (1)..(1662): n is a, c, g, or t
atgaaaagcgattctgtaaacaagggcattgcccgcgcgccccaccgctcactttttaaggcgttgggatttattgaggaagagtttaaaaggccgctgattggaattgcctgcgcgaagagcgagatagtgccgggtcatatgcacctggacaacatcgcgcgcgctgtggcggacggcgttcgcatggcggggggagcgcccgttgtctttccggtaatcggcgtatgcgacggaatcgcgatggggcatgtgggaatgaagtactcgctgccgacaagggaactgatcgccgactcggttgagtgcatggctttagctcacgcttttgacgcgcttgtccttatccccaactgcgacaaaattgtgcccggcatgctgatggcgtcggcgcggcttaaccttccctcgatttttgtttcaggcgggccaatgcttgccgggcgcaaggacgggaaaccgctgacgcttacaactatgttcgaggcggtgggcgctgttgccgcaggaaagatcagcgaagcggagcttgaggaacttgaaaacctttcctgtcccggatgcggttcctgcgccggaatgtttacggcgaactcgatgaactgcgtgacggaagcgcttggtatggctctgccgggcaacggcacaataccggcggtgatggctgaacgtatccgcctcgcgaaaaaaaccggaatgttgatcatggacgttcttaaaaaagatttgcgtccaaaacaaatacttacgcaggccgcgtttatgaacgccctcgccctcgacatggcgctcggctgttcaacgaataccgctcttcatcttcccgccattgcaggggaagcaggtttcaaactcgatctggaacttcttaacaaggtaagcgcagttacgcctaacctttgccgccttgcccctgcgggaaaagacgcaatcgaagacctgcacacggctgggggaattcccgctgtctttaaggaactttcaaaaaagagccttgtcgatcttaaagccgccacagtgtacggttgtctcggcgacgcgttggtcaaggcggaaaaccgcaaccccgatgtaataaaaccgattgaaaatccctactcggcgacaggagggcttgccgcgttgaagggaaacatcgctcaggacggctgtgtcgtaaagcgaagcgcggtagcgccttccatgttgaaacacgaaggaccggcgagagtcttcgattccgaggaaacggcattcgactctatcatgggaaagaaaataaatgcgggagacgttgtcgttatccgttacgaaggaccgaaaggcggacccggcatgaaggaaatgttagctcctactgcggctctcgccggcatgggtcttgacgataaagtcgccctgattacagacgggcgtttttcaggcgcatccaaaggcgcgtctatcggtcacgtttcgccggaagccgctttaggcggaaacatcggtatcattaacgaaggcgacataatcgccattgacattgacgggctttcgataaatgtgaagataagtgatgaagaaattgagcggcggcgcanaaattggaaacctctttccaagaaccctgtcggttatcttgcccgctatgccgcgcaagtaggctcagccgcgtcaggagcggttttactgagcctaaagtaa

SEQ ID NO: 41280 - protein, 553 aa, Unknown
  Obtained from environmental sample
  DOMAIN (31)...(550): Dehydratase family
  misc_feature (1)..(553): Xaa is any amino acid
MKSDSVNKGIARAPHRSLFKALGFIEEEFKRPLIGIACAKSEIVPGHMHLDNIARAVADGVRMAGGAPVVFPVIGVCDGIAMGHVGMKYSLPTRELIADSVECMALAHAFDALVLIPNCDKIVPGMLMASARLNLPSIFVSGGPMLAGRKDGKPLTLTTMFEAVGAVAAGKISEAELEELENLSCPGCGSCAGMFTANSMNCVTEALGMALPGNGTIPAVMAERIRLAKKTGMLIMDVLKKDLRPKQILTQAAFMNALALDMALGCSTNTALHLPAIAGEAGFKLDLELLNKVSAVTPNLCRLAPAGKDAIEDLHTAGGIPAVFKELSKKSLVDLKAATVYGCLGDALVKAENRNPDVIKPIENPYSATGGLAALKGNIAQDGCVVKRSAVAPSMLKHEGPARVFDSEETAFDSIMGKKINAGDVVVIRYEGPKGGPGMKEMLAPTAALAGMGLDDKVALITDGRFSGASKGASIGHVSPEAALGGNIGIINEGDIIAIDIDGLSINVKISDEEIERRRXNWKPLSKNPVGYLARYAAQVGSAASGAVLLSLK

SEQ ID NO: 41281 - DNA, 543 bp, Unknown
  Obtained from environmental sample
  misc_feature (1)..(543): n is a, c, g, or t
ttgctggctaagataaaacgcgaacgtgaaaaaatgaatgccattgagaaagatttggcgggggcattatcttctttgattaatgacggaaaggttcatgtgacgcaaacatcacgcggcgtgcatgtggaaatcaacacaagtgttttattttcagccggggaagcacgcttgaatgaacaggctacacaggttattaaatcagtgggtgccgttttaaaggggatagaaaatgacgttcaggttgaagggtttaccgataatacgcctatcagtacaaaccagtttccttcaaactgggagttgtcggcggggcgtgcctgtagtgttgtccggttactggtcgtaagcggcatgaaagaaagccagttaattgcaatcggtaatggcgccaataatcctattgaaagtaatgatacccctgaagggcgtttccgcaacagacgtgtgcaactgattgtattatcttctctgcctgaggtgatgaaagagttttttatgacaaataccaaggagaagaaagacggaatgatgcggcagtaa

SEQ ID NO: 41282 - protein, 180 aa, Unknown
  Obtained from environmental sample
  DOMAIN (50)...(148): OmpA family
  misc_feature (1)..(180): Xaa is any amino acid
MLAKIKREREKMNAIEKDLAGALSSLINDGKVHVTQTSRGVHVEINTSVLFSAGEARLNEQATQVIKSVGAVLKGIENDVQVEGFTDNTPISTNQFPSNWELSAGRACSVVRLLVVSGMKESQLIAIGNGANNPIESNDTPEGRFRNRRVQLIVLSSLPEVMKEFFMTNTKEKKDGMMRQ

SEQ ID NO: 41283 - DNA, 903 bp, Unknown
  Obtained from environmental sample
  misc_feature (1)..(903): n is a, c, g, or t
gtggaaatggaaaacgcgggcaggccgctttccggattaatttccgccgcaagaagttctaacgaaaaaataacgcttgtagtgcgctgtgtttttgacgatccctggcttgccgccgattatgccctttgcaacgaaaggcttcaggccgttgttgaaggcgccgccattgtggctaaagcctgtttcaaggtaacgcagataatttttgcggtttcgtatcacgaaaaagaattaggcgaaaggcttatgctggaagcggcaaattgggacattcagtccgttcttgcgctgacaggctgccgttacccgcagcggaacaacagggagcttgagcttgcgctcaggatatttgaaaaaagggaaaagcagagtttcggctctttcttgattctaagccctgccgtccttgccgcggcgcatgatgccgtaaagcacaaaaggccgattcttgaccgttatgtggctgtcggcggatcggctgtaaggcatcctcaaatattaaaagcaagaatagggacaagaataggcgagttaattgaacagtgcggcggttttatagaagcgccgtaccgggttgccatgggttctccgctttccggaagggaagtaatgtaccttgacgagcctgtcagaaaaaactgttacgcgattgccgctatgacaaaatcgcaagcctccacaggtgaagagcagaattgcataaactgcggcgaatgcaggacggtctgccctatagggctggatcctcagaatatttacaagcgtataagaacccaggggatagaaaatgtagggtcgtccggatgtcacggctgcggctgttgtaagattgtctgtccgtccgccctgttgttatctgatacaataatggaaggaaatcaggagagatggaatgcctga

SEQ ID NO: 41284 - protein, 300 aa, Unknown
  Obtained from environmental sample
  misc_feature (1)..(300): Xaa is any amino acid
MEMENAGRPLSGLISAARSSNEKITLVVRCVFDDPWLAADYALCNERLQAVVEGAAIVAKACFKVTQIIFAVSYHEKELGERLMLEAANWDIQSVLALTGCRYPQRNNRELELALRIFEKREKQSFGSFLILSPAVLAAAHDAVKHKRPILDRYVAVGGSAVRHPQILKARIGTRIGELIEQCGGFIEAPYRVAMGSPLSGREVMYLDEPVRKNCYAIAAMTKSQASTGEEQNCINCGECRTVCPIGLDPQNIYKRIRTQGIENVGSSGCHGCGCCKIVCPSALLLSDTIMEGNQERWNA

SEQ ID NO: 41285 - DNA, 1335 bp, Unknown
  Obtained from environmental sample
  misc_feature (1)..(1335): n is a, c, g, or t
ttgagcgaactgaacgaggccggcaatgagctcaatgttgtggtactggatgcctgccgcgacaaccccttcagctgggcgcggagcaacagccggggtctttccgttatatcgaaccagcctgcggacagcattatcgtgtatgccacaagcgccggttcaacggcggcggatgggacaggcaggaacggcctttttacaacccaactcttaaagaacataaagacccccggtttggaggtgaacgaattatttcgccgtaccggcgcggacgtagcgcaagccagcgacaggaagcagatacccgccgtgtataaccagttcttcggcaacgcctatcttggctcccgatccacccagcctcctggccaaaaccagtcttccgccgcgacagcgcaggccgccgccaaagaacattatgataagggtgaaatatttagcgggcgaaatgattgggataccgctattctggaatttactgaagccataaggcttgctcccaattacgctgaagcttataacaggcggggcaatgcgtatacaaataagaacgactatgaccgcgccatcgcggattacacccaggctattagacttgatcccaatttcgcttgggcatatcaaggccggggcattgcgtatcgtaataagaatgactatgaccgagccatcgcggattacaacgaagcgataaggcttgattccaatttcgtttcggcttattacaaccggggtaatgcatatataaataaaaaggactacgaccatgccatcccggatttcaccgaggcgataaggcttgatccaaatttcgctttggcttataacaatcggggcattatgtattttgtgagtaagaaggactatgaccgtgccatcgcagattacaccgaggcgataagacttgatcccaagaacgctgatgcttataacaatcggggccgtgcgtatcacgacggcaagaatgactgcgaccgcgccatcgtggattataccgaggcgattaggcttgatcacaaacacgttaatgcttataacaaccggggccgtgcgtatcacgacggcaagaatgactacgaccgcgccatcgcagattacaccgaagcgattaggcttaatcccaatttcgctgatgcttatattaaccgtggttttgcatatcaagaaggtaaaaaggactatgacaaagccatcgcggattacaccgaggcgataaggattaatcccgattatgctaatgcttataaaatccgtggtgatgcgtacaaagccaaaggcggcacggatagagccaacgcggattacatgaaggcaagggaactggggtataagtga

SEQ ID NO: 41286 - protein, 444 aa, Unknown
  Obtained from environmental sample
  DOMAIN (136)...(169): Tetratricopeptide repeat
  misc_feature (1)..(444): Xaa is any amino acid
MSELNEAGNELNVVVLDACRDNPFSWARSNSRGLSVISNQPADSIIVYATSAGSTAADGTGRNGLFTTQLLKNIKTPGLEVNELFRRTGADVAQASDRKQIPAVYNQFFGNAYLGSRSTQPPGQNQSSAATAQAAAKEHYDKGEIFSGRNDWDTAILEFTEAIRLAPNYAEAYNRRGNAYTNKNDYDRAIADYTQAIRLDPNFAWAYQGRGIAYRNKNDYDRAIADYNEAIRLDSNFVSAYYNRGNAYINKKDYDHAIPDFTEAIRLDPNFALAYNNRGIMYFVSKKDYDRAIADYTEAIRLDPKNADAYNNRGRAYHDGKNDCDRAIVDYTEAIRLDHKHVNAYNNRGRAYHDGKNDYDRAIADYTEAIRLNPNFADAYINRGFAYQEGKKDYDKAIADYTEAIRINPDYANAYKIRGDAYKAKGGTDRANADYMKARELGYK

SEQ ID NO: 41287 - DNA, 1266 bp, Unknown
  Obtained from environmental sample
  misc_feature (1)..(1266): n is a, c, g, or t
atgaaaaataaatatattattttgcctttaatttttttttgtttctcagcttcatttaccgtattcgcgcaggagcaatatgacgctgaagatgattttttagagagtgttgaagatgattttattgatccgcccgttgaaagaatagaagcaagggcgttttttgggaaagatcttacagaagtaacaattccggacagtattaaatttataggcgatgaagctttcgcgcggaatcaactagccggcgttattattccggacagcgtagaatatataggtgaaaaagcgtttgcagataacgcgcttacaaccgtaactattcacggaaatgttacggttatcaaaaaagaaacgtttatgaataatcttctttcctcggtaattattcccgacggcgttaattatattgatgaaagagcgtttgcgggaaacagaatttcggaaatatttatccctgacagcgttgccgccgtaggaaattgggcgttcaatttaaaggatgacgccgttatacgtattggctccgcagtcgcgttaaaccagtcatttgattatgattttgaggaaatctataaaagaaacaaccgcatggcgggaacttaccgccatatcggaacaaaatggcagtttaccgccccttccgccgaggaacagatagccgctattaaagcaagggaagaacgaccgcttccggcagtttctttcgcgtggaatgacagaggaagataccgctattcccagaaacgttacagcgaggcaatcgcggattttaccgaatcgataaaattgaatccaagatggactctcccattatacaaccgcggccttgcccgtttggaaaccggcgattacaaaggagtcatcgccgattccgccgaagttcttaaaatacaaaaaaataattccgacgcctacagaatccgcggcatagcctacaggcttacaggcgattttaagtcggctcttgaaaacctcaacgaggcgatacgccttaatcccagagatgacgcggcgtggctctgccgaggcgacacttatatggatttaaaagaccctgacagcgccataacaaattacaacgaagtaatccgccttgatcctctctctcattccgcatacaacaacagaggcgtagcatataacagaaaaggcaaccgcgaacaagcgctcgttgatttagaccacgcaatggcaatagatcccgaaaacgaaatatccaaacgcaactacgaaaaactatcagccggcgaaaaaatagattaa

SEQ ID NO: 41288 - protein, 421 aa, Unknown
  Obtained from environmental sample
  SIGNAL (1)...(23)
  DOMAIN (371)...(404): Tetratricopeptide repeat
  misc_feature (1)..(421): Xaa is any amino acid
MKNKYIILPLIFFCFSASFTVFAQEQYDAEDDFLESVEDDFIDPPVERIEARAFFGKDLTEVTIPDSIKFIGDEAFARNQLAGVIIPDSVEYIGEKAFADNALTTVTIHGNVTVIKKETFMNNLLSSVIIPDGVNYIDERAFAGNRISEIFIPDSVAAVGNWAFNLKDDAVIRIGSAVALNQSFDYDFEEIYKRNNRMAGTYRHIGTKWQFTAPSAEEQIAAIKAREERPLPAVSFAWNDRGRYRYSQKRYSEAIADFTESIKLNPRWTLPLYNRGLARLETGDYKGVIADSAEVLKIQKNNSDAYRIRGIAYRLTGDFKSALENLNEAIRLNPRDDAAWLCRGDTYMDLKDPDSAITNYNEVIRLDPLSHSAYNNRGVAYNRKGNREQALVDLDHAMAIDPENEISKRNYEKLSAGEKID

SEQ ID NO: 41289 - DNA, 927 bp, Unknown
  Obtained from environmental sample
  misc_feature (1)..(927): n is a, c, g, or t
atggacagaatcggccgagctcgtgccgctcgtgccgctcgtgccgattattatccagcctatcagcaatgcgttggaggagtaatagtagagggcggttctagctcatctgttacgagcagtgacggcagttctaattccgtaacgggcggtaagtcatcgtctggcggtggcagtagtggaccgaaagaagttgtatcaacgacaatggcatacgattccaccggcggaatattgtacgaatactactatgaatacgatagcaagggtaacaaaataaaagaaacctatcgtactcataaacgttatggttgggccggtacggattacacaacatattactacgatagcaatggtaaccaaataaaaaaactttcttgcaaggacggttttttagacctatacgaatttgaatacgacaacaagggtaacaaaataaaagaaactgaacactttataactctaactactcaaacctgtacagagtacgaaaataaaacgataaataatggtacgggtagaataacaagatatgaatacgacagtaatggcaatgtgataaaagaaatttatgatgggacaatagctggtgaaatggacttcatttgtaaaaatgatgtctgcgttgttactgctataaataacaataacggctgtaatgaagaacaaacatacataacaataaattcaaaaagactcccaaaaagctataaaaggtcaaaatgtaccgacggcagtaatgacttttcagaagaacgtgaatatgatgccaaaggaaatatgacgaaagggacgatgaatggtgttgtttatgttaaatatgagtatgagtatgataccaagggaaatataacgaaagagacaaaatatgatgaagagggcaaacccacagtaatcacgttagaacacacctacataacaatttga

SEQ ID NO: 41290 - protein, 308 aa, Unknown
  Obtained from environmental sample
  misc_feature (1)..(308): Xaa is any amino acid
MDRIGRARAARAARADYYPAYQQCVGGVIVEGGSSSSVTSSDGSSNSVTGGKSSSGGGSSGPKEVVSTTMAYDSTGGILYEYYYEYDSKGNKIKETYRTHKRYGWAGTDYTTYYYDSNGNQIKKLSCKDGFLDLYEFEYDNKGNKIKETEHFITLTTQTCTEYENKTINNGTGRITRYEYDSNGNVIKEIYDGTIAGEMDFICKNDVCVVTAINNNNGCNEEQTYITINSKRLPKSYKRSKCTDGSNDFSEEREYDAKGNMTKGTMNGVVYVKYEYEYDTKGNITKETKYDEEGKPTVITLEHTYITI

SEQ ID NO: 41291 - DNA, 471 bp, Unknown
  Obtained from environmental sample
  misc_feature (1)..(471): n is a, c, g, or t
gtggaaaacgaaaaagtcgccgtcgcggtttttatcggtcagaacggatttggccgcgttcacgcgaataatcccttcacttccctgcccgctttctttgaacgcctgcgaaaacaaactccctacatcattatagattttcacgcgcaggcaagcgctgaaaaaaagacttttatttacgccgccgacggcctttgttccgcggtaatcggctctcacacaagggtccaaaccgccgatgaaactgtcatgccgggcggaaccgcatacataagcgacgccggccgcacaggaagccggcaatccgtaggcggctgcgaaataaattcgcgcataaaagaatacctgacaggcatccccgaatggaccaaagacgcctgggaatccccggagttacaaggcgtgtatcttgacataggcaaggatggtaaagccctctccatagagcggatacgccttgctacagattaa

SEQ ID NO: 41292 - protein, 156 aa, Unknown
  Obtained from environmental sample
  misc_feature (1)..(156): Xaa is any amino acid
MENEKVAVAVFIGQNGFGRVHANNPFTSLPAFFERLRKQTPYIIIDFHAQASAEKKTFIYAADGLCSAVIGSHTRVQTADETVMPGGTAYISDAGRTGSRQSVGGCEINSRIKEYLTGIPEWTKDAWESPELQGVYLDIGKDGKALSIERIRLATD

SEQ ID NO: 41293 - DNA, 867 bp, Unknown
  Obtained from environmental sample
  misc_feature (1)..(867): n is a, c, g, or t
ttgctctggaaaaaagtaaagaacggactttccgccgggcgcgtccagtctgtggctttaaggttgatctgcgaacgcgaaaaagaagtggaaagctttattccggaagaatattggactctggaagccgaatttaaatcgggcaaatctgtttatgacgcacagcttacgctttggaataacaacaagcctgttttgaaaagcgaggccgaagtaaaagatataatcgacaaaattaaggataaggattttatcgtgtccgacgtgcgtgagacggaaaaaactatccgccccaaagcgccgtttaccacgtcccagcttcagcagacagcggcaaacaaacttggtttcacctcacgcaagacaatgcaggtggcgcagcagctttacgaaggcgtcgccttaggggcgtcaagagtaggtttgattacctatatgcgcacggacagcgtccgtatctcgcaaaccgcgctggaagacgtgcgttcctggcttgaaaaaaattatcccaaagaactgccggaaaaacccgtggaatataccgtaggcaagaacgcgcaggacgcgcacgaggcgataaggcccacatataccgaatatacgcccgattcgataaaagaacatttaacaaaggatcagctccgcctgtattcaattatctgggaaaggtttgtttccagtcaaatgaccaacgcgaaaagcaggactgtaagccttgacatcaaggttattgcgggtaatgaagaagggcttttccgcgtaagcggtacaaaacttgtcgaaaaagngtttttacaaggcgataaaactcctgtcctcaaaagaagaaaacacaggctcctgtccgtcgcttggggtaaacgataa

SEQ ID NO: 41294 - protein, 288 aa, Unknown
  Obtained from environmental sample
  DOMAIN (1)...(284): DNA topoisomerase
  misc_feature (1)..(288): Xaa is any amino acid
MLWKKVKNGLSAGRVQSVALRLICEREKEVESFIPEEYWTLEAEFKSGKSVYDAQLTLWNNNKPVLKSEAEVKDIIDKIKDKDFIVSDVRETEKTIRPKAPFTTSQLQQTAANKLGFTSRKTMQVAQQLYEGVALGASRVGLITYMRTDSVRISQTALEDVRSWLEKNYPKELPEKPVEYTVGKNAQDAHEAIRPTYTEYTPDSIKEHLTKDQLRLYSIIWERFVSSQMTNAKSRTVSLDIKVIAGNEEGLFRVSGTKLVEKXFLQGDKTPVLKRRKHRLLSVAWGKR

SEQ ID NO: 41295 - DNA, 864 bp, Unknown
  Obtained from environmental sample
  misc_feature (1)..(864): n is a, c, g, or t
atgggagtattttgtactgtttcacccatagaaaaccaccgcgggcgcgaaaaaggcgttctggtgtatcccgtgtattcgcggcgttcgggcggcctctcggtaggtattaacctttttccggatcaaaaaagctgtccctttgactgcccctattgcgaggtgtttccattttcaactaacgcaattttttctccggaacaaatggaagatgatctgcgagctgtcattgccgatgccgtggaaagaaatatcccggttaaggatatctgcttttccggtaacggagaaccgtcattatcccccgatttccccagagcgctggaactggcaagccgtatccgcggcgaactgattcccttcgcaaaactcgtattgattaccaatggcgccgggctgctggataaaaaaatattctccctgcttgttgaagcggcagcgcttccttcggaaggcgaagctaatcatgcgctggatatttggctgaaactcgacgccgggacttcccgatggtatcaactgataaaccgctcggaaattccccatgaaaaacttatcgcaaagataaaagaatttgccgtccttgccccgtttacggtacaaaccatgctctgttcggtagacggttacgcccctgtccccgatgaagcgcaagcctgggaaactttagtagttgagttagccgcaatcgcggcaactggaacgggtaaaattcgcacagttcaaatctacggcaaagcccgcccatcgccggatgatccaaaggctcaggagcttcccgtagcatacctggaagagcgggccgcctccttaaaacaagcccttggaggatcagcgcagatttcaatagagatattcccataa

SEQ ID NO: 41296 - protein, 287 aa, Unknown
  Obtained from environmental sample
  misc_feature (1)..(287): Xaa is any amino acid
MGVFCTVSPIENHRGREKGVLVYPVYSRRSGGLSVGINLFPDQKSCPFDCPYCEVFPFSTNAIFSPEQMEDDLRAVIADAVERNIPVKDICFSGNGEPSLSPDFPRALELASRIRGELIPFAKLVLITNGAGLLDKKIFSLLVEAAALPSEGEANHALDIWLKLDAGTSRWYQLINRSEIPHEKLIAKIKEFAVLAPFTVQTMLCSVDGYAPVPDEAQAWETLVVELAAIAATGTGKIRTVQIYGKARPSPDDPKAQELPVAYLEERAASLKQALGGSAQISIEIFP

SEQ ID NO: 41297 - DNA, 933 bp, Unknown
  Obtained from environmental sample
  misc_feature (1)..(933): n is a, c, g, or t
ttgttttcttcgtgctttatgtgtgtaatcccggctttttgtgcaggtacgattgaggtactcttttcatctccgccggccgcagacgggcttcccgacctgaagatacttgccgccgccgcaatagccgtaagagccgccggaatatcaattgccggcaatgaaaatgcgcataacaacaggttcagggtnttcgccgtaggaggagcgcaggctatagcggcttntgcgtttggaactgaatcaattccccgcgcggatgtcattgcaggacccggaaacaagtatgtagcggcggcaaagcgcctgctctacggacaggtgggaattgattttattgcgggaccttccgatgttttggtaattgcagataacacctctattcaatcagcggatattattgcggcggacatgatcgcacaggcggagcatgacccagacgccagagccagagccattgtgcctgacaaggaatttgcggacaaaattattgccgcaatcgaaaaaaggcttattactctgcccactgcaaagaccgccaacgcttcacttgaaaacgggcttatcattgtctgtaacaacagggaagaatcggttcgtattgccaacaaaatcgcgcctgaacatcttgagcttcaaactgcggatgcggacagttggattcctcagttaaaaaattacggctcgctttttatcggcagcctttccgcagaagttctcggcgattattcagcgggtatcaatcatactttaccgacatcaggtagcgcgcgctttacaggcgggcttgctgtgcggcatttcctaaaaactgttaccaccctgcgctgcgcacaaggtgaaggctttgaaaaagcaaggaatgcggcggaagtacttgcccgcgccgaagggctggaaggacacgcgcagagcgcggcggcgcgggggtga

SEQ ID NO: 41298 - protein, 310 aa, Unknown
  Obtained from environmental sample
  DOMAIN (1)...(309): Histidinol dehydrogenase
  misc_feature (1)..(310): Xaa is any amino acid
MFSSCFMCVIPAFCAGTIEVLFSSPPAADGLPDLKILAAAAIAVRAAGISIAGNENAHNNRFRVFAVGGAQAIAAXAFGTESIPRADVIAGPGNKYVAAAKRLLYGQVGIDFIAGPSDVLVIADNTSIQSADIIAADMIAQAEHDPDARARAIVPDKEFADKIIAAIEKRLITLPTAKTANASLENGLIIVCNNREESVRIANKIAPEHLELQTADADSWIPQLKNYGSLFIGSLSAEVLGDYSAGINHTLPTSGSARFTGGLAVRHFLKTVTTLRCAQGEGFEKARNAAEVLARAEGLEGHAQSAAARG

SEQ ID NO: 41299 - DNA, 1113 bp, Unknown
  Obtained from environmental sample
  misc_feature (1)..(1113): n is a, c, g, or t
ttggtcgccgcttcctgcggggacagtgactttactccttttgcccaaacgctggataaagccgccgttgacctgggcgttgattttgtgggtggcttttccgctttggtgcagaaaggtttttccggcggcgatgaacggctgattgcctcgctgccgcaggcgctttcccaaacagaaagagtgtgcgcttcgataaatgtagcggcgaccaagagcggcatcaacatggacgcggtaaagctgatgggcgcagtaatcaaacagatcgctgaaaaaaccacggacagagacggtattggctgcgcgaaactggtggtgttctgcaacgcgccggaagacaatccttttatggcgggggcatttcacggcgttggcgaagcggaaagctgcctgaacgtgggtgtttccggccccggcgtaataaaagccgcgctggaaaatcttggcggcgccagttttgatgagcttgccgacgccattaaaaaaacagctttcaaaattacccgcatgggtcagcttgtaggaatggaggcggcgcggcggctgggcgtgcctttcggcattctggatctgtctctcgcgccgactccggcggtaggcgattcagtcgcccgtattcttgaggaaatgggccttgaaaccgctgggactcacggcactaccgccgcgcttgccatgttaaccgacatgataaaaaaaggcggtatcatggcgtctacccatgtcgggggctttttcggggcgtttatccccgtctccgaagacgaaggcatggttaacgcggtgaggaaaggcgcgatcagccttgacaagcttgaggcgatgacctcggtttgttccgtcggccttgacatgatcgccctgcccggcgacacgagcgccgccaccatctcggcgattattgccgacgagatggcgattggcatggtgaacaacaagaccaccgcggtgcggattattcccgtgcccggaaaaaaagcgggcgattgggcggaattcggcggactcctcggcggcgctcccgtcttgtcggtaaactccgcaagaagcgacgctttcatcaatcgcggcgggagaataccggcgccggtacattcgttcaggaattag

SEQ ID NO: 41300 - protein, 370 aa, Unknown
  Obtained from environmental sample
  DOMAIN (1)...(370): Uncharacterized ACR (DUF711)
  misc_feature (1)..(370): Xaa is any amino acid
MVAASCGDSDFTPFAQTLDKAAVDLGVDFVGGFSALVQKGFSGGDERLIASLPQALSQTERVCASINVAATKSGINMDAVKLMGAVIKQIAEKTTDRDGIGCAKLVVFCNAPEDNPFMAGAFHGVGEAESCLNVGVSGPGVIKAALENLGGASFDELADAIKKTAFKITRMGQLVGMEAARRLGVPFGILDLSLAPTPAVGDSVARILEEMGLETAGTHGTTAALAMLTDMIKKGGIMASTHVGGFFGAFIPVSEDEGMVNAVRKGAISLDKLEAMTSVCSVGLDMIALPGDTSAATISAIIADEMAIGMVNNKTTAVRIIPVPGKKAGDWAEFGGLLGGAPVLSVNSARSDAFINRGGRIPAPVHSFRN

SEQ ID NO: 41301 - DNA, 387 bp, Unknown
  Obtained from environmental sample
  misc_feature (1)..(387): n is a, c, g, or t
atgacgattccgccgttgtcgccttaccggctgagaaaagcgcgtgaggtgtttaatcttttcaatgttttcaactcgctttcatggaatctgctggtggggagtattatcaccctgtttgccatacggttgggcgcgtcatccacctacattggaaccctcagcgcccttttatacgtgtcgttttttttcctgccgctgggaaaacttcttaccagaaaattcagcatagtcggtattttcagttttacatggactttgcgggcgcttggaatgattacggtggtgttcgcgccggtcgcggcgaatcttggctatcaggatacggcgctcgggttgaccatgctgggggttggaattttccatgtggtacgcggcgtggaatga

SEQ ID NO: 41302 - protein, 128 aa, Unknown
  Obtained from environmental sample
  misc_feature (1)..(128): Xaa is any amino acid
MTIPPLSPYRLRKAREVFNLFNVFNSLSWNLLVGSIITLFAIRLGASSTYIGTLSALLYVSFFFLPLGKLLTRKFSIVGIFSFTWTLRALGMITVVFAPVAANLGYQDTALGLTMLGVGIFHVVRGVE

SEQ ID NO: 41303 - DNA, 783 bp, Unknown
  Obtained from environmental sample
  misc_feature (1)..(783): n is a, c, g, or t
gtgacgtctttctcggttatcaccgacaaagaacacggcaacattaaataccctctagccgattacgagcttactcccgatgtggtgattatcgatccgcagtttgtcactaccatgccgaaatccattgtagctgatacaggcatggacgtacttacccatgcgatagaggcgtatgtatccgtgcttgcctctgattttacaagcggacttgccatgaaagcctgcgcgcttgtttttaaatatctcccgcgaagttacgcaaatgaaaatgacgaaatagcgagagaaaaaatgcataacgcttcctgtattgcgggcatggcgtttacaaacgctttcctgggcattaatcattcgcttgcgcacaaacttggcggcgagttccatattccgcacggacgggcaaacgccgtactgctgcctcatgtaatcgcctacaatgcgcaaaagccggataaattcccaatcttccccaagtacagcgagtttaaagccgattatcgttatgcgcaaatagccaatcaactgcgtttgggcggcggtaatcagcaagaggaaatagccgctttgatcaattcagtgtggaaattaatggaaacattgaatgttcccacaagcataaaggactgcggcgttgatgaaaaagaatttttcagcaaggttggcgtattggccgaacacgcatttgaagatcaatgtacaacagctaacccaagatacccgttaattaaagatttagaggaaatttaccgtaaggcatattatggagaaaggagttaa

SEQ ID NO: 41304 - protein, 260 aa, Unknown
  Obtained from environmental sample
  DOMAIN (1)...(247): Iron-containing alcohol dehydrogenase
  misc_feature (1)..(260): Xaa is any amino acid
MTSFSVITDKEHGNIKYPLADYELTPDVVIIDPQFVTTMPKSIVADTGMDVLTHAIEAYVSVLASDFTSGLAMKACALVFKYLPRSYANENDEIAREKMHNASCIAGMAFTNAFLGINHSLAHKLGGEFHIPHGRANAVLLPHVIAYNAQKPDKFPIFPKYSEFKADYRYAQIANQLRLGGGNQQEEIAALINSVWKLMETLNVPTSIKDCGVDEKEFFSKVGVLAEHAFEDQCTTANPRYPLIKDLEEIYRKAYYGERS

SEQ ID NO: 41305 - DNA, 495 bp, Unknown
  Obtained from environmental sample
  misc_feature (1)..(495): n is a, c, g, or t
atgaaaaatgaattcggaacaaagttcgagatggtctgcgatattctggatcgccatgaaacgcatccaagcaaccttatcgcaattttacaggagattcaggaagcgtattcctatctgccggaggacgtaatgacttatgttgcaacggctctggaagtctcgccgggcattgtcttcggcgttgcgactttttattcacacttcacccttgagccaaaaggcaagtacgttatcaaggtgtgcgacggaacagcctgtcacgtcaaaaaatcgatggacatcattaacaccctggaagcggaactgaagctcaacgaaaagaaaaaaacatcggacgacatgctgtttacgctggagacggtaaactgcctgggagcttgcggcatcgcgcctgtagttgtggtcaacgaagacgtgtacggatcgatggattcggcgaaaacaaaagcgcttattgaaaagattcgaaaggaggaatccgcaaatgcctga

SEQ ID NO: 41306 - protein, 164 aa, Unknown
  Obtained from environmental sample
  DOMAIN (5)...(157): Respiratory-chain NADH dehydrogenase 24 Kd subunit
  misc_feature (1)..(164): Xaa is any amino acid
MKNEFGTKFEMVCDILDRHETHPSNLIAILQEIQEAYSYLPEDVMTYVATALEVSPGIVFGVATFYSHFTLEPKGKYVIKVCDGTACHVKKSMDIINTLEAELKLNEKKKTSDDMLFTLETVNCLGACGIAPVVVVNEDVYGSMDSAKTKALIEKIRKEESANA

SEQ ID NO: 41307 - DNA, 513 bp, Unknown
  Obtained from environmental sample
  misc_feature (1)..(513): n is a, c, g, or t
ttgatggccgagaaactggagtatctggctattccagaaacatcctccgagacccgcaaatacatccccattggattcttaccacccaacgtcttgccgagccacgccattcggattagtgaaaatgccacgctgtggcatttcggcattctgacatcactcgttcacatggcttgggttcgcgtcgtctgtggtcgcctagaaatgcgctaccgctactcgattgacatcgtctacaacaatttcccatggcccaactcaacagaaaagcaaaggaaggagattgagggcttggcgcagggtgtcttggatgcgagggagaaccaccccgcaagctcactcgccgatctctatgatccgaccgcgatgccgacagacttgacgaaagcgcacgagaaactagacaaagccgtgatgaagctctacggcttcggtacggacatgaccgaatctgagatcgtggccgagttaatggaacgctacagagtactgacagccgctacggaattgtga

SEQ ID NO: 41308 - protein, 170 aa, Unknown
  Obtained from environmental sample
  misc_feature (1)..(170): Xaa is any amino acid
MMAEKLEYLAIPETSSETRKYIPIGFLPPNVLPSHAIRISENATLWHFGILTSLVHMAWVRVVCGRLEMRYRYSIDIVYNNFPWPNSTEKQRKEIEGLAQGVLDARENHPASSLADLYDPTAMPTDLTKAHEKLDKAVMKLYGFGTDMTESEIVAELMERYRVLTAATEL

SEQ ID NO: 41309 - DNA, 675 bp, Unknown
  Obtained from environmental sample
  misc_feature (1)..(675): n is a, c, g, or t
atgcacgccgagcatctgagggccgcaaggggcgtcggcccccacaccatatccgtgccgcgcctgcggaccgcggccgggatggcgccaggggactttccccaccttgtgtccgacgcgcacttcaaacagttggtcgccatactgcgtctggccgtgccctacaccgggatgatactttccacgcgcgagccttccgacttccgcagggaagtgatagccgtgggaatatcgcaggtgagcgccggctcctgcaccggcgtgggcggctacgccggcgctgccaaattggaaaaagaaacggagtgcgctacagattgcgcggcactgcgccagttcgagccagaggaccgccgctcccccacggaagtcctgaagacactgctgaaggacggctacctgccgagctactgcaccgcctgctaccgcgaagggcgcaccggcgaccgcttcatgcagttggcgaagtccggccagatagccaacgtctgccaggccaacgccatcctgaccctgcaggaatacctgattgactacggcgacgccgagttgaaggaactgggcgagcgtgtcatacagcgcgagttggacgccatgccaaacaaaaaggccagagagaaagccctcgaaatgctggcgcagataaagaatggggcaagggatttgaggttttga

SEQ ID NO: 41310 - protein, 224 aa, Unknown
  Obtained from environmental sample
  DOMAIN (16)...(135): Biotin and Thiamin Synthesis associated domain
  misc_feature (1)..(224): Xaa is any amino acid
MHAEHLRAARGVGPHTISVPRLRTAAGMAPGDFPHLVSDAHFKQLVAILRLAVPYTGMILSTREPSDFRREVIAVGISQVSAGSCTGVGGYAGAAKLEKETECATDCAALRQFEPEDRRSPTEVLKTLLKDGYLPSYCTACYREGRTGDRFMQLAKSGQIANVCQANAILTLQEYLIDYGDAELKELGERVIQRELDAMPNKKAREKALEMLAQIKNGARDLRF

SEQ ID NO: 41311 - DNA, 1179 bp, Unknown
  Obtained from environmental sample
  misc_feature (1)..(1179): n is a, c, g, or t
atgaaagaagttgacaaggaagacgccgaagtgcccaatcatttgcgcgacgcgagccgtgacgcggaaagctttggccacggcgaaggctatatttacccccacgcctaccgcgaccactgggccgcccagcaatacctgcccgctgccctgcgcggcagaaccttctatatcccctccgctatcggctatgaaggaaaaatcagggacgaagtactgaggaaaagggaactgcaagcagccgttattttaggagagcaaacaggtgacggggaactcttaagctggtcggcagcggcgaaagggagaacgggatggttcaagcgacttgaatcgggccgaagcgccctcctgctgaaagatcgcgacgcgattttcaacgccgccgctccctcccgacagggccgggtgcttgtccctctggccgccgacggcctcctgctctgggagagcctgcgccgctgtcccgaaggcctcagcgcggcgttagtcgctactgaagccgcccgcgaggcattgctccgttacgcggctgtgctggatgaaattgagcagccggaaatcgccgtactggaatcagggattttacctgcgcctgaacaggctgccgaatggtttgccgcaaatgttttcgatttgatactgataagggaaccctggcgcagaggtttttcgggaacacagggcggccgttcgcaaaaccccgaagcagaatttacaagcctcgccgaatccgcgaaagcactgcttgcccccggaggccgcattgtcctgctctgctcgccgccaatgacgggccagcggatttcgcaattcatcattgatgaagaccaattattgtccgaaaaactggccaaggccgaagacgcctttttttcaggtcggaaagacaagcccagcgcgtggaactgggacgcctccaatgtgtccgcttcttttgaatcgcggggcttcaaagttacaattaacgtccttgaacagaaagaggaacggcttatcagcccaaaagacatacaagcctggtttgacaaagtaaattcccgctggggcgcttttatggaaaagaacctcgacacagccgatttttcccgcgccgaagaaatcctgacccaacgcatccagtcaggcccattgccgtggaagtggaagagtttgctgctcacagggagcagtgagtag

SEQ ID NO: 41312 - protein, 392 aa, Unknown
  Obtained from environmental sample
  misc_feature (1)..(392): Xaa is any amino acid
MKEVDKEDAEVPNHLRDASRDAESFGHGEGYIYPHAYRDHWAAQQYLPAALRGRTFYIPSAIGYEGKIRDEVLRKRELQAAVILGEQTGDGELLSWSAAAKGRTGWFKRLESGRSALLLKDRDAIFNAAAPSRQGRVLVPLAADGLLLWESLRRCPEGLSAALVATEAAREALLRYAAVLDEIEQPEIAVLESGILPAPEQAAEWFAANVFDLILIREPWRRGFSGTQGGRSQNPEAEFTSLAESAKALLAPGGRIVLLCSPPMTGQRISQFIIDEDQLLSEKLAKAEDAFFSGRKDKPSAWNWDASNVSASFESRGFKVTINVLEQKEERLISPKDIQAWFDKVNSRWGAFMEKNLDTADFSRAEEILTQRIQSGPLPWKWKSLLLTGSSE

SEQ ID NO: 41313 - DNA, 342 bp, Unknown
  Obtained from environmental sample
  misc_feature (1)..(342): n is a, c, g, or t
atggtatttattttaaaaccgaacataccaaaagaaaagatagacaaatttatctccgactgggaacaaaaggggttttctactatcttcagcgttgggacggaacataccgccgtctgcctgattggaaacaccgcggaaatagacctggatcacgtggttaataccagcgatattgtagattacggcaaacgaatcaccgaacagtacaaggcggtcaaccgcagcgtccatgaagataatacgattatcaaagtgggagacgcgtcaatcggggaaggattttttacggtcatggccgggccgtgttccgttgagagcggggaacagatcttgaaatag

SEQ ID NO: 41314 - protein, 113 aa, Unknown
  Obtained from environmental sample
  misc_feature (1)..(113): Xaa is any amino acid
MVFILKPNIPKEKIDKFISDWEQKGFSTIFSVGTEHTAVCLIGNTAEIDLDHVVNTSDIVDYGKRITEQYKAVNRSVHEDNTIIKVGDASIGEGFFTVMAGPCSVESGEQILK

SEQ ID NO: 41315 - DNA, 1011 bp, Unknown
  Obtained from environmental sample
  misc_feature (1)..(1011): n is a, c, g, or t
ttgagccttggccgccgcctgagggcttcgctggaaaacgccgcttccatagacagctcgctttcgcctgagttaaagcgcctggaagatatttactacgaggccgaagacctggccgccgaattcagaaattaccggggccgccttacctacgacccggcgaagcttgaggaagcggaagaaaggcttgccttgctttacaaactgaagaaaaagtaccggtcggcggaaaacacagactctggcggccaggatgaagggggtatcctcgcttacaaaacggaggccgaggctgagatagaagcgctttcaggagctggggaaaaccaggacaggctaaaggccgaaataagccgccttgaaaaggatcttgccgcaaaggctgccgttctgagcgccaaacgaagcgagggtgcaaagcgcctgggcgaaggaataacaggtatcctttcccggctgggaatgcccaaggcggtttttgctgcgaatgtgaagccaaaaaccagggaagggggagccggtcttgtctgcgggcaatggggcgcagaagacgtggaattcatgatttccgccaatacaggcgagccgctcaaagaccttgcccgtatcgcttccggcggagagctttcccgcgtaatgctggcgataaagacggcgcttttatccgaagggcaaaatgaagccgaaggagtggaaacccttgtttttgacgagattgatacgggcattggaggggaagttgccttgaaagtaggagaatacctgaccaagatcggcaaatttaagcaaattttttgtgtaacacatcttgccagtatcgctgttagagccgataatcattttaaggtggaaaaaagaacggaaggcggcagaacttatacaggtatcgggcctttgagcgcggacggccgcaggaaagagattgcgagaatgcttgcgggggacgcgggaaatgccgcgcttgcccacgccgacgatcttatgcaaaaatacggtaaacggagcggttaa

SEQ ID NO: 41316 - protein, 336 aa, Unknown
  Obtained from environmental sample
  misc_feature (1)..(336): Xaa is any amino acid
MSLGRRLRASLENAASIDSSLSPELKRLEDIYYEAEDLAAEFRNYRGRLTYDPAKLEEAEERLALLYKLKKKYRSAENTDSGGQDEGGILAYKTEAEAEIEALSGAGENQDRLKAEISRLEKDLAAKAAVLSAKRSEGAKRLGEGITGILSRLGMPKAVFAANVKPKTREGGAGLVCGQWGAEDVEFMISANTGEPLKDLARIASGGELSRVMLAIKTALLSEGQNEAEGVETLVFDEIDTGIGGEVALKVGEYLTKIGKFKQIFCVTHLASIAVRADNHFKVEKRTEGGRTYTGIGPLSADGRRKEIARMLAGDAGNAALAHADDLMQKYGKRSG

SEQ ID NO: 41317 - DNA, 831 bp, Unknown
  Obtained from environmental sample
  misc_feature (1)..(831): n is a, c, g, or t
ttgaaaacctcaagctgcaggaaccggttcngcatgaaaacctgcggggcagcgcttactacagggaggacgatcatgttagataacgccacactgggccagttgcgtgatctcgccctgtccgcaatggcgtcatgtttcaaggatcaattaaacgggaacggcattggctcgctctcgtttgaagagcgtttcggtatgttagttgaagccgagtgggttagccgcggaaacaagcgctttaaccgcctgataaggcaggcgggcttccgccttcccgcggttcttgaggacattgattattccggcaagcgcggtattaccaaaccggaaatactcaaactcagcctgggggcctatatcaaaaaagcgcaaaatatttttttctcagggccgaccggggttggaaaaacatacctggtatgcgccttgggcagggccgcttgcgcccaaggtgttcaagtcctctatacaagggtcacggattatttcaattcgatatttactccctcaagcaattaccggcacaaaccgttgcgggataaattcgcttccgtgccgttgctcgtccttgacgactgggggcttaaaaagttttccgctgaagaaacccatgaactctcagagctgtttgaacggcgctatggccgggccgcaaccatcatttcaggacagattccttccacctcctggcatgacttgtttcccgacccgacgcaagctgacgcaatcctcgaccgtattgtccataacgcctacgcctataatatctcaggtgagtccatgcggaaagccctcggaaagcgcagcctggaaagttctgattcctag

SEQ ID NO: 41318 - protein, 276 aa, Unknown
  Obtained from environmental sample
  DOMAIN (48)...(77): IstB-like ATP binding N-terminal
  misc_feature (1)..(276): Xaa is any amino acid
MKTSSCRNRFXMKTCGAALTTGRTIMLDNATLGQLRDLALSAMASCFKDQLNGNGIGSLSFEERFGMLVEAEWVSRGNKRFNRLIRQAGFRLPAVLEDIDYSGKRGITKPEILKLSLGAYIKKAQNIFFSGPTGVGKTYLVCALGRAACAQGVQVLYTRVTDYFNSIFTPSSNYRHKPLRDKFASVPLLVLDDWGLKKFSAEETHELSELFERRYGRAATIISGQIPSTSWHDLFPDPTQADAILDRIVHNAYAYNISGESMRKALGKRSLESSDS

SEQ ID NO: 41319 - DNA, 1584 bp, Unknown
  Obtained from environmental sample
  misc_feature (1)..(1584): n is a, c, g, or t
ttggaaaatattgaagaagcgctgaaaggcagaaaactggattacctcgcggttcagcacgtagaacctgaccattccgccgtgattcctgaattgattcgattataccctaatataaaaattgtttgcagtgagaaaatattagaatttatcaaacaattctatgagtttgatatagattcacgcattcatctggtcgatgaaaataaaacactgaatacaggaaaacacacctttcattttgttatggctccgatggtgcattggcccgaagtcatgatgacctacgattcaacatcaaaaatacttttttctgctgatgcgtttggatgtttcggcgcgttgaacggcgctattttcgctgacgaagtgaatttcgctaaggattatatggacgaagcccgccgctattatacaaatatagtagggaagtacgggacgcaggttgaatcggtattgaacaaagcgtcaactcttgatatcgaaatgatttgtccgcttcacggttttgtatggcgttcaaacttaaatgaaatcctttcaaagtatatgctttggagcaagtacgagcctgaagaacgaggcgttatgatagcttacgcgtccgtttacgggaatacggaaaacgccgcggaaattcttgcctgccgcctgcgggacaaagggattaaaacggttatatttgatgtttcggttacgcccgcatccgagatagtaagcgccgcgttcaaatggagccaccttgtattcgcttccacaacctacaacgccggaattttcgtaacaatggaagctttgcttaacgatctcgccgcgcacaatattcaaaaccgccgtgtcgctattatcgaaaacggttcatgggctcccgcaagcggcggcttgattcgtgaaatactaggcaagtgcgaaaagatcaatattatcgaaaagaatgtcagtattttatccggcttaaaggcaagtcatctttcggatattgaatcaatggcgcaagcaatcggcgctgatttccccgctcccgcggcagttgctcagaataatcagactgcgccgaataccgttgattccaacgccatgttcaagctgtcttacggtttatttgtattaacagccaaagacggcaataaggacaacggctgtattatcaataccgttatgcaaataacggtaacccccatgaagataacaatcggagtgaataaagccaattatacacatgacatgatattaaagaccggaaaattcaatgtttccgttttaagcgagaaagcgccttttagtgtttttcagcaatttggttttaagagcggaaaagacaccgataaatttgccggcagtgaagaagttttgcgcacaacaaacggcgtccgttatttatcaaaatgggcaaacggcgtgatttcagcggaagtgaaagaagcaattgattgcggcacacatacgctgtttatcgccgaagtgaatcaggcgttctcgctgtcgagcgatgcaagcgttacttatcaatattattttgacaatataaaaccgaagccccagccgccgaagggaaacaaaaagggatttgtctgcaaaatttag

SEQ ID NO: 41320 - protein, 527 aa, Unknown
  Obtained from environmental sample
  DOMAIN (1)...(168): Metallo-beta-lactamase superfamily
  misc_feature (1)..(527): Xaa is any amino acid
MENIEEALKGRKLDYLAVQHVEPDHSAVIPELIRLYPNIKIVCSEKILEFIKQFYEFDIDSRIHLVDENKTLNTGKHTFHFVMAPMVHWPEVMMTYDSTSKILFSADAFGCFGALNGAIFADEVNFAKDYMDEARRYYTNIVGKYGTQVESVLNKASTLDIEMICPLHGFVWRSNLNEILSKYMLWSKYEPEERGVMIAYASVYGNTENAAEILACRLRDKGIKTVIFDVSVTPASEIVSAAFKWSHLVFASTTYNAGIFVTMEALLNDLAAHNIQNRRVAIIENGSWAPASGGLIREILGKCEKINIIEKNVSILSGLKASHLSDIESMAQAIGADFPAPAAVAQNNQTAPNTVDSNAMFKLSYGLFVLTAKDGNKDNGCIINTVMQITVTPMKITIGVNKANYTHDMILKTGKFNVSVLSEKAPFSVFQQFGFKSGKDTDKFAGSEEVLRTTNGVRYLSKWANGVISAEVKEAIDCGTHTLFIAEVNQAFSLSSDASVTYQYYFDNIKPKPQPPKGNKKGFVCKI

SEQ ID NO: 41321 - DNA, 1203 bp, Unknown
  Obtained from environmental sample
  misc_feature (1)..(1203): n is a, c, g, or t
ttgaaagaagcccgccgtaaattgtattattccagtattatggttaaatacccttttgagacaatcgaacccaagtggcagaaatactgggctgaacacaagacttttaaggcggcggaagacccggcctttcccaaagacaaacgctgttatgtgctggatatgttcccctacccttccgcccagggacttcatgtgggccaccctgaaggctataccgcaacggacatctactgccgttacctcagaatgaacggctataacgtgctgcatcccatgggctttgacgcgttcggccttccggcggaaaattacgcgataaaaatgggccttcatccggctaaaattaccgccgaaaatatcgatcatttcagagaacagataaaagcccttggattttcttacgactgggatcgtgaagttgataccactgatgaaaactattacaagtggacccagtggatatttctcaagctgtttgaaaaagggctggcttacgaggctgaaagcccgattaactggtgcccgtcctgcaagacaggcattgccaatgaagaagtggtggaaggcctctgcgaaaggtgcaagaccagggtaacccgtaaacgcatacgccagtggatattaaagatcaccgcttatgcccagcggcttcttgacgaccttgagggtcttgactggccggaacctgtgaagcagatgcagcgaaactggataggccgttcggaaggcgctaatgtggttttcaaggttgacgcgtcaaacctgaatacaaaagaggaaatctcttttgagatatataccacccgtcccgacacccttttcggggcgacctacatggttctttcaccggaacatccgctgacagaaaaactcaccacgccggaacagaagaccgcggtgctggcgtacatcgaagaagccgcgaaaaaaagcgaccttgagcgtacagatctggccaaaaccaaaacaggcgtgtttaccggggcatacgctatcaatccggtaaacggcgaaaaaatccctatatggatcgccgattatgttcttatatcatacggaaccggagccatcatggcggttccggcgcatgacgagcgcgactgggaattcgcccaagcgtttaatctgccgatttgtaaagtagttggggaagaaaagggaatgggaaatggaaatggggaaaagggggaacctaattaa

SEQ ID NO: 41322 - protein, 400 aa, Unknown
  Obtained from environmental sample
  DOMAIN (25)...(389): tRNA synthetases class I (I, L, M and V)
  misc_feature (1)..(400): Xaa is any amino acid
MKEARRKLYYSSIMVKYPFETIEPKWQKYWAEHKTFKAAEDPAFPKDKRCYVLDMFPYPSAQGLHVGHPEGYTATDIYCRYLRMNGYNVLHPMGFDAFGLPAENYAIKMGLHPAKITAENIDHFREQIKALGFSYDWDREVDTTDENYYKWTQWIFLKLFEKGLAYEAESPINWCPSCKTGIANEEVVEGLCERCKTRVTRKRIRQWILKITAYAQRLLDDLEGLDWPEPVKQMQRNWIGRSEGANVVFKVDASNLNTKEEISFEIYTTRPDTLFGATYMVLSPEHPLTEKLTTPEQKTAVLAYIEEAAKKSDLERTDLAKTKTGVFTGAYAINPVNGEKIPIWIADYVLISYGTGAIMAVPAHDERDWEFAQAFNLPICKVVGEEKGMGNGNGEKGEPN

SEQ ID NO: 41323 - DNA, 393 bp, Unknown
  Obtained from environmental sample
  misc_feature (1)..(393): n is a, c, g, or t
ttgaaaaaccttctgcgcaacctgaaagccaccggtccggccttcctcatcggggtcgccctttcggccctttttcagcgattcgtcccgcccgaggccatggccgcgcttttcggaaggcatcggggtttcggcctcctcatggccgcgacagtgggcgtacccctgtatgtctgcggcggtggcaccatcccccttcttatttcttggatggaaagcggcatgtcattgggctcggctgccgcgtttatgatcacgggcccggcaatgaaaatcacgaatatcggcgcggtaaaaatcattatgagaataaaagatttttgcctttacattgccttctcggttctttttgcccttttaaccgggtttttgattgaccttgtttatcattga

SEQ ID NO: 41324 - protein, 130 aa, Unknown
  Obtained from environmental sample
  SIGNAL (1)...(22)
  misc_feature (1)..(130): Xaa is any amino acid
MKNLLRNLKATGPAFLIGVALSALFQRFVPPEAMAALFGRHRGFGLLMAATVGVPLYVCGGGTIPLLISWMESGMSLGSAAAFMITGPAMKITNIGAVKIIMRIKDFCLYIAFSVLFALLTGFLIDLVYH

SEQ ID NO: 41325 - DNA, 1116 bp, Unknown
  Obtained from environmental sample
  misc_feature (1)..(1116): n is a, c, g, or t
gtggaagttgtggaagaagaagggggcaatatactgggccccggcgacttctttggggttgtttcctccatgtcttcccatagtcatattgaaaccgcacgcgccattacggatgttgtccttatttcagttcaaaaagaacaatacggggagctgattcagagaaacacacccgtagcgatgaagatcatccttcagttctcaaagcgcttaaggtatctggacgaggcgctttcaaggcttactttaaaaaacacagccgaagccgatccctcccacctttttaccgtggcggaacactacatccggcagagccagtacaatcaggcttattatgcgtacgccaaatatataaagtactgtccccagggcgataacgttaccaccgcgaaggagagaatggcaaaaattgccatttatgtaaaagggataaagttagaattcgggccggatgaatttaaccgtatctataaaaaaaattccatggtgtttgccgaaggagagcccgggaacgagctttttattattcaaaagggttccgtaacgatagcgaagatagtggacgaaaatgaggtgcttttggcggttttaaaacaaggggacatcttcggggaaatggctttgcttgaggcaaaacccagaaacgcaagcgcggtggcttatgaggaatgtcagcttctggctgtaaaccgtgccaactttcagaaaatgatctcctcacagccccagctcatcgcaaggcttaccactcttttggcagaccgtatttggttcatttacaagcacctggcaaattccctcatcaccgataccctgggccgtatgtacgacgcccttttaattcagcttgaaaaaaaccgcgttacgtttaacccctacgcctcttatacttttgactttggccccagggaactggccaatatggtaggcatacccccaaaagacgctaatttgctgcttagaaaaatgcttgagaacggaaagatagttattgaaaatgacaagattcacgcgaacaaggtaggtgaaattatcaagcaggccgaattctataaaaaaatgcaaaaaatagaaaactcccgcaaagtggcaaaggctcagcttaatccgatttga

SEQ ID NO: 41326 - protein, 371 aa, Unknown
  Obtained from environmental sample
  DOMAIN (154)...(243): Cyclic nucleotide-binding domain
  misc_feature (1)..(371): Xaa is any amino acid
MEVVEEEGGNILGPGDFFGVVSSMSSHSHIETARAITDVVLISVQKEQYGELIQRNTPVAMKIILQFSKRLRYLDEALSRLTLKNTAEADPSHLFTVAEHYIRQSQYNQAYYAYAKYIKYCPQGDNVTTAKERMAKIAIYVKGIKLEFGPDEFNRIYKKNSMVFAEGEPGNELFIIQKGSVTIAKIVDENEVLLAVLKQGDIFGEMALLEAKPRNASAVAYEECQLLAVNRANFQKMISSQPQLIARLTTLLADRIWFIYKHLANSLITDTLGRMYDALLIQLEKNRVTFNPYASYTFDFGPRELANMVGIPPKDANLLLRKMLENGKIVIENDKIHANKVGEIIKQAEFYKKMQKIENSRKVAKAQLNPI

SEQ ID NO: 41327 - DNA, 357 bp, Unknown
  Obtained from environmental sample
  misc_feature (1)..(357): n is a, c, g, or t
atgacagatcggccgagctgtctttgctgttacgacggctttttcgggccggggacaggaatgtttatgacgcttgcgctttcgggtcttgttcatctggatttgattaagtcagtgggtagtaccaagcttatcaatttctcttccaacttcaccgccatgatcacctggctgataagcggcaaaattctttttccgatagccgttccctgcatggtctgctctgtggcaggcggttttttgggctcaaggatggcgataaaaacgggtaaaaaattaattcgccttgttcttgccctggtttcaatcctgctttttgtaaagattgcattggatttggtacaggatattttatga

SEQ ID NO: 41328 - protein, 118 aa, Unknown
  Obtained from environmental sample
  misc_feature (1)..(118): Xaa is any amino acid
MTDRPSCLCCYDGFFGPGTGMFMTLALSGLVHLDLIKSVGSTKLINFSSNFTAMITWLISGKILFPIAVPCMVCSVAGGFLGSRMAIKTGKKLIRLVLALVSILLFVKIALDLVQDIL

SEQ ID NO: 41329 - DNA, 972 bp, Unknown
  Obtained from environmental sample
  misc_feature (1)..(972): n is a, c, g, or t
atgacgctggacgacctgcgcgccctgacaaggacggtgccgcaaatcattagtgtcaccccagttttttttactggcggcgaagtcaagagcggcggcagaagcacaaacacgcaaatctatatgacagatgacacttggattgaccagaacaaagtgaatttgtctatgggcaggaattttgtaccggctgacatgcgcctgaggtcaaaggtggctattattggcccgcggcttatagaaaaacttggaatcagcggcagcccagtgggccaatacatcacggcgctgaacatgagtttggaaatagtcggcgttttggaagcggtgggggccagcatcggcaatgacgaggatgacgcaataatactccccatcacaacgggcatggccacgctgccagaccacatgagaaggcagctaattttccaggcaaggcacgaccccaaggtcaacacagacgatgcagaagacttggtgcgcgaggcgctcaggcgcatccgcggggtaaagccaaatgagattgaaggctttgttgtgttcagccaaaagaagatcgcttcgatgatggacgcaatcactacatctataaccgccgtggctggcggaatggtcagcatagccctgctggtgggcggcattggcattatgaacataatgctggtcagcgtcacagagcgcacccgcgagataggtgtgcgaaaggccgttggggccacgcgcagggacatagccgcgcagtttttggtggaggcagtcacgctcactggcgtgggcggcatatttggcatcgcctttggccttggctgcggcttcttggtcaagctgatcaccggcttccccgccgccgcccccctgtggtccatcatactcggcgtcgccgtcagcaccggcacgggcctggcctctggactctggcccgccataaaggccgccaaacaggacccaatagaggccctgcgctacgagtga

SEQ ID NO: 41330 - protein, 323 aa, Unknown
  Obtained from environmental sample
  DOMAIN (119)...(316): Predicted permease
  misc_feature (1)..(323): Xaa is any amino acid
MTLDDLRALTRTVPQIISVTPVFFTGGEVKSGGRSTNTQIYMTDDTWIDQNKVNLSMGRNFVPADMRLRSKVAIIGPRLIEKLGISGSPVGQYITALNMSLEIVGVLEAVGASIGNDEDDAIILPITTGMATLPDHMRRQLIFQARHDPKVNTDDAEDLVREALRRIRGVKPNEIEGFVVFSQKKIASMMDAITTSITAVAGGMVSIALLVGGIGIMNIMLVSVTERTREIGVRKAVGATRRDIAAQFLVEAVTLTGVGGIFGIAFGLGCGFLVKLITGFPAAAPLWSIILGVAVSTGTGLASGLWPAIKAAKQDPIEALRYE

SEQ ID NO: 41331 - DNA, 663 bp, Unknown
  Obtained from environmental sample
  misc_feature (1)..(663): n is a, c, g, or t
atgaacgcgaataccggagccggcgcaaacgtaagtgagctggaaaattacaaacagcgttatcagcaattagaaacaagatacaaagaattagaacccgcagtaatagaattaaaagaataccggaataaatacctcgaaataaaggaacgatatgatttattgatatacaaacggtttgcccgtagcgcggaacaattacttgaggacgcgaaacaacagttgttatttgccgaggaagcggaagcaactgaagaaaaagaggaagagcttcaaacagtcatgtcattcagtcggaagaaagccgggcgcaaaccgttaagcgcgaatcttgaacgaagggagaaaataatagacatacccgaaagtgagaaaacatgcgcctgcggagcgaaattaacacgaattggtgaagaaacggcggaaaaactgcaaataatcccgccgcagatatatgtggaaaaaacggtcagacctaaatactcctgccgctgctgtgaagggactgaagatgaagacgcgccctctgtccgcatagcgcctgtagaacctgcgattattccaaaaagcatagcgagtcccagccttttaagcaccataatcacgcagaaatttgaaatgcatcttccatattacaggcaggagaaacaattgagcagatag

SEQ ID NO: 41332 - protein, 220 aa, Unknown
  Obtained from environmental sample
  misc_feature (1)..(220): Xaa is any amino acid
MNANTGAGANVSELENYKQRYQQLETRYKELEPAVIELKEYRNKYLEIKERYDLLIYKRFARSAEQLLEDAKQQLLFAEEAEATEEKEEELQTVMSFSRKKAGRKPLSANLERREKIIDIPESEKTCACGAKLTRIGEETAEKLQIIPPQIYVEKTVRPKYSCRCCEGTEDEDAPSVRIAPVEPAIIPKSIASPSLLSTIITQKFEMHLPYYRQEKQLSR

SEQ ID NO: 41333 - DNA, 363 bp, Unknown
  Obtained from environmental sample
  misc_feature (1)..(363): n is a, c, g, or t
atgccgcgtaagtacggcgttgaacacttgggttccaaaattgtcatcatccttggccacacctcatgcggtgccatcggcgccgttgctgacgcgaaagacgagcatctgcacgggaatttccatattttccaagaagtcatggaaggcctgctgagttctacgactagggatcccaacgagtccgagcaagactacaaaatccgcttggcaaaagtgaacgccattcgccaggccaagtcggtttacgaaaagagccccgtcatccgcgaattcatcgagcaaggcaagatttggctggttcccgccatacacgacattgccagcgggagagtcacattctttgagccagtgggtaagtag

SEQ ID NO: 41334 - protein, 120 aa, Unknown
  Obtained from environmental sample
  misc_feature (1)..(120): Xaa is any amino acid
MPRKYGVEHLGSKIVIILGHTSCGAIGAVADAKDEHLHGNFHIFQEVMEGLLSSTTRDPNESEQDYKIRLAKVNAIRQAKSVYEKSPVIREFIEQGKIWLVPAIHDIASGRVTFFEPVGK

SEQ ID NO: 41335 - DNA, 513 bp, Unknown
  Obtained from environmental sample
  misc_feature (1)..(513): n is a, c, g, or t
atggctctgtatatcaaacggggcaatgggaagggcatggacacaaaagcatttcgccgcataggccatgagttgatagattgggtcgccgactatagggagcgcattgaaacgctccccgtgatgagccaggcaaagccgggagatgtcagggctaagattcccaaagagcccccgcaaaagggagttggtttggaagggcttgggcggacgctggacgaagtggtgatgcccggcataacccattggactcaccccggcttctttgggtattttccctcgaataccgatttggcctccgttctaggcgacttggtggcctctgggcttggtgtgcaggggatgagctgggtcacgagtccagcggccacagaagtggaagaagccgtcatgggctggctgaggcagatgctggggttgcctgaatccttttcgggcgtgatacacgacaccgccagcactgctactttttgcgctctactttgcgctagggagcgcacaactgggttttag

SEQ ID NO: 41336 - protein, 170 aa, Unknown
  Obtained from environmental sample
  misc_feature (1)..(170): Xaa is any amino acid
MALYIKRGNGKGMDTKAFRRIGHELIDWVADYRERIETLPVMSQAKPGDVRAKIPKEPPQKGVGLEGLGRTLDEVVMPGITHWTHPGFFGYFPSNTDLASVLGDLVASGLGVQGMSWVTSPAATEVEEAVMGWLRQMLGLPESFSGVIHDTASTATFCALLCARERTTGF

SEQ ID NO: 41337 - DNA, 1656 bp, Unknown
  Obtained from environmental sample
  misc_feature (1)..(1656): n is a, c, g, or t
ttgatggccgaggattgcccggtattgtgcgcggcctgcggaaccgtactgacatattattggctgttccccgtgttccgttcaggggttataagcattgacgggctcttggtattgatttttatcccggtggcgtttctgtgcctgataagggtactggcctcatttccgggggggaaccttgaccctgccgggtctcggcggcaggtacccctacggggggaagaaaaacagatccccgtaccaaaactccgtgattccccctggttacttcttgcttattggacacgtccgaggcaattgcgcttactgaccttttggattgccgcattttcggcggggcttgcgattggtatagccgcgggcgcgagcatctcaaacactgtgtcttttagcattcccgaagatacagtccggggaatctacggcacattgcttgatgaccccagggttatatcaaacggcaaggccgacggcagggcgatgtccgcgcttttgctgagaacgtcaacgggtgacagcggcgtaaagatcgatgcatacggccaaattaccgtttttttccgggaggaaaacgttgagcggttaaaagaattcggaaggggaacggaagtctttgcggaaggcgagcttcacggccctgccggcggctctacccctggtggtggcgcaggctttaacggttttggggcctatactttcacggcagaggcattgcacataacaaaagcggctcctccccttgagcgttttcgcaccaatctcaggctcggccttacggacaggtttacgggttctcatcacacaggcgcctggngcggcctcgcgcttgccctgcttttgggcattcgtgacaatctcgacacgggttttgccgcccagtaccgggacgcgggctgctcgtatatacttgccctttcaggaatgcacctcgccattctcgtttccctcatctccttcttccttcaaaaaccacttgggttaaaggctgccgcaatcacgggcgccgttataatcatcgcgtattgctttatagtcggccccttgccaagcctgaaccgcgcggcccttatgtatctgctgggggttgtatccgtactgggcatgctaaggcgggatatgctgtcgcttctgtgtatggcgtttttgctccagcttgcctttaccccgtcgtctggtttctcgctttcgtttatcctgtcgtatctggcccttgcgggtattcttgtcataggcagggcaatcaacaacgtcttcatgggcaaaattccggctcttctgctccagcccctttccgcttccctgggcgcctttatcgccaccgcgggagtatcggcgtggtttttcaccgatcttcgccccgtgggcatactggccgggctcgcgcttgccccgcttgcctccgtatttatggtattgtccatcgcgtggctcggtcttgattctataatacccgttctttctttcctgcccggcaaagcgctttccctgctttaccggctgatggaaaaaaccgcctcgctggcggcggccgcgccgggcgtcagggcaaatccttttttggtaattttattttcattgttaataacagtaacagtattatggctggattggaggcgcgggattaccgccggacgactggagcctttcgcatga

SEQ ID NO: 41338 - protein, 551 aa, Unknown
  Obtained from environmental sample
  DOMAIN (279)...(536): Competence protein
  misc_feature (1)..(551): Xaa is any amino acid
MMAEDCPVLCAACGTVLTYYWLFPVFRSGVISIDGLLVLIFIPVAFLCLIRVLASFPGGNLDPAGSRRQVPLRGEEKQIPVPKLRDSPWLLLAYWTRPRQLRLLTFWIAAFSAGLAIGIAAGASISNTVSFSIPEDTVRGIYGTLLDDPRVISNGKADGRAMSALLLRTSTGDSGVKIDAYGQITVFFREENVERLKEFGRGTEVFAEGELHGPAGGSTPGGGAGFNGFGAYTFTAEALHITKAAPPLERFRTNLRLGLTDRFTGSHHTGAWXGLALALLLGIRDNLDTGFAAQYRDAGCSYILALSGMHLAILVSLISFFLQKPLGLKAAAITGAVIIIAYCFIVGPLPSLNRAALMYLLGVVSVLGMLRRDMLSLLCMAFLLQLAFTPSSGFSLSFILSYLALAGILVIGRAINNVFMGKIPALLLQPLSASLGAFIATAGVSAWFFTDLRPVGILAGLALAPLASVFMVLSIAWLGLDSIIPVLSFLPGKALSLLYRLMEKTASLAAAAPGVRANPFLVILFSLLITVTVLWLDWRRGITAGRLEPFA

SEQ ID NO: 41339 - DNA, 306 bp, Unknown
  Obtained from environmental sample
  misc_feature (1)..(306): n is a, c, g, or t
ttgctgatgctggccgccattcccttctctttattcgcgtctatcaccacgctgctgttgttgttcacgcggagcgtaccgacgatctcgtcgcgaacgcctgtggcgctgccttcgagcaatttcttcgtgttgaactctgtggtatttccgatgcggtcaatttcagctttaagctgtctgacttcggattgcagctcttcgcggtctttgtccgtgttagtgtcgttggccgactgtacggacagttcgcgcatcctttggaggatggagtgcgtttcggcgagggcgccttcagccgtctga

SEQ ID NO: 41340 - protein, 101 aa, Unknown
  Obtained from environmental sample
  SIGNAL (1)...(28)
  misc_feature (1)..(101): Xaa is any amino acid
MLMLAAIPFSLFASITTLLLLFTRSVPTISSRTPVALPSSNFFVLNSVVFPMRSISALSCLTSDCSSSRSLSVLVSLADCTDSSRILWRMECVSARAPSAV

SEQ ID NO: 41341 - DNA, 1614 bp, Unknown
  Obtained from environmental sample
  misc_feature (1)..(1614): n is a, c, g, or t
ttggtcggagttaactttataagcacagttcaggacatagtagatagtttggtaaaagaattgtacaacggcaagggaacagcctcgatattcagcgataacgctacaattgtagcccattgggacaaggtaagagtcaaggataatttaaaaacaaacgacaaggaaaaagcgctttttggagccgacgttaaccgtttagccgacgcgatcctgcatggacaagaccttataatagaaaagtattccccttccctgaaaacagacgtatattatattttacagcctattatcacttcgggctttgaaacaaccccctggtctctgcgaataggcatccctttatcggaaataaagaggccgattcataccctgatgaatttttccataatattcgccgttatccttctggttatagcggcggttattactttattagtctcaaacaacattattaaacctattatcgtcgtgaccgacacgttaaaggacatatctgaaggcgagggcgacctgacgcggactgtcgccgtcacttcaaaagacgaggtaggccatcttgccatgtactttaacaagacgcttgaaaaaatcaaaaacctgattcttattattaaaagacaggcaggcgcgttatcagaaatcggcgcggatttgtccagcaacatgaccganacggcggcgacggtgaacgaaattacctccaatatccagagcatcaagggccgtgttattaaccaaagcgccagcgtcaccgaaaccaacgcgacaatggatcaggtcatggcgaacatcaacaaactcaacggtcttgtagaaaatcaggctgaaacaatatcaaaacggtccaccttcattcaggcaatggtagataacatcaattcagtaaaccagactttgctaaaaaatctggaaaatgtacaaaccctcaaagaagcctccgaaataggccgcagcggattgcaggaagtagcggcggatattcaggaaattgcccgcgaatccgaagggcttttggagattaacgcggtcatggaaaacatcgccagccagaccaacctgctttcgatgaacgcggcgatagaagcggcgcacgccggagaatcgggcaagggtttcgccgtagtcgccgatgaaatccgtaaactggctgaaaattccggcgagcagtccaagacaattggtacggtactgaaaaagatagcggaatcaatcaaaaaaattaaaggcgccacngaaaacgtcctacccaaattcgaggcaattgacacgggcgttaagacggtgtcggatcaggaagaaaatatccgcaacgccatggaggagcagggagagggaagcaagcaagtcctgcaaggtgtcggccatctgaatgaaattacccggcaggtaaagaacggttccgaagagatgcttgagggcagccaggaagttatgaaggaaagccggaacctcgaaaaggtaacgcaggagatcaccggtggcatgaacgagatggcagcaggtgcagatcaggtgaacatagctgtaaaccgcgtgaacgaaataagcgtcaagaaccgcgaaggcattgcgaatttgatgaaggaagtatcgcgctttaaaatcgagtaa

SEQ ID NO: 41342 - protein, 537 aa, Unknown
  Obtained from environmental sample
  DOMAIN (231)...(493): Methyl-accepting chemotaxis protein (MCP) signaling domain
  misc_feature (1)..(537): Xaa is any amino acid
MVGVNFISTVQDIVDSLVKELYNGKGTASIFSDNATIVAHWDKVRVKDNLKTNDKEKALFGADVNRLADAILHGQDLIIEKYSPSLKTDVYYILQPIITSGFETTPWSLRIGIPLSEIKRPIHTLMNFSIIFAVILLVIAAVITLLVSNNIIKPIIVVTDTLKDISEGEGDLTRTVAVTSKDEVGHLAMYFNKTLEKIKNLILIIKRQAGALSEIGADLSSNMTXTAATVNEITSNIQSIKGRVINQSASVTETNATMDQVMANINKLNGLVENQAETISKRSTFIQAMVDNINSVNQTLLKNLENVQTLKEASEIGRSGLQEVAADIQEIARESEGLLEINAVMENIASQTNLLSMNAAIEAAHAGESGKGFAVVADEIRKLAENSGEQSKTIGTVLKKIAESIKKIKGATENVLPKFEAIDTGVKTVSDQEENIRNAMEEQGEGSKQVLQGVGHLNEITRQVKNGSEEMLEGSQEVMKESRNLEKVTQEITGGMNEMAAGADQVNIAVNRVNEISVKNREGIANLMKEVSRFKIE

SEQ ID NO: 41343 - DNA, 435 bp, Unknown
  Obtained from environmental sample
  misc_feature (1)..(435): n is a, c, g, or t
gtgaaaatatctacaaaagggcggtattcgctcagtatgcttgtggacttggccgagcacaaaaacgatgggtttgtttcattaaaagatatttccgagcggcagggcatttccaagaaataccttgaacagatcgttaccctactgaaccgccccggcattctgcgtaccaatcgcggcaataagggaggatatatgctggcaaaagagccagataagtatacagttggccaaatcttaagaattaccgagggagggttaaatccggtctcgtgcctggcggatgggcaaaatcaatgcgagcaaaaaggagcctgcaaaacactgtgggtatggcagggcttggagaaaatgatcaacaaatacctcgacggtattaccgttcaggatatagtagatacctgtaaagacagcgcgtacggctacgatatataa

SEQ ID NO: 41344 - protein, 144 aa, Unknown
  Obtained from environmental sample
  DOMAIN (1)...(123): Transcriptional regulator
  misc_feature (1)..(144): Xaa is any amino acid
MKISTKGRYSLSMLVDLAEHKNDGFVSLKDISERQGISKKYLEQIVTLLNRPGILRTNRGNKGGYMLAKEPDKYTVGQILRITEGGLNPVSCLADGQNQCEQKGACKTLWVWQGLEKMINKYLDGITVQDIVDTCKDSAYGYDI

SEQ ID NO: 41345 - DNA, 1413 bp, Unknown
  Obtained from environmental sample
  misc_feature (1)..(1413): n is a, c, g, or t
atgggcgagtatcttgatgcggcgcgcgaatcaaaaaatcacgccatggaaaacgcttcacacggctcttttgacactttccttgagtatagaaactccgcctattatttattgcaggaaatattgcaagaggagccggcggcaaagatagaaacaatcagcgcgcagttaagcgaaaaaaatcccgatttatccgacggtatagaagatgaagccgattacataatttcgttattaaacgctctggaaataaatctgtcccgtcatagagaactaaccgactctaacaaaaaaacttttaacgacaattttgtaattataggacgggttgatacgggaactaccgactacggagcgaacccgttttacggcaaatatgtcaatgtaggcactcacggcgttgtgcttgatacgatactttccaaatcattcataatttgccttgataatatttggaaaatattttttatgctgatttttattccgctcttttttatgtttacggataaatttgcgcctgttttacgcgcgtcattgggattcggaacagcgttatttatatttctcatttctgttttaatattccgcttaacaggattttttacggggccgtttggaatagtaacggcaatggtcgtcgctattattatccgtgaaattgtttcttacgctaattcggagaaagaaaaacaatttataagaacggcgttttccacttatgtttccggcgatgtagtaaaagaaataatttccgatccttctcgtttgcatttaggcggaacaaaacgccgcatgaccgctatttttacggatgtcagaagtttctctactatttccgaacagcttgatcctgaacaactggtaagccttttgaacaaatacctcggcgcaatgagcgacgttattctcgcggaaaaaggaaccatcgacaaatacgagggagacgcgattatcgctttcttcggcgctcctctcgaattaaaagatcacgctcttcacgcgtgtctgtccgcgatttccatgaaaaaacttgaaacagagcttaacaagactatcatggaaaacaatctttctcctctgccgcttttaacccgcataggcatcaacacgggcgatatggtagcgggcaacatgggaacagccaacaagatgaattataccatcatgggaaacgccgtaaatcttgcggcgcgacttgaaggagtaaacaaacaatacgggacatgggtactcgcttctgagaacacgatacgcgaaaccggcgataagttgtttcacagaaaacttgaccaagtgcgggttgtgggaattaatgaacctgtgcgtctttgtgaactggtggataccgctgaacacgcaacaagtcaacaaaaacagcttgtcaaagttttcacgaagcgctggaggttttga

SEQ ID NO: 41346 - protein, 470 aa, Unknown
  Obtained from environmental sample
  DOMAIN (260)...(448): Adenylate and Guanylate cyclase catalytic domain
  misc_feature (1)..(470): Xaa is any amino acid
MGEYLDAARESKNHAMENASHGSFDTFLEYRNSAYYLLQEILQEEPAAKIETISAQLSEKNPDLSDGIEDEADYIISLLNALEINLSRHRELTDSNKKTFNDNFVIIGRVDTGTTDYGANPFYGKYVNVGTHGVVLDTILSKSFIICLDNIWKIFFMLIFIPLFFMFTDKFAPVLRASLGFGTALFIFLISVLIFRLTGFFTGPFGIVTAMVVAIIIREIVSYANSEKEKQFIRTAFSTYVSGDVVKEIISDPSRLHLGGTKRRMTAIFTDVRSFSTISEQLDPEQLVSLLNKYLGAMSDVILAEKGTIDKYEGDAIIAFFGAPLELKDHALHACLSAISMKKLETELNKTIMENNLSPLPLLTRIGINTGDMVAGNMGTANKMNYTIMGNAVNLAARLEGVNKQYGTWVLASENTIRETGDKLFHRKLDQVRVVGINEPVRLCELVDTAEHATSQQKQLVKVFTKRWRF

SEQ ID NO: 41347 - DNA, 594 bp, Unknown
  Obtained from environmental sample
  misc_feature (1)..(594): n is a, c, g, or t
atgaaaaacaagttatttaccatattgatgttgctttttgctttatcttttgcttcctgtgcctctatggcttccaaggcttccgtgaaaaagcctgaacatccgaatagtattatggggaaggggaatgtcggggcggagaaattggcgcttttccttttgcaaagcaattcacaaatcgacaaagactatgttcggaaattggcgggaatttatattgaagaagccgcttttgaaggagtcaatcacgatgtcgctttttcgcagatgtgccttgaaacgggctttttaaatttcggcggacttgttcagccggagtggtacaatttttgcggtctcggctcaatcggtcccgaacaaccgggtcttgttttccccgatccgcgcaccggcgtacgcgcccatatccagcaccttaaaggttacgcgacagaagaaccgctcaagggacagttagttgatccgcgctacaaatatgtaaaaaaaggttccagtccaacaatcgaagggcttgccgggacttgggcggcggacagacagtatgcggttaagataaacaccattttgcaacggctttacgaattcgcgttttag

SEQ ID NO: 41348 - protein, 197 aa, Unknown
  Obtained from environmental sample
  SIGNAL (1)...(24)
  misc_feature (1)..(197): Xaa is any amino acid
MKNKLFTILMLLFALSFASCASMASKASVKKPEHPNSIMGKGNVGAEKLALFLLQSNSQIDKDYVRKLAGIYIEEAAFEGVNHDVAFSQMCLETGFLNFGGLVQPEWYNFCGLGSIGPEQPGLVFPDPRTGVRAHIQHLKGYATEEPLKGQLVDPRYKYVKKGSSPTIEGLAGTWAADRQYAVKINTILQRLYEFAF

SEQ ID NO: 41349 - DNA, 393 bp, Unknown
  Obtained from environmental sample
  misc_feature (1)..(393): n is a, c, g, or t
atggaaacaacagaatcaaccagtctcttatacagggacataataggggtacaaaccccatgggcaataacaggcgtagagaaggatgagcagaagagaaaaataaccgtaaagattgaacatgcgcgggaaaacaccataccatgtcccgcatgcggcggagaaacaaaagtatatgaccaccggataagggtattaagatatttagacacatgccaatatgaaacatttcttgaggtgtccataccccgggtgaagtgtaaagaagacggggtgcagcaaatagaaataccgtttgcggagaagcgaagccggtttaccagccgatttgagatggcggtgctggtatggcttaaaagcagcccccatatccgaagtggcgggaaactttaa

SEQ ID NO: 41350 - protein, 130 aa, Unknown
  Obtained from environmental sample
  misc_feature (1)..(130): Xaa is any amino acid
METTESTSLLYRDIIGVQTPWAITGVEKDEQKRKITVKIEHARENTIPCPACGGETKVYDHRIRVLRYLDTCQYETFLEVSIPRVKCKEDGVQQIEIPFAEKRSRFTSRFEMAVLVWLKSSPHIRSGGKL

SEQ ID NO: 41351 - DNA, 933 bp, Unknown
  Obtained from environmental sample
  misc_feature (1)..(933): n is a, c, g, or t
ttgtttgagactaccacagactacgataaacttaactttttttgttttaataatatatttgccgtaataaatataatggagcacactgataatgatgtaaagccgaagaatgcgctcgaaaaacacattagagcagtggtaaaaaacaacgccgcgagtgaagttgtcagtaataataacaagaaatttaatactttcagaattgttgcttccgctgagaatattcctgcggcgattgatgaaaaggcaagagcggaagcggaaagttttatttcccggttttccggtttgaaagtgaacagaagcttgcctgatactgaattttggtttttgtatagaagtgaaaaggagcaaaataaattttcggtttttatgaaacgccttaccttgcgcccttcttgggaaaagacgcttcacaaaggagaattgccgccgcctctcgcttggacattatgccgccttgcgctccttgtccacagcgatactgttttggacccgttttgcggttacggctcgattcccgacgcggcgttaaaacattttcatataaataaattcatcgcctgcgataataacagagaagccgctttgtacacaaagacacgatttaacaagcgcaagaaagaggactttgttttttacgaaagcgatttttctttgctgccttccctcgtcgccgaaaaaagcatagacgcgattgttacagaccctccgtggggagagtaccgggaaattaacaaaacctcgttttataaagaaatgtttgatgttttccaaaagttacttaaagatgacggaagaattgtgttgttatgcgctaataataatgattttttaaataacgtgccagtttcatataagcttgagtccaaaattcctatactgctctccgggaaaaaagcggctattttacagttttttaagaaagaataa

SEQ ID NO: 41352 - protein, 310 aa, Unknown
  Obtained from environmental sample
  DOMAIN (132)...(300): Putative RNA methylase family UPF0020
  misc_feature (1)..(310): Xaa is any amino acid
MFETTTDYDKLNFFCFNNIFAVINIMEHTDNDVKPKNALEKHIRAVVKNNAASEVVSNNNKKFNTFRIVASAENIPAAIDEKARAEAESFISRFSGLKVNRSLPDTEFWFLYRSEKEQNKFSVFMKRLTLRPSWEKTLHKGELPPPLAWTLCRLALLVHSDTVLDPFCGYGSIPDAALKHFHINKFIACDNNREAALYTKTRFNKRKKEDFVFYESDFSLLPSLVAEKSIDAIVTDPPWGEYREINKTSFYKEMFDVFQKLLKDDGRIVLLCANNNDFLNNVPVSYKLESKIPILLSGKKAAILQFFKKE

SEQ ID NO: 41353 - DNA, 630 bp, Unknown
  Obtained from environmental sample
  misc_feature (1)..(630): n is a, c, g, or t
atgaatttgatttttttaggccccccgggcgcaggtaaaggaactttagccgtcaaagccgtagagatacttggcgtgccgcagataagcacaggctcaattttcaggacggcaatagcggacaaaactccgttaggtcttaaagttaaggccatcattgacgccggaaaacttgtggacgatgagaccacaatcgccctcgtaaaagaacgtcttattaaagacgacgttaaaaatggatacattttagacggcttccccagaacaattcctcaggcggaagcgttggccggtttttccaaagtagacaaggttatcaattttgatattcccgattcaggcgtgcttgaacggcttgggggacgcagagtctgcagaaaatgcggatttaattttcacgctatttttaacaagcctaaacaagaaggcgtctgcgatcattgcggcggagaagtgtatatacgcgacgacgacaaacctgaagctgttcagaaacgccttgaagtgtaccgcgcccagacagctccgttaattgattattaccgggggaaaggcttgcttctggatatagacgcaaaacctatggttgatcaaattgtaatcaattttaagaaggctatgggaatatag

SEQ ID NO: 41354 - protein, 209 aa, Unknown
  Obtained from environmental sample
  DOMAIN (122)...(157): Adenylate kinase, active site lid
  misc_feature (1)..(209): Xaa is any amino acid
MNLIFLGPPGAGKGTLAVKAVEILGVPQISTGSIFRTAIADKTPLGLKVKAIIDAGKLVDDETTIALVKERLIKDDVKNGYILDGFPRTIPQAEALAGFSKVDKVINFDIPDSGVLERLGGRRVCRKCGFNFHAIFNKPKQEGVCDHCGGEVYIRDDDKPEAVQKRLEVYRAQTAPLIDYYRGKGLLLDIDAKPMVDQIVINFKKAMGI

SEQ ID NO: 41355 - DNA, 513 bp, Unknown
  Obtained from environmental sample
  misc_feature (1)..(513): n is a, c, g, or t
atgtccagacccacaaataaaaaagaactggttgaattgtcggaacttaatttcaataaattattggaatttattgacggacttcccgaaaagattaaaaacggaacatacaaaaatgatgaattaaatgatcgggataaaacagtcgctgatgtgatatgccatttgcatgaatggcatttgatgatggagaattggtataaggttggaatgtccggcaaaaaaccggcaatccctgcggaaggctatacgtttcagacattacccgcattgaaccataaaatatgggaaaaatataaagggactgaattaaaaaaggcaataactatgttcaaaaaaagccataaagatataatggctttaattgaaaaacataatgaaaatgaactgtttacgaagaaaaaatatcaatggacaggaacaacgtctttaggttcatattttatttcaagtacgtcaagtcattatgattggggcttgaaaacaataaaaccattaaaaaaattaaaatga

SEQ ID NO: 41356 - protein, 170 aa, Unknown
  Obtained from environmental sample
  DOMAIN (1)...(169): Protein of unknown function (DUF1706)
  misc_feature (1)..(170): Xaa is any amino acid
MSRPTNKKELVELSELNFNKLLEFIDGLPEKIKNGTYKNDELNDRDKTVADVICHLHEWHLMMENWYKVGMSGKKPAIPAEGYTFQTLPALNHKIWEKYKGTELKKAITMFKKSHKDIMALIEKHNENELFTKKKYQWTGTTSLGSYFISSTSSHYDWGLKTIKPLKKLK

SEQ ID NO: 41357 - DNA, 1269 bp, Unknown
  Obtained from environmental sample
  misc_feature (1)..(1269): n is a, c, g, or t
ttggcggctcaaagaagacgggcatttggacaaaggttgccttgtggtagctccggcctcccttttaagcaactggaaaaagagcttgagcgttttgccccttccctgcttgtctcccgctttcacgggcctaaccgcgtcatcaacagaaaattcaacgtctttcttaccacctaccaaacggcagttcgtgatgtggagaaactcaaggatgtcgctttttccctgcttttggttgacgaggcccacttgatgaagaacgccgaaacccgcatctcccgcgctgtgaaactcctgcaatccaaataccgccttgcgctttcgggaacgcccgttgaaaaccggctggaagaccttcgctccctttttgattttatcatcccggggtacttgggaaacgcgaggaactttcaaaaacaataccgtatccctatcgaagttatccgaagccgcgaccaggcggaagccttgcgcaaaatcacagcgccttttctcttgcggcgcttaaagacggacaaggcaatcatcaaagatctccctgaaaaaattgtcgccaacgaatacgccgtattggaaaaagatcaggccgccctgtacgaaagcgtagtttccgaatcaataaagaaatcagagaagatggaaagcaaggaacgttcctctctgatcctttcgctgctcacctcgttaaagcagatctgcgatcaccccagggtgtttgacaaggaaagcccggcggtttcggagctttccggcaaggcccagcttcttcttaccatgctggaagaaattctagccagccgtgaaaaagtccttatctttagccaatacgttgaaaccctgaattgccttgatctaatcatcagaaaggagatgaaggaagcggctctggtttaccacggcggcctaaaagtgaatgtccgttccgccttggtagaacgttttcaaaatgatcctgcctctaagatttttcttgtaagccttaaagccggcggccttggcctcaacctcacagcggcaagccgtgtgatccactacgatctctggtacaaccccgcggtggaaaatcaggctacagacagggcgttccgcatcggccaaaagcacaacgtctttgtccaccgttttatcaccaaaaacagttttgaggaaaaaatagacgcaatgatttcagggaagcgggaactcgcggaaatgacagttgcgtcaggcgaatcctggctggcgcggatgagccacgaagaactgaaggatttgtttgacaggggatag

SEQ ID NO: 41358 - protein, 422 aa, Unknown
  Obtained from environmental sample
  DOMAIN (4)...(239): SNF2 family N-terminal domain
  misc_feature (1)..(422): Xaa is any amino acid
MAAQRRRAFGQRLPCGSSGLPFKQLEKELERFAPSLLVSRFHGPNRVINRKFNVFLTTYQTAVRDVEKLKDVAFSLLLVDEAHLMKNAETRISRAVKLLQSKYRLALSGTPVENRLEDLRSLFDFIIPGYLGNARNFQKQYRIPIEVIRSRDQAEALRKITAPFLLRRLKTDKAIIKDLPEKIVANEYAVLEKDQAALYESVVSESIKKSEKMESKERSSLILSLLTSLKQICDHPRVFDKESPAVSELSGKAQLLLTMLEEILASREKVLIFSQYVETLNCLDLIIRKEMKEAALVYHGGLKVNVRSALVERFQNDPASKIFLVSLKAGGLGLNLTAASRVIHYDLWYNPAVENQATDRAFRIGQKHNVFVHRFITKNSFEEKIDAMISGKRELAEMTVASGESWLARMSHEELKDLFDRG

SEQ ID NO: 41359 - DNA, 1620 bp, Unknown
  Obtained from environmental sample
  misc_feature (1)..(1620): n is a, c, g, or t
gtgaacaacacgcccgcccacgttcaccaatggggcgactgggcaacaacaacccccgcaaactgcacaacggcaggatcaaaaacaagggtatgcgcccttgacgcaacccacaccgaaacgcaggaaatacccgtagaccccgacgcccatgattaccgctatgttgcgggaagcgggacagcccccacctgtacggcggacggcagtggaaacgaagcctgcacatacaacccaagccataccaaaaccggcgtagttatccccgcgcttgggcatgactatgacgactggacagtgacaaccccgcccacctgttcagcgacaggtatagaaacaggcacttgtacccatgacccggcgcacacctcgacacgcgccgtacccatagacccggacgcgcacgactgggaacagttggcgggagttgcgcccacctgcacaacagagggaagcggaagcagaaagtgtacaatatgcgaaacagtagaaaccctgaacgtcatacccgcgctcgggcacgatgacggcgcgtggcataccgcatcagaggcggactgcgaacatgacggcacaaaagaattacgctgtaccagagataactttgttttagaaactgccgctatccccgcgctcggtcacgacttcggcaactggacgcagacaaccgcgccgacctgtacaactgccggaatagatataaggacgtgtaaccatgacgcaacgcacaaagaaacacgaccaaatagcatagaccccaacatgcacgattggggcgactgggcgcagacaaccgcgccaacctgtacgactgcgggagtggaaacacggacgtgtacccataacgcaacccataaagaaacccgcgccggagccgctgcgctcgggcacaattacggaacagagacgcagacaaccgcccccacttgtaccgaagcgggagtaggaacaaggacttgtactcgtgacgcaacgcataaagtaacgtactcaatagtcgcgcttgggcatgattaccgcaactggacgcagacaaccgccccaacttccactacggaaggcagcgaaacaggaacctgtacccatgacggaacaaccgcaacacgcatcatttcgagaatactatccagcgtagccgacttgaaaacatggttgtccagccaatctgacaataccgccgtcactgcgtttaaaatcgcgctgaacgcggacgattttgggaatactattgatcttggaaatgcagcagaaggaagcgaatggagacagttgttgaatataatcgtagaggcaggcaaatatgtcagccttgacctttcttgttgtacaggaacggaattgaacgccggaccttttcttgacaaaagtagaattgtttctttagtacttccgcaaacaattacatcaattggtaattcttcattttatgccagcaggaaccttagttcgctaacgctgccagatactgtacaatctgtagacaattatgcattttccaataacagcatgttaacatttactgtaaccggaaacggcagtgggcaagcttatacaatagacggaggaaagatactcgttattggtacaacgggttgtatcagctcccggtgcaaacggtaa

SEQ ID NO: 41360 - protein, 539 aa, Unknown
  Obtained from environmental sample
  misc_feature (1)..(539): Xaa is any amino acid
MNNTPAHVHQWGDWATTTPANCTTAGSKTRVCALDATHTETQEIPVDPDAHDYRYVAGSGTAPTCTADGSGNEACTYNPSHTKTGVVIPALGHDYDDWTVTTPPTCSATGIETGTCTHDPAHTSTRAVPIDPDAHDWEQLAGVAPTCTTEGSGSRKCTICETVETLNVIPALGHDDGAWHTASEADCEHDGTKELRCTRDNFVLETAAIPALGHDFGNWTQTTAPTCTTAGIDIRTCNHDATHKETRPNSIDPNMHDWGDWAQTTAPTCTTAGVETRTCTHNATHKETRAGAAALGHNYGTETQTTAPTCTEAGVGTRTCTRDATHKVTYSIVALGHDYRNWTQTTAPTSTTEGSETGTCTHDGTTATRIISRILSSVADLKTWLSSQSDNTAVTAFKIALNADDFGNTIDLGNAAEGSEWRQLLNIIVEAGKYVSLDLSCCTGTELNAGPFLDKSRIVSLVLPQTITSIGNSSFYASRNLSSLTLPDTVQSVDNYAFSNNSMLTFTVTGNGSGQAYTIDGGKILVIGTTGCISSRCKR

SEQ ID NO: 41361 - DNA, 459 bp, Unknown
  Obtained from environmental sample
  misc_feature (1)..(459): n is a, c, g, or t
ttgtaccagccttaccagcatagccataacggacaaagtaccagcattgggtatagagcttttgaatggtgcaccgaatttacaagcgtaaccatacccaacagcgttaccagcattggggaagacgctttttaccaatgctaccgacttgtaaacgtaaacatagggaacggcgttaccagcattgggactagtgctttttcacgttgcgacaagcttaccagcgtaaccatacccaacagcgttaccagcattggggaaaacgcttttaggttttgcgacagccttaccagcgtaacatttcaaggcacgatcccctcgagcggacttaatactaatgcgttctataatctaggtgacttacgtgccaagttttacgcaacagacgcaaccaacggaacggcgggaacgtataccagaccagacacgtcaagcacaacatggacgaaacagccgtaa

SEQ ID NO: 41362 - protein, 152 aa, Unknown
  Obtained from environmental sample
  misc_feature (1)..(152): Xaa is any amino acid
MYQPYQHSHNGQSTSIGYRAFEWCTEFTSVTIPNSVTSIGEDAFYQCYRLVNVNIGNGVTSIGTSAFSRCDKLTSVTIPNSVTSIGENAFRFCDSLTSVTFQGTIPSSGLNTNAFYNLGDLRAKFYATDATNGTAGTYTRPDTSSTTWTKQP

SEQ ID NO: 41363 - DNA, 948 bp, Unknown
  Obtained from environmental sample
  misc_feature (1)..(948): n is a, c, g, or t
ttgacagtagcgtatatcgtcattacgtctgaacttcccgcaccaacgaacgtcacagcggttccgacctcgtcaaccaacattacagtcagctggtcttncgttacaggggctacaggatacagagtgttccgcagtacaagcttttccggcacatacaccagcgttggaacgccgacatccacttcttatacggacaccgaccttgccgcaaacacaacgtattattataaagtgtccacaaccggtagcgccggagaaagcgcccagtcctcgcctgtttcggcgacaactcctccgctagggtcaacaatcccaacctttaccactattgccgcctttcaagcctggctaaacgcacagccagccaacacagcagaaaccgcctattacgttgctttgagcatcagcggttttgggaacctccgaacagtattacaaagtgatatatatgtcaatcttgacctttcaggcagtacattcaccagtattggagaatcggcttttgactctttagacaaccttactggcgtggccatagggaacagagttaccagcattgggggtagtgcattttataattgcaccagtcttgtcagcgtaacaataccgaacggcgtcaccagcattgggggtagtgcattttataattgcaccagtcttgccagcgtaacaatactggacagcgttaccagcattggcgaaagtgctttttacggctgttccggccttaccatggtaactatgggaaacaatgttaccagcattggggctaccgctttttacaactgcgccagccttaccagtgtaaccatatcgaacagcattaccagcattgggcctagtgcttttcgattttgtaccagccttaccagcatagccataacggacaaagtaccagcattgggtatagagcttttgaatggtgcaccgaatttacaagcgtaa

SEQ ID NO: 41364 - protein, 315 aa, Unknown
  Obtained from environmental sample
  DOMAIN (12)...(91): Fibronectin type III domain
  misc_feature (1)..(315): Xaa is any amino acid
MTVAYIVITSELPAPTNVTAVPTSSTNITVSWSXVTGATGYRVFRSTSFSGTYTSVGTPTSTSYTDTDLAANTTYYYKVSTTGSAGESAQSSPVSATTPPLGSTIPTFTTIAAFQAWLNAQPANTAETAYYVALSISGFGNLRTVLQSDIYVNLDLSGSTFTSIGESAFDSLDNLTGVAIGNRVTSIGGSAFYNCTSLVSVTIPNGVTSIGGSAFYNCTSLASVTILDSVTSIGESAFYGCSGLTMVTMGNNVTSIGATAFYNCASLTSVTISNSITSIGPSAFRFCTSLTSIAITDKVPALGIELLNGAPNLQA

SEQ ID NO: 41365 - DNA, 474 bp, Unknown
  Obtained from environmental sample
  misc_feature (1)..(474): n is a, c, g, or t
ttgccggttgagcaagtcaattgggctgatgttcaggagtttatttcaaaactgaatgacgcgacaggcatgaaatatcgtctgccgacggaggcggagtgggagtatgccgctcgcggcggggctatgagcaagggctataagtatgcggggagtaatgacatagacgaagtagcgtggtacgggggtaatagcggcagaaagacgcatgtcgttggaacaaaaattccaaatgagcttgggatatacgatatgagcggaaacgtgtgggagtgggtgaatgattggtacgggaagtacagagcggatacacagacaaacccgatgggtgcggcacccggtacttatcgcgtgaatcgaggcggcagttggagctcagcagcggcaaatagtcgcgtttcaagccgccgcaacgacattcaagaggcaggcaacgatctcgttgggtttcgtcttgtgttgccatccggttag

SEQ ID NO: 41366 - protein, 157 aa, Unknown
  Obtained from environmental sample
  DOMAIN (1)...(154): Domain of unknown function (DUF323)
  misc_feature (1)..(157): Xaa is any amino acid
MPVEQVNWADVQEFISKLNDATGMKYRLPTEAEWEYAARGGAMSKGYKYAGSNDIDEVAWYGGNSGRKTHVVGTKIPNELGIYDMSGNVWEWVNDWYGKYRADTQTNPMGAAPGTYRVNRGGSWSSAAANSRVSSRRNDIQEAGNDLVGFRLVLPSG

SEQ ID NO: 41367 - DNA, 1800 bp, Unknown
  Obtained from environmental sample
  misc_feature (1)..(1800): n is a, c, g, or t
atgctttcgatcatcgcgtcttcagccgccgttcatatttccgatattccatttaacggcccggtcgcgggagtcagggtttgtcaggtggacggcgagcttattgtcaacccgacttatgagcagattgaaaaatccactctggaaattgtggtcgccggcactaaagacggcataactatggtggaaggcggagcgaaagaggtaagcgaggaattgatgatcgaagcgctggaaaaagcgcataagatgatcattgaattctgtatcttgcaggaaaaactgcgggagcttgccggaaagcaaaaacttccgcttaacgttcccgattattcactggagaacaaggacgccatccgcgccgctgcttatccaaaactggaaaccgcatgcttccttcccggaaagcaggaaagacacgacgccatcaaggctgtaaaagccgaatttgaaacagcgcacacggctcagcttgaagacgaaaaacaaaaaaaacttttcaacgcgttattcgaagaaatgcagtacgagatactgcgttcttcaatattgaataaaggcaaaagagtagacgggcgcgggcttgaggacatacgcaatatcacctgcgaaatcggcattttacagcggacgcacggttcggctcttttcacgcgcggtgaaacgcaggcgcttgtcgttacaacgctgggaaccgtttttgacgagcaaatcttcgacgacatagaaggcgacaaacgcgagaacttcatgctgcattacaacttccctccgtactcggtgggcgaagtcggcaggatggggacaggacggcgcgaaatagggcacggcaaccttgcccgccgttcacttgaagcgatggttccgtctaaagaagtcttcccgtatacgattcgcgttgtttcagaaataatggaatcaaacggctcgtcttcgatggcatccgtctgcggcggcactctttccatgcttcacgccggcgttcccatgattaaaccggttgccggtatcgctatgggccttattaccgaagggaaagccggtcccggcgacaggttcgctgtgttatccgacattctcggcgaagaagatcaccttggcgacatggactttaaggttgcaggcactaaagacggaattaccggcttccagatggacattaaaatcgcaggggtcagccccgagattatgagaaaagcccttgatcaggcaaagcgcggaaggcttcatattctttctatcatgaatcaatgtatcagtaagcccgtggaagaaataagcgaatatgcgcccaagattgtaaccctgcggatagatatcgacaagatcggcgcgcttataggaccgggcggcaagaacatcaaagcgttatgcgaacagtattctgttaagataaacacggaagacgacggcaccgtaacgatcttcggaaaaaccgccaaagatgccgaagacgcaaaggccgccgttatgggcattgcttccgatcctgaaattaacagggtatatgacggcgttgtaaagcgcataatggattttggcgcttttgtggaaattctgcccggtaaggaagggcttgtgcatatcagcaaactttccagacagcggattgcgcaggttacggacgtattaaaagaaggccagcagattcccgttaaactccttgagattgacaagcagggcaggttaaacctttcttatatagacgcaattgatccaaacggttcttccgccgattcttcggccgacaccggcggtagaagagacgagcgtcccaggaataacaataaccgccgctga

SEQ ID NO: 41368 - protein, 599 aa, Unknown
  Obtained from environmental sample
  DOMAIN (433)...(490): KH domain
  misc_feature (1)..(599): Xaa is any amino acid
MLSIIASSAAVHISDIPFNGPVAGVRVCQVDGELIVNPTYEQIEKSTLEIVVAGTKDGITMVEGGAKEVSEELMIEALEKAHKMIIEFCILQEKLRELAGKQKLPLNVPDYSLENKDAIRAAAYPKLETACFLPGKQERHDAIKAVKAEFETAHTAQLEDEKQKKLFNALFEEMQYEILRSSILNKGKRVDGRGLEDIRNITCEIGILQRTHGSALFTRGETQALVVTTLGTVFDEQIFDDIEGDKRENFMLHYNFPPYSVGEVGRMGTGRREIGHGNLARRSLEAMVPSKEVFPYTIRVVSEIMESNGSSSMASVCGGTLSMLHAGVPMIKPVAGIAMGLITEGKAGPGDRFAVLSDILGEEDHLGDMDFKVAGTKDGITGFQMDIKIAGVSPEIMRKALDQAKRGRLHILSIMNQCISKPVEEISEYAPKIVTLRIDIDKIGALIGPGGKNIKALCEQYSVKINTEDDGTVTIFGKTAKDAEDAKAAVMGIASDPEINRVYDGVVKRIMDFGAFVEILPGKEGLVHISKLSRQRIAQVTDVLKEGQQIPVKLLEIDKQGRLNLSYIDAIDPNGSSADSSADTGGRRDERPRNNNNRR

SEQ ID NO: 41369 - DNA, 666 bp, Unknown
  Obtained from environmental sample
  misc_feature (1)..(666): n is a, c, g, or t
ttgggcggccacggccttgaattggccggggacaatcagcgcaagatcgattatctaaagaaggtaactgacctggccattgaacttgattgccgtatcgttaccactcacatcggggttgtccctgcggatcagggcagcgataagtaccgtgtcatgcgggaagcttgcagcagtattggcgcttatgcagcggaacgtcaggttaccattgctatagaaaccgggcctgagccagttacccgcctgagacagtttattgaagcttgcggtccaggtcttggcattaactatgatccgggaaacctggtaatggtaaccaacgacgacgaggttgccggggtaaagactgctggtgcatacattgtacatacccacgccaaagacggcaggatgaaccactatgcggggccggaggaagtctatggcttatttgcaaagggcggaatcgaagctatcagtaaggtttccgaatggtttaccgagactccgttagggaagggcagcgttcgctggattccctacctgacggcgctcagggaagcaggttataacggctatctgactattgaacgtgaagtaaaggaaaatgccgcggaagatatacgcgccgcggtaacatttcttagggagattatcccgcaaattgaaggaggctctaaatga

SEQ ID NO: 41370 - protein, 221 aa, Unknown
  Obtained from environmental sample
  DOMAIN (1)...(141): Xylose isomerase-like TIM barrel
  misc_feature (1)..(221): Xaa is any amino acid
MGGHGLELAGDNQRKIDYLKKVTDLAIELDCRIVTTHIGVVPADQGSDKYRVMREACSSIGAYAAERQVTIAIETGPEPVTRLRQFIEACGPGLGINYDPGNLVMVTNDDEVAGVKTAGAYIVHTHAKDGRMNHYAGPEEVYGLFAKGGIEAISKVSEWFTETPLGKGSVRWIPYLTALREAGYNGYLTIEREVKENAAEDIRAAVTFLREIIPQIEGGSK

SEQ ID NO: 41371 - DNA, 912 bp, Unknown
  Obtained from environmental sample
  misc_feature (1)..(912): n is a, c, g, or t
atgaagctcggactggtatcggcgattttgccggatctgacttttgaggaagtggtagattacgcggcaagcgtaggcttccagtgcctggaggtttgctgctggcccaaagggaaagccgtcaggcgttacgcggggatcacccacatcgatcttgaggggcttactccggaaaagatgatctattaccgggattacgcgaacaaacgaggtgtggggatcagctctctgggttattatcccaatccccttgacccggacaaggaagcttccgacaccgcgttggagcacatcaaaaagctaatcggcgtttccgccgagatgggtatcggaatggttacaacctttatcggcagggataaaaacaagaacgtggaagaaaacctggagcttttcaaaaaattatggacaccagttgtcaggcttgccgaagaaaaaaaagttaaaataggtattgagaattgccccatgctatacacggccaacgaatggcccggcggcaacaaccttgcctgtacccccgagatctggcggcagatgttttcacttgtcccaagcgaaaacctcggcctgaattacgatccgtcacacctttacctgataggggcaagcgccactaagcctttgtacgaatttaagaaccggattttccatgtgcatttcaaggacatcaagatctaccaggaaaagctggacgaatacgggcatttctcctaccccggtctctggcactcgccaaagctccccggtttgggcagcgttgatttcagcgctttctgttccgccctttacgatatacgttacgaggggcctgcctgtattgaggttgaggacaaggcctttgaaggaaaccttgccctggttaagcaggggatcgagcaaagttaccgttacatgcggcaatttgtttaa

SEQ ID NO: 41372 - protein, 303 aa, Unknown
  Obtained from environmental sample
  DOMAIN (19)...(231): Xylose isomerase-like TIM barrel
  misc_feature (1)..(303): Xaa is any amino acid
MKLGLVSAILPDLTFEEVVDYAASVGFQCLEVCCWPKGKAVRRYAGITHIDLEGLTPEKMIYYRDYANKRGVGISSLGYYPNPLDPDKEASDTALEHIKKLIGVSAEMGIGMVTTFIGRDKNKNVEENLELFKKLWTPVVRLAEEKKVKIGIENCPMLYTANEWPGGNNLACTPEIWRQMFSLVPSENLGLNYDPSHLYLIGASATKPLYEFKNRIFHVHFKDIKIYQEKLDEYGHFSYPGLWHSPKLPGLGSVDFSAFCSALYDIRYEGPACIEVEDKAFEGNLALVKQGIEQSYRYMRQFV

SEQ ID NO: 41373 - DNA, 468 bp, Unknown
  Obtained from environmental sample
  misc_feature (1)..(468): n is a, c, g, or t
ttgagttttagggaattatttatggaattatttgaagaccctatagaaacaatgcctgatatttccggaatatttgaactatctgtggatgcctattacgccgccctttacgcacagatgagctgtaagccaataaagaaagagattgccgcatttgtcgaaaaagtaagccgggcaggaagcagggataaagcaaaacgtgccgtcactgaccgcggtgacagcgatgtattaacggtgctaaaagaagccggcaaagtaacatacgagattcaccgcttattaggtttactcaggttcagtcctgacagcgacggggtttatatagcccactgtgcgcctgataacttcatcctccccgctctggcggatcattttaccttccgcttccgcgaacgccctgggcaattatcgacgaaaagcgtggcctttgccttcacaaatccaatggcagcgaggctgttctag

SEQ ID NO: 41374 - protein, 155 aa, Unknown
  Obtained from environmental sample
  misc_feature (1)..(155): Xaa is any amino acid
MSFRELFMELFEDPIETMPDISGIFELSVDAYYAALYAQMSCKPIKKEIAAFVEKVSRAGSRDKAKRAVTDRGDSDVLTVLKEAGKVTYEIHRLLGLLRFSPDSDGVYIAHCAPDNFILPALADHFTFRFRERPGQLSTKSVAFAFTNPMAARLF

SEQ ID NO: 41375 - DNA, 972 bp, Unknown
  Obtained from environmental sample
  misc_feature (1)..(972): n is a, c, g, or t
atgaattttcgcatcttttttctgcttttgcttttgccgatggctgctattgcctgcagaataaaggatggccaccaggcttatttttcagtgattgaaaatgacgcagtaacggcaggagaaattccggacggggatcctgctcaacaggccgcagaaaaccggggcgagcaggttttaagggctttggcaagcgcttatccggacagggtaaacgcggtggaatttgacgatggggactggagcattctggtttacggtgaaaggttttattttgcaggaggccgctttcttcccgcttcacttcggggtgagattaaccagtttgcccccatgcctttttatttttaccaggaagaacttcccctctgggtaccgcccacaccggaagaatcggccaggctaagagagcagacccgcaaccgtaatgcaaaccagctaaagcgatcctctcattttaccgacgccctgtggagaagcaggaacagggacgaggcatgggagcatatcaagcaaatccgttttttgggaatgcaagtacaggttcattactccatacttgttcaattaagccttgttgaggaacaaattctaagactgtcaaaaaccaatagcgccgtaaggcagtggatcaatagcctcggttctgctgatggctgggcatggagaaacatcgcctccagcgagaatcgcagttaccacgcttacggagccgcaattgatcttatgccaaaatcttcttccggtcttgaagtttattggctatggacctccgggaaaaacatcgattggtggagcgttccttattctaaacgctaccaacctcctaacgaggtaataaaaatcttcgagtcctttggcttcatttggggggggaaatggcgttactacgacactatccattttgaataccgcccggaaattcttattttaagcgggatggcaataacggatttaagggatctacgctaa

SEQ ID NO: 41376 - protein, 323 aa, Unknown
  Obtained from environmental sample
  SIGNAL (1)...(18)
  misc_feature (1)..(323): Xaa is any amino acid
MNFRIFFLLLLLPMAAIACRIKDGHQAYFSVIENDAVTAGEIPDGDPAQQAAENRGEQVLRALASAYPDRVNAVEFDDGDWSILVYGERFYFAGGRFLPASLRGEINQFAPMPFYFYQEELPLWVPPTPEESARLREQTRNRNANQLKRSSHFTDALWRSRNRDEAWEHIKQIRFLGMQVQVHYSILVQLSLVEEQILRLSKTNSAVRQWINSLGSADGWAWRNIASSENRSYHAYGAAIDLMPKSSSGLEVYWLWTSGKNIDWWSVPYSKRYQPPNEVIKIFESFGFIWGGKWRYYDTIHFEYRPEILILSGMAITDLRDLR

SEQ ID NO: 41377 - DNA, 915 bp, Unknown
  Obtained from environmental sample
  misc_feature (1)..(915): n is a, c, g, or t
atggaattggtgccgacccattatgatactccgagcctgatcaacgatacggtacagtttaacgttatacgttttgacagtaagcccgttaattttgttttgaagattgacgaaaatattcctgtaaatttgttcggcgatcctctgcgcatcaaacagatattgaataatatcctttccaacgcgttcaaatacacggatatgggagaagttgaactgtcgttttccgccgaggtcccgcccgacgcgggcgcaccaggtgcgggcgcggacaagccagtaatgtttatttttaagataagtgataccgggcagggcatgagcaaggaacagttggacaagctgtttgacgattatacccggttcaatatagaccccaaacgccaaattcagggtacaggactgggcatgagcgttaccaaacgctttattgacatgatgaacggcgagatgaccgtaaaaagcgagccgggaaaaggcacagagtttaatatacggataccgcagggttatatcgattcggctgtattgggcaaggacggtacagagaatctgcagaaattatgcgctgaaagagaagcaagagaaagcgcccccgaaataaacagagagtatatgccctacggcaaagtattggttgtagacgatatggagccgaatctgtatgttacgaacatggttcttaatccttacggattgacaatatctaccgccaaaagcggacaagaggcgattgataaggttaaaaacggcatggtgtttgatattattttcatggaccattatatgccggaaatggacggagcggaagcgacaaaaataatacgcagtcttgggtacaagcaccctattgtcgcgctgaccgctaacgctttggtcggacaagccaagatttttatggaaaagcggctttag

SEQ ID NO: 41378 - protein, 304 aa, Unknown
  Obtained from environmental sample
  DOMAIN (209)...(303): Response regulator receiver domain
  misc_feature (1)..(304): Xaa is any amino acid
MELVPTHYDTPSLINDTVQFNVIRFDSKPVNFVLKIDENIPVNLFGDPLRIKQILNNILSNAFKYTDMGEVELSFSAEVPPDAGAPGAGADKPVMFIFKISDTGQGMSKEQLDKLFDDYTRFNIDPKRQIQGTGLGMSVTKRFIDMMNGEMTVKSEPGKGTEFNIRIPQGYIDSAVLGKDGTENLQKLCAEREARESAPEINREYMPYGKVLVVDDMEPNLYVTNMVLNPYGLTISTAKSGQEAIDKVKNGMVFDIIFMDHYMPEMDGAEATKIIRSLGYKHPIVALTANALVGQAKIFMEKRL

SEQ ID NO: 41379 - DNA, 396 bp, Unknown
  Obtained from environmental sample
  misc_feature (1)..(396): n is a, c, g, or t
atggcgaatttccttttagccttatgcgccgctgctgacagatacctttttatgataaacggttttgaatgggacaagtggacgaatcctccggggttcttctataattttgaaagcacaaaaccggtgtttgaccttttaggcgcgccccaaaacatcgcggtttccatgcaccgtcacaggcatggtattgaacaggaagatatggtcaagctgattaagtacgcaaattttgttttctacggcattcaggatttaacctttgattttgccgaaaccgaaaaaccaaagcccgcgacatgggaagaatttatggaaagtttgcatataaccccgttctcggcgtcggtcagccccgcaaataacgcgacttatgaggaaggaaaaccaaagtaa

SEQ ID NO: 41380 - protein, 131 aa, Unknown
  Obtained from environmental sample
  misc_feature (1)..(131): Xaa is any amino acid
MANFLLALCAAADRYLFMINGFEWDKWTNPPGFFYNFESTKPVFDLLGAPQNIAVSMHRHRHGIEQEDMVKLIKYANFVFYGIQDLTFDFAETEKPKPATWEEFMESLHITPFSASVSPANNATYEEGKPK

SEQ ID NO: 41381 - DNA, 1008 bp, Unknown
  Obtained from environmental sample
  misc_feature (1)..(1008): n is a, c, g, or t
gtgcggcagatactgactcgcgagttctccaaggacagagacatagaggtcgttggcaccgcccccgatccctacgtggctcgtgacaagatcgtgcaactcaaacccgatgtcattacgctcgacgtcgagatgccgcgcatggacggcgtaactttcctgcgcaaactgatgaaacatcacccgatccctgtcattatagtctcctctctaaccgccgccggcagcgagctcgcaatggaggcgctccaatacggcgccgtagacgtaatgtgtaaaccgggcaccgcctacagcgtgggagatatgtccgagctgctcatacagaagataaaagccgccgccatggtcgatatgagaaaacgcgccgacatgataaaagaacgggccgccatgtcgaccgagcctccaaagcgcttggccatgacaaaaacgaccaacaaaatcatcgccataggcgcctccaccggcggcaccgaggccataaaagacgtgctggtctctttcccggccggcgcccccggaacggtgatcgtgcaacacatgcccgaatacttcaccaagtctttcgccgagcggctcaacagcacctgcgcgataaacgtaaaggaagccgagaacggcgaccgcgtcatccccggcagggcgctcctcgcccccggcaacaaacacatggtgctcaaaaggtccggcgcgcagtatttagtcgaacttaaagacggcccgctggtcttccaccagcgccccgccgtagaagtgctattcaactccgtggcgcagtacgccggcgccaacgccgtcggcatgatccttaccggcatgggcaaagacggcgccaaaggcctcctggccatgaaagagtccggagcgtacacgatagtgcaagacgagcagtcaagcgtggtgtggggaatgcccggcgaggcgttcaaattaggcgccgcgacaatcgtactgccgctcaaaaagatcgcggaagaggcgctcaagagggcggaggcggagtag

SEQ ID NO: 41382 - protein, 335 aa, Unknown
  Obtained from environmental sample
  DOMAIN (1)...(112): Response regulator receiver domain
  misc_feature (1)..(335): Xaa is any amino acid
MRQILTREFSKDRDIEVVGTAPDPYVARDKIVQLKPDVITLDVEMPRMDGVTFLRKLMKHHPIPVIIVSSLTAAGSELAMEALQYGAVDVMCKPGTAYSVGDMSELLIQKIKAAAMVDMRKRADMIKERAAMSTEPPKRLAMTKTTNKIIAIGASTGGTEAIKDVLVSFPAGAPGTVIVQHMPEYFTKSFAERLNSTCAINVKEAENGDRVIPGRALLAPGNKHMVLKRSGAQYLVELKDGPLVFHQRPAVEVLFNSVAQYAGANAVGMILTGMGKDGAKGLLAMKESGAYTIVQDEQSSVVWGMPGEAFKLGAATIVLPLKKIAEEALKRAEAE

SEQ ID NO: 41383 - DNA, 726 bp, Unknown
  Obtained from environmental sample
  misc_feature (1)..(726): n is a, c, g, or t
ttgccggataataacacaaaagcggatataatatacttgtgttcaccgaacaatcccaccggagctgtttatagcaaagagcagctcaaattgtgggttgaatacgctttgaaaaatgacgccgtgattctctttgacagtgcttacgaagcgtttgtgcaagacagcaagttgccgactagcatttatcaaattgaaggggcaaaagagtgtgcaattgaattttgctcgttctccaaaacggcgggtttcaccggcacaagatgcggctacaccgttatcccaagtgggcttgtgcggggcggtcaggctttgaacaaattttggctgaggcggcaaactacaaaattcaacggcgttccatatattgtgcaacgcggagcggaagcggttttcacagacagcgggttttcgcaaatcaaaaacaatattgactattacatacaaaacgcaaggcttatagcagataccttgtcttcgcttgatatatggtacaccggtggtaaaaattccccttatatttggcttaaatgccctaacaatatgttgtcttgggaattttttgactatctgctcgaaagagcaaatgtagttggcactcctggtactggttttggaaaaaacggcgagggcttctttaggctcaccgcattcggaaacagggaaaatgtgaatacagctatggaaaggttcaaagatgtttgcacgaatcttccagcttcttga

SEQ ID NO: 41384 - protein, 241 aa, Unknown
  Obtained from environmental sample
  DOMAIN (2)...(231): Aminotransferase class I and II
  misc_feature (1)..(241): Xaa is any amino acid
MPDNNTKADIIYLCSPNNPTGAVYSKEQLKLWVEYALKNDAVILFDSAYEAFVQDSKLPTSIYQIEGAKECAIEFCSFSKTAGFTGTRCGYTVIPSGLVRGGQALNKFWLRRQTTKFNGVPYIVQRGAEAVFTDSGFSQIKNNIDYYIQNARLIADTLSSLDIWYTGGKNSPYIWLKCPNNMLSWEFFDYLLERANVVGTPGTGFGKNGEGFFRLTAFGNRENVNTAMERFKDVCTNLPAS

SEQ ID NO: 41385 - DNA, 1221 bp, Unknown
  Obtained from environmental sample
  misc_feature (1)..(1221): n is a, c, g, or t
ttgcataaattttctacattcctttcaatgaaaaaactcatagaacaagatgctgtgcttatagcaccgctttatgccaaagctcccattgaatttgtcagcggaaaaggcgttaaactgcgcgatacaaacggtaaggagtatcttgattttacttcgggaatatcggtcaataatcttgggcatctgcaccccgctatactcaaagctgtgaaaaaacagcaagcgagattttttcacatatctaacttatatcccaatgcaccgcaaatagagcttgcaaaaaaaatgctctcacttaccaaattcggcagagaaaagggcaaggcttttttctgcaactccggcacggaagcaaatgaagcggctataaaattagccagaaaatattttgcggaaaaaggcgaaaaacgcacagagataatttcctttgtaaacggatttcacggcagaacttacggtgcgctttcggcaaccggacaggaaaaattaaaagccggttttggaccgatgctccccggttttgttcacgttgaatggaatgatgaaaaggaattaaaaaaagcagtcagcgcaaaaaccgctgcaatcatcttggaacccatagttgcagaaggtgggattttaacaccgaacaagagttttataaacttgataaattctctcagcaaaaaaaataaatgcctgnttatagttgatgaaattcaagttggcttggggcggtgcggagcaatttcaggagcggagaaattcgggataaacgccgatatcacaacttgggcaaaatccatcggtggaggacttccgctgggaatggttttgatgtctgagaagatagctctttcgctgaaagccggagaccacggaaccacttttggcggcaaccccgttgcttgtgcagcaggtttagccgttgtggaaacagtttccaataaaaaatttctggcaaatgttgaggctcgttccaaacaaatcaaaaacggcttggaaaaactttcaaaaaaatataaatggctcggcgagattcgcggttgcgggcttttgctgggcatcacaacggagaaacccgttgcggacttgataaaagcgtgcagagaaaatggtttattggttttacgtgccgggacaaatgttttgcgtttgctgccacctttgatagtttccgagagagaagtcgctttggctctcaagaagctggaagattcgtgcaaacatctttga

SEQ ID NO: 41386 - protein, 406 aa, Unknown
  Obtained from environmental sample
  DOMAIN (31)...(355): Aminotransferase class-III
  misc_feature (1)..(406): Xaa is any amino acid
MHKFSTFLSMKKLIEQDAVLIAPLYAKAPIEFVSGKGVKLRDTNGKEYLDFTSGISVNNLGHLHPAILKAVKKQQARFFHISNLYPNAPQIELAKKMLSLTKFGREKGKAFFCNSGTEANEAAIKLARKYFAEKGEKRTEIISFVNGFHGRTYGALSATGQEKLKAGFGPMLPGFVHVEWNDEKELKKAVSAKTAAIILEPIVAEGGILTPNKSFINLINSLSKKNKCLXIVDEIQVGLGRCGAISGAEKFGINADITTWAKSIGGGLPLGMVLMSEKIALSLKAGDHGTTFGGNPVACAAGLAVVETVSNKKFLANVEARSKQIKNGLEKLSKKYKWLGEIRGCGLLLGITTEKPVADLIKACRENGLLVLRAGTNVLRLLPPLIVSEREVALALKKLEDSCKHL

SEQ ID NO: 41387 - DNA, 507 bp, Unknown
  Obtained from environmental sample
  misc_feature (1)..(507): n is a, c, g, or t
ttgcacgaatcttccagcttcttgagagccaaagcgacttctctctcggaaactatcaaaggtggcagcaaacgcaaaacatttgtcccggcacgtaaaaccaataaaccattttctctgcacgcttttatcaagtccgcaacgggtttctccgttgtgatgcccagcaaaagcccgcaaccgcgaatctcgccgagccatttatatttttttgaaagtttttccaagccgtttttgatttgtttggaacgagcctcaacatttgccagaaattttttattggaaactgtttccacaacggctaaacctgctgcacaagcaacggggttgccgccaaaagtggttccgtggtctccggctttcagcgaaagagctatcttctcagacatcaaaaccattcccagcggaagtcctccaccgatggattttgcccaagttgtgatatcggcgtttatcccgaatttctccgctcctgaaattgctccgcaccgccccaagccaacttga

SEQ ID NO: 41388 - protein, 168 aa, Unknown
  Obtained from environmental sample
  misc_feature (1)..(168): Xaa is any amino acid
MHESSSFLRAKATSLSETIKGGSKRKTFVPARKTNKPFSLHAFIKSATGFSVVMPSKSPQPRISPSHLYFFESFSKPFLICLERASTFARNFLLETVSTTAKPAAQATGLPPKVVPWSPAFSERAIFSDIKTIPSGSPPPMDFAQVVISAFIPNFSAPEIAPHRPKPT

SEQ ID NO: 41389 - DNA, 639 bp, Unknown
  Obtained from environmental sample
  misc_feature (1)..(639): n is a, c, g, or t
gtgtcaatagaccagcttttacaataccttacaagcgccatgtcactggggagcctgtacgccttgatagctatcggttatacaatggtgtacgggattctcagattgataaactttgcccacggcgacgtattcatgctggggggctatatcgccttctactcaattacaattttttttatgccctggtgggtcggttttatcgtggcgttggggctcacggggattttgggcatcgggcttgaacgcgtcgcttaccgtcccctgcgccattcaccgaaaatttcaatcatgatcagcgcgataggcgcgtcgtttttgcttcagaaccttgccacggtaatcttcggcggaaggcccaaggggttcccggttcccgaactttttaataaagtcgttagtgtcgcaataaagggaggagatgccgtctccgtattaaatgtcagcctaatcatcccggtattaaccgccatattgttaacgatattgctaataattgtacacaaaacaaaaaccggcatggcgatgagggcggtttccacagatatcgcggcggcgcggctcatggctattgacgttaacaaggtagtttcatttacctttggggcgggatcggttctggcggcatcggagggataa

SEQ ID NO: 41390 - protein, 212 aa, Unknown
  Obtained from environmental sample
  DOMAIN (9)...(211): Branched-chain amino acid transport system / permease component
  misc_feature (1)..(212): Xaa is any amino acid
MSIDQLLQYLTSAMSLGSLYALIAIGYTMVYGILRLINFAHGDVFMLGGYIAFYSITIFFMPWWVGFIVALGLTGILGIGLERVAYRPLRHSPKISIMISAIGASFLLQNLATVIFGGRPKGFPVPELFNKVVSVAIKGGDAVSVLNVSLIIPVLTAILLTILLIIVHKTKTGMAMRAVSTDIAAARLMAIDVNKVVSFTFGAGSVLAASEG

SEQ ID NO: 41391 - DNA, 1074 bp, Unknown
  Obtained from environmental sample
  misc_feature (1)..(1074): n is a, c, g, or t
atgggtttgtcaaaaaaacaaaaaaatctgctttccgccgtctcccttttgtttatttttgtatttgtaattattgcgaataacgcttttggttctttttcgctgcgtattttcaacctctgcggtatttacatcatcctggccctttccctcaatttgataaacggctttaccggcatgttttcgctgggacacgccggctttatggcgctgggagcctacaccagcgcgcttctgacaatgagtccttcccaaaaggaaatgctctattttcttgccccgattatcccgccgcttgcgaatatacatattccctttattccggcgctgatcatctcggggctggtagcgggactggcgggttttctcatcggcgcgcccgtgctgcgcctccgcgatgattaccttgccatagccacgcttggtttttcggaaataatccgggtggtcctgacgaacctgcagtccatcacaaacggctctttgggcctgaaaggactgccgcgttattcgacaacctacatgatatggggcgtcaccttcatttcaactgtttttttcctcgcactgataaactccgcctttggccgttcctgccgcgccgtgcgtgacaacgagattgcggcgcaggcaatggggatcaatgtcgccagggtaaaaataaccagcttcaccattgccagttttatggcgggcataggaggggcgattctcggccacctgatgagcaccatagacccaaaaatgttctcttttcccctgacctacaatatcctgctgattgtggtgctgggcggtgtaggcagtgtcaccggttcgataatagcgtcggttgtcgtaacaatttcgatggaagccctgcgcttccttgacgagcctttgaattttatctttaccaaaacccagggactgcccggtctgcggatggtggtattcagcatccttttaatgctggtgatcatcttccgtcaacaggggctgatgggcaacagggaattttcctgggacgcggcttacgatctctggctgaaaattaaacgcctgaagctgccgcgcagaanaggaaccgcctga

SEQ ID NO: 41392 - protein, 357 aa, Unknown
  Obtained from environmental sample
  SIGNAL (1)...(26)
  DOMAIN (33)...(320): Branched-chain amino acid transport system / permease component
  misc_feature (1)..(357): Xaa is any amino acid
MGLSKKQKNLLSAVSLLFIFVFVIIANNAFGSFSLRIFNLCGIYIILALSLNLINGFTGMFSLGHAGFMALGAYTSALLTMSPSQKEMLYFLAPIIPPLANIHIPFIPALIISGLVAGLAGFLIGAPVLRLRDDYLAIATLGFSEIIRVVLTNLQSITNGSLGLKGLPRYSTTYMIWGVTFISTVFFLALINSAFGRSCRAVRDNEIAAQAMGINVARVKITSFTIASFMAGIGGAILGHLMSTIDPKMFSFPLTYNILLIVVLGGVGSVTGSIIASVVVTISMEALRFLDEPLNFIFTKTQGLPGLRMVVFSILLMLVIIFRQQGLMGNREFSWDAAYDLWLKIKRLKLPRRXGTA

SEQ ID NO: 41393 - DNA, 366 bp, Unknown
  Obtained from environmental sample
  misc_feature (1)..(366): n is a, c, g, or t
atggtttttgatttgaatttccctgtcaaagttataggcgtaaaaacaataagggaaaaaaatgggcttgccatgtctagccgcaatgaatatatgagcttaaaggaacgtgaggctgcaagttcaatttacgcagggcttatggaagcaaaaaaaatgtatgagcgaggaattgattccgttgcaaaattaaaaagcattgttgaaaaaaaaataaaacaagctggtggcaaaattcaatacgttgaaatagcgaataaaaacgatttacagcctataaaaacaaaggtttcaaaaaatgcggttatcttgctcgcttgtcattttggcaaaacgaggctcattgaccatttggaatttttctaa

SEQ ID NO: 41394 - protein, 121 aa, Unknown
  Obtained from environmental sample
  DOMAIN (1)...(120): Pantoate-beta-alanine ligase
  misc_feature (1)..(121): Xaa is any amino acid
MVFDLNFPVKVIGVKTIREKNGLAMSSRNEYMSLKEREAASSIYAGLMEAKKMYERGIDSVAKLKSIVEKKIKQAGGKIQYVEIANKNDLQPIKTKVSKNAVILLACHFGKTRLIDHLEFF

SEQ ID NO: 41395 - DNA, 858 bp, Unknown
  Obtained from environmental sample
  misc_feature (1)..(858): n is a, c, g, or t
gtggagggcgacagcaacgtcatggccctgaccgcggcgcgatccgtggcggaagcgccgggaaacaccaagttcaacccgctcatcatctacggcgggacagggctgggcaaaacccacctcctgcaggccatcggacactacgctcaagcggagtgtacagtcgggcaggtggtatacataacgagcgaggagttcaccaacgagtacacgcagtttctccacgacaagaaggcatccctctctttctacaagaaattcatggacaccgacctgcttctcatagacgacatacagtttttcagcggtaagggaaagatacaggagcaattctacctaattttcgacaaattactgcaggaaaacaagcagatagtgctctcctcagattgtttgccggagaacattcccgacctgaaggcgcacatcttgacccgtttccaaggtgggctgaacgtagacgttctgccgccgaacttggagacgcgtatggccattttgcgcaaaaaggcggagtcggaggggcgtaccctgcccgacgaggtcgtccagtacatcgccgagcgcataaaatcaaacgttagggaacttcagggcattctgaccaagtacatcttctcggcctcgttttccgataccggtttcactttggacatagcgaaggaactgtgcggcggcgcgataacgggtaaagaggagcgcctatccgtgaagcgcataatggcggtggtcgcaggcgcttacggtataggggtgaatcaactcagcgcccacacgcggaagaaggaggcggtcctgccccgcgccgtggcgatgtacctctgcaagaagtggacgcgcagactaacctcacgatag

SEQ ID NO: 41396 - protein, 285 aa, Unknown
  Obtained from environmental sample
  DOMAIN (236)...(282): Bacterial  dnaA  protein helix-turn-helix domain
  misc_feature (1)..(285): Xaa is any amino acid
MEGDSNVMALTAARSVAEAPGNTKFNPLIIYGGTGLGKTHLLQAIGHYAQAECTVGQVVYITSEEFTNEYTQFLHDKKASLSFYKKFMDTDLLLIDDIQFFSGKGKIQEQFYLIFDKLLQENKQIVLSSDCLPENIPDLKAHILTRFQGGLNVDVLPPNLETRMAILRKKAESEGRTLPDEVVQYIAERIKSNVRELQGILTKYIFSASFSDTGFTLDIAKELCGGAITGKEERLSVKRIMAVVAGAYGIGVNQLSAHTRKKEAVLPRAVAMYLCKKWTRRLTSR

SEQ ID NO: 41397 - DNA, 489 bp, Unknown
  Obtained from environmental sample
  misc_feature (1)..(489): n is a, c, g, or t
atggcggaaaagaataatagcgaaagcaagggaccgacaaacgctgcgacgggtaaggacgctggcgcgggtaaagacacggccgccgctaaagacgcggtcgtcggcaaagacgccggcaccggcaaagaggcagacgcaggcaaggacgcggttaaagagactgttaaaaacaaggtgggcgacattctgcggaaagagcgtctcacacgcaggatcactatagagaccatagccaaggatctgaaactcaacatcggctacgtaaaggcattggaagcaagcgactacgactcgctcccgcccgacccgtacatcagggtctacatcaggtcgctaaccaagtatttgtccttggactcggagagcattctgaaagagttttacaaggagcgcggacttatctccgacgactccgcccaaacacagggaagcaagatcgacgtaagcgtccaacggcaggacaaaaacccggccgtcatattatag

SEQ ID NO: 41398 - protein, 162 aa, Unknown
  Obtained from environmental sample
  misc_feature (1)..(162): Xaa is any amino acid
MAEKNNSESKGPTNAATGKDAGAGKDTAAAKDAVVGKDAGTGKEADAGKDAVKETVKNKVGDILRKERLTRRITIETIAKDLKLNIGYVKALEASDYDSLPPDPYIRVYIRSLTKYLSLDSESILKEFYKERGLISDDSAQTQGSKIDVSVQRQDKNPAVIL

SEQ ID NO: 41399 - DNA, 456 bp, Unknown
  Obtained from environmental sample
  misc_feature (1)..(456): n is a, c, g, or t
atgtttcgtttcgccaacttgccggccgttaagccgcgtgacgcgtcggagcggttttacggcgccttggtgctgggagcggatacgatagtagcggcggacggcaaagttctgggcaagcctacggacaaggacgacgcgcgaaatatgctgcgcctcctttcgggcaggcggcacacggtggtcacggctgtggcgctcctgtgcggcgaggcgggtttcagcgaatcggtcgccgttcgcaccgatgtgtttttcagggcgcttgagggggaggagattgagcattacctctcttttccggaatacgaggataaggccggcgcatacgcggttcagggcggggccatgacttttatagataggatagagggctgctactacaacgtgatgggtctccccgtcactgcgacgcttggcctgttcaaaaagttcgccggaaaaggaggttcataa

SEQ ID NO: 41400 - protein, 151 aa, Unknown
  Obtained from environmental sample
  DOMAIN (1)...(151): Maf-like protein
  misc_feature (1)..(151): Xaa is any amino acid
MFRFANLPAVKPRDASERFYGALVLGADTIVAADGKVLGKPTDKDDARNMLRLLSGRRHTVVTAVALLCGEAGFSESVAVRTDVFFRALEGEEIEHYLSFPEYEDKAGAYAVQGGAMTFIDRIEGCYYNVMGLPVTATLGLFKKFAGKGGS

SEQ ID NO: 41401 - DNA, 789 bp, Unknown
  Obtained from environmental sample
  misc_feature (1)..(789): n is a, c, g, or t
ttgatccgaggagatgatataacaaaagaccgcgttccgaagtggttaatggggtggcgggatattactaatccacatacgttaagaacagtgattatcagtataattccagtaaccgctgtaaatcatacaatgccattattcatttttaatgagaaaaatacagccatttcatcatgttgcttatatggaaatttaaattcattaatacttgattatttagcacgacaaaaagttggaggtactcacttaacataccattatattatgcaattccccgtccttcccccaaacgcctattctcaggacgacattgattttatcgttcctcgtgtgcttgagcttacctataccgccgtagaccttatcccctttgcggaagacctctgggattgtgcagacttaaaaatgaggcgctattttctggaacagtgccacgggacacaagccgcagaatttgaagagtttaccaagtacgacaccgcccatctgccggagaagacggaagggcaaagcaagcagacaggattggcagactttctcccgccctttgtttttaaccccgaaagacgggcattgctccgagccgaattagatgcccgctacgcccggctctacggtctttcccgtgacgacctacgctacattctcgaccccgctgatttaatgggcgaggattatccttcggagactttccgtgttctcaagaagaatgaaatcgacgaatacggggaatatcggacacggcggctggtgctggaggcttgggatagggaggaaagatcttaa

SEQ ID NO: 41402 - protein, 262 aa, Unknown
  Obtained from environmental sample
  misc_feature (1)..(262): Xaa is any amino acid
MIRGDDITKDRVPKWLMGWRDITNPHTLRTVIISIIPVTAVNHTMPLFIFNEKNTAISSCCLYGNLNSLILDYLARQKVGGTHLTYHYIMQFPVLPPNAYSQDDIDFIVPRVLELTYTAVDLIPFAEDLWDCADLKMRRYFLEQCHGTQAAEFEEFTKYDTAHLPEKTEGQSKQTGLADFLPPFVFNPERRALLRAELDARYARLYGLSRDDLRYILDPADLMGEDYPSETFRVLKKNEIDEYGEYRTRRLVLEAWDREERS

SEQ ID NO: 41403 - DNA, 564 bp, Unknown
  Obtained from environmental sample
  misc_feature (1)..(564): n is a, c, g, or t
atgaaaaagatagaactgataatggacgcccacgccctcgacctcgccctcacccgtatctcgcaccaaattttggagcggtacggcgatatggggagcgtctgcatcgtcggtatgcagtctcgcggggtgttcttggcgcagcggatcgcggctaagatcaccgcgatgcttgggctcgcggcgccgcttttgaccggcattttggacaccaccctctaccgcgacgactaccgttcgcgcctccggcagccggaggttcgggtgaccgacatccctttcgacataaacgagaagagcgtggtccttgtggacgacgtcctctttacggggcgcaccgtgcgggcggcgctggacgcgctgatggatcacgggaggccccgggagatacagcttgccgtgctcatagaccgcgggcaccgagagctgcccatccgcgccgactatgtgggcaggaagatcaccacctccccgacgcaggaggtctcgctcaaggtgagcgagttggacggggaggattcactatggcttatggagcttgatgaggagggcggcggccgatga

SEQ ID NO: 41404 - protein, 187 aa, Unknown
  Obtained from environmental sample
  DOMAIN (2)...(152): Phosphoribosyl transferase domain
  misc_feature (1)..(187): Xaa is any amino acid
MKKIELIMDAHALDLALTRISHQILERYGDMGSVCIVGMQSRGVFLAQRIAAKITAMLGLAAPLLTGILDTTLYRDDYRSRLRQPEVRVTDIPFDINEKSVVLVDDVLFTGRTVRAALDALMDHGRPREIQLAVLIDRGHRELPIRADYVGRKITTSPTQEVSLKVSELDGEDSLWLMELDEEGGGR

SEQ ID NO: 41405 - DNA, 933 bp, Unknown
  Obtained from environmental sample
  misc_feature (1)..(933): n is a, c, g, or t
atgagtttacagatacagcacctgctcggcttggagggggtctcccgcgaggacatcacgcagatactcgacgcggcggaccaatttcgcggggtgcttcagagggatgtgaaggtggtcccgccgctgagggggaagacagtcgtcaatttgttttacgagaacagtacgcggacgaagatatcatttgagttagccgaaaaacgtctctccgcaagccccctcaatttcagcgtttcaacaagttccgtcaataaaggcgagagtctcagggatacgatacagaacatagaggccatgatgatcgacatggtggtggtgcggcatccctgcgccggcgtgccgtatttcctgacgcagtgcacgaacgcggtgatcgtcaacgccggggatggtctgcacgagcatcccacgcaggcgctgctcgacatgatgaccatccgccaaaaactcggacggcttgaggggctcaaagtcgcgataatcggcgacatcttccacagccgcgtggcgcgttccaacgcttgggggatgaagacgatgggtatgaacgtgacgctctgcggcccgccgacgctgttgccgcagcacacggactcgcttggagtgccggttacggatgatatcgacgaggcgctggacggggccgacgtggtgatgctgttgcgcgtgcaacttgagcggcagtcgagcgcggtctttccctcagtgcacgaataccgcgagcgctacgggttcgatatggagatgctgtcgcggatgaagaaaggggtggtgattatgcaccccggtcctataaacagaggcgtggaattggcgtcgaatgtggcggattcaggcaattctgtgatattggatcaggtgaccaacggtgtcgccgttcgaatggcggtgctgtatctgcttggcggcgttgggagcgaggccgcatga

SEQ ID NO: 41406 - protein, 310 aa, Unknown
  Obtained from environmental sample
  DOMAIN (154)...(302): Aspartate/ornithine carbamoyltransferase, Asp/Orn binding domain
  misc_feature (1)..(310): Xaa is any amino acid
MSLQIQHLLGLEGVSREDITQILDAADQFRGVLQRDVKVVPPLRGKTVVNLFYENSTRTKISFELAEKRLSASPLNFSVSTSSVNKGESLRDTIQNIEAMMIDMVVVRHPCAGVPYFLTQCTNAVIVNAGDGLHEHPTQALLDMMTIRQKLGRLEGLKVAIIGDIFHSRVARSNAWGMKTMGMNVTLCGPPTLLPQHTDSLGVPVTDDIDEALDGADVVMLLRVQLERQSSAVFPSVHEYRERYGFDMEMLSRMKKGVVIMHPGPINRGVELASNVADSGNSVILDQVTNGVAVRMAVLYLLGGVGSEAA

SEQ ID NO: 41407 - DNA, 438 bp, Unknown
  Obtained from environmental sample
  misc_feature (1)..(438): n is a, c, g, or t
ttgcacgcgcaacagcatcaccacgtcggccccgtccagcgcctcgtcgatatcatccgtaaccggcactccaagcgagtccgtgtgctgcggcaacagcgtcggcgggccgcagagcgtcacgttcatacccatcgtcttcatcccccaagcgttggaacgcgccacgcggctgtggaagatgtcgccgattatcgcgactttgagcccctcaagccgtccgagtttttggcggatggtcatcatgtcgagcagcgcctgcgtgggatgctcgtgcagaccatccccggcgttgacgatcaccgcgttcgtgcactgcgtcaggaaatacggcacgccggcgcagggatgccgcaccaccaccatgtcgatcatcatggcctctatgttctgtatcgtatccctgagactctcgcctttattgacggaacttgttga

SEQ ID NO: 41408 - protein, 145 aa, Unknown
  Obtained from environmental sample
  misc_feature (1)..(145): Xaa is any amino acid
MHAQQHHHVGPVQRLVDIIRNRHSKRVRVLRQQRRRAAERHVHTHRLHPPSVGTRHAAVEDVADYRDFEPLKPSEFLADGHHVEQRLRGMLVQTIPGVDDHRVRALRQEIRHAGAGMPHHHHVDHHGLYVLYRIPETLAFIDGTC

SEQ ID NO: 41409 - DNA, 1203 bp, Unknown
  Obtained from environmental sample
  misc_feature (1)..(1203): n is a, c, g, or t
atgtacggcattgctttggacattggaacaacgacaatggtcgcggagctttacgatctgacagacggcaaacttctggcaagcgaaagcatgctgaaccctcaaagcgcgtacgctcaggacgtgttgtcgcgtattcaattcgcaaagggagaaaacggacttactgttttgtatgaagcgtttttaaaagcgtttggagcattgcgcgattcaattgtgaacacggcgcggattgaccccaagtacatatacgaggttgtgttttccggcaataccgccatgcttcatcttgccacaaacacagacccctctccgcttggcaaatatccctatatttcaaatgttaagggaggagaaagcataccggcggcggggcttggaatctcaaactttggtctggtttatttgccgccgattatttccgcgtttgtcggcgcggacataacgtcgggaatttttatatcaaaattgaaagagaagaaagggaaaactctttttattgacataggaacaaacggggaaattgtaatggcgaataacggtcgtcttgccgctacctctaccgccgccggtcccgcgtttgagggaatgaacatcgcgtgcggtatgcgcgcggctccgggtgctgtggaacaatttacgattgatgaaaacggcggctttagttttaaaactatcggcggcaataaagcgacaggcatttgcggaagcgggcttttggatattacgggagaacttgtaagaacaaaagtaattgaaaaaacaggcagattcgcgaagactaacccattactcaaagagcataacggcaaaccggcgttttttattacagacgatgtatttcttacattgcaagacgtgcgtcaggtacagttagctaagggcgcgatacgttccggcattaccgcgcctgtgaattcgttgggtatcggcgcggacgatattgacgaagcgctgatagccggttcctttgggtatcatctttcggaaagcagcctgcttaatacaggtttgcttccgcctgaattgcggggaaaaatcaggttcctgggcaacacctcgcaatcgggcgcggccgcgtttttgctgaaccgcggctttagggaagttattccggaaataattgacggcgttgaaaaaatcgagcttgctaacacgcccggttttgaagacatcttcgtgcaggcattagggttctga

SEQ ID NO: 41410 - protein, 400 aa, Unknown
  Obtained from environmental sample
  misc_feature (1)..(400): Xaa is any amino acid
MYGIALDIGTTTMVAELYDLTDGKLLASESMLNPQSAYAQDVLSRIQFAKGENGLTVLYEAFLKAFGALRDSIVNTARIDPKYIYEVVFSGNTAMLHLATNTDPSPLGKYPYISNVKGGESIPAAGLGISNFGLVYLPPIISAFVGADITSGIFISKLKEKKGKTLFIDIGTNGEIVMANNGRLAATSTAAGPAFEGMNIACGMRAAPGAVEQFTIDENGGFSFKTIGGNKATGICGSGLLDITGELVRTKVIEKTGRFAKTNPLLKEHNGKPAFFITDDVFLTLQDVRQVQLAKGAIRSGITAPVNSLGIGADDIDEALIAGSFGYHLSESSLLNTGLLPPELRGKIRFLGNTSQSGAAAFLLNRGFREVIPEIIDGVEKIELANTPGFEDIFVQALGF

SEQ ID NO: 41411 - DNA, 516 bp, Unknown
  Obtained from environmental sample
  misc_feature (1)..(516): n is a, c, g, or t
gtgagacaccgtgattaccggcctgttgaaacatattattcgcttatacggcccccaagcctgtatatccgcccggaatttaccgatattcacggccttaccgtcgatgatgtaaaagacaagccggatttcatgcacctgtgggaaaacgggatacgcgattttttgggagatacgccccttgcggcgcataacgcggcgtttgatatgagggttctaaaatcggttcttgaatggtatgaacttccgatccccgaattgcattacttttgcactctcagcctggcccgtaatacctggcccggtttcaagtcttatgccctgaccgcgcttgcggcgagattcaatattacatataacgcccataacgcccttgacgacgcgatgacctgcggcagactggtgctgatgtcggcgcaggaattcaatatggggccggatattgaaaaactcctgcaagcctccgaaacaaggctggatatattgggagcagggcctatggcgtcagaaccctaa

SEQ ID NO: 41412 - protein, 171 aa, Unknown
  Obtained from environmental sample
  DOMAIN (1)...(135): Exonuclease
  misc_feature (1)..(171): Xaa is any amino acid
MRHRDYRPVETYYSLIRPPSLYIRPEFTDIHGLTVDDVKDKPDFMHLWENGIRDFLGDTPLAAHNAAFDMRVLKSVLEWYELPIPELHYFCTLSLARNTWPGFKSYALTALAARFNITYNAHNALDDAMTCGRLVLMSAQEFNMGPDIEKLLQASETRLDILGAGPMASEP

SEQ ID NO: 41413 - DNA, 1464 bp, Unknown
  Obtained from environmental sample
  misc_feature (1)..(1464): n is a, c, g, or t
gtgttagttgatcgagaaagactggataacgcgcaggagagcataagccgcgagtatcagggtttgtatatgcgctcccaccgtgatgagaatgccagagaatttcccctgccggagcgtttgctgctcaatttcaaagaactaatagaaacgtaccagaaggaaaaagcgcgaaaaattatttcctttctttccattaagagcgaggccaggccggggataccccgcgtcaatataccctgcgatccgtcccggagttttttcggcaacatcaactacatgaaggatgaattcgccgctctgcacgcgggcggctggcatatagccgtggccgcggaatccgaagtgcaggcgcagcgcatcgagtctatgcttgttccgcataaattcctttccataatacctttgcctctttcctcggggttctccctgccggaaatcaaactcatggtaatacaggagaacgagatattcggccggcgcaaacggccgccccgttccctcaaaaccgtccactcaagccccatcgacacttttgtggaactgaaccctggcgattacgttgtgcatgttaaccacggaataggcctgttcaaaggcattgagcggatcaacgccctgggctttgaacgtgactacatacagcttgagtacgcgggagacgagactgtttttgtgcctgtggaacagttgaatctggtgcagcggtacataggcagcgagggtaatcccccaaggcttgataccgttggatcaaaaagctgggagaaccgcaagcacaaggtaaaaaaatcggttgaagatattgcccaaaggcttctggagttgtattcaaagcgaaaaaaggccatggggtacgctttccccaaagacaccgaatggcagaccatgttcgaggcggctttcccttttgaggagaccgaggatcagctccgctgcgtggaggagatcaagcgggacatggaaagtcccagccccatggacaggcttgtctgcggcgacgtaggctacggaaaaaccgaagtcgccgtgcgcgcctgctttaaggcgatcatgagcggcaagcaggcggcgtttctcgccccgaccacgatcctcgcggaacagcattatgaaaatttcaaggaacgtttctcgatttttcccgttcgtatcgccatgctttcacgattcgttgaccataaaaatgtccgtacgattcttggacagcttaaaaacggcgagatagatctgttgatcggaacacacaggattatccagcgggacgtggcgtttaaaaaccttgggttaatcgtcattgacgaggaacagcgtttcggcgtaaaggacaaggaacggctcaaggaactgaaaaacaatgtcgactgccttaccctttccgcgactcccataccgcggactctgcatatgagtctgctgaaaatacgcgacatgagccttttggcgaccgccccttcgggctag

SEQ ID NO: 41414 - protein, 487 aa, Unknown
  Obtained from environmental sample
  DOMAIN (303)...(465): Type III restriction enzyme, res subunit
  misc_feature (1)..(487): Xaa is any amino acid
MLVDRERLDNAQESISREYQGLYMRSHRDENAREFPLPERLLLNFKELIETYQKEKARKIISFLSIKSEARPGIPRVNIPCDPSRSFFGNINYMKDEFAALHAGGWHIAVAAESEVQAQRIESMLVPHKFLSIIPLPLSSGFSLPEIKLMVIQENEIFGRRKRPPRSLKTVHSSPIDTFVELNPGDYVVHVNHGIGLFKGIERINALGFERDYIQLEYAGDETVFVPVEQLNLVQRYIGSEGNPPRLDTVGSKSWENRKHKVKKSVEDIAQRLLELYSKRKKAMGYAFPKDTEWQTMFEAAFPFEETEDQLRCVEEIKRDMESPSPMDRLVCGDVGYGKTEVAVRACFKAIMSGKQAAFLAPTTILAEQHYENFKERFSIFPVRIAMLSRFVDHKNVRTILGQLKNGEIDLLIGTHRIIQRDVAFKNLGLIVIDEEQRFGVKDKERLKELKNNVDCLTLSATPIPRTLHMSLLKIRDMSLLATAPSG

SEQ ID NO: 41415 - DNA, 525 bp, Unknown
  Obtained from environmental sample
  misc_feature (1)..(525): n is a, c, g, or t
gtggattataaattgacaggagccgcagattacacgctcacaggaaaaaccgcatacagtttttgtatgtgcccaggcggagtggttattccttgtgcatcggagccaaatggagtggcaaccaacggaatgagttatagccgccgcaacagcccttttgcaaattcggctttaatagttccttatgaagtgggtaagagcgatgtgaaaagcgggattgcctttcagagggaattggagcaaagagcttttgaaatgactgggaaaaattactccgctcccaaacagagtgcagagaattttttagcgaaaaaaagtggagactataatctgtgggatttaatgccagaaaatataaacacaagtttagaagcggctctttatgagtttgaaaataaaatgcccggttttataaaaaacggtttgctaatcgcgccggaaaccagaacttcgtccccgctcagaattgtccgccaaagagaacggcgagtccgtttccgttgctggcatttacccggttggtga

SEQ ID NO: 41416 - protein, 174 aa, Unknown
  Obtained from environmental sample
  misc_feature (1)..(174): Xaa is any amino acid
MDYKLTGAADYTLTGKTAYSFCMCPGGVVIPCASEPNGVATNGMSYSRRNSPFANSALIVPYEVGKSDVKSGIAFQRELEQRAFEMTGKNYSAPKQSAENFLAKKSGDYNLWDLMPENINTSLEAALYEFENKMPGFIKNGLLIAPETRTSSPLRIVRQRERRVRFRCWHLPGW

SEQ ID NO: 41417 - DNA, 453 bp, Unknown
  Obtained from environmental sample
  misc_feature (1)..(453): n is a, c, g, or t
gtgaaaatggccctggcctgtaaaggtttggacaaggtctgccttatacncgacgcaaacctgaacgcgggtatggagcctggtatatacaagggcataagtggaactgacataaaaatgaggtacaagggcggcccagcaagagaatggcgccagcctacggaagatggaggttctccaaacgcaacggaaccaggcggccttacagggagcggcttaacgcttgatcttgcgttcagaaacgccgtaaaaatgctgggcttgtctttacctcaggcagccgccctagtttcgcataaccctgccagagtgcttggtcttgatcacgatcgcggcgtaatcgaaaaaggctaccgtgccgatttttcacttttggacagggattttagagtaaaagcctgctacattgcgggtaaacaggcatacacggaagatgaggatgctcctatttga

SEQ ID NO: 41418 - protein, 150 aa, Unknown
  Obtained from environmental sample
  misc_feature (1)..(150): Xaa is any amino acid
MKMALACKGLDKVCLIXDANLNAGMEPGIYKGISGTDIKMRYKGGPAREWRQPTEDGGSPNATEPGGLTGSGLTLDLAFRNAVKMLGLSLPQAAALVSHNPARVLGLDHDRGVIEKGYRADFSLLDRDFRVKACYIAGKQAYTEDEDAPI

SEQ ID NO: 41419 - DNA, 765 bp, Unknown
  Obtained from environmental sample
  misc_feature (1)..(765): n is a, c, g, or t
atgccaggacggcttgttattacacatgcctcggtagtttgccgggacaggatccttgaagatcataccgttacctgcgagggaaatcgaataacagggatttttccttcacaatcaacggatgggaaagagcgaagttttgatcccgcctctgaagcggatattacggacgtgaagggcgcgtatgtcgtaccgggctttatcgacctccatatccacggccttaagggaaagctggcaggtagcggccctgatgatctatccggaatgtgccaagagctgcccggctttggcgtaacggcctttttaccgtctattactcctgacgataaagaatgtgaaaccctcgcgaatttggcagggacaaaaaccagcggagctgaggttttaggtttttttcttgaagggcatttcttaaaattgaccggcgctatcaggggcatgaaaagcgattatacgtcagaaagggtaaaagctctcaaaaacgctctgggaaacaggcgcgcggttttcggggtttcacctgaaattcctggtattacctcattgattccaatgatggttgaaggcgacgctccggtttttattacccacactatggcaaattatgaagagacagaaaaagctatagaagccggggcaaggcacgccactcatttttacgatgtttttccttatcccggcgaacaggaacccggcgtccgcggctgcggcgccgtggaagctatcatggctaatcccgatgtgactgtgacttcatcctga

SEQ ID NO: 41420 - protein, 254 aa, Unknown
  Obtained from environmental sample
  misc_feature (1)..(254): Xaa is any amino acid
MPGRLVITHASVVCRDRILEDHTVTCEGNRITGIFPSQSTDGKERSFDPASEADITDVKGAYVVPGFIDLHIHGLKGKLAGSGPDDLSGMCQELPGFGVTAFLPSITPDDKECETLANLAGTKTSGAEVLGFFLEGHFLKLTGAIRGMKSDYTSERVKALKNALGNRRAVFGVSPEIPGITSLIPMMVEGDAPVFITHTMANYEETEKAIEAGARHATHFYDVFPYPGEQEPGVRGCGAVEAIMANPDVTVTSS

SEQ ID NO: 41421 - DNA, 804 bp, Unknown
  Obtained from environmental sample
  misc_feature (1)..(804): n is a, c, g, or t
ttggagacctttcacagcttagaaaaccgtatattaataaaaacgaacaggaggttcattatgaatcagaatttaacggaattgtgtgttatccttgaccgtagcggttctatgggagggcttgagaatgacacgattggaggctttaacgggtttgtcaaaaaacaggcggaagcgggtcagaccagccttaccaccgtgctttttgacgacaggtacgaaatcctccacaacggtgttgacgccggtaaggtaaagcttacagatcgtgaatactttacacgcggttctaccgccctgttggacgctgttggcaaaaccatcaatgacgtggggaagcggcttaatgagacggcggaagaatcgaggcccggcaaggttatcttcgtcatcacaacggacgggcttgaaaacgcgagccgtgaattcagctatgacgaggtaaaaagaatgatcacccatcagactgagaagtacggctgggagtttgtcttcatgggggccaatattgatgtagctaaagaaggggataaactcggcattaatgccgaccggtcattcgcctttgcgtcaacttcagaaggagtctgcgatatgtatggcggctgnatcgcgcggagtttgacaaatttctgcaaactgccagttattcgctcagtaattcgtccacccgtgacgtgtgtatcatgtactgcattgataaaggcatttatgatattgacgaggttaacgccctgctgtttgcggtcggcattgatccgctgtcgagggaatagtaattatcaaactgctaactttccttaa

SEQ ID NO: 41422 - protein, 267 aa, Unknown
  Obtained from environmental sample
  misc_feature (1)..(267): Xaa is any amino acid
METFHSLENRILIKTNRRFIMNQNLTELCVILDRSGSMGGLENDTIGGFNGFVKKQAEAGQTSLTTVLFDDRYEILHNGVDAGKVKLTDREYFTRGSTALLDAVGKTINDVGKRLNETAEESRPGKVIFVITTDGLENASREFSYDEVKRMITHQTEKYGWEFVFMGANIDVAKEGDKLGINADRSFAFASTSEGVCDMYGGXIARSLTNFCKLPVIRSVIRPPVTCVSCTALIKAFMILTRLTPCCLRSALIRCRGNSNYQTANFP

SEQ ID NO: 41423 - DNA, 744 bp, Unknown
  Obtained from environmental sample
  misc_feature (1)..(744): n is a, c, g, or t
gtgatgacgcggcttattccccggaacaccaccatccccaccaggaaaagccagattttctccaccgccgctgacggacagaccgcagtttcaatccaggtgcttcagggcgaaagggaaatggccgcccagaaccgtacgctgggcagatttgacctggtaggtataccgccagcgccgaggggaattccacagatagaagttaccttcgacattgacgcgaacggcattgtccatgtttccgcaaaagacctcggaacaggcaaggagcagaagatccgcatagaaagctcttccggcctttcggacaacgaaatcgaccgcatggtaaaggaagcggaactccacgcggaagaagacaaaagggaaagggaaagggcagaagtccgaaacgacgcagacaacatgatctactccaccgagaaaaacatcaaagagctgggagacaagataaacggcgcggataaatccaaagtagaagaagcgatagcggatctgcgcaaggctcttgagggaagcgatatcgaaaacatcaaatccaaaaccgaggccttaaagcaggtttcctacaagatagccgaagaagtctacaaacaggcgggcgcacagcaaggcggcaatacgtccggcccatccggtggcccttcgagcggtagccattcgagcggtagcagtactggagccgggaataataccaaaggcgccgaagatgcggactatgaagtagtggatgacgacaagtag

SEQ ID NO: 41424 - protein, 247 aa, Unknown
  Obtained from environmental sample
  DOMAIN (1)...(198): Hsp70 protein
  misc_feature (1)..(247): Xaa is any amino acid
MMTRLIPRNTTIPTRKSQIFSTAADGQTAVSIQVLQGEREMAAQNRTLGRFDLVGIPPAPRGIPQIEVTFDIDANGIVHVSAKDLGTGKEQKIRIESSSGLSDNEIDRMVKEAELHAEEDKRERERAEVRNDADNMIYSTEKNIKELGDKINGADKSKVEEAIADLRKALEGSDIENIKSKTEALKQVSYKIAEEVYKQAGAQQGGNTSGPSGGPSSGSHSSGSSTGAGNNTKGAEDADYEVVDDDK

SEQ ID NO: 41425 - DNA, 303 bp, Unknown
  Obtained from environmental sample
  misc_feature (1)..(303): n is a, c, g, or t
atgttgtctgcgtcgtttcggacttctgccctttccctttcccttttgtcttcttccgcgtggagttccgcttcctttaccatgcggtcgatttcgttgtccgaaaggccggaagagctttctatgcggatcttctgctccttgcctgttccgaggtcttttgcggaaacatggacaatgccgttcgcgtcaatgtcgaaggtaacttctatctgtggaattcccctcggcgctggcggtatacctaccaggtcaaatctgcccagcgtacggttctgggcggccatttccctttcgccctga

SEQ ID NO: 41426 - protein, 100 aa, Unknown
  Obtained from environmental sample
  SIGNAL (1)...(22)
  misc_feature (1)..(100): Xaa is any amino acid
MLSASFRTSALSLSLLSSSAWSSASFTMRSISLSERPEELSMRIFCSLPVPRSFAETWTMPFASMSKVTSICGIPLGAGGIPTRSNLPSVRFWAAISLSP

SEQ ID NO: 41427 - DNA, 789 bp, Unknown
  Obtained from environmental sample
  misc_feature (1)..(789): n is a, c, g, or t
gtggctaaaagagattattacgaagttctcggcgtacaaaaaaactcctcaacggatgacataaaaaaagcgtaccgaaaacttgcccttcaataccatcccgacaagaatccgggtgacaaggccgcggaggaaaagtttaaggaagctaccgaagcttacgaagttctaggtgatgacaaaaaacggcaggcatacgatcaattcggctttgccggagtagaaggcatgggtgggtccaccccgcatgacttttcccagacattccatggcttcgaagatatctttgaaaatttaggaggcttttccaacatctttgatacgatgtttggagggggaaccagacgctcctcgggcggtcatggaggagccaggcatggggccaacctccgatacgatatcgaaatatcctttaaggatgctgttttcggcacaaaggttgaaatccagtacaacagaaacgactcttgccctgtttgtaagggttcgggtgctgccagcgggacaagcagaaaagtttgccccacctgcaagggagccggccagatacgccagagcgcgggttttttccaaatggctacgccctgcccgtcctgcggcggccagggtgaggttatagagaaaccttgcccggaatgtgggggagccggtacacagaagaagcgtcagaaaataatggttaccattccgccgggagtagaaaacggcaaacgggtgctaattccccggcagggcgacgctggagttgccggtggcccaacggtgatctctacgtttttatccccgtaa

SEQ ID NO: 41428 - protein, 262 aa, Unknown
  Obtained from environmental sample
  DOMAIN (144)...(224): DnaJ central domain (4 repeats)
  misc_feature (1)..(262): Xaa is any amino acid
MAKRDYYEVLGVQKNSSTDDIKKAYRKLALQYHPDKNPGDKAAEEKFKEATEAYEVLGDDKKRQAYDQFGFAGVEGMGGSTPHDFSQTFHGFEDIFENLGGFSNIFDTMFGGGTRRSSGGHGGARHGANLRYDIEISFKDAVFGTKVEIQYNRNDSCPVCKGSGAASGTSRKVCPTCKGAGQIRQSAGFFQMATPCPSCGGQGEVIEKPCPECGGAGTQKKRQKIMVTIPPGVENGKRVLIPRQGDAGVAGGPTVISTFLSP

SEQ ID NO: 41429 - DNA, 507 bp, Unknown
  Obtained from environmental sample
  misc_feature (1)..(507): n is a, c, g, or t
ttgcccggaatgtgggggagccggtacacagaagaagcgtcagaaaataatggttaccattccgccgggagtagaaaacggcaaacgggtgctaattccccggcagggcgacgctggagttgccggtggcccaacggtgatctctacgtttttatccccgtaaagccccatgaattttttgaacgcgaaggtgaagacctttactgcgccattccgatttctatgacccaggcagcgcttggcgcggagattcaggtggcaaccctcgagggcagatccatcaaggtaaaggttccgccgggaatacagaacggcaaactgctccgcatccgcgaggaaggtgtccccgtgtcgggccgccggggaaacctctatatcaagatgatggttcaggttcctgcaaagctttcaaagcgcgggcgggaacttatggaggagctttcgcgcgtcgaaggggaaaacagcacgcccaagcctataccgctttcagagctttcggaacgctaa

SEQ ID NO: 41430 - protein, 168 aa, Unknown
  Obtained from environmental sample
  DOMAIN (22)...(148): DnaJ C terminal region
  misc_feature (1)..(168): Xaa is any amino acid
MPGMWGSRYTEEASENNGYHSAGSRKRQTGANSPAGRRWSCRWPNGDLYVFIPVKPHEFFEREGEDLYCAIPISMTQAALGAEIQVATLEGRSIKVKVPPGIQNGKLLRIREEGVPVSGRRGNLYIKMMVQVPAKLSKRGRELMEELSRVEGENSTPKPIPLSELSER

SEQ ID NO: 41431 - DNA, 561 bp, Unknown
  Obtained from environmental sample
  misc_feature (1)..(561): n is a, c, g, or t
atgataatcggcatagacataggaagcaccactaccaaggcggtttcgctggaagacggcaaggtcgtaaaaaaaattagtaccagggccgaggacgcgattacctcggcttcaggcgcgtttggcaaaatcatcctggaaaacgggatcaggatgaccgacataaagcggattatgatcacaggtgccggggcaactaaaattgaaggagaactgttcggcattcctacggaaaaggtaaacgagataaccgcgattggtattggcggaatgtatctttcaggccaggacaatatcgtcattgcaaatataggaaccggaaccgccatcatagaagcccaaagggacaggatcattcacctgggcggttcgggcgtgggcggcggcactattctcgggctggcaaaaaaactcctttcgctttccgacttcaaagacattatgaaactggccgaagaaggaaagctcgatcctgtagatcttctccttgaagacatcatgataaccgattttagttttcttggcaaaaaatcaacggcctccaatttggaaaaatgctga

SEQ ID NO: 41432 - protein, 186 aa, Unknown
  Obtained from environmental sample
  DOMAIN (1)...(185): Fumble
  misc_feature (1)..(186): Xaa is any amino acid
MIIGIDIGSTTTKAVSLEDGKVVKKISTRAEDAITSASGAFGKIILENGIRMTDIKRIMITGAGATKIEGELFGIPTEKVNEITAIGIGGMYLSGQDNIVIANIGTGTAIIEAQRDRIIHLGGSGVGGGTILGLAKKLLSLSDFKDIMKLAEEGKLDPVDLLLEDIMITDFSFLGKKSTASNLEKC

SEQ ID NO: 41433 - DNA, 360 bp, Unknown
  Obtained from environmental sample
  misc_feature (1)..(360): n is a, c, g, or t
ttggcaaagatcggcattcaaaatattaactcaaatttagctacggcaatcagaaccattgtcgttcttgtcatgtcatgggcaattgtttttattaccggaaaacacaacgaagttatgaacatcagccacaaaaatttattgtttttgattttatcgggaatagcgacgggattatcttggctttgttatttcagggctctgcaaatcggggaagcgtcaaaagtaatacctatagataaattcagtctggtaataggaatgataatggcttttatcgtcttaaaagaaacagtaacaataaaaacaataataggcggagtttttattacgataggcacttttgtcctgatattctga

SEQ ID NO: 41434 - protein, 119 aa, Unknown
  Obtained from environmental sample
  DOMAIN (1)...(119): Integral membrane protein DUF6
  misc_feature (1)..(119): Xaa is any amino acid
MAKIGIQNINSNLATAIRTIVVLVMSWAIVFITGKHNEVMNISHKNLLFLILSGIATGLSWLCYFRALQIGEASKVIPIDKFSLVIGMIMAFIVLKETVTIKTIIGGVFITIGTFVLIF

SEQ ID NO: 41435 - DNA, 447 bp, Unknown
  Obtained from environmental sample
  misc_feature (1)..(447): n is a, c, g, or t
atgataattaaccttgaacaagatgatttacaaaaagatataaaagtatcgatcacatatccggtaaaaaataaaattttggagcgtattgtctcttttttaaaaacggttgacgctcaaatagaatgttattcagacgatgttgtaaaaccggtaaatgtttctgatattttttacattgaaagcgtggacgggaaaacggtcgtttgctgtgaaaaagagaaatatatcgttaaaagccgtttgtatcaaatatatgaaaaattaagggacaacgggtttattcaaatcagcaagtattgcgtattaaatattaacaagctggaaaaattcaagcccttggacaattatcgtctggaagctgtattatcaaacggcgtttatttgtgtataacaagaaaatatatatcagggataaaacagatattaaaggagatgaataaatga

SEQ ID NO: 41436 - protein, 148 aa, Unknown
  Obtained from environmental sample
  DOMAIN (47)...(144): LytTr DNA-binding domain
  misc_feature (1)..(148): Xaa is any amino acid
MIINLEQDDLQKDIKVSITYPVKNKILERIVSFLKTVDAQIECYSDDVVKPVNVSDIFYIESVDGKTVVCCEKEKYIVKSRLYQIYEKLRDNGFIQISKYCVLNINKLEKFKPLDNYRLEAVLSNGVYLCITRKYISGIKQILKEMNK

SEQ ID NO: 41437 - DNA, 1194 bp, Unknown
  Obtained from environmental sample
  misc_feature (1)..(1194): n is a, c, g, or t
atggtagaaggaccaagcttgaccggtgtagcaaccaacttaatttttaacagatactcgctcagtctgcccgccggcacttgggaagaccttatcgccacgcttgtgccatccaacgcgccgcagctcgtgcattgggaaaccaacaatcccggtatcatagatttgggggattatggcaccagtaggggaatgagtaggtgcagtgttcgcggcgtgaaggaagggacagcggtcattaccgcttacataaatactgtatctggccgcagactcagaacaacctgcgccgtaaccgtaaccgccgcgccaaccggcccgaccgggccgaccggcccaaccgggccaaccgggccaatcggtccaattgacatggtacgtgtcgagggcggcagtttccagatggggaaagaactgggaaccgccaagtcaggcgacgtaactccggtgcgcacggtaacgctgaccggcttttacatgggcaaatatgaggtaacgcaggcgcagtggtatgcggtaatgggaacgaccattgctcaaaagcagaattcggcggtgccgacttttacgcctccgggttttcctcaggatacaagtaacaagggcaggggagataaataccccatgtactatgttacttggtatgacgcgctggtgttctgcaacaagctgagcatggcagagggcttaagccccgcgtaccgcattaacaacagtaccgatcctgccgcatggggaacagtaccgacaaacaatgacgctacatggaatgctgtagtaatagttgccggttctaccggatatcgtttaccgactgaggcgcagtgggagtatgcgtgccgtgcgggaacaaccacagcatataacacgggagctacgattagcgacaatacagggtggtacggcggtaacagcggaagtaagacacatgaagtgggaaagaaacccgcaaatgcgtgggggctgtacgatatgcatggaaatgtgtatgaatggtgctgggattggtatgatacttattcgaactatgcgcagaccgatcctatgggcgagtcctcggggactttccgcgtgtgtcgcggcgggagttggtacggtggttcagggcaactacgttccgcgtaccggggctacggccacccgtatagcaggttagacgatattggtttccggtttgttcgcccgaaccaataa

SEQ ID NO: 41438 - protein, 397 aa, Unknown
  Obtained from environmental sample
  DOMAIN (121)...(394): Domain of unknown function (DUF323)
  misc_feature (1)..(397): Xaa is any amino acid
MVEGPSLTGVATNLIFNRYSLSLPAGTWEDLIATLVPSNAPQLVHWETNNPGIIDLGDYGTSRGMSRCSVRGVKEGTAVITAYINTVSGRRLRTTCAVTVTAAPTGPTGPTGPTGPTGPIGPIDMVRVEGGSFQMGKELGTAKSGDVTPVRTVTLTGFYMGKYEVTQAQWYAVMGTTIAQKQNSAVPTFTPPGFPQDTSNKGRGDKYPMYYVTWYDALVFCNKLSMAEGLSPAYRINNSTDPAAWGTVPTNNDATWNAVVIVAGSTGYRLPTEAQWEYACRAGTTTAYNTGATISDNTGWYGGNSGSKTHEVGKKPANAWGLYDMHGNVYEWCWDWYDTYSNYAQTDPMGESSGTFRVCRGGSWYGGSGQLRSAYRGYGHPYSRLDDIGFRFVRPNQ

SEQ ID NO: 41439 - DNA, 918 bp, Unknown
  Obtained from environmental sample
  misc_feature (1)..(918): n is a, c, g, or t
atgaataatgaaagaaatatatttgacattatattagaatttgtaaacaaagacgactgtattcgggctgttgctatggaaggatcaaaaaataataaaaatgttccgatagatatttttcaagattatgacattacattttttgttaatgacatggggaaatataaaattaatgatgattggttaaatatttttggaaaaatggttataatgcaaaaacctgatgaaatgcatttgtttcctccagaaggctggataggtaaatgtcaaaaactcacttatttgatgatatttgaagatggtaataaaatagacttaaaaataatgcttataagtgaaatgaaactttattttaagttatttgccgactctctttgtaaaataatattggataaagataaattattccctttaatccatgaaccttcagatattgattttcatgttaaaaagccaagtgaagaatttgtggataattgtagtaatgaattttggtgggtatctacttatgtaacaaaaggtatatgcagaaatgaattattatatgttatagaacatttgaatattatgaggaaacaattgcttttaatggtttcatggaaagtaggaatagaaacttctttttcaataagtgttgggaaatcatataaatatttggataaatatgtatcaaaagaaacatgggaggcaatattaaaaacttataattgtaatacaatagattttgcatgggattcattaatattatgttgcaatttattccaagaaatggaaaactatgtttcaaaagaattgtgttataaatgtccggaaatatacaaaaaaagtataaaatatatagaacagtattttccagaaaataaaaaaagggaaaataaaaattgtgtaaatgggcaacttcgcataacaggtctgtaa

SEQ ID NO: 41440 - protein, 305 aa, Unknown
  Obtained from environmental sample
  DOMAIN (1)...(286): Streptomycin adenylyltransferase
  misc_feature (1)..(305): Xaa is any amino acid
MNNERNIFDIILEFVNKDDCIRAVAMEGSKNNKNVPIDIFQDYDITFFVNDMGKYKINDDWLNIFGKMVIMQKPDEMHLFPPEGWIGKCQKLTYLMIFEDGNKIDLKIMLISEMKLYFKLFADSLCKIILDKDKLFPLIHEPSDIDFHVKKPSEEFVDNCSNEFWWVSTYVTKGICRNELLYVIEHLNIMRKQLLLMVSWKVGIETSFSISVGKSYKYLDKYVSKETWEAILKTYNCNTIDFAWDSLILCCNLFQEMENYVSKELCYKCPEIYKKSIKYIEQYFPENKKRENKNCVNGQLRITGL

SEQ ID NO: 41441 - DNA, 1659 bp, Unknown
  Obtained from environmental sample
  misc_feature (1)..(1659): n is a, c, g, or t
ttggggctcagggttatccgcaaaattgaaaatataataagggaagagatgaatgccctcggcggcttagaagcagacctgcctgtggtgcaaacagccgagctttggagcgaggctgggcgctatcaggcaataggagacgaattgctccgtttcaaagaccgcaacgcccacaatatggtgctagccatgacccacgaagaagccatcaccgacatggcacgttatgtgctctccagctacaaacaactgccctttatgctctaccagttcaaaacaaaatacagagacgaagcacgggcacgcggcggcttgataagggtacgcgaatttgaaatgaaagacgcctatagctttcacgctacaccagaggacttggacaagcattacgaacttgaatacaaagcctaccaaaacatctttcacagggttgggatagaacccgtgatagtgcaatccgacacaggaataatgggcggtaaaattgcccacgaatttatgttgagcacgccaaacggcgaagactatttaattatatgcaaacactgcggctaccgagcgaacagggaaatcgccgagttcaaacggcagcccgtttctggaaattcaaaccttgaaaaagtcgcaacacctagcaaacagaccatagacgaagtctgcacattcttaaactcggataaaaaaaatgcaggcaaatgcgtattctttgatgtggacggcaaattggtggtggcattggttcagggttatttagaggtgagcgaaacaaaactccgcaactacctcaaaagcaaaattttaatccccgcatcggaagaattaatcagagcgagcggaatggtgccgggttatgcaagccctataaacgcgaaaaattgcagggtgattttggatataggtgcggcggaaagttcggatttaatcgtaggcgcaaacgaagacggctatcattataaacactgcgttccaaagcgagatttcacgactttcgaagcggcagacatcgcagaagccgccgaaaactgcctttgccccaaatgcgaaaaatctttgagcgaggcacgcggcattgagcttggcaatatattcaagctgggtacaaaattcagcgaaaatatgggttgtgttttcacagacgcaaacggcgaggtaaaacccgccataatgggttgttacgggataggcgttggcaggcttatggcaagcgttgtggaaaacagccacgacgattttggccctatatggcctatgtccatcgcaccatttcacgttctaattgtgccaatcgcaaaagacgaagccattttgcaggtcgcggagcggctggaaaaagaactgaccgagcagggcgttgaagttttggttgacgaccgagacgaaagaccgggtgtaaaattcaaagacggcgatttgtggggaattccaatccgcatagccataggcaaaaaaggtcttgcagaaaacaaagtggagtggaaactccgtagcggaaaagaaatcgaaatggtacccgttgaaaacgtggcggaaaaagtccgctcttttgtctnaaccgaggctcattctgaatttaaaattcatttgncattttttttatattttcctaaatttcaaacaggagttcactatgaaaacacatttttcaaagctggaaaataa

SEQ ID NO: 41442 - protein, 552 aa, Unknown
  Obtained from environmental sample
  DOMAIN (205)...(335): YbaK / prolyl-tRNA synthetases associated domain
  misc_feature (1)..(552): Xaa is any amino acid
MGLRVIRKIENIIREEMNALGGLEADLPVVQTAELWSEAGRYQAIGDELLRFKDRNAHNMVLAMTHEEAITDMARYVLSSYKQLPFMLYQFKTKYRDEARARGGLIRVREFEMKDAYSFHATPEDLDKHYELEYKAYQNIFHRVGIEPVIVQSDTGIMGGKIAHEFMLSTPNGEDYLIICKHCGYRANREIAEFKRQPVSGNSNLEKVATPSKQTIDEVCTFLNSDKKNAGKCVFFDVDGKLVVALVQGYLEVSETKLRNYLKSKILIPASEELIRASGMVPGYASPINAKNCRVILDIGAAESSDLIVGANEDGYHYKHCVPKRDFTTFEAADIAEAAENCLCPKCEKSLSEARGIELGNIFKLGTKFSENMGCVFTDANGEVKPAIMGCYGIGVGRLMASVVENSHDDFGPIWPMSIAPFHVLIVPIAKDEAILQVAERLEKELTEQGVEVLVDDRDERPGVKFKDGDLWGIPIRIAIGKKGLAENKVEWKLRSGKEIEMVPVENVAEKVRSFVXTEAHSEFKIHLXFFLYFPKFQTGVHYENTFFKAGK

SEQ ID NO: 41443 - DNA, 831 bp, Unknown
  Obtained from environmental sample
  misc_feature (1)..(831): n is a, c, g, or t
atgatagaagaacagaccgaaagcgtaaacatgtcgtccacagccattgaggaaatgacagctaacattcattcggtaacgcagacgctggcggaaaacagcaaaaatgtcggcgttttgaccgaagcatcggagaacgggaaatcggggctgcagacggtcgctcaggaaatactggaaatagcccgtgattccgaagggcttttggaaataaactcggtaatggacaatatcgccggtcagaccaatctgctttcgatgaacgccgcgattgaggctgctcacgccggagaagcggggaaggggtttgctgttgtagccgatgaaatccgcaaactcgcggaatcatcaagcgaacaatcaaaaaccaccgcaacgatgctgaaaaaaataaaagcgtccatagataatatcaccaaatcctccgatgaagtattaaaccgtttcggcgccatagactcaagcgtaaaaacagtttcagagcacgaagagaatatattaaacgccatgcgggaacaggaaacgggcggcaggcaaatattggaatccataggccgccttagggacataacccgttcggttaaaaacgggtccgatgacatggcggaatctggcaaaactctggttaaggaaacggacgaattcataaaaataagtcagaaagcggtggaaggcatgaacgagatattaaagggcgttaataagataagcagttcggtcagccatgtaaacgacatgattatagaaaacaaccatagctttgacgccttgaaaaagggaactgaaaaatttaacgataccgatagaaaaaattctgaaaaaatagtataa

SEQ ID NO: 41444 - protein, 276 aa, Unknown
  Obtained from environmental sample
  DOMAIN (3)...(224): Methyl-accepting chemotaxis protein (MCP) signaling domain
  misc_feature (1)..(276): Xaa is any amino acid
MIEEQTESVNMSSTAIEEMTANIHSVTQTLAENSKNVGVLTEASENGKSGLQTVAQEILEIARDSEGLLEINSVMDNIAGQTNLLSMNAAIEAAHAGEAGKGFAVVADEIRKLAESSSEQSKTTATMLKKIKASIDNITKSSDEVLNRFGAIDSSVKTVSEHEENILNAMREQETGGRQILESIGRLRDITRSVKNGSDDMAESGKTLVKETDEFIKISQKAVEGMNEILKGVNKISSSVSHVNDMIIENNHSFDALKKGTEKFNDTDRKNSEKIV

SEQ ID NO: 41445 - DNA, 564 bp, Unknown
  Obtained from environmental sample
  misc_feature (1)..(564): n is a, c, g, or t
atgaaagctcccgcttttctggaagatatttatccgcagaatttattgtacggcataactatcaggtctcctatagcaaacgggcatctgaaaatgattcattttcccgatcttccggacaattataccgtaattaccgccagaaacatccccggagaaaacaggctggaagacacctccattcccatacttgcggattcaaaactttcctacataggggagccggtagccattctgcttggacaggaaaaaacaaaacttgaagaactggcgaatcaatgcaaggttgtttttgaagaggaaaggcctgattttaacgccataacgcccgcggctgtcgtccgtgagattcagattggcaactgtgaaagcgtttatgacaggccggaaaaaatattagccggtacttacataacgggaatacaggatcattggtatgcggagcctgccggagccgtaacttattatgataaaaaagaaaaagagactaaattaaaaaaagccgaaaaaacattaatcgtaaaaaccgcgacccaatggccgtaccatgtaaacgctcggtag

SEQ ID NO: 41446 - protein, 187 aa, Unknown
  Obtained from environmental sample
  DOMAIN (4)...(102): Aldehyde oxidase and xanthine dehydrogenase, a/b hammerhead domain
  misc_feature (1)..(187): Xaa is any amino acid
MKAPAFLEDIYPQNLLYGITIRSPIANGHLKMIHFPDLPDNYTVITARNIPGENRLEDTSIPILADSKLSYIGEPVAILLGQEKTKLEELANQCKVVFEEERPDFNAITPAAVVREIQIGNCESVYDRPEKILAGTYITGIQDHWYAEPAGAVTYYDKKEKETKLKKAEKTLIVKTATQWPYHVNAR

SEQ ID NO: 41447 - DNA, 918 bp, Unknown
  Obtained from environmental sample
  misc_feature (1)..(918): n is a, c, g, or t
atgttcttcgacaaagagaagctcattcacttccgggcgatgatcgtttccgataccgaagcggagcgcagagaagctctaaagaaaatcctaccccttcaacagaaggattttttgggcatcttcaaagccatggaaggaaaaccggtaaccatcaggcttttggaccccccgcttcatgaattcgttccgcatacaccggaagagacgaaggagctggccgattacctgaatgttgcggttgaaaccctccagcccaagatcgacaagctccgcgaacaaaacccgatgcttggacacaggggctgccgcctggcggtaacgtacccggaaatctacgacattcaggttgaagccattgcactcgcggcggtggagtgtttaaaagaaacgattccggtgaaccccgaaatcatgattcccattgttatgagtgccagagagttgaagcttttgcggcccaacgccgaaaaggttttaaagaaggtctttgacgcggagggagtaagcataaaggtgaagatcggcaccatgatcgaagtacccagggcggccatacgctccgcccatatcgcaaaatacgcggacttctacagtttcggaaccaacgatcttacccagatgacttttgccttcagtcgcgatgatgtcgcttccttcctgcctacttaccttgaaaaaactgtgctggatgttgacccctttaaatccattgacgaagacggcgtgggctaccttctctcttatgccacacagcagggaagggcggtcaacccggccctccaggtgggcatatgcggcgagcacggaggtgatccgttaccatcgacttctgttaccgcgcaggcctcagctacgtatcctgctcgcccttccgcgttcctgtggcgcgccttgcagccgcccaggcggtgttga

SEQ ID NO: 41448 - protein, 305 aa, Unknown
  Obtained from environmental sample
  DOMAIN (1)...(294): PEP-utilising enzyme, TIM barrel domain
  misc_feature (1)..(305): Xaa is any amino acid
MFFDKEKLIHFRAMIVSDTEAERREALKKILPLQQKDFLGIFKAMEGKPVTIRLLDPPLHEFVPHTPEETKELADYLNVAVETLQPKIDKLREQNPMLGHRGCRLAVTYPEIYDIQVEAIALAAVECLKETIPVNPEIMIPIVMSARELKLLRPNAEKVLKKVFDAEGVSIKVKIGTMIEVPRAAIRSAHIAKYADFYSFGTNDLTQMTFAFSRDDVASFLPTYLEKTVLDVDPFKSIDEDGVGYLLSYATQQGRAVNPALQVGICGEHGGDPLPSTSVTAQASATYPARPSAFLWRALQPPRRC

SEQ ID NO: 41449 - DNA, 747 bp, Unknown
  Obtained from environmental sample
  misc_feature (1)..(747): n is a, c, g, or t
gtggcgcgccttgcagccgcccaggcggtgttgaacaacccgccggcaaaagccgaagtgcctgctgcatccaaagaggctgcgtccaaagaggtgcaaaaaaaattagtggtgacagaaaaatcggctgcgccaaagaaatcggtagagccaaagaaagcgcaggcctctgttaaggcagcgaacaaggccgcagatataaagccagaggccaaaaaaccgcaaacctctgttccggtggtgaaaaagcctgcgtccaaagaggcaccaaaaaaattgacggtgccggaaaaatcgatagcgccaaagaaagctcaagcccctgtttcggcggcgaaaaaaccagcggccaaaaaagatgctggcaaaaaacctcaagcttctgttccggcggcgaaaaaggtgcggacctccggtccggcagataaaaaagctgcggcgaaaaaagctgcggtcaaagaaccggttgccaaaaaaccagtcgtcaaaaaaccggcggcaataaaagcggtaactaaaaagcccttagcgaagaaagcgcaggcctctggttcgacatcgaaaaaggttgttgtaaagaagacagatgccaaaaagccgactgttaaaaaagcgaaggtgaaaaaggcggttaaaaatccttccgctaaaaatcctgcgcttaacaatttaccgaccaggaaacaggtagttaagagtgcgccggtgaaaaaagcgcccgttaagaaagcaaagaaggtaaagtag

SEQ ID NO: 41450 - protein, 248 aa, Unknown
  Obtained from environmental sample
  SIGNAL (1)...(18)
  misc_feature (1)..(248): Xaa is any amino acid
MARLAAAQAVLNNPPAKAEVPAASKEAASKEVQKKLVVTEKSAAPKKSVEPKKAQASVKAANKAADIKPEAKKPQTSVPVVKKPASKEAPKKLTVPEKSIAPKKAQAPVSAAKKPAAKKDAGKKPQASVPAAKKVRTSGPADKKAAAKKAAVKEPVAKKPVVKKPAAIKAVTKKPLAKKAQASGSTSKKVVVKKTDAKKPTVKKAKVKKAVKNPSAKNPALNNLPTRKQVVKSAPVKKAPVKKAKKVK

SEQ ID NO: 41451 - DNA, 396 bp, Unknown
  Obtained from environmental sample
  misc_feature (1)..(396): n is a, c, g, or t
ttgaaaatcacgacagcgcaaaactactttaccttctttgctttcttaacgggcgcttttttcaccggcgcactcttaactacctgtttcctggtcggtaaattgttaagcgcaggatttttagcggaaggatttttaaccgcctttttcaccttcgcttttttaacagtcggctttttggcatctgtcttctttacaacaacctttttcgatgtcgaaccagaggcctgcgctttcttcgctaagggctttttagttaccgcttttattgccgccggttttttgacgactggttttttggcaaccggttctttgaccgcagcttttttcgccgcagcttttttatctgccggaccggaggtccgcacctttttcgccgccggaacagaagcttga

SEQ ID NO: 41452 - protein, 131 aa, Unknown
  Obtained from environmental sample
  SIGNAL (1)...(24)
  misc_feature (1)..(131): Xaa is any amino acid
MKITTAQNYFTFFAFLTGAFFTGALLTTCFLVGKLLSAGFLAEGFLTAFFTFAFLTVGFLASVFFTTTFFDVEPEACAFFAKGFLVTAFIAAGFLTTGFLATGSLTAAFFAAAFLSAGPEVRTFFAAGTEA

SEQ ID NO: 41453 - DNA, 780 bp, Unknown
  Obtained from environmental sample
  misc_feature (1)..(780): n is a, c, g, or t
atgcgcttaataagctggaacgtcaacggaataagatcggtggagaaaaaagacttcgcgtcctggttgaaaaacgaatccgcggactttgtatgtattcaggaaacgaaggcaaagccggatcaactgtcatccgggctgcttgaaatacaggataaagacggaaaaccctatcatgtctgttgggcatgcgccaaaaggcccggttactccggcgtcggaatttattcaaaaacagagccgcttaatgtcangaatttggggatagaagaatttgacaacgagggtagggtgctccaggcggaatacagggattttacgcttatctctgcttattttccaaattcccaggatgaaaggaaaaggctggactataagctaaggttttgcggcgcaattatggaactctgcaaaaagtaccgcaaagaaaatcggcattttgttctttcaggggattataacatcgcgcatacgagtattgaccttgcaaggcctaaggaaaacgagaacaaccccggctatctgccggaagaaagggcgtggatggacgcctttacgaaagagggctttattgataccttccggcatttccacctaggagaagccgggcattacagctggtggtcatacaggatgaatgcccgtgagaggaacgtggggtggagaatagactaccattgcactgatccaaattttctcccggctgtaaaatcatcgataatacgccctgaggttttcggttccgatcactgcccaatagagttggttatcgagctttaa

SEQ ID NO: 41454 - protein, 259 aa, Unknown
  Obtained from environmental sample
  DOMAIN (1)...(257): Endonuclease/Exonuclease/phosphatase family
  misc_feature (1)..(259): Xaa is any amino acid
MRLISWNVNGIRSVEKKDFASWLKNESADFVCIQETKAKPDQLSSGLLEIQDKDGKPYHVCWACAKRPGYSGVGIYSKTEPLNVXNLGIEEFDNEGRVLQAEYRDFTLISAYFPNSQDERKRLDYKLRFCGAIMELCKKYRKENRHFVLSGDYNIAHTSIDLARPKENENNPGYLPEERAWMDAFTKEGFIDTFRHFHLGEAGHYSWWSYRMNARERNVGWRIDYHCTDPNFLPAVKSSIIRPEVFGSDHCPIELVIEL

SEQ ID NO: 41455 - DNA, 468 bp, Unknown
  Obtained from environmental sample
  misc_feature (1)..(468): n is a, c, g, or t
atgcctgatatgaccatgctcaatatccaggcaatggccaggatgctcaggattcaggaaagggttgagattatttttattgattatattggccggataacttcggaaaacaagcagcttgcccgctatgaatttatatccgacgtatcaaggtctttgaaggggcttgcccgcgaattaaatattccggttgtggccctttcacagctcaggcgcgaagccgagaaagaaaaacctggcctggccgacatacgcgaatcgggttccattgagcaggacgcggacatagttatgtttttaaaccgggacagggaaatagataagagcagggaagagcaggaaaagatgaaagaacagaaagtacagctcatgctggcaaaaaaccggaacgggcctgtaggtacagttgatctaacattcataaaacaccttacaaaatacatttcatttacggatgaaaggggttag

SEQ ID NO: 41456 - protein, 155 aa, Unknown
  Obtained from environmental sample
  DOMAIN (1)...(84): DnaB-like helicase C terminal domain
  misc_feature (1)..(155): Xaa is any amino acid
MPDMTMLNIQAMARMLRIQERVEIIFIDYIGRITSENKQLARYEFISDVSRSLKGLARELNIPVVALSQLRREAEKEKPGLADIRESGSIEQDADIVMFLNRDREIDKSREEQEKMKEQKVQLMLAKNRNGPVGTVDLTFIKHLTKYISFTDERG

SEQ ID NO: 41457 - DNA, 867 bp, Unknown
  Obtained from environmental sample
  misc_feature (1)..(867): n is a, c, g, or t
ttgctcagcaaccacttgaacgatgaagaatttgaaggagcggcagcaaagctaatttcaaaagttcgcaccatagccgccgctgcatataaaatgagcacaggcagtcccattatttatgctgtaccggaatatggctatgtgaataattttctgcacatgatgttcacgctaccaaaccgtccatacatagcagacccagacattgtaaaagccctgaatctaattttgattttgcacgcagatcacgagcagaattgtagcacaagtgctgttcgcactattgccagcggcggagcaaacttgtttgccagcgcatcgtctggcgtttctgccttgtggggaaatttgcacggaggggcaaatcaagctgttgttgaaatgctagaggaaattcgcaaaaccagaacctctgttaaagattttgttgaaaaagtgaaacgcaaagaaaacggcattaaactcatgggctttgggcatagggtatataaaaactttgaccctcgctcaaagattctacaagaggttgcttctaaagttttgcaaaaacaagggcaaagcgatgagcttttggatattgctcaagagcttgcagagattgccctaaaagacgattattttatacagcgcaaactttacccgaatgtggatttttattcaggcataaccttaaaagccattggcattccgctaaatatgttcacggttatgtttgcaatcgggcgtatgccagggtggattgccaactggaaagaagttcacgataatcccaagcaaaaaatttacaggccaaggcaaatttatatgggagaagacacaaggcactatgtgcctatagatacacgaacagatttacgcctttcgtag

SEQ ID NO: 41458 - protein, 288 aa, Unknown
  Obtained from environmental sample
  DOMAIN (2)...(264): Citrate synthase
  misc_feature (1)..(288): Xaa is any amino acid
MLSNHLNDEEFEGAAAKLISKVRTIAAAAYKMSTGSPIIYAVPEYGYVNNFLHMMFTLPNRPYIADPDIVKALNLILILHADHEQNCSTSAVRTIASGGANLFASASSGVSALWGNLHGGANQAVVEMLEEIRKTRTSVKDFVEKVKRKENGIKLMGFGHRVYKNFDPRSKILQEVASKVLQKQGQSDELLDIAQELAEIALKDDYFIQRKLYPNVDFYSGITLKAIGIPLNMFTVMFAIGRMPGWIANWKEVHDNPKQKIYRPRQIYMGEDTRHYVPIDTRTDLRLS

SEQ ID NO: 41459 - DNA, 726 bp, Unknown
  Obtained from environmental sample
  misc_feature (1)..(726): n is a, c, g, or t
gtgccatttttactagaaacaaaagaattatcaaaagcctatagagaaacgggcggcaaccttgaaatattgaagaatgtcaatttcacgttggacgaaggtagcattgctgtgctaacaggacctagcggttctggcaaatccacttttttgaacatagtgggtgctttggataagccaaccggtggcttggttttctttaacggaaaggaaatgtcaaaattttccagacgggaaataaatagttttcaccgcaaaaatttgggctttatgtttcagtttcatcacctgctcgcagaatttaccgcatttgaaaatgtgcttatgccggctagaatagctcatcaaaattattgcgaaagccgtgaaagagcattggaacttttgagcatagtgggtctttctgagcgaattggccacttgcctcgcgagctttctggcggtgagcgccaaagggtagcactagcacgtgcccttatgaacagaccaagcttgattatagcagacgaacccagcggaaacttagacgaaaaaaacgcagaggttctaaaatctcttattttggaactcaataaaaaatatgggcaaacattcttaatagcaactcacgatatggatttggcagggatagccaccgataggtggctcgttgcgcacggaacaatcatggtgaatacgaatgcctacgaaaggcgtaaatctgttcgtgtatctataggcacatag

SEQ ID NO: 41460 - protein, 241 aa, Unknown
  Obtained from environmental sample
  DOMAIN (34)...(220): ABC transporter
  misc_feature (1)..(241): Xaa is any amino acid
MPFLLETKELSKAYRETGGNLEILKNVNFTLDEGSIAVLTGPSGSGKSTFLNIVGALDKPTGGLVFFNGKEMSKFSRREINSFHRKNLGFMFQFHHLLAEFTAFENVLMPARIAHQNYCESRERALELLSIVGLSERIGHLPRELSGGERQRVALARALMNRPSLIIADEPSGNLDEKNAEVLKSLILELNKKYGQTFLIATHDMDLAGIATDRWLVAHGTIMVNTNAYERRKSVRVSIGT

SEQ ID NO: 41461 - DNA, 1104 bp, Unknown
  Obtained from environmental sample
  misc_feature (1)..(1104): n is a, c, g, or t
atgaaaaccagcgattttttctttgagcttcccgatcatctgatagcccagtatcctcctgaacagcgggggcaaagccgcctgatgactcttgaccgccggaccaggcggcggacacaccgcatggtaaacgaactgcctgaaattctgtgcgggccggaattgtgcggcaaggacggcgggctgccgctgttggtttttaatgattcaaaagtgagaaaagcgcggcttgtcggtacggcgctccacaccggtgcgcaggcggagtttttgctggtggaaaaaatggggaatggggaaaagggaataatgagcaatgagcaaggagcaatgagcaatgaatggatagttcttacaaaacgggtgaaacggcgcaagccgggcagtgtttatgttttctttgacaacaatggcgcggaaattgccagagcggagattataacaggggaaggggattttaaataccttgcgtttgaccgtgttgttgacgatgactggcttgatcgttacgggcatatcccgttgccgccctatattaaacggcaggatgttttctccgactccgaacgctaccagacggtatacgcttctgcctgcggatcatcggcggcgccgactgcgggtctgcattttacaaacgaattgttggagagcattaacgcggcggggattgaaagcgtttttatcacgcttcacgtcgggctgggcacttttttgcctgtgagaagcgaaaacatcgaagatcatgttatgcaccgggaatatttcagcattgacgaacaagccgccctaagagtcgaagcggcaaaaactcaagggcgcaaagtcatagcggtagggactacgagcgtccgcaccctggaaagcgcctgggattcaggatcattaaaaagaggggagggtagtacttctatttttatatatcccggctataagtttaatgttgcggatgccatgtttaccaatttccatacacctgaatccactctgctgatgcttgtatcggcctttgccggcagggaattgatccttgaaagttacgcggaggcaatagcgcaaggctaccgttttttcagttacggcgacgccatgttaataatataa

SEQ ID NO: 41462 - protein, 367 aa, Unknown
  Obtained from environmental sample
  DOMAIN (1)...(243): Queuosine biosynthesis protein
  misc_feature (1)..(367): Xaa is any amino acid
MKTSDFFFELPDHLIAQYPPEQRGQSRLMTLDRRTRRRTHRMVNELPEILCGPELCGKDGGLPLLVFNDSKVRKARLVGTALHTGAQAEFLLVEKMGNGEKGIMSNEQGAMSNEWIVLTKRVKRRKPGSVYVFFDNNGAEIARAEIITGEGDFKYLAFDRVVDDDWLDRYGHIPLPPYIKRQDVFSDSERYQTVYASACGSSAAPTAGLHFTNELLESINAAGIESVFITLHVGLGTFLPVRSENIEDHVMHREYFSIDEQAALRVEAAKTQGRKVIAVGTTSVRTLESAWDSGSLKRGEGSTSIFIYPGYKFNVADAMFTNFHTPESTLLMLVSAFAGRELILESYAEAIAQGYRFFSYGDAMLII

SEQ ID NO: 41463 - DNA, 603 bp, Unknown
  Obtained from environmental sample
  misc_feature (1)..(603): n is a, c, g, or t
gtgctgcgggcagggcttgcgatagtcggtacaaaacccggtataaagacgctttcttctcattttatcgttcccacggaagatccgtcatggggcgcaaatggaaattttgtcttttccgactgcgcggtggtaccggatcccaatgcggagcaactggcggatatcgccatttcctccgcccagtcctgccgcgattttctgggcgccgagcctgtagtcgctttgctttccttttcaacaaaaggctcaggcgggaaccatccaaacgtggtaaaagtcagggaggcactggcaattgtaaaggcaagagatccgggccttcttatagacggcgaaatacaggcagacgccgccctggttgattctgttttggacaaaaaagcccccggcagccccataagaggcaaggtaaataccatggtgtttccggatcttcaatcagggaacatcggcattaaattgatacagcgcattggcaagatcaacgggttcggcccattcctgcaaggcttcgctaaaccgcttagcgacctttccagaggcacaacagttgaagaaatagtgaataccagcgcgtttttacttgcccaggtcaggtga

SEQ ID NO: 41464 - protein, 200 aa, Unknown
  Obtained from environmental sample
  DOMAIN (1)...(196): Phosphate acetyl/butaryl transferase
  misc_feature (1)..(200): Xaa is any amino acid
MLRAGLAIVGTKPGIKTLSSHFIVPTEDPSWGANGNFVFSDCAVVPDPNAEQLADIAISSAQSCRDFLGAEPVVALLSFSTKGSGGNHPNVVKVREALAIVKARDPGLLIDGEIQADAALVDSVLDKKAPGSPIRGKVNTMVFPDLQSGNIGIKLIQRIGKINGFGPFLQGFAKPLSDLSRGTTVEEIVNTSAFLLAQVR

SEQ ID NO: 41465 - DNA, 420 bp, Unknown
  Obtained from environmental sample
  misc_feature (1)..(420): n is a, c, g, or t
atggatcttattacagaaattaaagaaaaagccaaatccaggcagaaaaaactggttctgcccgagggaactgacctgcgaacgctgaaagccgccaggctgattgttgaagccgctcttgcgtcttcggtaaccgttttgggcagggaatcggaagttcggaaactggcggccgccgaaagcattgatcttggcggggtcaatattctggaacaggcaggctcagacgatattgaaagatacgcaaaagagttttacgaattaagaaaacacaaaggcatgacgatggagcaggccagggctgacattctagcccccctgcgctggggagccatgatgctccatctgggagatgtggacgcaatggtagcgggagcgaaaataccacggcagatgtgctgcgggcagggcttgcgatag

SEQ ID NO: 41466 - protein, 139 aa, Unknown
  Obtained from environmental sample
  DOMAIN (2)...(139): Phosphate acetyl/butaryl transferase
  misc_feature (1)..(139): Xaa is any amino acid
MDLITEIKEKAKSRQKKLVLPEGTDLRTLKAARLIVEAALASSVTVLGRESEVRKLAAAESIDLGGVNILEQAGSDDIERYAKEFYELRKHKGMTMEQARADILAPLRWGAMMLHLGDVDAMVAGAKIPRQMCCGQGLR

SEQ ID NO: 41467 - DNA, 390 bp, Unknown
  Obtained from environmental sample
  misc_feature (1)..(390): n is a, c, g, or t
ttgggctacctggatagcgagggctacctttaccttacaggccgcgccaaaaacgtgatcgtaacagagggcgggaaaaaggtattccccgaggaagtcgaaaaccagttccagttgtacgggcagatcgatcaaattctgatccgcggcttcatcatggatcaaaaaatgaagaaggaaggcatagaagcccttatataccctactccggatcttaaaaacgaagaagggcagccgtataccgcagaagaaatcaaagccatgatggaaaaaatcgtagccgatgttaaccagcacctcttgttctaccaaaaaattaacagggtggtaattctggacaagcctatggagatgtcttctacaaaaaaaataaaacgttttacggtttaa

SEQ ID NO: 41468 - protein, 129 aa, Unknown
  Obtained from environmental sample
  misc_feature (1)..(129): Xaa is any amino acid
MGYLDSEGYLYLTGRAKNVIVTEGGKKVFPEEVENQFQLYGQIDQILIRGFIMDQKMKKEGIEALIYPTPDLKNEEGQPYTAEEIKAMMEKIVADVNQHLLFYQKINRVVILDKPMEMSSTKKIKRFTV

SEQ ID NO: 41469 - DNA, 471 bp, Unknown
  Obtained from environmental sample
  misc_feature (1)..(471): n is a, c, g, or t
atgagaagaaaagataaagagataatcggcatagacgagaagttggagattattgcgaagtgcaaaatttgcaggcttgggttatgtgaaaataattatccgtatattgtgccgttgaattatggtttttcttatgatgatgagaaattgactctgtattttcatagtgcaaaagagggcaaaaaaattgatatgattaagaataatagcaaggcgtgttttgagattgattgcgatacaaaattggttgagggagaaaagccctgtgattatggctatgaatttaagagcataatcggttttgggaaaattgtttttcttgatgcaatagatgaaaaaacagatggtttaaattatttgatgaaacagcaaaccggaaaggatataaaatttgattttgaggagagtaaattgaaaaatgttgttgttttcaaaatgttggttgatgaatttacggggaagcaaaaataa

SEQ ID NO: 41470 - protein, 156 aa, Unknown
  Obtained from environmental sample
  DOMAIN (11)...(87): Pyridoxamine 5'-phosphate oxidase
  misc_feature (1)..(156): Xaa is any amino acid
MRRKDKEIIGIDEKLEIIAKCKICRLGLCENNYPYIVPLNYGFSYDDEKLTLYFHSAKEGKKIDMIKNNSKACFEIDCDTKLVEGEKPCDYGYEFKSIIGFGKIVFLDAIDEKTDGLNYLMKQQTGKDIKFDFEESKLKNVVVFKMLVDEFTGKQK

SEQ ID NO: 41471 - DNA, 633 bp, Unknown
  Obtained from environmental sample
  misc_feature (1)..(633): n is a, c, g, or t
atggaaggcaatcccattcatgccgacatgctttacgccgccaaaaaggcaaatctttctttcatttgcaacgtggtcattaacgccgccaaggaagttattttcgccgttgccggggactgtgattttgcgcaccggaaaggttgtgaattccttttaagcaaatgcggtgcacagcccgttatcgccgatattgtcatttcaactaacggaggttatccgcttgatcagaacgtctaccaggccgtcaagggcatgactgccgccgaagccacggtaaaagaaggcggagtaattattcatctctccgaatccggcgacggccacggagcggctgaattccataaaacctttgctgaagaaaaagaccttgatcgtatgctggatacgtttatgaaaactcccagagaaagtacaagaccggatcagtgggaatcacaaatacttctgcgtatattaaaacacgcccatgttatttatatttccgacgctccggataacattatacgggattttcagatgacgcccgctcattcaattaacgacgcgttgaggatggcggaagaaatgcttggtaatcctgacgcttccattacggtaattcccgacggggtctcggtagtaattagttaa

SEQ ID NO: 41472 - protein, 210 aa, Unknown
  Obtained from environmental sample
  misc_feature (1)..(210): Xaa is any amino acid
MEGNPIHADMLYAAKKANLSFICNVVINAAKEVIFAVAGDCDFAHRKGCEFLLSKCGAQPVIADIVISTNGGYPLDQNVYQAVKGMTAAEATVKEGGVIIHLSESGDGHGAAEFHKTFAEEKDLDRMLDTFMKTPRESTRPDQWESQILLRILKHAHVIYISDAPDNIIRDFQMTPAHSINDALRMAEEMLGNPDASITVIPDGVSVVIS

SEQ ID NO: 41473 - DNA, 324 bp, Unknown
  Obtained from environmental sample
  misc_feature (1)..(324): n is a, c, g, or t
ttggaaggagctcggacttgtatagtgtatgcaaatccctcgtcacggccgcgtgggggacgtcaatctcgcactgccacatggtcgacggatcgggctaggcgctcggaggtctggaagaaaaacgaaaaatcttgcccgggggaactgtacgcaatcacccaaatcatgggcggaaagatttcaggcgaacacggcataggcattaaacgcagggaatttttcagggacctggtaagccccgttgagttggaacttatgaaaagactgaaacaggcctgggatccgaacaatatcatgaatccggggaagatatttaactaa

SEQ ID NO: 41474 - protein, 107 aa, Unknown
  Obtained from environmental sample
  misc_feature (1)..(107): Xaa is any amino acid
MEGARTCIVYANPSSRPRGGRQSRTATWSTDRARRSEVWKKNEKSCPGELYAITQIMGGKISGEHGIGIKRREFFRDLVSPVELELMKRLKQAWDPNNIMNPGKIFN

SEQ ID NO: 41475 - DNA, 1674 bp, Unknown
  Obtained from environmental sample
  misc_feature (1)..(1674): n is a, c, g, or t
ttggatactgccgaacgtttcgagccgggaatcaggcggcgcacggaaaagattgaaggggtatacgcgatttatccttatctgagagaaataacggaaatgttgaaaaccgatgccagcctgccgttgcttgttgactgcctgaactgcgaaaaaggctgccttggcgggcccggcacggggaacgccgaaaaaccgctggctttgcttaaagaacctgtacaaagacgcatggctaaactggaagaagaacttaatactcataccggagaaaaagcggtcaataaataccatgatgttttgaaaaggtactggaagaaagacatgtataacagaagctatcgtaatctttccgaaaacaatatgatcaaacagccaagcgaggaagaaataaccagaatcttccgcagtatgaagaaattcggagaggaagatatatataactgtacctgctgcggttacggaaactgcaaatcaatggcgaaggcgattttcaacaaacttaacaaagcggaaaattgcgcccattatattcttgccctgctcacggaaaaaaccaataccgaagaacttaaccgtcagcttcaggaacatatcgcccaggcgtccggccttatcgaaggaattaacaaattaataaataaattgaacgccgccatcatttcacaggcggatacaatcgctcaatcttcggcggcaaccgaaaaaatgatcgattcactcaaagaaacttcggaaatttcccgaagcaaacaggaaactataaaagaactgatagtagacacggagaaaagccaggaatccatgcgggagacaattcaatcggttgaggacatttccaaatcggtggaaggtattgcggaaacgattaaaataatcgcttcaatagcggctaacaccaatttattgtccatgaacgcggcgatagaatccgcccacgccggcgaagcgggcaggggctttgcggtggttgccggtgagatacgccgcctttccgagactaccagagaaaattcggtgaacatttccaagacgttgaaaaacatcattgcgggggtatccattaccgaaaaacaatcgggcaacaccggaacacgtattaacacaatgtcaaaagaaatcggcagtttcgctaaaaccatgtccgatctaatcaatacatttggagaactgtcggcgcaaagcggtgaaattaccgccgctcttgataaccttcaaagtcaaagcgacatggtaaaaaccgactatgccgagatactgtcaatgacggaaaaactacgcgcggcaatgattggtttgactatgctgtccaagaaaaaagtccttgtagttgatgatgatgaacctatccttatcatgacaaaggacatattgaaagacgattataacgttactacaatcaattccggcaaggcggctttggacttgttcttagaggggtatatccctcatttaattttactggatttgtatatgcctgaaatgggcggatgggatacctttctcagaatacgtaacataagccaattacacagcatcccgatagcgatatacacgacatcggacgacccgaaagacaaggacaaagcggatgaactgcgcctggttgaatttatacacaaggcactcagtaaagacgtgctgcttgaaaaagtagcggaattggtgaggtaa

SEQ ID NO: 41476 - protein, 557 aa, Unknown
  Obtained from environmental sample
  DOMAIN (197)...(450): Methyl-accepting chemotaxis protein (MCP) signaling domain
  misc_feature (1)..(557): Xaa is any amino acid
MDTAERFEPGIRRRTEKIEGVYAIYPYLREITEMLKTDASLPLLVDCLNCEKGCLGGPGTGNAEKPLALLKEPVQRRMAKLEEELNTHTGEKAVNKYHDVLKRYWKKDMYNRSYRNLSENNMIKQPSEEEITRIFRSMKKFGEEDIYNCTCCGYGNCKSMAKAIFNKLNKAENCAHYILALLTEKTNTEELNRQLQEHIAQASGLIEGINKLINKLNAAIISQADTIAQSSAATEKMIDSLKETSEISRSKQETIKELIVDTEKSQESMRETIQSVEDISKSVEGIAETIKIIASIAANTNLLSMNAAIESAHAGEAGRGFAVVAGEIRRLSETTRENSVNISKTLKNIIAGVSITEKQSGNTGTRINTMSKEIGSFAKTMSDLINTFGELSAQSGEITAALDNLQSQSDMVKTDYAEILSMTEKLRAAMIGLTMLSKKKVLVVDDDEPILIMTKDILKDDYNVTTINSGKAALDLFLEGYIPHLILLDLYMPEMGGWDTFLRIRNISQLHSIPIAIYTTSDDPKDKDKADELRLVEFIHKALSKDVLLEKVAELVR

SEQ ID NO: 41477 - DNA, 810 bp, Unknown
  Obtained from environmental sample
  misc_feature (1)..(810): n is a, c, g, or t
gtggatgtggtttatcccgatattatcacggcgatggatctggaaagcaagatcctctataaactcgttgatgatttaaccgcgtattcgggcgagcgcagcgcccaggcggcggccacgctgactctggcccgacaactggaacttttagtcaggcggcccgataaaattcccaggactttggttaattttaaattcaatatcagcgccctgggcgacagccttttggccctttcccagtcccagcttgacgttgattacattgtggtaagcgccgccaacgcgagaatacaaccggaaagggaaaattttctggtcgccctttcccatgagatacgttctttccttgtttcgttctttgttgattacaacaacctcggcgacgtgtaccgcaaaggcgccgacgtcgtcgaagtgtggatgcttgccggacgcgatcaaagcacgattctgaaaggaatgattgacgatacctttacccccaaaacaggcattaaagtgaacgttaaactcgtggcgccggacgcggttatgccggctgttgtcgcgggtacggggccggacgcggcgctgaccgtgcctcaggccgatccggtgaattacgccgtccgccacgccgcgattgacgtttcaaaattaccgggctttgaggaactgacgcgggagtttattccagcgtcctcgtaccgttcagttacgccggcggcgtgtacggccttcctgaaacccagtacttccatgttatgttttaccgcaaggatatttttgaggaattggatattgccgttcccgaaacatgggatgagatga

SEQ ID NO: 41478 - protein, 269 aa, Unknown
  Obtained from environmental sample
  misc_feature (1)..(269): Xaa is any amino acid
MDVVYPDIITAMDLESKILYKLVDDLTAYSGERSAQAAATLTLARQLELLVRRPDKIPRTLVNFKFNISALGDSLLALSQSQLDVDYIVVSAANARIQPERENFLVALSHEIRSFLVSFFVDYNNLGDVYRKGADVVEVWMLAGRDQSTILKGMIDDTFTPKTGIKVNVKLVAPDAVMPAVVAGTGPDAALTVPQADPVNYAVRHAAIDVSKLPGFEELTREFIPASSYRSVTPAACTAFLKPSTSMLCFTARIFLRNWILPFPKHGMR

SEQ ID NO: 41479 - DNA, 777 bp, Unknown
  Obtained from environmental sample
  misc_feature (1)..(777): n is a, c, g, or t
ttgggctatacgcctgagccttacgcattttttttgaacgcgggggataacgttatccggcttgagggaataaacgagcctgcggcaatccgcgcaatctgccttaaagctcctgttccggctcagaattaccggcagtacgcggcggggattgataccagcaactaccgcaatacggtttccacttataagttaaggatacagggtgaagacgccaattatcgttccgatccttcgttatacgccatctatgaccgttcttccggcgcgacggatccgcccagcgtggcaaaaataagactcaacatgataggcggacagagctggcgcgttgccggacagtggattgaatgggacttctatgtgcctgaaaacggtatgtacagggttaccgtcaagggccgtcagaattacaaccgcggttttgtttcaaaccgcaaggtgattatagacggtcagattccctgcacggaactttccgccgtgccttttacctacagcaataaatggaagctggtgactttcaacgacgatcagggtgatatgctgtttcccctggaacacggcgcgcacagtttgcgcttgcaggtggctatgggcggcatgggcgagatgttaagcgtcatggaagaaagcgtgttccgccttaacagcatttaccgcaaaatactggtgctgaccggcactgaaccggataatttaccgcgattaccgcgtggatgtggtttatcccgatattatcacggcgatggatctggaaagcaagatcctctataa

SEQ ID NO: 41480 - protein, 258 aa, Unknown
  Obtained from environmental sample
  misc_feature (1)..(258): Xaa is any amino acid
MGYTPEPYAFFLNAGDNVIRLEGINEPAAIRAICLKAPVPAQNYRQYAAGIDTSNYRNTVSTYKLRIQGEDANYRSDPSLYAIYDRSSGATDPPSVAKIRLNMIGGQSWRVAGQWIEWDFYVPENGMYRVTVKGRQNYNRGFVSNRKVIIDGQIPCTELSAVPFTYSNKWKLVTFNDDQGDMLFPLEHGAHSLRLQVAMGGMGEMLSVMEESVFRLNSIYRKILVLTGTEPDNLPRLPRGCGLSRYYHGDGSGKQDPL

SEQ ID NO: 41481 - DNA, 381 bp, Unknown
  Obtained from environmental sample
  misc_feature (1)..(381): n is a, c, g, or t
atggagagcaatcgccgcaccttcgcaccgccgcagcctaagaccgcggccgcgcctgccgcgaccgcaacggctaaaccgctcgcgaccgtccccagcatcggcagcgtccaagtgctcaacggctgtggcgccgagggcgcggctaaccgcgtggcggacttcctccgctcaaagggtttcgacgtcaaggacataggcaacgcctcatcatggaaacaccagtccacgatggtcatatcgaggacggcggacatggggctggccgaatcgattgagaagctgcttaaaacgggcaaactggtgctgataagaaacggggactcgatgtacgacgtgacagtcgtcgccgggccggactttgaggagaggataaagtga

SEQ ID NO: 41482 - protein, 126 aa, Unknown
  Obtained from environmental sample
  misc_feature (1)..(126): Xaa is any amino acid
MESNRRTFAPPQPKTAAAPAATATAKPLATVPSIGSVQVLNGCGAEGAANRVADFLRSKGFDVKDIGNASSWKHQSTMVISRTADMGLAESIEKLLKTGKLVLIRNGDSMYDVTVVAGPDFEERIK

SEQ ID NO: 41483 - DNA, 381 bp, Unknown
  Obtained from environmental sample
  misc_feature (1)..(381): n is a, c, g, or t
gtgaccgcgaagagtgcaaacggtacaaaaagcgcaaataagaagggcggcgacgttctcgcgggcagcgagttggtcgacgcggtcgtctccgtcttggaggagaaactggcggagaagatagcggtgatagacctgcgcgacgtgccggcggcggcggactggttcatcgtgtgccaaggcgacaacacgtcgcacacgtcggcggtcgcgaacgaggtaataggcgcgcttaaagaaaaatacggcacggcaccgtggcactacgagggcttggaagagggccggtgggcgctgatagactacaccgacgtcgtggtgcacgttatgctgcgggaggttagggagtattacgacttagagtccctgtggggtaattag

SEQ ID NO: 41484 - protein, 126 aa, Unknown
  Obtained from environmental sample
  DOMAIN (23)...(125): Domain of unknown function DUF143
  misc_feature (1)..(126): Xaa is any amino acid
MTAKSANGTKSANKKGGDVLAGSELVDAVVSVLEEKLAEKIAVIDLRDVPAAADWFIVCQGDNTSHTSAVANEVIGALKEKYGTAPWHYEGLEEGRWALIDYTDVVVHVMLREVREYYDLESLWGN

SEQ ID NO: 41485 - DNA, 438 bp, Unknown
  Obtained from environmental sample
  misc_feature (1)..(438): n is a, c, g, or t
atgcttggacctccaacctatcaaccaggtagtctccctggtgcctttaggggggttaaacccccagggatggcttatcttgaggggggcttcccgcttagatgccttcagcggttatcccgtccgaacgtagctacccggcgcttgcccttggcaggacaaccggtacaccagaggttcgtccatttcggtcctctcgtactaaaaacagctcctctcaaccatccaacgcccatggcagatagggaccgaactgtctcgcgacgttctgaacccagctcacgtaccgctttaattggcgaacagccaaacccttgggacctgcttcagccccaggatgcgatgagccgacatcgaggtgccaaaccttcccgtcgatgtggactcttggggaagatcagcctgttatccccggagtaccttttatccgttaagtga

SEQ ID NO: 41486 - protein, 145 aa, Unknown
  Obtained from environmental sample
  misc_feature (1)..(145): Xaa is any amino acid
MLGPPTYQPGSLPGAFRGVKPPGMAYLEGGFPLRCLQRLSRPNVATRRLPLAGQPVHQRFVHFGPLVLKTAPLNHPTPMADRDRTVSRRSEPSSRTALIGEQPNPWDLLQPQDAMSRHRGAKPSRRCGLLGKISLLSPEYLLSVK

SEQ ID NO: 41487 - DNA, 303 bp, Unknown
  Obtained from environmental sample
  misc_feature (1)..(303): n is a, c, g, or t
gtgccaaaccttcccgtcgatgtggactcttggggaagatcagcctgttatccccggagtaccttttatccgttaagtgacggcgcttccactcgctgccgccagatcactaagacctactttcgtacctgctcggcctgtcagcctcgcagtcaagcctccttgtgcctttacactcacgcgccgatttccaaccggcgcgaggagaccttcgcgcacctccgttactctttaggaggcgaccgccccagtcaaaccgcctgcctaccactgtccccgtaccggtttcacggcacgggttag

SEQ ID NO: 41488 - protein, 100 aa, Unknown
  Obtained from environmental sample
  misc_feature (1)..(100): Xaa is any amino acid
MPNLPVDVDSWGRSACYPRSTFYPLSDGASTRCRQITKTYFRTCSACQPRSQASLCLYTHAPISNRREETFAHLRYSLGGDRPSQTACLPLSPYRFHGTG

SEQ ID NO: 41489 - DNA, 465 bp, Unknown
  Obtained from environmental sample
  misc_feature (1)..(465): n is a, c, g, or t
ttgcctgcacagcctgcctacacgcttgcaccgggacttccaacacccggcctgcctacctttccgcgtctctccatcgcgcggacacacaagtacgggaatattaacccgtttcccatcgactacggctttcgccctcgccttagggaccgactaaccctgggaagattacctttacccaggaaaccttgggtttacggcgaacaggtttctcgcctgttttatcgttactcatgtcagcataatcacttccgtacagtccaccatgccttgcggcacagcttccgcccatacggaacgctcccctaccagactccatacggagaatccgcagcttcggcaccatgcttagccccgttacattttcggcgcaacgtcattagaccagtgagctattacgctttctttcaacgatggctgcttctaagccaacgtcctgggtgtctctacaacgccaccacctaa

SEQ ID NO: 41490 - protein, 154 aa, Unknown
  Obtained from environmental sample
  misc_feature (1)..(154): Xaa is any amino acid
MPAQPAYTLAPGLPTPGLPTFPRLSIARTHKYGNINPFPIDYGFRPRLRDRLTLGRLPLPRKPWVYGEQVSRLFYRYSCQHNHFRTVHHALRHSFRPYGTLPYQTPYGESAASAPCLAPLHFRRNVIRPVSYYAFFQRWLLLSQRPGCLYNATT

SEQ ID NO: 41491 - DNA, 354 bp, Unknown
  Obtained from environmental sample
  misc_feature (1)..(354): n is a, c, g, or t
gtgcgctttgaggactatgtagaccgcatgctgcgtatccccagaacagccgcgaacatggcgattaaaatgtttgagtacgacatcgccccggaagtcggcgcggacaatatgcgtttccttgccggtatccgcagcgaagaaaaccgcacagcggcggaaaaagcgctcataaagggaaaaagccccgatacggtaaagattcaggttcgtgacaaaggtaaagacaaggatgaaaatccaaaagaaaaactggaaaaagagaaaacaaggctggaacggacaattgcctcgcttaggaagcggctggatgaagtgaaccgtgagcttgttaataaggattggaagaaatga

SEQ ID NO: 41492 - protein, 117 aa, Unknown
  Obtained from environmental sample
  misc_feature (1)..(117): Xaa is any amino acid
MRFEDYVDRMLRIPRTAANMAIKMFEYDIAPEVGADNMRFLAGIRSEENRTAAEKALIKGKSPDTVKIQVRDKGKDKDENPKEKLEKEKTRLERTIASLRKRLDEVNRELVNKDWKK

SEQ ID NO: 41493 - DNA, 471 bp, Unknown
  Obtained from environmental sample
  misc_feature (1)..(471): n is a, c, g, or t
ttggaagaaatgaacacaaaagtcgctattaatcgctgtgacgcgtatgaatcggataaattgaatatctcgttaaaaaatgcggcgacatccgcgaatttaccgaatcttgctggtcagacagttctgttaaagccgaatattcttatggattcggctcccgaaaaagccgttaccaccaaccctgtttttctcgaagcggttatgcgtttggtttgggagtggggcgcttcccgtattttggtgggggacagtcccggtattcaagggcctaattttaccgcgcgcagctgcgggataggggacgttgtaaaaaagtgcggcgcagaatgngccgatttttccagaggcacaatggagttagcctgtccggaaggaaaaactcataaaagtttttaccatagcaaggttttacaagatgttgattttgtggttaacgtcccgaagctaaaaactcatcagcttatgtaa

SEQ ID NO: 41494 - protein, 156 aa, Unknown
  Obtained from environmental sample
  misc_feature (1)..(156): Xaa is any amino acid
MEEMNTKVAINRCDAYESDKLNISLKNAATSANLPNLAGQTVLLKPNILMDSAPEKAVTTNPVFLEAVMRLVWEWGASRILVGDSPGIQGPNFTARSCGIGDVVKKCGAEXADFSRGTMELACPEGKTHKSFYHSKVLQDVDFVVNVPKLKTHQLM

SEQ ID NO: 41495 - DNA, 561 bp, Unknown
  Obtained from environmental sample
  misc_feature (1)..(561): n is a, c, g, or t
atgattgtcgatctaaataccgcgattaaaaagcccgtgtacgctttcatggacgccgttacagcgatggaagggcccggcccttccgcgggaacgcccaaacaggtcggccttattcttgcttcagccaaccttttggcgatggacgttgcggcaagctctattgtgggatatcctccgcagttgattcctgtaaataaagaagcccttgagcgtaaaatctggcttaatgatttttctgaaattgaatatccgcttttaaaaccgcaagaagttatggttagggattttatcaagattccttttaagaaaaccgccagccagcttttggattttatcactccaggacctttaaaaaatttattcgcgtccaaaaatcccctgcctgttataaacggcaatatttgcgtctgttgttctgactgcgtaaaagtctgcgcgtcaaacgcgataaagctcgcgaatcaggaaggtaaaatgcggattgtaattgacaaagatctttgtatacgctgttattgctgtcacgaaatgtgtcctgaaaaagcgattaaagtttag

SEQ ID NO: 41496 - protein, 186 aa, Unknown
  Obtained from environmental sample
  DOMAIN (162)...(185): 4Fe-4S binding domain
  misc_feature (1)..(186): Xaa is any amino acid
MIVDLNTAIKKPVYAFMDAVTAMEGPGPSAGTPKQVGLILASANLLAMDVAASSIVGYPPQLIPVNKEALERKIWLNDFSEIEYPLLKPQEVMVRDFIKIPFKKTASQLLDFITPGPLKNLFASKNPLPVINGNICVCCSDCVKVCASNAIKLANQEGKMRIVIDKDLCIRCYCCHEMCPEKAIKV

SEQ ID NO: 41497 - DNA, 477 bp, Unknown
  Obtained from environmental sample
  misc_feature (1)..(477): n is a, c, g, or t
ttgatggccttggtgaacacgcctttgaagacgatattgaaggtgttagcaagcaaggcggcacacatccttttagggactgcaaatacaaaggcgcaggcattttggtttccaatcgcaattttggatgcggttccagcagagagcatcaccacaggctctaatgcggttgggataaaagcgataatagccgaaagctatagcgaaattttctttggaaactgcgtttccataggcatcccctgttttgttgcaaaccacgaaacagcagaggaaattttagattgcatagagaaaaatccatctgttgaattttctgtgagcgttaaggaacttaaagccaagtttggcgaaaaatcttatgagcttaaattggcagatggaccgcgcgggcagtttttagacggctcttggcacgctcggagcgttttgcttttgaacaaggaaaaaattgaagccctggcaaactcactatga

SEQ ID NO: 41498 - protein, 158 aa, Unknown
  Obtained from environmental sample
  misc_feature (1)..(158): Xaa is any amino acid
MMALVNTPLKTILKVLASKAAHILLGTANTKAQAFWFPIAILDAVPAESITTGSNAVGIKAIIAESYSEIFFGNCVSIGIPCFVANHETAEEILDCIEKNPSVEFSVSVKELKAKFGEKSYELKLADGPRGQFLDGSWHARSVLLLNKEKIEALANSL

SEQ ID NO: 41499 - DNA, 1206 bp, Unknown
  Obtained from environmental sample
  misc_feature (1)..(1206): n is a, c, g, or t
gtgccaacaccaccaataccagtaccgcaagataatctaccagaaccggtagtaccactagtgccagctcaacctataccagagcaattagtaccgactgcacagccccagccaccaatgccagtgtcattgcctaaagaccctaaagacacgttgccactgccacccttgccaccactgccgccaatgccattaccgcaagactcaacaccggtagcaccaccgccaaccgacagcgtaaaaatagcacctacacctgcgtcgctgccgcaagaggcagcgccacaggtagtgtcaccgaaaactgacagcgcaagcataacacccgcacccgcaccaaaagatacaactccgcaaaaaccgtcgttgccagtgaataccataacagttgaccttggacccacgattatcggtgtgggcatagacgcggctgctaaaactctcggaaaaaaactgaaaaatgtggatatatccgcttttggctttgcagtgcaatatgaatatcagcctattaggtttttgagtttgccactccgatttgcctatatggattttgaaacaaaggtaaaagcagaaaaagattttgaaaaggatcttcactatacatacccaggcgacctgtcagcaaacccacctattccacctattacatttgacacatcatttaccataccgcttgaagctacacttaaagccaagctttccatttggtctatagaagctcacccacgtttatatccttttggaggttctttttttgtggaaggaatgataggttatgcaaacttgtcaacagatttttcaggcaaagcccttatcagcgtagaaatagacgcaccggagctacctgagttgcctgagctacctgagcttggcgaacttgaccctgaaggccctatgagaatagactccgttgttgccgttaaacttaaagcatcaagaagttatttaaagtatggcggcaaactcggatggcgtgtggattttggcgatccgggtggacttatttttgaatacgcaattggattttatggcgcaagcgggcttggtaaaaaaacaatagttaagcaattagcagattatgttgagaaagaatatgatgcaaaagcggaaactgaaaaatttgacgatgctttctcaatgcttgaaaaaatcatatttgtgggcggacctcgttgtacgtttgcctttggatggaggttttga

SEQ ID NO: 41500 - protein, 401 aa, Unknown
  Obtained from environmental sample
  misc_feature (1)..(401): Xaa is any amino acid
MPTPPIPVPQDNLPEPVVPLVPAQPIPEQLVPTAQPQPPMPVSLPKDPKDTLPLPPLPPLPPMPLPQDSTPVAPPPTDSVKIAPTPASLPQEAAPQVVSPKTDSASITPAPAPKDTTPQKPSLPVNTITVDLGPTIIGVGIDAAAKTLGKKLKNVDISAFGFAVQYEYQPIRFLSLPLRFAYMDFETKVKAEKDFEKDLHYTYPGDLSANPPIPPITFDTSFTIPLEATLKAKLSIWSIEAHPRLYPFGGSFFVEGMIGYANLSTDFSGKALISVEIDAPELPELPELPELGELDPEGPMRIDSVVAVKLKASRSYLKYGGKLGWRVDFGDPGGLIFEYAIGFYGASGLGKKTIVKQLADYVEKEYDAKAETEKFDDAFSMLEKIIFVGGPRCTFAFGWRF

SEQ ID NO: 41501 - DNA, 354 bp, Unknown
  Obtained from environmental sample
  misc_feature (1)..(354): n is a, c, g, or t
atgcccacaccgataatcgtgggtccaaggtcaactgttatggtattcactggcaacgacggtttttgcggagttgtatcttttggtgcgggtgcgggtgttatgcttgcgctgtcagttttcggtgacactacctgtggcgctgcctcttgcggcagcgacgcaggtgtaggtgctatttttacgctgtcggttggcggtggtgctaccggtgttgagtcttgcggtaatggcattggcggcagtggtggcaagggtggcagtggcaacgtgtctttagggtctttaggcaatgacactggcattggtggctggggctgtgcagtcggtactaattgctctggtataggttga

SEQ ID NO: 41502 - protein, 117 aa, Unknown
  Obtained from environmental sample
  misc_feature (1)..(117): Xaa is any amino acid
MPTPIIVGPRSTVMVFTGNDGFCGVVSFGAGAGVMLALSVFGDTTCGAASCGSDAGVGAIFTLSVGGGATGVESCGNGIGGSGGKGGSGNVSLGSLGNDTGIGGWGCAVGTNCSGIG

SEQ ID NO: 41503 - DNA, 405 bp, Unknown
  Obtained from environmental sample
  misc_feature (1)..(405): n is a, c, g, or t
atgggggttttcatcccgctgattgttgttaattgcattatcatgggccgtgtggaaggctttgcctcaaaacgcccgttacgcgattgccttgccgattccctgggcatgggcctgggctatacatgggtgcttgccggtatcgcgctggtccgagagcttttgggcaacggcactattctgaattttcaggtgatgccgttaggctatcagccgctgcttttcttcgtgctgccgccggggggcttctttgttttcgccctgtttatcgcccttaatatctacatcaagtcgcggctgaaggatccttccgcggctgatagcggcgaaggctttggctgctgtaaaccgaataattgcgccgccgcttgcggcgcggttaaagacgctgggggtaaagaatga

SEQ ID NO: 41504 - protein, 134 aa, Unknown
  Obtained from environmental sample
  DOMAIN (2)...(91): Rnf-Nqr subunit, membrane protein
  misc_feature (1)..(134): Xaa is any amino acid
MGVFIPLIVVNCIIMGRVEGFASKRPLRDCLADSLGMGLGYTWVLAGIALVRELLGNGTILNFQVMPLGYQPLLFFVLPPGGFFVFALFIALNIYIKSRLKDPSAADSGEGFGCCKPNNCAAACGAVKDAGGKE

SEQ ID NO: 41505 - DNA, 1248 bp, Unknown
  Obtained from environmental sample
  misc_feature (1)..(1248): n is a, c, g, or t
atgcacaacgaatttacattgtatttcaggaaggttccatcggggaaaaggctgttttattactatgcctatgatgacgaagggaataggctggggccgtgggctacggggcagtccaccaaaacaggggcaaagaattactgcattggccttgtcaggttggggaaactattgccggggacaaaggagatgccgactttctccgaatttgcgtccagtttttgggattgggaaaaaagcgaatacataaaagagcgattgaagcggcgcaagcttacgcaagcctacgcagacaaaaacaagaaggtagccgagcacacgctagtcccctatttcggaaatatgaaactggacaaaatatcgggggaggacattgacaaatggcttgatcacatgattgcggaaaagtacgagaattcaaccactaacggctatttcggcacaatgcaaacaatgatgaaatgggcggcaaagaaaaagattattgacagagacccattccttgacgttcaaaaacttcttaacgaaaagacggacaagaaaataatcacgcctgacgaattcaaagccctttttgtagacgactggaaaaaagtttggggcaacgatttactgcgttgtaccgccaacaaagtagcggctttaactggcatgaggtgctgtgaggtgctggggatgaggggagaatatgtatatgacgaccatatctatttatgcgggcaatatgacgaatacggctaccgtgaaaccaagaccaagattaaacaccatattccccttaccgccgaattggtaaaggatttgagaaagcttatgaaggcaaacggacaaggctatatcttctctcttgacggcggggctacgcctgttacccgtatgcacatattcaaaggcttaaaaaaagcgtttaacaatatcgggataaccaacgaagagataggggaacgtgggcttaatatccatgcgtggcggcatttctgcaatacggaactgcaaaaggcggggttgacaatccagaaagtacaggcggttacagggcataagacagagggcatgactgaacggtacacgcattttgacccgcttgatttcggggaagtcccaaaaatacaggcggaactgctgaaaaagaagcataaaaagccggaaacccaaataagcgaagcggcggggaatgaacgcccagcctttacccttgtaaagccacaggaagatgacaaggccggaaggaaaagaaaagcgtcctag

SEQ ID NO: 41506 - protein, 415 aa, Unknown
  Obtained from environmental sample
  DOMAIN (199)...(366): Phage integrase family
  misc_feature (1)..(415): Xaa is any amino acid
MHNEFTLYFRKVPSGKRLFYYYAYDDEGNRLGPWATGQSTKTGAKNYCIGLVRLGKLLPGTKEMPTFSEFASSFWDWEKSEYIKERLKRRKLTQAYADKNKKVAEHTLVPYFGNMKLDKISGEDIDKWLDHMIAEKYENSTTNGYFGTMQTMMKWAAKKKIIDRDPFLDVQKLLNEKTDKKIITPDEFKALFVDDWKKVWGNDLLRCTANKVAALTGMRCCEVLGMRGEYVYDDHIYLCGQYDEYGYRETKTKIKHHIPLTAELVKDLRKLMKANGQGYIFSLDGGATPVTRMHIFKGLKKAFNNIGITNEEIGERGLNIHAWRHFCNTELQKAGLTIQKVQAVTGHKTEGMTERYTHFDPLDFGEVPKIQAELLKKKHKKPETQISEAAGNERPAFTLVKPQEDDKAGRKRKAS

SEQ ID NO: 41507 - DNA, 1842 bp, Unknown
  Obtained from environmental sample
  misc_feature (1)..(1842): n is a, c, g, or t
ttgtcgccgcccataacgcgctacaaccgcaaagcgattgtggtaaaagggtattccagcgacgccaacgacattgaagaggttttcttgtcaatggacaatgccaacacctaccagaaagtgaagctggccgctgacggtaattgggaactggccctcaataccgctgattataccgacggcatttattcggcgctgatacataccattgacaaatacggcgtttcttcctattccaacgccatgatcaatatagataatacggcgccggaacttttcatcaccgctccggtggacggtcagcatgtgggaaccgaaatgcgtttaacgggccgggtgactgacaatctgtccatgaaaagcctgacgtaccaggtcatcagcgcggcaaacccccgccagcggcagaccattaacgcgcagccccggctggttctgtttgacaagatcgaccttaccgggtttccccagggcgagtatgtaatacgggttgttgcgacggatcttgcgggtaacgagactcttgtttcacggaagtttatttatgacgccgatgacaaggctgcggaaattgccatttataaccctctgcccggcgaagttcattcaggtcccctgcatattgtcgggatcgttaccggagcgttccagcccgcggaagtccagttgattatgaatgatcagccgttggcgctggtgccggtagagcgttatgggatattccgttatgaagttcccgaagaaatgctggtcgaagaaaaggcctacaaaatatcggcatattacaattccgaaaccaacaaaaaaatctcaagcccggatcataccgtgtactattccactttcggcccgatacttcaggtggaaagccacggagacggtgatgccataacgggacggccatggctttcaggtcacgcctggtttaccattcccgaacccggcgaagaggatcccccccttacccgcgctcagttggcgcagcaaaaaacagagcaaaaggtaaaacgcattacggtaagccatgataatggccgtacctttaagtcaaccagaggcagcggtgaaaaatggaaagtccgtctggagaccagtgagcttccccgcggaccgcagccgattttggtaaaggcggtatttgccaacggtgaagaagcggtacgccgtttgatggtatatgttgataccatactcccgcaggtggaaaccatttccccgccggaggacagcgtccatcgtgacaatattgaggtctatggaaccgccggtgacaattatgaccttgccaatgtggatatcagcctgcgtccgggcgataaattcttttactcggttccgcccgcgatacgcggtatgtatttcgacgttaaaggctttggggctacttacgttgacgtagggttgggcttaagtttctttagtgataatgtgcgcttgcaggctcaatttggttttgcgccggtggatggaaccaacacttcatactctattggcggacgctatgtcggttctgtatacggcgtaaagttattggcgaatattttctatttgccttttgcctggttgttcgggcttgactgggccttttactcgatgaacttcgcgttgggggcaaatttttcctactttaccatggatgactggcgcagtcccctgttcatgggcgctgtagtggcgcagtgggatatagccaatattaatatgcagtacttctatcctaactggaaatatttcaggaattacgcgctgtatgtggaaccggaattgtggtttgcttcttccgatgtcaaagcggatattatattcaggatgacggtcggcatgagggttaactggttttag

SEQ ID NO: 41508 - protein, 613 aa, Unknown
  Obtained from environmental sample
  misc_feature (1)..(613): Xaa is any amino acid
MSPPITRYNRKAIVVKGYSSDANDIEEVFLSMDNANTYQKVKLAADGNWELALNTADYTDGIYSALIHTIDKYGVSSYSNAMINIDNTAPELFITAPVDGQHVGTEMRLTGRVTDNLSMKSLTYQVISAANPRQRQTINAQPRLVLFDKIDLTGFPQGEYVIRVVATDLAGNETLVSRKFIYDADDKAAEIAIYNPLPGEVHSGPLHIVGIVTGAFQPAEVQLIMNDQPLALVPVERYGIFRYEVPEEMLVEEKAYKISAYYNSETNKKISSPDHTVYYSTFGPILQVESHGDGDAITGRPWLSGHAWFTIPEPGEEDPPLTRAQLAQQKTEQKVKRITVSHDNGRTFKSTRGSGEKWKVRLETSELPRGPQPILVKAVFANGEEAVRRLMVYVDTILPQVETISPPEDSVHRDNIEVYGTAGDNYDLANVDISLRPGDKFFYSVPPAIRGMYFDVKGFGATYVDVGLGLSFFSDNVRLQAQFGFAPVDGTNTSYSIGGRYVGSVYGVKLLANIFYLPFAWLFGLDWAFYSMNFALGANFSYFTMDDWRSPLFMGAVVAQWDIANINMQYFYPNWKYFRNYALYVEPELWFASSDVKADIIFRMTVGMRVNWF

SEQ ID NO: 41509 - DNA, 738 bp, Unknown
  Obtained from environmental sample
  misc_feature (1)..(738): n is a, c, g, or t
atgagaatccgcgcccttaacgtagaaacctccgaagtgcagggacagtacaaccgcaacatatccgccagcaaattgattatcgcattgatgaaggggggaaaatcggctaacaccatttacggcgcaagaaacgcaacgccaacaacaagctacccgcagggtagcacatcagcgcagacagcaatccccctttacaaaatcggcggcacaggacccgcaggtggcttgattttttacgacaagggaaacaatagaggcggctggcggtatatggaagccgcgccgtcggacacaggaatacaaatttgggctcccaatgtagacaggtcttatgaataccctaaccccggtgaaacaataagatgggggaaattaataacaacggcattgggcagggggaaagagaacaccgaagaaataatggatgtaataagccggcagagcggagggttcggctgggcaatacgtgtagtttctgaattgaatattaacggctttgatgattggttcttgccaagcagggacgaactcaactttatgtacggcaatttgtatcttaaagagttgggaaatttcagggcagggctgtattggacttcatcgcttggcagtgacggtcaaggttatgtcaggaatgttcacgcaatagatttctccacaggcaaatctgatgaatatagttttgttcgtcataatgaccaaagaggcaatatccgagcagccagacggttttaa

SEQ ID NO: 41510 - protein, 245 aa, Unknown
  Obtained from environmental sample
  misc_feature (1)..(245): Xaa is any amino acid
MRIRALNVETSEVQGQYNRNISASKLIIALMKGGKSANTIYGARNATPTTSYPQGSTSAQTAIPLYKIGGTGPAGGLIFYDKGNNRGGWRYMEAAPSDTGIQIWAPNVDRSYEYPNPGETIRWGKLITTALGRGKENTEEIMDVISRQSGGFGWAIRVVSELNINGFDDWFLPSRDELNFMYGNLYLKELGNFRAGLYWTSSLGSDGQGYVRNVHAIDFSTGKSDEYSFVRHNDQRGNIRAARRF

SEQ ID NO: 41511 - DNA, 423 bp, Unknown
  Obtained from environmental sample
  misc_feature (1)..(423): n is a, c, g, or t
atggaagttctgatcgatactaatgtcgctttggacgttatacttaataatgccggattttccgccaatgccagagtagtccttgaacttgccgaacaaaagcgtttcaccggatatatttccgcttcggcgataactgacatcttctatatctcccgtaaaaaattgggtaaagaaaccgcgcgagaagctataaaacatctgctgcatattttttaccctgctactgtaacagacaacaatatctatcaggcgcttgatttggaatgggatgattttgaggactctgttcaatatgtcgttggagaagggcttgctgttgattatatagttaccagaaatattaaggattttgtctccggttccattcccgcagtaaccccggaacagtttattgagattattaccgatattaaagaataa

SEQ ID NO: 41512 - protein, 140 aa, Unknown
  Obtained from environmental sample
  misc_feature (1)..(140): Xaa is any amino acid
MEVLIDTNVALDVILNNAGFSANARVVLELAEQKRFTGYISASAITDIFYISRKKLGKETAREAIKHLLHIFYPATVTDNNIYQALDLEWDDFEDSVQYVVGEGLAVDYIVTRNIKDFVSGSIPAVTPEQFIEIITDIKE

SEQ ID NO: 41513 - DNA, 1323 bp, Unknown
  Obtained from environmental sample
  misc_feature (1)..(1323): n is a, c, g, or t
gtggacatagactacatagaagtgggaccgtacgtctccgaaccgttcacaatcagcgggtcgccggttacgccgaacgcgtcgccgaacgcccgtaaggtgtacggttttttgcgggacaatttccagaagaaggtgataagcggcgtcatgaccaataccgtgacacaaaccgacggcaagtacacgcccaacactcccgacaatcaggcggagatggcgcatataaagagcgtttcaggcaagctgccggcgctcatgggggtagacttcatgcacagcaccggcaagaaggcggacgacgagtggtacgtgggctacaccaatggaacgctgtcgctcgccgaggagttcttcaaaaggggcgggattcccatatactgttggcactggcgggatccgctcaaaaacgacgaggagttctattcggaaaaaacaaagttcgatctgaccaaggcgtttaagagcgcaaattatacggagacaaactttaacgagagcagcgcagagtacaagggaatagtcgcggacatcgaccgtatcgcaagttacttgaaggggcttgccgataaagatattccggtgttatggcgcccgctgcacgaggctgccggcggatggttctggtggggacgcgacaaaaagccggagccgtgccgggcgctgtaccgattcatgttcgataggatggtacgccaccacgggctcaacaacctgatatgggtatggaccacggaggagtccgggcgggagcttgattggtaccccggcgacgacgtcgtggatatcgtcggccgcgactactacccgaatcccgaccagcgtgcgaaggagcacggctcacgtgtggcgtcattcgagaacatcaagggaattttcggcgcgaagaagatcatcgccctaagcgaaaacggcgccctaccccaccccgacagcctcgtggccgacggagcggagtggtcgtggttcatgccgtggtacggcgacttcacgacagacgtcaatgttccggcgatatggaatcaaactatgaaccacagctacgttataacgcttgacaaaatgcctggttgggacaaatacaatgtgacgtcgatatgtaaaatgataccggtcgcgtcggcgacgcaatcgcgtgtcaccgtaaagtcttaccgcaattcattgatgctgaacgttaaagggatggacgtgcgaggcgtggaattgtttgatttacgcggcgtgaggaatgctgtttttgagcagaataaattggatgacgggaagtataatttttcaaccaacgggttggcggcgccagattgtgtttcctcaaggtga

SEQ ID NO: 41514 - protein, 440 aa, Unknown
  Obtained from environmental sample
  DOMAIN (23)...(354): Glycosyl hydrolase family 26
  misc_feature (1)..(440): Xaa is any amino acid
MDIDYIEVGPYVSEPFTISGSPVTPNASPNARKVYGFLRDNFQKKVISGVMTNTVTQTDGKYTPNTPDNQAEMAHIKSVSGKLPALMGVDFMHSTGKKADDEWYVGYTNGTLSLAEEFFKRGGIPIYCWHWRDPLKNDEEFYSEKTKFDLTKAFKSANYTETNFNESSAEYKGIVADIDRIASYLKGLADKDIPVLWRPLHEAAGGWFWWGRDKKPEPCRALYRFMFDRMVRHHGLNNLIWVWTTEESGRELDWYPGDDVVDIVGRDYYPNPDQRAKEHGSRVASFENIKGIFGAKKIIALSENGALPHPDSLVADGAEWSWFMPWYGDFTTDVNVPAIWNQTMNHSYVITLDKMPGWDKYNVTSICKMIPVASATQSRVTVKSYRNSLMLNVKGMDVRGVELFDLRGVRNAVFEQNKLDDGKYNFSTNGLAAPDCVSSR

SEQ ID NO: 41515 - DNA, 621 bp, Unknown
  Obtained from environmental sample
  misc_feature (1)..(621): n is a, c, g, or t
atggcctgccggaacgcgctcttgggcaaaacgggcgacgcaatgcagtttgaggtctacgagcagacgatgtcggaggccgccgcgatgcttgccttcgtccgcgtggaagcggtgcgggagctgtccgcattgacaggcgatttttacgctgaaatcagcggcggcgccgaagccgcctctgtggagtacgcgcccaaaattaaatgcgatatttttgacgcaaaggagtggcaaaatgcatatttagtattgttggcggagcgtcgcgaaagggatgccgaactccagtacacggcggtcggcccgcaccgcgacgacctgcggttcgcgctgggcggcagggcggcgaagagccacgcgtcgcagggccaatgccgcagtttcgccctctccctgaaactcgcctcggcgcggttcatagagcaaaaacgcggcggcggcatggtctttctcgtagacgacgccgtctcggaactcgatccggagaggacgtcgcgggtatacccgctgctggaaggcaggggccaagtcttcatagcaacgccccgctgccaagcggcgctgggcgggagggtattacggtgcgcggtagaatcgggaaaagtaaagacgacgtga

SEQ ID NO: 41516 - protein, 206 aa, Unknown
  Obtained from environmental sample
  misc_feature (1)..(206): Xaa is any amino acid
MACRNALLGKTGDAMQFEVYEQTMSEAAAMLAFVRVEAVRELSALTGDFYAEISGGAEAASVEYAPKIKCDIFDAKEWQNAYLVLLAERRERDAELQYTAVGPHRDDLRFALGGRAAKSHASQGQCRSFALSLKLASARFIEQKRGGGMVFLVDDAVSELDPERTSRVYPLLEGRGQVFIATPRCQAALGGRVLRCAVESGKVKTT

SEQ ID NO: 41517 - DNA, 339 bp, Unknown
  Obtained from environmental sample
  misc_feature (1)..(339): n is a, c, g, or t
gtggcaaaaaaatacagcgacgaccctggcagcaaggacaagggcggcctttacgaaaacttcgacccggcggggatggtcccggaattcgccgaggcagtccgcacacaggcgataggcgtggtgggcccgccggtcaagacccagttcggctaccacatgatattggtcgagtcccgcgcacccgcgcggacgcagacctttgaggaggcgaaggccaaggtccgctcccaagtcgtcaacaagatactgacggactcctggacagcccacttcgattcgctgaaggcggagcttgggtactccgaggttgacgagccaccggcaggggacaaatag

SEQ ID NO: 41518 - protein, 112 aa, Unknown
  Obtained from environmental sample
  DOMAIN (1)...(59): PPIC-type PPIASE domain
  misc_feature (1)..(112): Xaa is any amino acid
MAKKYSDDPGSKDKGGLYENFDPAGMVPEFAEAVRTQAIGVVGPPVKTQFGYHMILVESRAPARTQTFEEAKAKVRSQVVNKILTDSWTAHFDSLKAELGYSEVDEPPAGDK

SEQ ID NO: 41519 - DNA, 534 bp, Unknown
  Obtained from environmental sample
  misc_feature (1)..(534): n is a, c, g, or t
gtgctggagaccgacaaggactacatattcgtccaactgatgcccagggagtccgagggcgcccagccccttcgaggcggtcaaagaccagatagtcgcaaaattgcaggagcccagggcaaaaaacgccctccagttgtacctgcagtcccagcggctccgcgccaacatacgctacatggtgcccaaggagcagatagtcaagggttaggcatgaggctagaccaatttctgaaaaccacgcatctggtcaagcgcagggagcttgccaaggaactgtgcgacgacggctgcgtccgcataaacggctccccccgcaagccaggggccgaggtgtcgcagggcgacgtgctggaattccctgtctataaccgtatgctcaaggtcagggtgctggacatccccaagggcaacgcccccaagggcagccagtggtctttcatagagattctcgaggaaaaacgcttccccattgacgacggcttcgccaccgacttccccggcagccaggccaagccgccgacgtaccattga

SEQ ID NO: 41520 - protein, 177 aa, Unknown
  Obtained from environmental sample
  DOMAIN (72)...(118): S4 domain
  misc_feature (1)..(177): Xaa is any amino acid
MLETDKDYIFVQLMPRESEGAQPLRGGQRPDSRKIAGAQGKKRPPVVPAVPAAPRQHTLHGAQGADSQGLGMRLDQFLKTTHLVKRRELAKELCDDGCVRINGSPRKPGAEVSQGDVLEFPVYNRMLKVRVLDIPKGNAPKGSQWSFIEILEEKRFPIDDGFATDFPGSQAKPPTYH

SEQ ID NO: 41521 - DNA, 897 bp, Unknown
  Obtained from environmental sample
  misc_feature (1)..(897): n is a, c, g, or t
ttgatgcgcgattttgccgagcccaaaacagaaaatgaagcgaagcggctaaatttgctggcaacgctaattgccgatggtagccttgatattaaaattgcattcactctgaacgatagcaagataagcatttatcatgaaaagtttggagttattactgatgcaaagggcaatcaggttgctttcgcaggctctacaaacgagtccgcgcttgcttacgtacacaactacgaggcaattgacgtttattgttcttggcagacagagtttgagcaaaagaaaatatacgagaaagatttagcgtttcatcggctttggactaatgccgatgcggcgattactactattgattttccagacgttgctcgcgaacggctcgtgtcatataaaagacctgattttgataataacattgacattattgatacagcggacgatattccagaacaaagcgcgccagtgctcgttcaacccaaagatgtatttagactccctgccgataaaaatctacgcccataccaaaaggaagcgattaaaaaatggattgctgctggcggtcgaggcatatttgacatggctacaggctctggaaagacatatacgggactgggggcggttagcgcattgtcgcagtcgctcggcgataatttagccgtttttattgtctgcccataccagcatttagtcgaacaatgggtagaagatatacgcgtgttcaatgttgaaccgctgatatgctattcgagttataattcgagttataagtggaaagaaagatttcagcaaaaaatgaaacactttaggcttggcgtagtcaagagcttttgcgcgattttcgttaaagactcatttgcaaaagaaatggttcaatctgaggttgcgaaaacgaaaaggtaa

SEQ ID NO: 41522 - protein, 298 aa, Unknown
  Obtained from environmental sample
  DOMAIN (167)...(273): Type III restriction enzyme, res subunit
  misc_feature (1)..(298): Xaa is any amino acid
MMRDFAEPKTENEAKRLNLLATLIADGSLDIKIAFTLNDSKISIYHEKFGVITDAKGNQVAFAGSTNESALAYVHNYEAIDVYCSWQTEFEQKKIYEKDLAFHRLWTNADAAITTIDFPDVARERLVSYKRPDFDNNIDIIDTADDIPEQSAPVLVQPKDVFRLPADKNLRPYQKEAIKKWIAAGGRGIFDMATGSGKTYTGLGAVSALSQSLGDNLAVFIVCPYQHLVEQWVEDIRVFNVEPLICYSSYNSSYKWKERFQQKMKHFRLGVVKSFCAIFVKDSFAKEMVQSEVAKTKR

SEQ ID NO: 41523 - DNA, 702 bp, Unknown
  Obtained from environmental sample
  misc_feature (1)..(702): n is a, c, g, or t
gtgaccacgtgccagcagtcatacaacgggctctacttcacaagcgccaaataccccgagtaccgcgagtacctaatccaccaccccggcacggcgagcaggcacatcataccgacccttgtaaatcccgagtacgtggagaacacaagaatagtctacgcttcaagcgaacttcagtcggtctcgccccaaacgcggcgcaccgtcttcaacgctttcctcttcgcccacacaaacaagataatggtcgcctacgactccaacctgcgcctccagcgctggtcgctcgaagacgctaaggagagtttgtggagcgtgctgtcgctggtggacgtcttcttcgtctccagcccggaggagtccaaggcgctattcggctacgagcggccgcttgacgtggtaggcttcctgctgaacaggggcgtgggcacggtggtggtcaagatgggcgccgacggatgcatgatcggccatgacaagagcatcagagccttcccgcagcccgccgacgacggaagctgcccgttcaagacgccggcgctcgttggcagcgcgttcaacggggcattcctgaacagcatagccaacggctacgacccgttcgcggcggcggagttggcgaactccgtggcgctgtttaaggggataaagggatggggtattgattcactgccgacagtggacgacttccgcaaagagtag

SEQ ID NO: 41524 - protein, 233 aa, Unknown
  Obtained from environmental sample
  misc_feature (1)..(233): Xaa is any amino acid
MTTCQQSYNGLYFTSAKYPEYREYLIHHPGTASRHIIPTLVNPEYVENTRIVYASSELQSVSPQTRRTVFNAFLFAHTNKIMVAYDSNLRLQRWSLEDAKESLWSVLSLVDVFFVSSPEESKALFGYERPLDVVGFLLNRGVGTVVVKMGADGCMIGHDKSIRAFPQPADDGSCPFKTPALVGSAFNGAFLNSIANGYDPFAAAELANSVALFKGIKGWGIDSLPTVDDFRKE

SEQ ID NO: 41525 - DNA, 840 bp, Unknown
  Obtained from environmental sample
  misc_feature (1)..(840): n is a, c, g, or t
gtgacctctgcctttgttctcatagacaagccagctggcataacatcttttagaacgctcaggggcataaaaacgcagtttggcacaaagagggtgggccacgccggaaccttagaccaggcggcgagcggcttgatagttgccgcggttggcaaatgcacaaggctgttgccttatatagaagcacaagaaaaagtttactccttcaatctgcatcttgggattttaaccgacaccttggagcctacggggaacgtcctaaagcaggacaataacgctgcgagaacggcggagcaaatagaggcggttttgcaaacctttataggcgagattgagcaggttccgcctgcgtatagcgcgataaagataaacggcaaaagggccagcgatttggcattgaaaggccaaaatatagaactaaagccccgacatacttacataagcgaattaaaaatgcttcccacacccaataccccgcacactgacctaatatacccgctatactgccgttgctcaaaaggaacctacattcgctcccttgccagagacatagccgaaaaacttgggacttgcggcgttgccgacaaaataagacgcctagccataggcagcatttccgtggagcaggcctcggacaaaccaattttgccccaagagctttttaactgggaaatcgccgaaataggggaagaagacgcaaaaaaaatcctaaacggagtgcctgtagccaacagcgttttatcggcatcaaaatccatggcttttatctcaaataacggtcaaatcatcgccgccgcggaatgtcaaaacaactaccttgtaccaaagttcctattatag

SEQ ID NO: 41526 - protein, 279 aa, Unknown
  Obtained from environmental sample
  DOMAIN (24)...(177): TruB family pseudouridylate synthase (N terminal domain)
  misc_feature (1)..(279): Xaa is any amino acid
MTSAFVLIDKPAGITSFRTLRGIKTQFGTKRVGHAGTLDQAASGLIVAAVGKCTRLLPYIEAQEKVYSFNLHLGILTDTLEPTGNVLKQDNNAARTAEQIEAVLQTFIGEIEQVPPAYSAIKINGKRASDLALKGQNIELKPRHTYISELKMLPTPNTPHTDLIYPLYCRCSKGTYIRSLARDIAEKLGTCGVADKIRRLAIGSISVEQASDKPILPQELFNWEIAEIGEEDAKKILNGVPVANSVLSASKSMAFISNNGQIIAAAECQNNYLVPKFLL

SEQ ID NO: 41527 - DNA, 420 bp, Unknown
  Obtained from environmental sample
  misc_feature (1)..(420): n is a, c, g, or t
atgtctaaaaaactcccgaagtttgctccgctcactttggacttcactttcaaaaaagcctttgccaacgagcaatgcacggaactccttttgtttctgctcaacatttttcttgccgaaaagctgaaaagctccattaaaaaagtaaatataataagcagtgagcagcttggaaaaacaagactcaacagaaacgccgtgttcgatgtctattgcgaggatgccacaggctctaggttcattgtggaaattcaggttaaagggcaggaacattttattaagcggactttcttttatctttgcatgattataagcaaccttgccaccaaaggaaaaaagtacgatttcaacattcccaagctctattccataagtttcttagattttaccttaacttcggtaaaggctgtacagaggtaa

SEQ ID NO: 41528 - protein, 139 aa, Unknown
  Obtained from environmental sample
  misc_feature (1)..(139): Xaa is any amino acid
MSKKLPKFAPLTLDFTFKKAFANEQCTELLLFLLNIFLAEKLKSSIKKVNIISSEQLGKTRLNRNAVFDVYCEDATGSRFIVEIQVKGQEHFIKRTFFYLCMIISNLATKGKKYDFNIPKLYSISFLDFTLTSVKAVQR

SEQ ID NO: 41529 - DNA, 558 bp, Unknown
  Obtained from environmental sample
  misc_feature (1)..(558): n is a, c, g, or t
atgtgcgcagaaagccgcgtccccgagatcatggacaattacagaaagctatgcgcgtactgcgactctatttggaaccgcgtacgcgaagcctatccgaatgaaatcgcatgtaggaaaggttgcgggatatgctgcgaattgcagtctgtcaatcagatcgaggcttacgctatccgttcttacatcgttaataataaaaatcttttaggtgatatacgtattgatatcgataatacggatgcctgcccgttcctacgccggcaagcctgcgcaatctaccccgcccgcccaataatctgccgcacccacggcttgatcctgcgttcgtccgagttcccgctgtcgcgccaagcctcaagctgcccgtacaacttcccatccatccatccggacgacttcccgccggaactagcggtagacgtagatctcatcacaaaaaacctagtcaacctaaacctcgcgttccgcttggcaagcgacgttgacgtcagagatgagacggaaggcgcggaaagcagggtgcttttgcgcgatttggcttgggcgactggttga

SEQ ID NO: 41530 - protein, 185 aa, Unknown
  Obtained from environmental sample
  DOMAIN (36)...(108): Uncharacterised protein family (UPF0153)
  misc_feature (1)..(185): Xaa is any amino acid
MCAESRVPEIMDNYRKLCAYCDSIWNRVREAYPNEIACRKGCGICCELQSVNQIEAYAIRSYIVNNKNLLGDIRIDIDNTDACPFLRRQACAIYPARPIICRTHGLILRSSEFPLSRQASSCPYNFPSIHPDDFPPELAVDVDLITKNLVNLNLAFRLASDVDVRDETEGAESRVLLRDLAWATG

SEQ ID NO: 41531 - DNA, 816 bp, Unknown
  Obtained from environmental sample
  misc_feature (1)..(816): n is a, c, g, or t
gtgattattataatgggttccggagcggaaacctgcgaggaaaccgttgattaccttaactcaaagggagagaaagtcggcatggtaaaagtccacctgtaccgcccctttgacgtaagcctctttgtaaaagccctgccgtccacggtaaaagccattgccgtgcttgaccgtaccaaagagcccggctcactcggcgagccgttatacgaagatgtccgcaccgcaatcgccgaagcgcaggctaacggcagtttctccgccaacccgattgtgctgggcggacgctacggcctcggttccaaagaattcacccccaccatggtcaaggcggtgtttgacaatctgtccggcaagaaaattgccaacttcattataggtattaatgacgacgtggagcacaagagcctggaatacgatccgaattttgtactggaagaagagggcctgaacgaagccctgttctacgggcttggagcggacggcacggtcggcgcgaacaaaaactcgatcaagatcatcagcgaggcgaaaccggaactcaacgcccaggcatacttctcctacgactcgaaaaagtcaaacggctttaccgtttcgcacctccgcttcggcaagggccgtatcagaaggccctaccttatcaactccgcggacttccttgcctgtcacaaattttcctacatggaaatgtacgacatgctcaagagcgttaaggcaggcggcgtattccttcttaacagcccgttcaaggccgccgacgtatggaagaatctccccgtagaggcccagcagcgcataatcgacaaaaaataa

SEQ ID NO: 41532 - protein, 271 aa, Unknown
  Obtained from environmental sample
  DOMAIN (159)...(270): Pyruvate ferredoxin/flavodoxin oxidoreductase
  misc_feature (1)..(271): Xaa is any amino acid
MIIIMGSGAETCEETVDYLNSKGEKVGMVKVHLYRPFDVSLFVKALPSTVKAIAVLDRTKEPGSLGEPLYEDVRTAIAEAQANGSFSANPIVLGGRYGLGSKEFTPTMVKAVFDNLSGKKIANFIIGINDDVEHKSLEYDPNFVLEEEGLNEALFYGLGADGTVGANKNSIKIISEAKPELNAQAYFSYDSKKSNGFTVSHLRFGKGRIRRPYLINSADFLACHKFSYMEMYDMLKSVKAGGVFLLNSPFKAADVWKNLPVEAQQRIIDKK

SEQ ID NO: 41533 - DNA, 1185 bp, Unknown
  Obtained from environmental sample
  misc_feature (1)..(1185): n is a, c, g, or t
atgcaggccgcttatttcaagatttccggcatattgtccgaagaagaagcggtaagacgcatgaaagaacatattgaacactcctacggcaagaaaggcaaagacgtagttgaaaagaactacaaaaccgttgacgcgtcattgactgccgttgaagaagtaaaatatccttccaaaaccgaaggggacatccacatgaaaaaaccctttgcaaccgcaaaggatccatggatcaaggaagttctcggaaccatgtcggtacaggaaggcgacaacctgcctgtcagcaaacttcccgaagacggaacattcccgaccgctactacccagtacgaaaaacgttctgtcgccgagcgcgttcccatttggaattccgaagtctgtatacagtgcggtaactgtacggttgtatgcccccatgcctgtatgcgctttaaaaaccttaccgatgatcaagtcgcgaaagcgccgaaaggatttaagactgcggaaattaaaccgaagccggtagcgggtcagaaagcggctcttgttatcgcttgcgaagactgttacagttgcggcgtttgtttcaatatatgtcccatgtccaataagggtcaggaaaaaccggcgttgtcatggaaatcttacgctgacgatcacgagttccacgctgaacaggtcgccgtttgggattacttcctttcattgccagaaaccccggccggtgatcttatatcgccgaaagcccttgcctacaagcgccccttgtttgaattctctggcgcgtgcggcggatgcggtgagactccctacgttaaacttatgtcgcagttgttcggcgaccgcgctattatcgccaatgcgacaggctgttcctcaatctacggcggaaacctgccgacaacgccctactgccagcgcgcggacggacgcggacctgcatggtcaaacagcttgtttgaagatgccgctgaatttgcaatgggcttccgccttacaagtgacaagctctccgttcatgcccgcgaaattgccgagaaggcaaaaagcgaaggcatcgcaacaggaattatcgacaagattctttccaacaatcaggcggacgacgcggcgattgacgaactgcgcaaaaacatagacgagcttaaagccgctctaaaaacgactccaagccgacggcaaaattgctggtttcgttag

SEQ ID NO: 41534 - protein, 394 aa, Unknown
  Obtained from environmental sample
  DOMAIN (121)...(144): 4Fe-4S binding domain
  misc_feature (1)..(394): Xaa is any amino acid
MQAAYFKISGILSEEEAVRRMKEHIEHSYGKKGKDVVEKNYKTVDASLTAVEEVKYPSKTEGDIHMKKPFATAKDPWIKEVLGTMSVQEGDNLPVSKLPEDGTFPTATTQYEKRSVAERVPIWNSEVCIQCGNCTVVCPHACMRFKNLTDDQVAKAPKGFKTAEIKPKPVAGQKAALVIACEDCYSCGVCFNICPMSNKGQEKPALSWKSYADDHEFHAEQVAVWDYFLSLPETPAGDLISPKALAYKRPLFEFSGACGGCGETPYVKLMSQLFGDRAIIANATGCSSIYGGNLPTTPYCQRADGRGPAWSNSLFEDAAEFAMGFRLTSDKLSVHAREIAEKAKSEGIATGIIDKILSNNQADDAAIDELRKNIDELKAALKTTPSRRQNCWFR

SEQ ID NO: 41535 - DNA, 1113 bp, Unknown
  Obtained from environmental sample
  misc_feature (1)..(1113): n is a, c, g, or t
ttggcttttcttgtaaaccctcgcgatgaagtcgcttttcgccgcatagtaaacaaacccacaagaggcgtaggcgcggtaacagttgataaaattactgaaacttccaatgagtacaacggcaacttgcttgaatcaagccgcgcactggactgctctgcaaaagcgcgtaaaggtattaatgagtttattaaagtaatagaagactcgaaaaaattgttggtttctcagtcgccaacaattgaaaatgaagacgtgaaaaagcagaatggacttatttccggcgataaactttcggttcttgttacaaaaatcattaatgattccggtcttgccgaatatcacagatcgcaagatgacattacaggaaacaacaaaatcggcaatttacaggagcttgtaaatgcggcaagcgattatcctcaaacttacgaaggtcttgcaaatttcctggagaacattgaacttgaccgttcaatggaagacaaaacaaacgcggacaaatccggcgacatacaaaacgctgtaacgttgattacttttcacaacaccaaaggtttggaattcaagcgcgtaataatgacgggacttgagcagggtgtttttccaagagaagacaaaaaaggcgatgaacttgaagaggagcgcagactcttttatgtgggagccacccgcgccatggacgaactctatttaacgacttgcgccgaacggcggatgtacggaaaaaccgcgcaaatgcagccatcgttatttatacgcgagattgacagaaactatctgcaagtaaaggaacttgaggcaacgcaaagagtcactgcgccgcagtacgcaggcggaagatcgttcatcgggagaaattttaatccgctcaacccgcaaaacttacacgcaagcacaggtagcggcgcaaatgctgaacttgaagaacgcgcaggttggcgaaggggacagcgcctatttcacgaagatcatggatacggcgcggtcatgggggtaaaggacagcgaggatggtcctgtcgttcatgtccgttttgattcaggacaggacaaactttttttgagcgagtatcagggcagagcctatgaaaagataggagaagaatattaa

SEQ ID NO: 41536 - protein, 370 aa, Unknown
  Obtained from environmental sample
  misc_feature (1)..(370): Xaa is any amino acid
MAFLVNPRDEVAFRRIVNKPTRGVGAVTVDKITETSNEYNGNLLESSRALDCSAKARKGINEFIKVIEDSKKLLVSQSPTIENEDVKKQNGLISGDKLSVLVTKIINDSGLAEYHRSQDDITGNNKIGNLQELVNAASDYPQTYEGLANFLENIELDRSMEDKTNADKSGDIQNAVTLITFHNTKGLEFKRVIMTGLEQGVFPREDKKGDELEEERRLFYVGATRAMDELYLTTCAERRMYGKTAQMQPSLFIREIDRNYLQVKELEATQRVTAPQYAGGRSFIGRNFNPLNPQNLHASTGSGANAELEERAGWRRGQRLFHEDHGYGAVMGVKDSEDGPVVHVRFDSGQDKLFLSEYQGRAYEKIGEEY

SEQ ID NO: 41537 - DNA, 795 bp, Unknown
  Obtained from environmental sample
  misc_feature (1)..(795): n is a, c, g, or t
atggaaataaaagatgatttcagtctattaagaaaaatccccacagtccttcgcgcaaggggcttccgtctttatttatccaatggcaaacgtttactagatctttggctaaacggcggcgcggcagtcttgggtcatactcctccaaacattttacgcgaactaaaaaacaccgcaagcagaggcctatacgcgcccttcccccacttcaccgaagcccgttacctgaaagccctgtcaaaaattttcccaaaacgcatttttcgcctctatgccgcgccgccacaggagttatccctacttttcaacaacggaaatgcaaaactttggcgcccttttacaaaccccgcagacccattcgcggtgacagaaaatgcgcctattcttatccccgtactccctggcattcaaatctggcgtggcggactgccgcttggcttgtgcgtggtagccgctgaatctgaaaaccaacttgccaatttaccggaaagcgacattcttccccccgtattgcttgcaacggcggcacgtggaatctacgatatgctcgccgcgccgaatagggcaacccttcaattacagcgcgttgaaaaagttttaaaaaatagccgttggttgcggcgcggcatttaccttgagttgaaagaaaaatctgctatctgggacgcgctgtttgataaatttttgggggaggggtttttattgccgcctgctccggcctttccgttgattcttccgtgggaactctctgacggagaagaggcgaaattggcggcggtgttgggggagttatag

SEQ ID NO: 41538 - protein, 264 aa, Unknown
  Obtained from environmental sample
  misc_feature (1)..(264): Xaa is any amino acid
MEIKDDFSLLRKIPTVLRARGFRLYLSNGKRLLDLWLNGGAAVLGHTPPNILRELKNTASRGLYAPFPHFTEARYLKALSKIFPKRIFRLYAAPPQELSLLFNNGNAKLWRPFTNPADPFAVTENAPILIPVLPGIQIWRGGLPLGLCVVAAESENQLANLPESDILPPVLLATAARGIYDMLAAPNRATLQLQRVEKVLKNSRWLRRGIYLELKEKSAIWDALFDKFLGEGFLLPPAPAFPLILPWELSDGEEAKLAAVLGEL

SEQ ID NO: 41539 - DNA, 459 bp, Unknown
  Obtained from environmental sample
  misc_feature (1)..(459): n is a, c, g, or t
gtggccctggagcacatgtacgttgacgcggcctcaatggcgcttatccgcaacccccgcgactacgacgtcatggtgatggaaaacaccttcggcgacattttgagcgatgaagcctcgatgatcggcggctcgctgggcatgatcccttcggccagcttgtcgtccatacctgttggcaaagttttcggcctgtacgagccgatacacggcagcgaccccgtccgggccgggaaattcgtggacaatcccatcgccaccattctcagcgccgcgctcatgctccgccattcctgcggtctggtcaaggaagcggatgtcgtggaaggagcggtcaatcaggcgctggaaaacggataccgcacgtgggacatcatgtctgccggcaaaaaacaggtcggcaccagggaaatgggcgactgcatcgtcgaagaggtcaacaaagcctccggcaagtaa

SEQ ID NO: 41540 - protein, 152 aa, Unknown
  Obtained from environmental sample
  DOMAIN (1)...(142): Isocitrate/isopropylmalate dehydrogenase
  misc_feature (1)..(152): Xaa is any amino acid
MALEHMYVDAASMALIRNPRDYDVMVMENTFGDILSDEASMIGGSLGMIPSASLSSIPVGKVFGLYEPIHGSDPVRAGKFVDNPIATILSAALMLRHSCGLVKEADVVEGAVNQALENGYRTWDIMSAGKKQVGTREMGDCIVEEVNKASGK

SEQ ID NO: 41541 - DNA, 936 bp, Unknown
  Obtained from environmental sample
  misc_feature (1)..(936): n is a, c, g, or t
gtgggcggcgattcgcacacctgcacctacggcgctcttggcgcgctggcattgggcatggggtccaccgacgtggcggtcagcatggtcaagggcgaaatttgggtcaaagttccccactctttgaaattcaccttccgcggcgaactgcccaaatgggtgggcggcaaggatctcattcttaaaattatcggcgacatcggcgttgacggcgcactgtacgcctccatggaatttgacggcgaagcggtcagctcgctcgacatggacaaccgcttcaccatgaacaacatggcaattgaagccggcgccaagacgtccgtatgcctagtggacgacaagacaagagcctacctggacacgcacgctccgggcgccgcgtatgaaaccttcgctccggacaaagacgcgacgtatgccgcccgctatgaatacgacgtcgccaagcttgagccgttggtagcttttccttcccagccttccaacgtgcgcccggcgagtcaggccggcaacattccgatcgatcaggtggccataggattctgcaccaacggacgcttgggcgatctgcgccaggccgccgcgattctcggcggcaggaaggtgcatccgaaggtgcggtgcatgatcttccccggttcgcaaaaggtgtatctccaagccctgcaagaagggctgctggaaacattcatagccgccggggcgggggtgagcatccccacctgcgggccgtgcctgggcggacacatgggcattttggccgcgggagaacggtgcgtggccacgagcaaccgcaattttgtaggcaggatgggaagcccgaaatcggaagtgtacctgggccaatccggctgttgccgcggccagcggccgtatggggcagaatcgcttcgccggaggaggctctgcaatgactatcagaggaaaggctcataa

SEQ ID NO: 41542 - protein, 311 aa, Unknown
  Obtained from environmental sample
  DOMAIN (1)...(284): Aconitase family (aconitate hydratase)
  misc_feature (1)..(311): Xaa is any amino acid
MGGDSHTCTYGALGALALGMGSTDVAVSMVKGEIWVKVPHSLKFTFRGELPKWVGGKDLILKIIGDIGVDGALYASMEFDGEAVSSLDMDNRFTMNNMAIEAGAKTSVCLVDDKTRAYLDTHAPGAAYETFAPDKDATYAARYEYDVAKLEPLVAFPSQPSNVRPASQAGNIPIDQVAIGFCTNGRLGDLRQAAAILGGRKVHPKVRCMIFPGSQKVYLQALQEGLLETFIAAGAGVSIPTCGPCLGGHMGILAAGERCVATSNRNFVGRMGSPKSEVYLGQSGCCRGQRPYGAESLRRRRLCNDYQRKGS

SEQ ID NO: 41543 - DNA, 873 bp, Unknown
  Obtained from environmental sample
  misc_feature (1)..(873): n is a, c, g, or t
atgaaaacccgcgaagcgttggcggaaggaagcgccgctctgaaagcgggcggtattgattcgccgtcccttgacgcgtctctcttgcttgcgcatgttctgaacactacgcgcgcggcgcttctcgcgcacgggacggacgcgttagacgacggcgctcttacggcgtatcgcgtccttattcaaagaagacttggcggcgaatgcgccgcctacatacttggaaaaaaagaattcagggggctggagtttttggtaaacaaatcggtgcttgtaccgcggcctgaaaccgagacgcttgtggaaacggcggttaacatacttaacaaaaaaaacaaggatgcggaaaaagcctgcgttctggatttatgtacgggatccggggcaatcgccgtttcaataaagagcgaaataccggaagtacatgtgtgggcaacggacataagcggacaggctcttgaaaccgcgaaggcaaacgccgcccgtcttttgcacggcagcgctgttcactttttccaaggcgacttatttaatgcgctgccgattaatgcgctgtcatttaacgggctgccggataacgcgttgaccgataacgcacagccatctttgcgattttccgtaattgtaagcaatcctccgtatattcctactgaagaaataagaaccctcgcggcggaggtgcaaaatgagccgctcattgccctcgacggcggacaatccggactggatattattgaacgaattatagaaggcgcgcccgattaccttataaaagacggcgcgttgttaatggaaaccgcgggcaaaaaacagacggaaaaaatcgccgtactgcttgaaaaaaaaggatttancaaatataaatatatataa

SEQ ID NO: 41544 - protein, 290 aa, Unknown
  Obtained from environmental sample
  DOMAIN (97)...(279): Methyltransferase small domain
  misc_feature (1)..(290): Xaa is any amino acid
MKTREALAEGSAALKAGGIDSPSLDASLLLAHVLNTTRAALLAHGTDALDDGALTAYRVLIQRRLGGECAAYILGKKEFRGLEFLVNKSVLVPRPETETLVETAVNILNKKNKDAEKACVLDLCTGSGAIAVSIKSEIPEVHVWATDISGQALETAKANAARLLHGSAVHFFQGDLFNALPINALSFNGLPDNALTDNAQPSLRFSVIVSNPPYIPTEEIRTLAAEVQNEPLIALDGGQSGLDIIERIIEGAPDYLIKDGALLMETAGKKQTEKIAVLLEKKGFXKYKYI

SEQ ID NO: 41545 - DNA, 639 bp, Unknown
  Obtained from environmental sample
  misc_feature (1)..(639): n is a, c, g, or t
atgaactcaaacgacacagagctgggcggcattaaggaaattgtattttccataaccggaaacaacgtatacgaaaacatgcgctatgaatcgggagtccatagggtgcaaagggtccccgctacggaagcgtcgggaagaattcacacttcggcggtaacggtggccgttttgcccgaggcggatgaaacagaaatagacataaaaaccgaagatttgcgcatagacgtaatgcgcgccggcggcccgggaggccagtgcgttaacaccaccgattccgctgtgcgcataacgcacattcccaccggagttactgtccattgtcaggatgaaaagagccagataaaaaacaaggcgaaagccatgcgaatactacgggcgcgcatttacgaaatggaagaagcgaaagccgcggctcaaagggccgaagccagaaagacgcaggtaggttcgggcgaccgctcccaaagaataaggacgtacaattttccgcagaaccgccttaccgatcaccgcattaaccttactctttacaaacttgatttaattatgcagggcgacacggcggaactcttcgacgccttaaaactttccgcaaaagaagaaatgctgcaatcgggcgaagccgccgcttcataa

SEQ ID NO: 41546 - protein, 212 aa, Unknown
  Obtained from environmental sample
  DOMAIN (59)...(172): Peptidyl-tRNA hydrolase domain
  misc_feature (1)..(212): Xaa is any amino acid
MNSNDTELGGIKEIVFSITGNNVYENMRYESGVHRVQRVPATEASGRIHTSAVTVAVLPEADETEIDIKTEDLRIDVMRAGGPGGQCVNTTDSAVRITHIPTGVTVHCQDEKSQIKNKAKAMRILRARIYEMEEAKAAAQRAEARKTQVGSGDRSQRIRTYNFPQNRLTDHRINLTLYKLDLIMQGDTAELFDALKLSAKEEMLQSGEAAAS

SEQ ID NO: 41547 - DNA, 1140 bp, Unknown
  Obtained from environmental sample
  misc_feature (1)..(1140): n is a, c, g, or t
atgcagatttatgcggaccggcaaatacgccccaagtacgcctgccggcaatgcgaggggaccgaagacgaagagaagcctacggtacgtatcgcgcctgtggagcctgcaatgattcccaggagcatagcaagcgccagtttgttagccacgattttcacgcagaagtttgagatgcacctgccttattacaggcaggagaagcaatttgagcagataggcgttgtaataagccggcaggacatgagcaactggcagcagcaggcgtatgaaaaactggaaccgttattcgccatactgaaaagaacggtaaaagaaggccccgtggtgcagatggatgagacggaggtgcaggtaatcggggaggaaaaccggagcgatattcagaaaagccgcatgtggctggcccgaggcggcccccctggcaagaaagtaatctggtacgagtaccatccgacgcgggccgcgtataacgcgaaagcgtttctggaagggtattcgggttatctgcaaacggacgggtatgacgggtatgacagcgcggtgaaagacatgcccggtattattcatgtggggtgcatggcgcacgcgaggaggcggttctttgaagcggccaaaataaacaagaaaccgcagtccgccgaggaagggataaagcatatacgcaagctgtaccagcttgaagacgcgctgaggggcaaatggaaagacgaccttgaaagattcaatgaagagagaaagaaagaagcggcctccctgttagatgaatttaaagcgtggctgttaaagcgtgtgaatgaagtgccgccgaagacgctgttaggtgaagcggtaaactatgcgttgaatcaatgggacaaattgataaagtatcttgaaagcccctatttgacccccgacaacaacgcgtgtgaaaacgcgatccggccttttgtcctgggaagaaaaaattggttgttctgccagagtgtgggcggggccaaaagttcctgcggcatatttactcttatagaaacggcaaaacagaacggccttgttcccagagaatatctgacggctctttttgagaaagcgccgcttgcttcttcgcctcaagactgggaaaagctgctcccatggaatattaaatttcctgtttag

SEQ ID NO: 41548 - protein, 379 aa, Unknown
  Obtained from environmental sample
  DOMAIN (1)...(187): Transposase IS66 family
  misc_feature (1)..(379): Xaa is any amino acid
MQIYADRQIRPKYACRQCEGTEDEEKPTVRIAPVEPAMIPRSIASASLLATIFTQKFEMHLPYYRQEKQFEQIGVVISRQDMSNWQQQAYEKLEPLFAILKRTVKEGPVVQMDETEVQVIGEENRSDIQKSRMWLARGGPPGKKVIWYEYHPTRAAYNAKAFLEGYSGYLQTDGYDGYDSAVKDMPGIIHVGCMAHARRRFFEAAKINKKPQSAEEGIKHIRKLYQLEDALRGKWKDDLERFNEERKKEAASLLDEFKAWLLKRVNEVPPKTLLGEAVNYALNQWDKLIKYLESPYLTPDNNACENAIRPFVLGRKNWLFCQSVGGAKSSCGIFTLIETAKQNGLVPREYLTALFEKAPLASSPQDWEKLLPWNIKFPV

SEQ ID NO: 41549 - DNA, 480 bp, Unknown
  Obtained from environmental sample
  misc_feature (1)..(480): n is a, c, g, or t
atgagtagcttaaataattgggataaaataaaactaaaagaaatatgtagttttattaacggcgatgcttataaagatactgattggagtaataatggaattccaatagtacgcattcaaaacttgaatgatattaataaaccttttaacaattgggcaggtcaaatagaggatagagtaacaattgataacaatgatcttcttttggcttggtcaggtacacctggaacttcatttggcgcacatatatggaatagaggttttgctttactaaatcaacatattttcaaagttatatataatcaagataaagcaaatcttttttggctaaaacatgcaataaatcaaatattaaagattatgattgataaatctcatggtgctgttggtttacgtcatgttacaaaaccagaagtagagaatttggagattttatgtatccgtcaaaagaaccacatcttgacaaaaagagaaaggtag

SEQ ID NO: 41550 - protein, 159 aa, Unknown
  Obtained from environmental sample
  DOMAIN (7)...(156): Type I restriction modification DNA specificity domain
  misc_feature (1)..(159): Xaa is any amino acid
MSSLNNWDKIKLKEICSFINGDAYKDTDWSNNGIPIVRIQNLNDINKPFNNWAGQIEDRVTIDNNDLLLAWSGTPGTSFGAHIWNRGFALLNQHIFKVIYNQDKANLFWLKHAINQILKIMIDKSHGAVGLRHVTKPEVENLEILCIRQKNHILTKRER

SEQ ID NO: 41551 - DNA, 540 bp, Unknown
  Obtained from environmental sample
  misc_feature (1)..(540): n is a, c, g, or t
atgttcacaacaattttctttattctgtttgcggctgtgtgcctcgttagtgctttcgcactcttgatttcaaagcaccctataaacggagcgatggctcttgtgctcaatatgctttcgcttgcgggtatttacacccttgttaacagcacttttttaggcgttttgcaaattttggtttatgcaggcgcggtaatgatgcttatagtatttgtgattatggtactcaacggggcaaaagaaacaaggctgccgagaatggataggcttggagtgcgtgccatttttgcggttttttgcggagggctgcttttgctggctgcttttttcaatgcaaatttacaagaaaatcctggggctgttgctggaagcgttgctgtgatttctgagcatctgtttgataccagctacagagtttttatgaatgctcctggcgggtatttcattttgtttgaacttgttggctttattttgctttctgcaatggtgggcgcagtatttttggtgaaaaggaaaaaattgccaggaaagaatgaataa

SEQ ID NO: 41552 - protein, 179 aa, Unknown
  Obtained from environmental sample
  SIGNAL (1)...(20)
  DOMAIN (13)...(169): NADH-ubiquinone/plastoquinone oxidoreductase chain 6
  misc_feature (1)..(179): Xaa is any amino acid
MFTTIFFILFAAVCLVSAFALLISKHPINGAMALVLNMLSLAGIYTLVNSTFLGVLQILVYAGAVMMLIVFVIMVLNGAKETRLPRMDRLGVRAIFAVFCGGLLLLAAFFNANLQENPGAVAGSVAVISEHLFDTSYRVFMNAPGGYFILFELVGFILLSAMVGAVFLVKRKKLPGKNE

SEQ ID NO: 41553 - DNA, 1170 bp, Unknown
  Obtained from environmental sample
  misc_feature (1)..(1170): n is a, c, g, or t
gtgttcttgctgtttttctgcttggtaactgcaagaattcggcgaagatcgcttccgttgaacgcgaagacctttttgcgctggacatcggcaagctggaagaatcaaatcgctttttttaacctcgaaggggacagggggatacgccgcacaggcgttgccatgcgggacgggcttttttatatctcggacggcaatggcggcaaaattttaaggtacaactcatacggcgatcttcttttcatgatttataacgaggaaaccaatcctcctccgctttcattgaagcccttattagaagggagcatggtaacccgttgggcggtttcctacccgctgcaggaaccgggagaaattaccgttgactcccgcaaacacatatacgtgcgggatcttcttccttacgaaaggcacggttttgattctgaaagcaaagcccttttgaacaatacgatccttcattttggcgaggatggaaaatttgttgaatatttaggcagggaaggctcaggcggcagcccctttccgaaaattgaaaatctttttacctcgttcagagacgagcttgccgtaatatgcaggacacctaacggatgggacacgtattggttcgatcccgacggaaacttgctatttttaattcaattaaaatccaacgcactgccaattccatcggacagggacaatgttttcccctcgctggacacgatttttgccgggccggattcaaggactctgtatatcaaagtggattattacaggaatacctttgacgaatccacaaacatcagaacgggaattgagcaggacagctctgttatctggattatgaatgtagaagacgggctttgggaaaaatatgtggatgtgcctttttttgaataccagtatacggaacaaaacagaaaaatcactataaagatgttatattccctgcttggaattgtcaggaacggaaggatatttctttcttttccggtagaaggcggctactccatacttgttatgccttcggaatacggaacaacgggggagcagcgccagggttttatcagggtagataatgacgaactgcagtttaacgcctttgatctgagcgccgaacgaattttatcagggcttttggtcgacgactggcaggtaaaactggtgtggtggaggactgaataa

SEQ ID NO: 41554 - protein, 389 aa, Unknown
  Obtained from environmental sample
  misc_feature (1)..(389): Xaa is any amino acid
MFLLFFCLVTARIRRRSLPLNAKTFLRWTSASWKNQIAFFNLEGDRGIRRTGVAMRDGLFYISDGNGGKILRYNSYGDLLFMIYNEETNPPPLSLKPLLEGSMVTRWAVSYPLQEPGEITVDSRKHIYVRDLLPYERHGFDSESKALLNNTILHFGEDGKFVEYLGREGSGGSPFPKIENLFTSFRDELAVICRTPNGWDTYWFDPDGNLLFLIQLKSNALPIPSDRDNVFPSLDTIFAGPDSRTLYIKVDYYRNTFDESTNIRTGIEQDSSVIWIMNVEDGLWEKYVDVPFFEYQYTEQNRKITIKMLYSLLGIVRNGRIFLSFPVEGGYSILVMPSEYGTTGEQRQGFIRVDNDELQFNAFDLSAERILSGLLVDDWQVKLVWWRTE

SEQ ID NO: 41555 - DNA, 885 bp, Unknown
  Obtained from environmental sample
  misc_feature (1)..(885): n is a, c, g, or t
atgatcagatggccgacccaagaatttcgcacgctacgtggcgcggaattgcttgactgggatagcgtgcataaaagaattcccgccgttaaggcatattcgcacaaatacgaaaggggaaccgtggagatacgcgccggtgcggtggggacagcaggagcgggattaatagcggcgcgaggcgcacaggcggcaggggcggggcttgtccgcctggtggcggatgacgatatttaccccatacttgcatcaggctcaggcggaatcatggtttccccggtatccgctccggatatggattttgaaggaagattcgcgcctgatgctatacttcttgggccaggctggggcagggcggaaaaacgcgtcccggttttggaaaaagcgctgcggaaagaaaaaacagggactcctttaattattgatgccgatgccatcgagctggcaaaaaacgtaaagtataatggcaacgcgatccttactccccacaccggcgagttaagcaggttttcaggaatcgataaagacgacttgctatgccgtccggttcaggcacttttaaatctaagcaaagaatataacgcaaccatcatttttaagtgccatgtgatccatatcgcttctccggacggccgccttggaatagtcgacggcatgaccgcaaatctggctgccggagggagcggagacctcctggccggattttgcgctgccatagccgccaggatgtcgcgggaaggccgatttgacgcttataactgcgctgccatctccgcgagccttcttattgcctgcgctaaagccgatgatctaagaaagcggtttacggatccgctggaatttgcagacaaggcggctgaccttgcaggcgaagcatggctttaa

SEQ ID NO: 41556 - protein, 294 aa, Unknown
  Obtained from environmental sample
  DOMAIN (42)...(287): Carbohydrate kinase
  misc_feature (1)..(294): Xaa is any amino acid
MIRWPTQEFRTLRGAELLDWDSVHKRIPAVKAYSHKYERGTVEIRAGAVGTAGAGLIAARGAQAAGAGLVRLVADDDIYPILASGSGGIMVSPVSAPDMDFEGRFAPDAILLGPGWGRAEKRVPVLEKALRKEKTGTPLIIDADAIELAKNVKYNGNAILTPHTGELSRFSGIDKDDLLCRPVQALLNLSKEYNATIIFKCHVIHIASPDGRLGIVDGMTANLAAGGSGDLLAGFCAAIAARMSREGRFDAYNCAAISASLLIACAKADDLRKRFTDPLEFADKAADLAGEAWL

SEQ ID NO: 41557 - DNA, 765 bp, Unknown
  Obtained from environmental sample
  misc_feature (1)..(765): n is a, c, g, or t
atggtggcggggccgggcgacgtcgtccagttcgtgggcaacagaaagctcatcgtcaacggcacggagcttatcctgccgccgcacggcaagtacacggggggcaacagggccgacccgcgcatcatcaacttcgccccgctgcgcataccggccaagggcgacgctttctgcccggacactatgcccattagggagttcttgttcttcaagacgctggtgcatcaggaaaatccgacaaagagagtgtatatgcactttgacctatacgtagacggcgagttcgcgaacggcaccgccctaaacttcaacggggcgaggctctctctggacgaattgcaggacggcaaattcatctacaaaaacgagatgacgcggcgcacggaggccttcgattttaaccgtattgatgattggacgatgcttgactatgtcttagacatcatccgccgaaacttttcatccgaaaagagcgtggagatacgcaaaaagctcttcattgggaatgataggattgagcgctacacggtgcgcaacgacaactattttatggtaggcgacaaccgcgacaactcgctcgactcgcgatattgggggtatctgaattacaattttgtgaaagccaaggcgttaatattatacttctcctacgacaactccggcccggcttggaagttcccggcaaacatacgctggaaccgcataggaaagctaattagaacttgggacggtgagagcgagggaaatcctaaaattaagtattag

SEQ ID NO: 41558 - protein, 254 aa, Unknown
  Obtained from environmental sample
  misc_feature (1)..(254): Xaa is any amino acid
MVAGPGDVVQFVGNRKLIVNGTELILPPHGKYTGGNRADPRIINFAPLRIPAKGDAFCPDTMPIREFLFFKTLVHQENPTKRVYMHFDLYVDGEFANGTALNFNGARLSLDELQDGKFIYKNEMTRRTEAFDFNRIDDWTMLDYVLDIIRRNFSSEKSVEIRKKLFIGNDRIERYTVRNDNYFMVGDNRDNSLDSRYWGYLNYNFVKAKALILYFSYDNSGPAWKFPANIRWNRIGKLIRTWDGESEGNPKIKY

SEQ ID NO: 41559 - DNA, 1218 bp, Unknown
  Obtained from environmental sample
  misc_feature (1)..(1218): n is a, c, g, or t
atgaatataactatggctgtaaaaatgatggcgctgctcgttctccttgccggagtggcggcggcgggtgtgaaatacgtggcggtcgtggaaattgggatagacgagcggtcgggcgcgtcgtccatgctgaacgcggcggaggtggcgctgataaccgccgaacttcgcagggtggcggttgaaaacctgccgcgagagaagtacaacgtcatgacaacggaaaccgtccaagcgcagagcggcgctgttttggcggagtgcgccgatgaaaactgcgttatcacactcgggagcaagatcggggcggattatatcgtgcgggggactataagcaaaattgggacgaaacttacgctgtcgatagagatgtatgaaactgaggacgggactttggtcgcgtcggcacgggtcagttctgaaaaggcggaggggcttttggagagggctacgggagcttctgccgaaatgtatatgaagtttgagagtgaggcaggtgctgtgcagagaacgccgcagcaacaaacgccacctcctacacaacctacagttgttgctacgccacaaactgcgaatccgccgccgccgccgtccccatacatccaaccccccacggaacctacaccaacgcatcagcaatccaacagaggtaattctgtaggagtaactcaacgcggtcacttttccgtgacgacattcaccgacagcagggatagtaaaacatacaaaatggtaaatataggtaatcaaacgtggatggcagaaaatttgaattatcaaccacaaaagggtaaatcttggtgttataaaaaagataattccaactgcgataaatacggcagactatacgattggaatacagcaaaaacaatttgtccttcaggatggcatctatctactcgtcaagaatggaatcatttgatagcaacgataaatggttcttccgccggtaaagaattgaaatcaaagacaaattggaaaaattggatgaaaagtggcaatggtacagatgattacgaattttcggctctaccaggcggttatcgcaacacctttggcggtttcaacaatgtcgacaacagcggattttggtggacgactgcagagtatagtaacggtcttgcttatgtttggtatatgttatgcgatacaaaatacgtgaatgagttcagaattgacaagagctttggattttcggttcgttgcgtccaagattag

SEQ ID NO: 41560 - protein, 405 aa, Unknown
  Obtained from environmental sample
  SIGNAL (1)...(22)
  misc_feature (1)..(405): Xaa is any amino acid
MNITMAVKMMALLVLLAGVAAAGVKYVAVVEIGIDERSGASSMLNAAEVALITAELRRVAVENLPREKYNVMTTETVQAQSGAVLAECADENCVITLGSKIGADYIVRGTISKIGTKLTLSIEMYETEDGTLVASARVSSEKAEGLLERATGASAEMYMKFESEAGAVQRTPQQQTPPPTQPTVVATPQTANPPPPPSPYIQPPTEPTPTHQQSNRGNSVGVTQRGHFSVTTFTDSRDSKTYKMVNIGNQTWMAENLNYQPQKGKSWCYKKDNSNCDKYGRLYDWNTAKTICPSGWHLSTRQEWNHLIATINGSSAGKELKSKTNWKNWMKSGNGTDDYEFSALPGGYRNTFGGFNNVDNSGFWWTTAEYSNGLAYVWYMLCDTKYVNEFRIDKSFGFSVRCVQD

SEQ ID NO: 41561 - DNA, 840 bp, Unknown
  Obtained from environmental sample
  misc_feature (1)..(840): n is a, c, g, or t
ttggaggcgtctgtgaatttggattttaatcttgcccgtttttggggagactacggaaaaagtatccttgaaattgggcagaagataatcaaattgcttttgatagtagccggcggaaaaatcgcgatttccattttcacaaagctaacccataagactactaccggaaaattgaaagtcgatgaaaaccttgcttcggttttaaggatggcgttccggtacggggttgtaattgtttgcctgctaatgattctggatactctgggtatcaacacaaacggcctcattgcccttttgggagcagccggagtcgcagtaggtttttctcttagagataccctggggaatatcgccaccggcatcatcattctttttctaaagcctttccagaggggcgacttcattgagtgcggctctgtctccggctctgtccgggagatggggcttttcgcgacaaccctggaaaccgctgacggaatttttatctccgctcccaactccagcctttggggagtaccgctgaaaaattattcccgcaatcccatccgtcgcatagatatttcagtttcaattgcctactcggattcaatagacgaagctttcaggnttcttaatgaaattatcaacgaggaaagccgtttcctgaaagaaccggccagccaggttacggttcagtccctgggggattccggcatcggcatcaccctgagggcatgggtgcgggcttcggactattggagcgtgtattttgctcagatgaagaatgtgaaagaaaggatagagggggcgggtcttaccatacccttcccgcagcgggatatacacctgattaaagcatga

SEQ ID NO: 41562 - protein, 279 aa, Unknown
  Obtained from environmental sample
  DOMAIN (70)...(268): Mechanosensitive ion channel
  misc_feature (1)..(279): Xaa is any amino acid
MEASVNLDFNLARFWGDYGKSILEIGQKIIKLLLIVAGGKIAISIFTKLTHKTTTGKLKVDENLASVLRMAFRYGVVIVCLLMILDTLGINTNGLIALLGAAGVAVGFSLRDTLGNIATGIIILFLKPFQRGDFIECGSVSGSVREMGLFATTLETADGIFISAPNSSLWGVPLKNYSRNPIRRIDISVSIAYSDSIDEAFRXLNEIINEESRFLKEPASQVTVQSLGDSGIGITLRAWVRASDYWSVYFAQMKNVKERIEGAGLTIPFPQRDIHLIKA

SEQ ID NO: 41563 - DNA, 708 bp, Unknown
  Obtained from environmental sample
  misc_feature (1)..(708): n is a, c, g, or t
atgatttccaaaaaaaggtttttccagggtttaatttgctgtgcggtttttatttatctcttatttttatttatcccttttccggagcttgacgctttcagaaacaggtcgtggggaacggtaatcactgaccgaaacggaatcgtcttgcgggttctgcctgccgataacggcgttaagcgggagtgggtgccgttaggtgcaattccttcgggggcggttaacatttttatacaggctgaagacaagcgtttttattctcatccgggaattgacgttttcgcgcttgcagccggcttctatagaaatcttagggccgggcgcacagtgtcaggcgcgtccacgattacgatgcagcttgcccggctggtgcatcctcactcagccggcctgcgtggaaaaatcgttgaagcctgggacgccattcgccttgaagctaaactttcaaaaaaagagatccttgagctgtacctgaacagcattcccttcggcagcaacatcgaagggcttgcggcaattacaagggccaggtttggctgttctgtcagagagctggacgataacagagccgtgctcctcgcttcggttcccaggagaccgcttttttacgatcccgccttaacccggatgcggctgtttctgccgcaatggtactttccgccaggtgtcgcctggacttgcgtgaagaagagcttcggcgggtggtaa

SEQ ID NO: 41564 - protein, 235 aa, Unknown
  Obtained from environmental sample
  DOMAIN (40)...(210): Transglycosylase
  misc_feature (1)..(235): Xaa is any amino acid
MISKKRFFQGLICCAVFIYLLFLFIPFPELDAFRNRSWGTVITDRNGIVLRVLPADNGVKREWVPLGAIPSGAVNIFIQAEDKRFYSHPGIDVFALAAGFYRNLRAGRTVSGASTITMQLARLVHPHSAGLRGKIVEAWDAIRLEAKLSKKEILELYLNSIPFGSNIEGLAAITRARFGCSVRELDDNRAVLLASVPRRPLFYDPALTRMRLFLPQWYFPPGVAWTCVKKSFGGW

SEQ ID NO: 41565 - DNA, 423 bp, Unknown
  Obtained from environmental sample
  misc_feature (1)..(423): n is a, c, g, or t
ttgaggccatccacgccgaagggagccgtcgcgggtatccactgctgcggaaataccgaatggagcatactcgttgacgcgggtgtggacatcgtgaactttgacgctttcgagtacggggatactatcgccatatactccgacagcgtaaaatcgcacctggataggggcggagtactggcatggggcgtggttcccacttccgaaaagatacgggaacagaccgttgaatccctggaaaagaagcttgaggaaggcattgatcgtctggcttccaagggaattgacaggaaccttattctccagcaggccatgatcaccccctcgtgcggcacgggatcgctacctgttgatgccgcggaaaaagtattttcccttatggctgaccttaccaaacggatgaaggaaaaatacaagttctaa

SEQ ID NO: 41566 - protein, 140 aa, Unknown
  Obtained from environmental sample
  misc_feature (1)..(140): Xaa is any amino acid
MRPSTPKGAVAGIHCCGNTEWSILVDAGVDIVNFDAFEYGDTIAIYSDSVKSHLDRGGVLAWGVVPTSEKIREQTVESLEKKLEEGIDRLASKGIDRNLILQQAMITPSCGTGSLPVDAAEKVFSLMADLTKRMKEKYKF

SEQ ID NO: 41567 - DNA, 723 bp, Unknown
  Obtained from environmental sample
  misc_feature (1)..(723): n is a, c, g, or t
atgacgaagaccaaatttctttctaccgcgataggttcaatgccttttgaagatccggattacgctgtcggcgtttcgctgaaatccatggacgcgcccatttggccccagttgccgaggcttggcctcttggaacagatggaagtacagtactccgaaaacatcccctgcgccgtaattgacaatgaaaagaaccgtatgtactttcaaaccgattgcgactattcagaaaagttcgccgagttttacgaagcctacatgaccgcctcggatgccgacgggggaacgaaagatttttcgccaatggcgatcagtgaaaagtattccaagggtatctacgccctcttgcggacattaaaggcgaaaggcgcgaagcatccctggctcaaggttcaatccaccggcccgattacctttgcgctttctatcaccgatgaaaacaagcgcgccatgtactacaacgaagaattcagggatgtaatcgtaaaggccatctctgcaaagagcagatggcagatacagcagttcanaccctttgccgaaaatattatttgctttatcgacgagccgattctgtcggccttcggcagttctacatatgtttcagtcaagcgggaggatgtggtgagtatcctggaagaagtcattgaggccatccacgccgaagggagccgtcgcgggtatccactgctgcggaaataccgaatggagcatactcgttga

SEQ ID NO: 41568 - protein, 240 aa, Unknown
  Obtained from environmental sample
  misc_feature (1)..(240): Xaa is any amino acid
MTKTKFLSTAIGSMPFEDPDYAVGVSLKSMDAPIWPQLPRLGLLEQMEVQYSENIPCAVIDNEKNRMYFQTDCDYSEKFAEFYEAYMTASDADGGTKDFSPMAISEKYSKGIYALLRTLKAKGAKHPWLKVQSTGPITFALSITDENKRAMYYNEEFRDVIVKAISAKSRWQIQQFXPFAENIICFIDEPILSAFGSSTYVSVKREDVVSILEEVIEAIHAEGSRRGYPLLRKYRMEHTR

SEQ ID NO: 41569 - DNA, 807 bp, Unknown
  Obtained from environmental sample
  misc_feature (1)..(807): n is a, c, g, or t
gtgaaagacaaactcgcctccctcggctttgaggaatttgacggccccctggttgaaaccgagttctggaattcagacgccctgttcatgccgcagttccactcggcgcgggacatccatgacagctacagccttagcgatcccgcaaaacccggtgaaatcgcaaaggcaaagtcaatagaagagccctggctttccaacgtggctagtgcccatgaaaacggcgggaaaaccggcagccgcggctggaactacgcttttgatcgcgaatttacccgtcggctgatcctccgttcacagggcacggtgctttccgcgaaaacactgcccaaggcgaaaatccccggcaagtatttcggcattgtccgttgtttccgctacgaccgcgtggatgccacccacctgcctgacttctaccagaccgagggcattgtgttaggcgaaaccgtaaaccttcgtaccctgttgggaatgttggatatgtttgcccgcgaggttgccggcgcgaaagaggttaaatatgttcccggctatttcccatttaccgaaccttcggtggaagtgcatataaagcaccctgtgcttggctggttcgagctgggaggctccggtattttccgtcccgaggtgacacaaagccttggcgtggatgttccggtcgcggcctggggtatcggcattgatcgcatggcccttatggcgctgggccttaatgatctgcgggacctgttcagcggcaacattgaagacgtgcgtctgcgccgtcttactgaagtaaacaaaatcaaggaaaaagcaaatgcctaa

SEQ ID NO: 41570 - protein, 268 aa, Unknown
  Obtained from environmental sample
  DOMAIN (2)...(254): tRNA synthetases class II core domain (F)
  misc_feature (1)..(268): Xaa is any amino acid
MKDKLASLGFEEFDGPLVETEFWNSDALFMPQFHSARDIHDSYSLSDPAKPGEIAKAKSIEEPWLSNVASAHENGGKTGSRGWNYAFDREFTRRLILRSQGTVLSAKTLPKAKIPGKYFGIVRCFRYDRVDATHLPDFYQTEGIVLGETVNLRTLLGMLDMFAREVAGAKEVKYVPGYFPFTEPSVEVHIKHPVLGWFELGGSGIFRPEVTQSLGVDVPVAAWGIGIDRMALMALGLNDLRDLFSGNIEDVRLRRLTEVNKIKEKANA

SEQ ID NO: 41571 - DNA, 837 bp, Unknown
  Obtained from environmental sample
  misc_feature (1)..(837): n is a, c, g, or t
atgcctaaaatagaagtaaacgaagaagttttttattcgctctgcggcaagcgctggtccaatagagacgaattcgaggaagccctgacctgcgccaaggcggaattggactcggacctttggtccgcggacagcgacaaaagcctgcccgcccatgagcgtgtccttaaaatcgagcttaacgacaccaaccgtcccgacctgtggggaaccgcgggctgcgccagacagctcagggtatatcaggacggtaaaattcccgaatatccgtttttctcccggccaggcgttccaaagccggcggggtacgaggtgcatgttgaaaaaaacgttcaacaggtacggccttacctggcgggctttgtcgcgcagggcaaaacaatttccgatccggcgttacgcgacatgatacaaacccaggaaaaactcgcctggaatttcggacgcaaacggcgttccatttcgatgggcgtgtaccgtatagcgaggatcaactggcccatcatttacaagggcgttgatcctgacagcgtttcttttgtaccgttgcaatgggactccccattaaccttgagggaaattctcaagcagcatcccaagggaaaagagtacgcctttatccttgagaaagagccggttcaccccctgttaactgattcgaaaggcagcgtgctatcttatccgcccatcatcaattcaaatgacttgngcgcggtgcaggttggcgacacggacatctttgtgngattgaccggcactgacatcgcccaggtaacgctggcggcttcaatcgtcgcctgcgaccttgcgngatacggcttttccatgagccggtaa

SEQ ID NO: 41572 - protein, 278 aa, Unknown
  Obtained from environmental sample
  misc_feature (1)..(278): Xaa is any amino acid
MPKIEVNEEVFYSLCGKRWSNRDEFEEALTCAKAELDSDLWSADSDKSLPAHERVLKIELNDTNRPDLWGTAGCARQLRVYQDGKIPEYPFFSRPGVPKPAGYEVHVEKNVQQVRPYLAGFVAQGKTISDPALRDMIQTQEKLAWNFGRKRRSISMGVYRIARINWPIIYKGVDPDSVSFVPLQWDSPLTLREILKQHPKGKEYAFILEKEPVHPLLTDSKGSVLSYPPIINSNDLXAVQVGDTDIFVXLTGTDIAQVTLAASIVACDLAXYGFSMSR

SEQ ID NO: 41573 - DNA, 1350 bp, Unknown
  Obtained from environmental sample
  misc_feature (1)..(1350): n is a, c, g, or t
ttgtgcggagtaccggacaaagcggcgcttgttatagcctgtcaagattgtcaagactgcggtgtctgcttcaatatctgcccaatgtccaataagggtcaggaggatcccgcgctgtcattgaaatcttacgcggacgatcacgagttccgcgaggaacagattgctgtttggaattacttcctttcattgccggaaacgcctgtcggtgagcttaaaaacgcgaaagcgcttgcctacaagcgccccttgtttgaattctcaggcgcctgcggcggctgcggtgagactccatatgttaagcttatgtcccagttgttcggcgaccgcgcgatcatcgccaacgccaccggttgttcctccatttacggcggaaacctcccgactacgccttactgccagcgcgcggacggacgcggaccggcatggtcgaacagcttgttcgaggatgccgctgaattcgcgatgggcttccgcttaacaagcgacaagctcgccattcatgcccgcgaaatcgccgagaaggcaaagagcgaaggcatcgcggcgggaattatcgacaagattctttccaacaatcaggcagacgatgcggcgattgacgaacttcgcaaaaatattgacgcgcttaaagctgaacttaaaaacaattccaagccgaccgcgaaacttttagtttcgttagccgactattttgtaaaacgttctatttgggcgttcggcggcgacggctgggcttacgacataggcttcggcggactggatcacgttatcgcttccggcaagaacgtcaacctcttgtgcatggataccgaagtttattccaacaccggcggacagatgtccaaatcgactcctgtcggcgcaatcgcgaaatttgcccatgccggaaaagatattacaaagaaagaccttggcgctatagcgatgagctacggttatgtgtatgtcgccaaagtttcgttgggcgcgaatatgccgcaggtaatcaaagcgttccgcgaagcggaatcttacgacggcccgtcgcttattatcgcgtactcgcattgtatcaaccacggaatcgacatgagcaaggggcttgaacagcaaaaggcggttgtaacaagcggtctttggccgttgttccgctacgatccgcgtcttaaggatcagggaaagaatccattccagcttgactcgaaagatccgacaacaaacattgaggattttatgtacaaagaagtgcgcttcaagagcttaaaagccgccaatgccgaacgcgcggacgcattgcttgcgaaagcgaaagcacacgcggaaagggtctggaaggaatacaaatatttggcggatcgtccgttctaa

SEQ ID NO: 41574 - protein, 449 aa, Unknown
  Obtained from environmental sample
  DOMAIN (220)...(347): Thiamine pyrophosphate enzyme, C-terminal TPP binding domain
  misc_feature (1)..(449): Xaa is any amino acid
MCGVPDKAALVIACQDCQDCGVCFNICPMSNKGQEDPALSLKSYADDHEFREEQIAVWNYFLSLPETPVGELKNAKALAYKRPLFEFSGACGGCGETPYVKLMSQLFGDRAIIANATGCSSIYGGNLPTTPYCQRADGRGPAWSNSLFEDAAEFAMGFRLTSDKLAIHAREIAEKAKSEGIAAGIIDKILSNNQADDAAIDELRKNIDALKAELKNNSKPTAKLLVSLADYFVKRSIWAFGGDGWAYDIGFGGLDHVIASGKNVNLLCMDTEVYSNTGGQMSKSTPVGAIAKFAHAGKDITKKDLGAIAMSYGYVYVAKVSLGANMPQVIKAFREAESYDGPSLIIAYSHCINHGIDMSKGLEQQKAVVTSGLWPLFRYDPRLKDQGKNPFQLDSKDPTTNIEDFMYKEVRFKSLKAANAERADALLAKAKAHAERVWKEYKYLADRPF

SEQ ID NO: 41575 - DNA, 849 bp, Unknown
  Obtained from environmental sample
  misc_feature (1)..(849): n is a, c, g, or t
atgccgcgccccgcgctctccgcttcccagcgcgatgtatcccttttatcccgcagttctgcgccttttgttgacaattaccggggctcatctctttttcagttccatgatacccactccggaacaaaccttgacatttccctctcctatgaaacagatgtttacgccgtagaaacaaatatcagaaacacggctgttgtcaggctgaacaggccttcgcctatggggtccgccgtgagccttccgagcgcccttatcccgtcggaagaacaggcagtgagagcccaggtcaggacgataatagggaacgaacgccttccgttccccagggcacagaggatatacaactggcttgtttcaaacgtaaaaatccaggtcgaacctctcttaaataatgtaaccgaagctctcgaaaataaaaccgccgacaacttttccgcttccctgcttttctgcgctcttgcacgcgccacggaaatcccggcccagccggttgctggggtaataatcgaccgctgggggattgcaacaaagcactactgggcggaattctggctggatggtttcggctgggttccgctggatccggctttgggtgcgggggcgtccccccccgatttcaacctcagggaagaccacgcttcttattacttcggaaacctggacaaccaaagaatcgccttctcgcgcggggagcactttctcccgcagatgaccccacgcggaaggatcgcctcgcatgacagggagtactccctgcaaaacatctgggaagaagctgcggaaggccttgagtcctattcttctctttggagtgatgttacaataacaggcatgcgtatacagtag

SEQ ID NO: 41576 - protein, 282 aa, Unknown
  Obtained from environmental sample
  DOMAIN (139)...(197): Transglutaminase-like superfamily
  misc_feature (1)..(282): Xaa is any amino acid
MPRPALSASQRDVSLLSRSSAPFVDNYRGSSLFQFHDTHSGTNLDISLSYETDVYAVETNIRNTAVVRLNRPSPMGSAVSLPSALIPSEEQAVRAQVRTIIGNERLPFPRAQRIYNWLVSNVKIQVEPLLNNVTEALENKTADNFSASLLFCALARATEIPAQPVAGVIIDRWGIATKHYWAEFWLDGFGWVPLDPALGAGASPPDFNLREDHASYYFGNLDNQRIAFSRGEHFLPQMTPRGRIASHDREYSLQNIWEEAAEGLESYSSLWSDVTITGMRIQ

SEQ ID NO: 41577 - DNA, 630 bp, Unknown
  Obtained from environmental sample
  misc_feature (1)..(630): n is a, c, g, or t
atgaaggaacctctcacctcaaaatctcttcgttttcaagtgattgtttttattgctttcataaccataagctgcagtgaaaaaacgcctgaaatttcatttattgacccaagcatcggcaggatgggggatatccttaccattactggcagtggctttggggatgaaagaaacgaatcttttattacaatagcgggtacttcccccacgacgtcttcatatttgtcatggagcgacaaagaaattacggtacgggtgccggaattcggggaagcagggctggtttatgtccaccgggggcaaaagaaaagcaatgccgtcctgtttgcgaacctcttaaccctgcctgaaacggtttcaggctctcagatcggcaacgaccctgaaataagctctatagagcctttcttcagcacctataggctcccttatcacgatacaggggaacaattttggcgcttccagggaaacaggcggcgttttttttgcctggagcgcggaaactctggcgggagcccagacaattaccccccccggttttatcgaggtttttcaaagcgaactgggttacgaatcctggagcgaaagggaaatccgcgtccgcatacccgacggggccataagcggtaa

SEQ ID NO: 41578 - protein, 209 aa, Unknown
  Obtained from environmental sample
  misc_feature (1)..(209): Xaa is any amino acid
MKEPLTSKSLRFQVIVFIAFITISCSEKTPEISFIDPSIGRMGDILTITGSGFGDERNESFITIAGTSPTTSSYLSWSDKEITVRVPEFGEAGLVYVHRGQKKSNAVLFANLLTLPETVSGSQIGNDPEISSIEPFFSTYRLPYHDTGEQFWRFQGNRRRFFCLERGNSGGSPDNYPPRFYRGFSKRTGLRILERKGNPRPHTRRGHKR

SEQ ID NO: 41579 - DNA, 411 bp, Unknown
  Obtained from environmental sample
  misc_feature (1)..(411): n is a, c, g, or t
ttggggttggacaatcaaacggaagacgattgcagacggcttatcgaatttctgctggaaatcaatcttgatctcgcggagttcacggtattgactcccttcccccataccaaggcttgggacgaccttgcgcggcaggggcgcatttttgaccgcgactgggatcattttaacgctgggcaggtggtctttacccccaaaaacatgagcgccgaacgcctgcaggagctttacgattacgcgtggaaagctttttatcatgatgagactcaggaagaaaaaatgtttcacttgctttcagcggttgtcagccgtgagatggatgacggaacttaccgcccccgcaatcggcggctgattcataaatcatttggaaaagacgttgtacggaacgttggagcgggcagttag

SEQ ID NO: 41580 - protein, 136 aa, Unknown
  Obtained from environmental sample
  misc_feature (1)..(136): Xaa is any amino acid
MGLDNQTEDDCRRLIEFLLEINLDLAEFTVLTPFPHTKAWDDLARQGRIFDRDWDHFNAGQVVFTPKNMSAERLQELYDYAWKAFYHDETQEEKMFHLLSAVVSREMDDGTYRPRNRRLIHKSFGKDVVRNVGAGS

SEQ ID NO: 41581 - DNA, 573 bp, Unknown
  Obtained from environmental sample
  misc_feature (1)..(573): n is a, c, g, or t
gtgctaaaaaaatatcaaattaaagccatattctgtctgttaggtgaaaacgcggaacgttatcctgatctggtcaaacgtatatatgatgaagggcattgtattgtcaatcacgggtattccgacaaatgggcaagcaggatgaacaaagatgaattcaagaataatctgctccggggtgaagcggcgatttcctccgctttgggacgtgatatgtcacccaaactgtaccggccccagggtggtttttataccgccgcacaggaaaaaatcattcatgatgaaggctatacattggttctgaacaatgtcagggtatatgacgctgttattgacggaacaaaacagagtaaggttgtaagggatattgtcgaaaaagttgaaaaacaggacggggggatcattttactccatgacgcaagggattcttttgttcaggcggaagcgcggcttgcaaaaaaacctaatggcgtttttgaccgttcatggattcccgataccgtagaaagggtaataacggtccttttggacaaggggtttatcctgaacaattccgataattacccttattga

SEQ ID NO: 41582 - protein, 190 aa, Unknown
  Obtained from environmental sample
  DOMAIN (1)...(100): Polysaccharide deacetylase
  misc_feature (1)..(190): Xaa is any amino acid
MLKKYQIKAIFCLLGENAERYPDLVKRIYDEGHCIVNHGYSDKWASRMNKDEFKNNLLRGEAAISSALGRDMSPKLYRPQGGFYTAAQEKIIHDEGYTLVLNNVRVYDAVIDGTKQSKVVRDIVEKVEKQDGGIILLHDARDSFVQAEARLAKKPNGVFDRSWIPDTVERVITVLLDKGFILNNSDNYPY

SEQ ID NO: 41583 - DNA, 1734 bp, Unknown
  Obtained from environmental sample
  misc_feature (1)..(1734): n is a, c, g, or t
ttggatgatcttttctcctcaggagccgcgccgggcggcggcgaanataaaagccctcttgccgaccggatgcggcctcgcgtccttgaggacatcatcggccaggatcatattgtcggcccgggaaggctgctaaggcgggcgatacaggccgaccggctttcatcgctgatattctacgggccgccgggtacgggcaaaaccagtctggcgcgggttatagccaataccacaagggcggcttttgaaagccttaacgcggtgctgtcaggcgtaaaaaacatacgcgaggcgattgaccgttccgatgaaagattcaggctgtacggcaagcgcaccattttatttgttgacgaagtgcaccgctggaacaaggcccagcaggacgccctgctgccctgggtggaaaacggcacggtcatactcgtgggggcaaccacggaaaaccctttttttgaagttaaccgcgcgctggtaagccgcagccgtatttttcaattaaaaccgctggacgccgaagggctcatgaagacagcccgcaacgccattgcggacgcggaacggggttacggcaagtggcgggtcagctttgaagacggcgcgcttgaacaccttgtcgaggtttcaagcggcgacgcgcgcagcctgctaaacgcccttgagttagctgttgagacaagtacatcttggcctccggtgcagggcacggagatacacatctccatggaagcggccgaggaaagcatacaacgacgcgccgttctgtacgaccgcgacggcgactaccattttgacacgataagcgcctttatcaaaagcgtcaggggcagcgatccggacgccgcgctgtactggcttgcgaagatgttacgcgcgggcgaggatcccagttttattttcaggcgcatgatcatactggcaagcgaagacgtaggcatggccgatccgcacgcgctttccgttgttgtttcctgcgccgaggcctttgaccgcatcggctttcccgaggggaattttccccttgcccacgcctgcctgtaccttgccacttctccaaagtccaacaccgggctttccctctttgacgcgatgaaagaagttgacaaggaagacgccgaagttcccaaccacctgcgcgacgcaagccgcgacgcggaaagtttcggccacggcgaaggctatatttaccctcacgcataccgcgatcactgggccgcccagcaataccttccgaccgccttgcgcggaagaaccttttatatcccctcctctatcggttatgagggaaaaatcagggacgaggtcttaaaaaaaagggaactgcaggcggctgttgttcttggagagcaaacaggcgacggggaactcttaagctggtccgcggcggcaaaaggaagggagggctggttcaagcgccttgaatcgggcagaagcgccctcctgctcagcgaccgcgacgcgattttcaaggccgcatcccccggccgccaggaccggattcttgtcccgcttgcggccgacggcctgctgctctgggaaagcctgcgccgctgccccgaaggcctcagcgcggcgttagtcgcaaatgaagccgcccgcgaggccttgttcaggtacgcggcggtactggatcagattgagcagccggaaatcgccgtgctggaaacagggcttctgccctcgccccaacaggccgccgaatggtttgactcatggttttcgattttatactga

SEQ ID NO: 41584 - protein, 577 aa, Unknown
  Obtained from environmental sample
  DOMAIN (56)...(226): ATPase family associated with various cellular activities (AAA)
  misc_feature (1)..(577): Xaa is any amino acid
MDDLFSSGAAPGGGEXKSPLADRMRPRVLEDIIGQDHIVGPGRLLRRAIQADRLSSLIFYGPPGTGKTSLARVIANTTRAAFESLNAVLSGVKNIREAIDRSDERFRLYGKRTILFVDEVHRWNKAQQDALLPWVENGTVILVGATTENPFFEVNRALVSRSRIFQLKPLDAEGLMKTARNAIADAERGYGKWRVSFEDGALEHLVEVSSGDARSLLNALELAVETSTSWPPVQGTEIHISMEAAEESIQRRAVLYDRDGDYHFDTISAFIKSVRGSDPDAALYWLAKMLRAGEDPSFIFRRMIILASEDVGMADPHALSVVVSCAEAFDRIGFPEGNFPLAHACLYLATSPKSNTGLSLFDAMKEVDKEDAEVPNHLRDASRDAESFGHGEGYIYPHAYRDHWAAQQYLPTALRGRTFYIPSSIGYEGKIRDEVLKKRELQAAVVLGEQTGDGELLSWSAAAKGREGWFKRLESGRSALLLSDRDAIFKAASPGRQDRILVPLAADGLLLWESLRRCPEGLSAALVANEAAREALFRYAAVLDQIEQPEIAVLETGLLPSPQQAAEWFDSWFSILY

SEQ ID NO: 41585 - DNA, 576 bp, Unknown
  Obtained from environmental sample
  misc_feature (1)..(576): n is a, c, g, or t
gtgaaagtgggcatagggccgggttcaatctgcacgacaagggttgtcgcgggaatcggagtgccgcaatttagcgccgtctgggactgcgccgaagaagcggcaaagtcaaaaatcccggtaatcgcggacgggggcattaagttctcgggggacattaccaaggcaatcggcgcgggagcgggcgttgtaatgattggcaaccttttcgccggattaaaagaagcgccgggaaacgaaattatttttgacggaagaatttacaaggaataccgcggaatgggaagcatgggcgcgattgcggacggctcgggcgaccgttaccagataggcaaggacgaggaacccgtgccggaaggcattgaggggcgcgtgccttacaagggcgagcttcgcacctacctgaaccagcttatagcgggtttacgcaaaggtatggggtattgcggctgtaagagcataacagagttaaataaataccggaaatttgtaaagattaccgcttccggccttcgtgaaagccatcctcatgatattaccatcacgcaggaagcgccgaattattcaccgtcctga

SEQ ID NO: 41586 - protein, 191 aa, Unknown
  Obtained from environmental sample
  DOMAIN (1)...(177): IMP dehydrogenase / GMP reductase domain
  misc_feature (1)..(191): Xaa is any amino acid
MKVGIGPGSICTTRVVAGIGVPQFSAVWDCAEEAAKSKIPVIADGGIKFSGDITKAIGAGAGVVMIGNLFAGLKEAPGNEIIFDGRIYKEYRGMGSMGAIADGSGDRYQIGKDEEPVPEGIEGRVPYKGELRTYLNQLIAGLRKGMGYCGCKSITELNKYRKFVKITASGLRESHPHDITITQEAPNYSPS

SEQ ID NO: 41587 - DNA, 774 bp, Unknown
  Obtained from environmental sample
  misc_feature (1)..(774): n is a, c, g, or t
atgaaagataaaactccggcgcanaaactggatttatggtacgaaaaaatctgcgtcaaagattttatcaaagatgatccggttcaatttccgcgccgttacgcaaaaaaagaagacattgaaattgcagcgtttctcgccgcgacaatagcctggggacggcgcgacctgattatacgctcatgcaggcggatgttcgccatgatggagccgggagggccgcaggcctatgtaaaacacgccgcgcgccgaaggtgtgcaacgcggtcaaagcgcgccacgctacgaaagagcgcatccgttcgcggcccctgcgtacaccgtactttttttgaagatgatctcgcgtatttttgcaggggcttcaggcattgttactcgaaatacggcacccttgaaaaactgttcacgtctcaacccgacgtgtggcagggcataaagctgttcagggaagaaatggccgcgggaaacaagggcctttacacaacgcatatcgccaacccggaggcgaattccgcctgcaaacggatcaatctggccctgcgctggctggtaagaaaacgcccggtggacataggcctgtggaaaagcataaagccttcctccctgtacattccgctggatgttcatgttgcgcgtaacgccaggaatatcggcctgctggaacgaaaatcaaatgacaaaaaagccgttatggaactgaccgggaaactccgccaattctgcccggaagacccggcaaaatacgactttgttttattttcaatcggttag

SEQ ID NO: 41588 - protein, 257 aa, Unknown
  Obtained from environmental sample
  misc_feature (1)..(257): Xaa is any amino acid
MKDKTPAXKLDLWYEKICVKDFIKDDPVQFPRRYAKKEDIEIAAFLAATIAWGRRDLIIRSCRRMFAMMEPGGPQAYVKHAARRRCATRSKRATLRKSASVRGPCVHRTFFEDDLAYFCRGFRHCYSKYGTLEKLFTSQPDVWQGIKLFREEMAAGNKGLYTTHIANPEANSACKRINLALRWLVRKRPVDIGLWKSIKPSSLYIPLDVHVARNARNIGLLERKSNDKKAVMELTGKLRQFCPEDPAKYDFVLFSIG

SEQ ID NO: 41589 - DNA, 1008 bp, Unknown
  Obtained from environmental sample
  misc_feature (1)..(1008): n is a, c, g, or t
gtgaaaatgaaaaataagtatactattctgttcactctattcattctgtccattctggttcagacatgtgcctcggtagccccaccacccggaggtcccgaagacaaacttccacccagagtaagcggaacaacgcttgccccaaatgccataaatcagaacgtgaaattggatttaaccctgcaatttgacgagtggataattcaaaaaccgccaaatggtgcagttgcaatttcgccgcctatttctggcaagctacgtgtagaagccgatggcgacaagttgcgcatatattccaccgcacctttggattccaacacaacatacacactcacggttacaaatgccataagggatttgcagggcaacccgctggaaaaatcatttcagattttgttttcaacaggaaatttcttagatagccttaaaacgaatttttctgtgctactgcaagattccttgataaaaaagaaaaaatttcctgttgtggctttttatcctattggcaaagttcgctcccacaaaggctatctggagaaattcagagattcaaccttaagcgcggaggcagatacctttccgcgtattgcaaaagaaattccacaatacattgctcaaaccgatagccttggaaacggagttttgcagggaatgcaggcgggtttgtatttagccgcagcctttttagacgaaaacaacaatcaaaaattagatgctacaagcgaaattgcaggcattgtggcttttccctttgaattaaccgaagccaaagtaaatctgttaaggttttcccttggggatttagatacgtcttcgtttagtttggatgcagtttctcaaaggggcaatagggaaattgagctttcgttttccagaaatacggttttggattctctgtttaagcaaaaaaacaactgttttttcttaaacggcaaagacactatttttccttcagattcttacattgaaacttacagtaaaaatacagtgcttttggttgagaactga

SEQ ID NO: 41590 - protein, 335 aa, Unknown
  Obtained from environmental sample
  SIGNAL (1)...(26)
  misc_feature (1)..(335): Xaa is any amino acid
MKMKNKYTILFTLFILSILVQTCASVAPPPGGPEDKLPPRVSGTTLAPNAINQNVKLDLTLQFDEWIIQKPPNGAVAISPPISGKLRVEADGDKLRIYSTAPLDSNTTYTLTVTNAIRDLQGNPLEKSFQILFSTGNFLDSLKTNFSVLLQDSLIKKKKFPVVAFYPIGKVRSHKGYLEKFRDSTLSAEADTFPRIAKEIPQYIAQTDSLGNGVLQGMQAGLYLAAAFLDENNNQKLDATSEIAGIVAFPFELTEAKVNLLRFSLGDLDTSSFSLDAVSQRGNREIELSFSRNTVLDSLFKQKNNCFFLNGKDTIFPSDSYIETYSKNTVLLVEN

SEQ ID NO: 41591 - DNA, 756 bp, Unknown
  Obtained from environmental sample
  misc_feature (1)..(756): n is a, c, g, or t
ttgaaagtaaaaaccttaatcccagcctccgaagaattgataaaagcaagcggaatgattccgggttacgcaagcccaataaatgcaaaaaattgcagaataatattagacactggagctgccgaaagcaaagacttaatcgtgggagcaaacgaagaaggctatcactatatgcactgcattccaaaaagagattttgccagttttgaaacggtggatattgcagaagcggcagcggactgtctttgcccaaaatgcgaaaaggaattgacagaaacaaggggcattgagcttggcaatatattcaagctgggcacaaaattcagcgagaatatgaattgcacattcacagatgcggctggcgaggttaaacccgctataatgggttgctacggcattggcgttggtcgcttaatggcaagcgttgttgaaaacagccacgatgattttggtcctatatggcccctttccattgcccccttccaagttctcattgtgcaaatagcaaaagacgatgcaattttgcaggtatctgagcaactagaaaaagaacttgaagcccaaggaatagaagttttagttgacgaccgtgatgaacgccctggagttaaattcaaagacggcgatttatggggaatacccattcgcatttccataggcaaaaagggtcttgcagagaacaaggttgagtggaaacttcgctctcaaaaagaaatggaaatggtacccattgcagaggttgttgagaaggcgtga

SEQ ID NO: 41592 - protein, 251 aa, Unknown
  Obtained from environmental sample
  DOMAIN (162)...(250): Anticodon binding domain
  misc_feature (1)..(251): Xaa is any amino acid
MKVKTLIPASEELIKASGMIPGYASPINAKNCRIILDTGAAESKDLIVGANEEGYHYMHCIPKRDFASFETVDIAEAAADCLCPKCEKELTETRGIELGNIFKLGTKFSENMNCTFTDAAGEVKPAIMGCYGIGVGRLMASVVENSHDDFGPIWPLSIAPFQVLIVQIAKDDAILQVSEQLEKELEAQGIEVLVDDRDERPGVKFKDGDLWGIPIRISIGKKGLAENKVEWKLRSQKEMEMVPIAEVVEKA

SEQ ID NO: 41593 - DNA, 867 bp, Unknown
  Obtained from environmental sample
  misc_feature (1)..(867): n is a, c, g, or t
atgcgcagtgccaagccacatattttaatgcgaggcggctatataaagccgttatccacaggtatatacagcatattacccttggggcttagggttattcgcaaaattgaaaatataataagggaagagatgaatgccgttggtggcttagaagtggatttgcctgtggtgcaaaccgccgagctttggagtgaggctggccgttatcaagcaataggggatgaacttctccgtttcaaagaccgcaacaaccacaatatggtgctggcaatgacccacgaagaggcaatcaccgacatggctcgctacgtgctttccagctacaagcaactgccctttatgctctaccaattcaaaacaaaatacagagacgaagcgcgcgcgcgaggcggcttgattagggtgcgcgaatttgaaatgaaagatgcttacagttttcacgccacaccagaagacttagacaaacactacgaacttgaatacaaagcctaccaaaaaattttcaacagagttggaattgaacccgtgattgttcaatccgacacaggaattatgggcggcaaaattgcccacgaatttatgctagacacgccgagcggtgaggattatttaattatttgtaaacactgcggctaccaagcgaacagggaaatagctgagttcaagcggcaacctgttgatggaaatttgggtcttgagaaagtagcaacgccagagaaacaaaccattgacgaggtttgtacttttttaaaagcgaacaaaaaaaatgctggcaaatgcgtattctttgacgttgacggcaaactgatagtggctttggttcaaggttatttagaggtgagcgaaacaaaactgagaaatttttga

SEQ ID NO: 41594 - protein, 288 aa, Unknown
  Obtained from environmental sample
  DOMAIN (32)...(202): tRNA synthetase class II core domain (G, H, P, S and T)
  misc_feature (1)..(288): Xaa is any amino acid
MRSAKPHILMRGGYIKPLSTGIYSILPLGLRVIRKIENIIREEMNAVGGLEVDLPVVQTAELWSEAGRYQAIGDELLRFKDRNNHNMVLAMTHEEAITDMARYVLSSYKQLPFMLYQFKTKYRDEARARGGLIRVREFEMKDAYSFHATPEDLDKHYELEYKAYQKIFNRVGIEPVIVQSDTGIMGGKIAHEFMLDTPSGEDYLIICKHCGYQANREIAEFKRQPVDGNLGLEKVATPEKQTIDEVCTFLKANKKNAGKCVFFDVDGKLIVALVQGYLEVSETKLRNF

SEQ ID NO: 41595 - DNA, 393 bp, Unknown
  Obtained from environmental sample
  misc_feature (1)..(393): n is a, c, g, or t
gtgcttgaacccgggcgttctctggtaggcgacagcggcattttgatagcggaagttgttttaatttcaagaaaaaatcgtacggcgcttaaccgctgggtgtatcttgataccggaaaatttaacgggcttatagaaacgttaaatgaattaacaaaatatcctattgttatagaacatgaggacgatgaagcggaggaagaagaagcaattatcgccgggcctacctgcgacggtcttgatattctgtacgaagaccacaaataccggcttccggtaaacctcaaaacaggcgacaaactctattttctttccgccggagcgtatacggcaagttacgcttctgtctgttttaacggtttcccgccgattaaaacgtatattatggaataa

SEQ ID NO: 41596 - protein, 130 aa, Unknown
  Obtained from environmental sample
  DOMAIN (14)...(129): Pyridoxal-dependent decarboxylase, C-terminal sheet domain
  misc_feature (1)..(130): Xaa is any amino acid
MLEPGRSLVGDSGILIAEVVLISRKNRTALNRWVYLDTGKFNGLIETLNELTKYPIVIEHEDDEAEEEEAIIAGPTCDGLDILYEDHKYRLPVNLKTGDKLYFLSAGAYTASYASVCFNGFPPIKTYIME

SEQ ID NO: 41597 - DNA, 780 bp, Unknown
  Obtained from environmental sample
  misc_feature (1)..(780): n is a, c, g, or t
atgacgcgcggagaatatctaaaaaataacaacatagtttattcagaaatattttttgcaccgacaaaatttttaaaaatggggtttagttttccaaagattgttgagatattaacggaaggggcctgttcaatttataacaggtatggggtagaaattaaatatttaattgacgtttcacgtactttcggaccggaaaatgcaatgaataatttaaatctgatgttggaatacaaaagtgatgcaattataggcataggtctgggcggcgctgaaaaatcaggtccatcaaagaattatgcggaagtatttcaaaaagcgcgcgaacagggaattcattttgtggctcattcaggagaggacatggggtgggaagagatcggtgaaacattaacttatcttgatccggaacgtatagggcacggaataagtgcgattcaaaatcccaacctggttaaatatattgctgaaaataaaatccctcttgaaatatgccctacgagtaatttatttacacgcaaatatgtgtcagaaatagaaacacatcctgtaaaacagttttatgaaaataatctttttgtaactattaattcagatgatcctgcgctgttttcaacgtctcttgttgatgaatatatgctactttttaataaaggagttttttctcaaaatgaaattcttgctcttataaaaaacaatatatatgccagttttttaaccgaagataaaaagaatacgctttggagaaattgcaatatgatttataataatacttggtag

SEQ ID NO: 41598 - protein, 259 aa, Unknown
  Obtained from environmental sample
  DOMAIN (1)...(250): Adenosine/AMP deaminase
  misc_feature (1)..(259): Xaa is any amino acid
MTRGEYLKNNNIVYSEIFFAPTKFLKMGFSFPKIVEILTEGACSIYNRYGVEIKYLIDVSRTFGPENAMNNLNLMLEYKSDAIIGIGLGGAEKSGPSKNYAEVFQKAREQGIHFVAHSGEDMGWEEIGETLTYLDPERIGHGISAIQNPNLVKYIAENKIPLEICPTSNLFTRKYVSEIETHPVKQFYENNLFVTINSDDPALFSTSLVDEYMLLFNKGVFSQNEILALIKNNIYASFLTEDKKNTLWRNCNMIYNNTW

SEQ ID NO: 41599 - DNA, 888 bp, Unknown
  Obtained from environmental sample
  misc_feature (1)..(888): n is a, c, g, or t
gtgccggagcaggattatcaccgggaacgcaacagccttttgcttgattctgtaatgtttctgctcataacggtcgtcatcataaccgccgttatttatctggttgtgggcgggcttctccgtcgtgttaatcatctggttaaagggattgaaaaaatcgcggaaggaaatttggaagccaggatagaaggcagttacaatgacgagtttgacataatcaagaatgcggttaactctatggcagcggatataaaaacatacatggaagaaaaacttaaaaccgaacgcaaacttaatgaaagccgtatctccatcttgctttcccagatacaaccccattttttatacaacgctcttgccgtcatatcaaggctgtgcgacaaagaccccgcgaaggcaaaaaaagcgaccataaatttttccaattacctgagagcaaacatgaatcttttggagagcgcagagccgattccgtttcaaaatgaactaaaccatactatcagttttttgaatttggaaaatgccatgtacggcgaagctttaaaagtaatatatgacatacaagctcaatatttcaggattccggctctcacagtacagcccattgtcgaaaacgcaatcagacacggcataggcaaaaaagaaggcggaggcactgttaccatttcaacaaaagaaacagaagaacattatctggttattattacagatgacggagcggggtttgattccgcgaaaataccccatgacggacaacagcacatcggaataaacaatgtccgtcaaaggctgtcagggcaatgcggcggatctcttgaaataaaaagcaanccgggcgaagggacaagcgcaaaaataattattccgaaaaagatgcaggctgactga

SEQ ID NO: 41600 - protein, 295 aa, Unknown
  Obtained from environmental sample
  DOMAIN (190)...(291): Histidine kinase-, DNA gyrase B-, and HSP90-like ATPase
  misc_feature (1)..(295): Xaa is any amino acid
MPEQDYHRERNSLLLDSVMFLLITVVIITAVIYLVVGGLLRRVNHLVKGIEKIAEGNLEARIEGSYNDEFDIIKNAVNSMAADIKTYMEEKLKTERKLNESRISILLSQIQPHFLYNALAVISRLCDKDPAKAKKATINFSNYLRANMNLLESAEPIPFQNELNHTISFLNLENAMYGEALKVIYDIQAQYFRIPALTVQPIVENAIRHGIGKKEGGGTVTISTKETEEHYLVIITDDGAGFDSAKIPHDGQQHIGINNVRQRLSGQCGGSLEIKSXPGEGTSAKIIIPKKMQAD

SEQ ID NO: 41601 - DNA, 1467 bp, Unknown
  Obtained from environmental sample
  misc_feature (1)..(1467): n is a, c, g, or t
atgtttgaagtgcagcgagtgtttgaacacctgcaaattcggcgcggttatcaagggttaagggaaggagagaatatgattaaagtaactataaacgataaaacattggaagttgaaccggggactacaatcctcgaagctgcagagatggtgaatataaagattcctactttgtgttacaatccggacctgacgccgtgggcgtcatgcggtatttgtattgtacgtcttgcgggctctcccaaaatggtacgcgcctgtattaccgcctgtgaaaataatatgagcgttatcacccacgacaccgagataatcgcagtcaggcgtactgtgcttgaattgatactttccaaccaccccaacgactgtctccaatgtccgcgcacccaatgctgcgaactgcaggatttggcgtctgaattcggcctaagggaagcgccctttataaagattaagaatgaactgcctgtggacaattccaatccggcggttgtactttgtcccgaaaaatgtatccgatgcggcagatgcgtaaaagtgtgtcaggaagtgcagaatgtctgggcgcttgaattcctcggacgaggcattcacggaaaaatcgccagcgccgctgacgttccgttaggtgaaagtccgtgcattaaatgcggtcagtgcgccgcacattgtccggtgggagccattnacgaacgggacgatacggtaaaagtctgggcagcgctccagaatcctgacgttcacccggtggttcagattgctccggcagtgcgggtggccctggcggaagaattcgggctgcccccgggaacggtccttaccaaaaagatctacgccgctcttaggcgtctgggctttaagaccgtgtttgacaccaacttctctgcggatctcactataatggaagaaggaacggaactggtgaagcgccttacggaaaaaggcagcgccattcctcttatcacttcctgctgccctgcctgggtcgattatatggaaaagtactattccgatatgatccccaacttctccaccgccaagtctccccagcagatgatgggcgccatgattaagacatactgggcaggcaaagccggagtagatcccgcgaagatctattcggtatccgtaatgccctgtactgccaaaaaatgggaaacctaccgcaatgacgatatgaagagctcgggggaatgggatgtggacacttctattaccacccgggaattggcgcggatgatcaagcaggcaggtatcgaaatcctcaaactggctgatgaagaagccgacagccccttaggcccttacaccggcgcgggaaccatctttggcgctaccggcggggtcatggaagctgcggtacggagcgcctattatctggtaaccaaaaaggaactggccgatgtaaactttaagcctgtccggggcctgagggtgaaagaagcggaagtagacttccagaactga

SEQ ID NO: 41602 - protein, 488 aa, Unknown
  Obtained from environmental sample
  DOMAIN (207)...(230): 4Fe-4S binding domain
  misc_feature (1)..(488): Xaa is any amino acid
MFEVQRVFEHLQIRRGYQGLREGENMIKVTINDKTLEVEPGTTILEAAEMVNIKIPTLCYNPDLTPWASCGICIVRLAGSPKMVRACITACENNMSVITHDTEIIAVRRTVLELILSNHPNDCLQCPRTQCCELQDLASEFGLREAPFIKIKNELPVDNSNPAVVLCPEKCIRCGRCVKVCQEVQNVWALEFLGRGIHGKIASAADVPLGESPCIKCGQCAAHCPVGAIXERDDTVKVWAALQNPDVHPVVQIAPAVRVALAEEFGLPPGTVLTKKIYAALRRLGFKTVFDTNFSADLTIMEEGTELVKRLTEKGSAIPLITSCCPAWVDYMEKYYSDMIPNFSTAKSPQQMMGAMIKTYWAGKAGVDPAKIYSVSVMPCTAKKWETYRNDDMKSSGEWDVDTSITTRELARMIKQAGIEILKLADEEADSPLGPYTGAGTIFGATGGVMEAAVRSAYYLVTKKELADVNFKPVRGLRVKEAEVDFQN

SEQ ID NO: 41603 - DNA, 990 bp, Unknown
  Obtained from environmental sample
  misc_feature (1)..(990): n is a, c, g, or t
ttgggcgcgggcgcgtttgtctgcggcgaagaaaccgcgcttattaaatccgtagaaggcaacaggggaatgcccgttcctaaaccgccattcccggcaaacaagggcttgtggcaaaaacccactattattaacaacgttgaatcattcgccaatgttcccgtcatcaccgcgaggggcggggactggctcgcgaaaatcgggactgaaaaatccaaaggaaccaaagtattcgcgcttacgggaaaagtcaaatattcaggacttgtcgaagttccaatgggaaccacgttacgcgaacttgtctacgacgtgggcggcggaataaaagacgataaaaaatttaagggagtgcagtcgggcgggccgtcgggcggcattcttaccgaaaaatcacttgatgttccaatcgactttgaatcattattggctaacggctccatgatgggctcaggcggcatgatagtaatggacgaggatgactgcgtggttgacgtatcgcgcttctacatggacttctgcgttgatgaaagctgcggtaaatgttctccctgccggattggtactacccaaatacttaaaatccttgaaaaaatagcaaagggcaatggcgaggacgaagaccttgtaaaacttgaagctatcggacacgcgatgacgaaggcctcgctttgcatgctcggctgtaccgccgcaagtcccgtaatgtccacccttaaaaatttccgcgaagaatacatggaacatatacacgataaaaaatgccgtgcaggcaagtgtaaaaaactggtcagatttacaattgatacggtgaagtgtatcggctgcggagcgtgcgcaaaaaaatgccccgctcactgcattagcgcaggagaagcagcaatgtttcccgataaaaagcggcctccgtatatcgtcaataacgatgaatgtttgaagtgcagcgagtgtttgaacacctgcaaattcggcgcggttatcaagggttaa

SEQ ID NO: 41604 - protein, 329 aa, Unknown
  Obtained from environmental sample
  DOMAIN (304)...(327): 4Fe-4S binding domain
  misc_feature (1)..(329): Xaa is any amino acid
MGAGAFVCGEETALIKSVEGNRGMPVPKPPFPANKGLWQKPTIINNVESFANVPVITARGGDWLAKIGTEKSKGTKVFALTGKVKYSGLVEVPMGTTLRELVYDVGGGIKDDKKFKGVQSGGPSGGILTEKSLDVPIDFESLLANGSMMGSGGMIVMDEDDCVVDVSRFYMDFCVDESCGKCSPCRIGTTQILKILEKIAKGNGEDEDLVKLEAIGHAMTKASLCMLGCTAASPVMSTLKNFREEYMEHIHDKKCRAGKCKKLVRFTIDTVKCIGCGACAKKCPAHCISAGEAAMFPDKKRPPYIVNNDECLKCSECLNTCKFGAVIKG

SEQ ID NO: 41605 - DNA, 444 bp, Unknown
  Obtained from environmental sample
  misc_feature (1)..(444): n is a, c, g, or t
atgggcgcggcagtagaaataaaccttcgggatatagaaaggctccaaaagaagatcgaaaagtttgccctgtcaggcggcgacaaagagaggctgctaaccagcttgggcaacagaatggtcgagcaaaccagggaccgctttaacctccagaaggatccttccggcgatccctggcacgagctaaccgaggcatacaaaaagcgcaaaggctttgtttcaaccggcggcattctggaacgggaagggttacttaaaatttctatagaaccccagctcaccggcagggacagcgtccttgtcggctcgccgatggaatacgcgggctaccaccagagcgcgaaggacaaaaagcgccgccgggagtttttggggctaagcgccgacaacatcgacgagctggaaaatgccatcgatgaatttttgaagggcaaaatagcatga

SEQ ID NO: 41606 - protein, 147 aa, Unknown
  Obtained from environmental sample
  DOMAIN (10)...(143): Phage virion morphogenesis family
  misc_feature (1)..(147): Xaa is any amino acid
MGAAVEINLRDIERLQKKIEKFALSGGDKERLLTSLGNRMVEQTRDRFNLQKDPSGDPWHELTEAYKKRKGFVSTGGILEREGLLKISIEPQLTGRDSVLVGSPMEYAGYHQSAKDKKRRREFLGLSADNIDELENAIDEFLKGKIA

SEQ ID NO: 41607 - DNA, 783 bp, Unknown
  Obtained from environmental sample
  misc_feature (1)..(783): n is a, c, g, or t
ttgcaaataaacgctgtaatggaaaacatagccgcccagaccaacttgctttcgatgaacgccggtattgaggcggcgcacgccggggaagtgggtaaagggtttgccgttgtcgccggtgaaatacgaaaacttgccgaatcgtcaagtaatcagtcaaggtcaaccgcggatatgttaaaaaagataaaagactccatagacggaataaccgcgtcttccaatgatgttctttcacgtttccaggttattgacgaaaaagtaaaaacagtttcggtacatgaggaaaatatccgcaacgcgatggaggaacaggaagtaggcggaaaacaaatacttgaatcaataaaccgattgaaagaaatcagcataacggtaaaagatagcgctggtgaaatgcataaatccggcgatcacctgaaccggcagaccaaagattttataaaaataagcaatgagtccatgaccggcatgaacgatatagtaaacggcgcgatgaaggaaataaaatcagcggtaaccattgtagacgaaatgagcgccgagaataacaagaactttgaagaccttaaaacggaatcaacaaaattcaaggttgaatcaagtgacgcaaagaaaaaaattgtcgttattgatgatgaagaggccgttcttgtcatgacaaaaaattcgcttgaagataaatatgacgttactacagtcaattcaggtaaggcggctttaaacatgttcttcaaaggatatgttcccaattttggtgttattggatttgatgatgcctga

SEQ ID NO: 41608 - protein, 260 aa, Unknown
  Obtained from environmental sample
  DOMAIN (2)...(200): Methyl-accepting chemotaxis protein (MCP) signaling domain
  misc_feature (1)..(260): Xaa is any amino acid
MQINAVMENIAAQTNLLSMNAGIEAAHAGEVGKGFAVVAGEIRKLAESSSNQSRSTADMLKKIKDSIDGITASSNDVLSRFQVIDEKVKTVSVHEENIRNAMEEQEVGGKQILESINRLKEISITVKDSAGEMHKSGDHLNRQTKDFIKISNESMTGMNDIVNGAMKEIKSAVTIVDEMSAENNKNFEDLKTESTKFKVESSDAKKKIVVIDDEEAVLVMTKNSLEDKYDVTTVNSGKAALNMFFKGYVPNFGVIGFDDA

SEQ ID NO: 41609 - DNA, 405 bp, Unknown
  Obtained from environmental sample
  misc_feature (1)..(405): n is a, c, g, or t
ttgaatgatctgctagtcggggatttatccgtggagcaggatcgggagatcattttacttaaagatgtgcctgaagaatacaagacaatggaattgtgtcttatagctttagaaacagttggttacgtgcttcaatttgtgccggaagaacacaagacggaagaactttgtcttacggcggtccggacaaatggccaggcacttcagtatacgccggaggagcgcaggactgcggaactgtgccttgcgacggttatgcaggacggattcgcgcttgcctatgtaccggaaaaaaaccggtcagcgttactatatatcgcggctgttgtacataatggcgcggcgcttcaacttgtgccggaagagagcaagacagcggaactgtgtctcgtggctgtcgcataa

SEQ ID NO: 41610 - protein, 134 aa, Unknown
  Obtained from environmental sample
  misc_feature (1)..(134): Xaa is any amino acid
MNDLLVGDLSVEQDREIILLKDVPEEYKTMELCLIALETVGYVLQFVPEEHKTEELCLTAVRTNGQALQYTPEERRTAELCLATVMQDGFALAYVPEKNRSALLYIAAVVHNGAALQLVPEESKTAELCLVAVA

SEQ ID NO: 41611 - DNA, 498 bp, Unknown
  Obtained from environmental sample
  misc_feature (1)..(498): n is a, c, g, or t
atgtatgtatctcggcaaaatgagtattcaaacgctgaccaaaggacaaccggcttgcgccaggtggtagttgaaaatttcaaggatatggtcgcgaatggctgctataagctcatagtgctcggagagcctgagcttttaaagtatatagaaataatcatccgtacatatctggggcagagcctaaccctttgcaacagccgaccatattttcttgaaataatgccagaagataccgacaagggaaccgcgttggcagaagtggcgaagatcttgaaagtcaagcaggaacagacgatggctatcggggattccatgaacgatgaagcaatgatccgctgggcaggcattggagtggcaatggcaaacggggatgaacgcataaaaagcatggccgatgtagtaaccgagcacacaaacgatgaagacggcgtggcggaagttatcgaaaagtattttccgattaaaagtggacagaaagaagggggacaccaatga

SEQ ID NO: 41612 - protein, 165 aa, Unknown
  Obtained from environmental sample
  DOMAIN (1)...(149): haloacid dehalogenase-like hydrolase
  misc_feature (1)..(165): Xaa is any amino acid
MYVSRQNEYSNADQRTTGLRQVVVENFKDMVANGCYKLIVLGEPELLKYIEIIIRTYLGQSLTLCNSRPYFLEIMPEDTDKGTALAEVAKILKVKQEQTMAIGDSMNDEAMIRWAGIGVAMANGDERIKSMADVVTEHTNDEDGVAEVIEKYFPIKSGQKEGGHQ

SEQ ID NO: 41613 - DNA, 651 bp, Unknown
  Obtained from environmental sample
  misc_feature (1)..(651): n is a, c, g, or t
atgagtgacagctctggatcttccgaagacattcccatcagtacggttgattcgccttcggtggtattggaacttatttatcagttaaagataaaggatgtaatgaatgccgcggtaatcagcgcaagaagcacagacacaatacgccgaattcagtcagtcatgcgggaaaattacattagcggccttcccatttcggatggaagggaacttttgggtattatttctatcgaagacatcattaaagcccttgagggtggatatattgatgaaccggcggaaactcatatgaccaaaaatgttatcgttctgcaagacgatatgcccctttcattcgcgatttcctatttaaacaagtaccgttacggtcgctttccggttttaaacaaaaacaaggagttggtggggatcatttcttcaaaggatgtggtaaaaagcctcctcgtagaaatgaaccgcgaagttatgaggcttgaaaaaatgcacaacaaggaaacgaacgcccaggacaagtttacggagatggaatttaccacagtgcgctatgattttgaattggcgggacgggcttccacagaaataaaaaaggccctaaaaaaacgggaatatcgatccaaaaattatccggcgtgttgcaattgccagttatga

SEQ ID NO: 41614 - protein, 216 aa, Unknown
  Obtained from environmental sample
  DOMAIN (33)...(148): CBS domain pair
  misc_feature (1)..(216): Xaa is any amino acid
MSDSSGSSEDIPISTVDSPSVVLELIYQLKIKDVMNAAVISARSTDTIRRIQSVMRENYISGLPISDGRELLGIISIEDIIKALEGGYIDEPAETHMTKNVIVLQDDMPLSFAISYLNKYRYGRFPVLNKNKELVGIISSKDVVKSLLVEMNREVMRLEKMHNKETNAQDKFTEMEFTTVRYDFELAGRASTEIKKALKKREYRSKNYPACCNCQL

SEQ ID NO: 41615 - DNA, 303 bp, Unknown
  Obtained from environmental sample
  misc_feature (1)..(303): n is a, c, g, or t
ttggagataaatcaggtagtccactcccttggcggaacaattagctgtacgatacaacccgacaaggtgatcattgtggctgcggacaccggccccggcatcaaggatatcagccttgtgctgcaagaggggtggtcaacagctgacgagtggattcgttctttgggttttggcgcgggaatggggctgccgaatacaaaacgcgtctcggacgaattttatattgagtcgactctcggcgtcggcacgaaagtccgttcggttgtatacattgactcgcctaaggatatggagggatcatga

SEQ ID NO: 41616 - protein, 100 aa, Unknown
  Obtained from environmental sample
  misc_feature (1)..(100): Xaa is any amino acid
MEINQVVHSLGGTISCTIQPDKVIIVAADTGPGIKDISLVLQEGWSTADEWIRSLGFGAGMGLPNTKRVSDEFYIESTLGVGTKVRSVVYIDSPKDMEGS

SEQ ID NO: 41617 - DNA, 1269 bp, Unknown
  Obtained from environmental sample
  misc_feature (1)..(1269): n is a, c, g, or t
ttgcggggggcaaggcagaccggaaagacagcggcggtcagggagttgggcagacggtttaagcattatgtggaaattaactttgataacgacgcgggcgcggcgcattattttcaggataatcttgaaccggaagagctgtgcaagcgcctttccgtatatgtccgcgccccgataactccgggggaaacgcttcttttttttgatgaaattcaaagctgtacggaggcgataaaatcgcttcgttatttttacgagaaatatccccagcagcacgttattgccgcaggctctcttttggagtttacgttaggcgaaataccgtctttcggcgtaggcaggcttcattccgtttttatgtacccgttttcgttctatgagtttttgggcgcgctgggcgaggaaatgttatccggagcttgtctggaagcctcgccggataagccgctcccgcagcctgttcataaactgcttctggatcgcctgaagatttttttgctgataggcggtatgccggaagccgtctcaagttatgcgcaaagcagggatatactgcagagccaggtaattcttgaggatattataactacgttcagggatgatttttccaaatatcggacaaagatgccggctattattttaaatgaagtctttgaatcggtgatgcatcaggcgcagggaaaatttatttatgaacacgcggcggtagaaaccgcaaacgccagaattaaacaggctctggatttgcttattatggccggactcgcaattcctgtaacgcacagcgcggcaaacggcattccccttggcgcgcagacaaaccccaaataccgccgcgttattccatgcgataccggcattttcctgcatatacttggaattgataaatcgcagatacttgtatctgacgattttaaaaccgttaaccagggagcgttagcggaaatatatgccggtcttgaacttctgaaaaacggcggcactcatgcccgcaggcagctttattgctggagcagggaaaaagcccaaagcagcgcgcagatcgattatcttatacagctcgattcgtcaatcgttcccattgaagttaaatcaggaacgcagggcggcatgaagagcctgaatatttttatgaaggaaaaaaatatcagccggggaataagggcttcgcttgagaatttcgcgcaaaaagacaattttgacatttatccgttgtacgcgatttcgaatttatatattaaaggactggggctcgggaacagggactag

SEQ ID NO: 41618 - protein, 422 aa, Unknown
  Obtained from environmental sample
  misc_feature (1)..(422): Xaa is any amino acid
MRGARQTGKTAAVRELGRRFKHYVEINFDNDAGAAHYFQDNLEPEELCKRLSVYVRAPITPGETLLFFDEIQSCTEAIKSLRYFYEKYPQQHVIAAGSLLEFTLGEIPSFGVGRLHSVFMYPFSFYEFLGALGEEMLSGACLEASPDKPLPQPVHKLLLDRLKIFLLIGGMPEAVSSYAQSRDILQSQVILEDIITTFRDDFSKYRTKMPAIILNEVFESVMHQAQGKFIYEHAAVETANARIKQALDLLIMAGLAIPVTHSAANGIPLGAQTNPKYRRVIPCDTGIFLHILGIDKSQILVSDDFKTVNQGALAEIYAGLELLKNGGTHARRQLYCWSREKAQSSAQIDYLIQLDSSIVPIEVKSGTQGGMKSLNIFMKEKNISRGIRASLENFAQKDNFDIYPLYAISNLYIKGLGLGNRD

SEQ ID NO: 41619 - DNA, 675 bp, Unknown
  Obtained from environmental sample
  misc_feature (1)..(675): n is a, c, g, or t
atgtctaagattttacataacatggaattgcttgctcccgccggttctcctgaagcgcttgacgcggctgtcggagagggagcggacgctgtatatcttgggctgaaggattttaacgcccgtcttagaagcgctaattttacctacgcgcagtttgaaagcgctcttcgttcccttcatagaatagggaaaaaagtttacgttacggtaaacacggtttttgaacagcgcgaagcggacagaatgtatcaatttttaaaatacctcgattcgcagcagcctgacgctataatcgtgcaggatttaggcgttgtggaaatggcgcgttccaattttccttcattaagacttcacgcttccactcagatgaatatagcctccgcaaggggggcgaacgctctttcgcgttacggagtttcccgcgttgtttttgcgcgggaactttcgcttgaagaactgcgcagtataaaaagagaaacaaaccttgaacttgaagtttttgttcacggagcactttgcgtcagcgtttcagggctttgtcttttttcagttttctcggcggtaaatcagctaacaggggaatgtgtacgcaggcttgccgcaggttataccgcacatactcaggccgccgcgcggacagcgaaaaagaaagcggctatatttcagcccgaatga

SEQ ID NO: 41620 - protein, 224 aa, Unknown
  Obtained from environmental sample
  DOMAIN (79)...(224): Peptidase family U32
  misc_feature (1)..(224): Xaa is any amino acid
MSKILHNMELLAPAGSPEALDAAVGEGADAVYLGLKDFNARLRSANFTYAQFESALRSLHRIGKKVYVTVNTVFEQREADRMYQFLKYLDSQQPDAIIVQDLGVVEMARSNFPSLRLHASTQMNIASARGANALSRYGVSRVVFARELSLEELRSIKRETNLELEVFVHGALCVSVSGLCLFSVFSAVNQLTGECVRRLAAGYTAHTQAAARTAKKKAAIFQPE

SEQ ID NO: 41621 - DNA, 474 bp, Unknown
  Obtained from environmental sample
  misc_feature (1)..(474): n is a, c, g, or t
gtgccttttgttcggcgagtttgttctattttgggcggtcggctttcttccggtcctgtttcaaaaaaccacgcctcccttccgtccgtactgcttataatttccaccctgcttaccgcggcggcggcggcaagcgcttcccctctgaacccgagcgttacggctgtatcaagatcgtctaaccggcgaattttacttgttgcgtgcgtcagcgtgcagagttccaaatcttcgcggatcattccgtctccatcgtctgatacctcaacttttttacagccgccttcttcgatggagatttctatgttagctgaatttgcgtctattgcgttgtcaagaaattccctgacaagcgcggcggggcggtctactacttcgcccgcggcaatgcgtcttgcctcttcaggcggaaggactaggatacgggaattattctccgtcatcaaaaagttccaactccggcgattcgcttaa

SEQ ID NO: 41622 - protein, 157 aa, Unknown
  Obtained from environmental sample
  misc_feature (1)..(157): Xaa is any amino acid
MPFVRRVCSILGGRLSSGPVSKNHASLPSVLLIISTLLTAAAAASASPLNPSVTAVSRSSNRRILLVACVSVQSSKSSRIIPSPSSDTSTFLQPPSSMEISMLAEFASIALSRNSLTSAAGRSTTSPAAMRLASSGGRTRIRELFSVIKKFQLRRFA

SEQ ID NO: 41623 - DNA, 543 bp, Unknown
  Obtained from environmental sample
  misc_feature (1)..(543): n is a, c, g, or t
atgacaggtggcccgtacggatctaaaacctgttgtagcgcggtgggccatgaaattgactgggctttgagtgactatgccgctgacttgcgcgcgccaaccccttccgcggcggcggaacttgtgagtgaaagccgcgccgccattacggatacaattaaatcaatgaaagaaaactttaaaaacgttatacacatacgaatagaaagggcgcggcttttgcttaaacctttcgatttacgggatttggaataccgtttccgcgctattttacaaccgcgccttatccgcctggacgatgcgaaagacgcgcttatcaaggcaattgccgaccgaaaggaaaatttgcgcggcagaatagcgctggcatccgctgttatcgaagccacaagtcctcttgcggcaatggagcgcggtttttccgtagtaacaaactcaagcggcgcaatagtacgaaattcagcaaaagtaaaaaaaggggagcggctttttatccggccgcttaaaggaaaaattaacgcaatagttgaaagttgcgagtaa

SEQ ID NO: 41624 - protein, 180 aa, Unknown
  Obtained from environmental sample
  DOMAIN (6)...(135): Exonuclease VII, large subunit
  misc_feature (1)..(180): Xaa is any amino acid
MTGGPYGSKTCCSAVGHEIDWALSDYAADLRAPTPSAAAELVSESRAAITDTIKSMKENFKNVIHIRIERARLLLKPFDLRDLEYRFRAILQPRLIRLDDAKDALIKAIADRKENLRGRIALASAVIEATSPLAAMERGFSVVTNSSGAIVRNSAKVKKGERLFIRPLKGKINAIVESCE

SEQ ID NO: 41625 - DNA, 756 bp, Unknown
  Obtained from environmental sample
  misc_feature (1)..(756): n is a, c, g, or t
atgatccaggggggcgatccccttggcgacggcacaggcgggcctggttaccgttttcccgacgagttcgatcccacccttttgcacgacggccctggggtgctttccatggccaatgccggggccggtacaaacggcagccagttttttattacccatgtggcgacgccctggctggacggcaaacattccgttttcggcagggtagtcaagggccaggatgtggttgacgccatacagcagggggacaggatacagaagattaccataatccgcaacggcgaaatggccgcgaacttcaaggcggatcaaactgtttttgacgctttggttcgcaacagcgagtcggcggctgctgcaaaggcaaaggtcaggcaggaagaggaaatcgctgaaatcgccaggaaatatccaaacgccatcgtaagtccatccggcctaaggtatatcgttcaaaagcagggagtcggcccaaagcctactcccggaagtaccgcagtggtcaacatcataaggagcctgctttccggcacggtttttgccaattcggatctctcaggcgggcctgaaaagctgccagtaaggataggcagggtccttccgggtctggaccaaccaataatgggcatgtccaggggtgagaagcggctcgcgattgttccccctgaattgggatacggaaatagggacattgagaacgtcattccggcgaatagtttcctgatttttgagctggaactggtggagataaagtaa

SEQ ID NO: 41626 - protein, 251 aa, Unknown
  Obtained from environmental sample
  DOMAIN (1)...(96): Cyclophilin type peptidyl-prolyl cis-trans isomerase/CLD
  misc_feature (1)..(251): Xaa is any amino acid
MIQGGDPLGDGTGGPGYRFPDEFDPTLLHDGPGVLSMANAGAGTNGSQFFITHVATPWLDGKHSVFGRVVKGQDVVDAIQQGDRIQKITIIRNGEMAANFKADQTVFDALVRNSESAAAAKAKVRQEEEIAEIARKYPNAIVSPSGLRYIVQKQGVGPKPTPGSTAVVNIIRSLLSGTVFANSDLSGGPEKLPVRIGRVLPGLDQPIMGMSRGEKRLAIVPPELGYGNRDIENVIPANSFLIFELELVEIK

SEQ ID NO: 41627 - DNA, 504 bp, Unknown
  Obtained from environmental sample
  misc_feature (1)..(504): n is a, c, g, or t
gtgaaagacccgcagcccctgatccgcgtgatgggtacagacccaagctatttgaggactgcctttgacgcggaagtgaacaattttagggattggggcattcctttgggcaggcgcttcaggtcgctcaagctgtggtttctgatactggatcgtggagtagaggccatacaggaactcgtcaggcgcaacgtgtcctacgcagcttggctggccgcccagatagactcggccccaaactggcagcgcatgggcccagcgcacttgcagacggtttcgctgaggcacgtcccaccaagcatcagcggcgatgaagacgcgctatccaaccataaccttgctctcgccgatgcaataaacgcggctgggcggcattttgtgacaacggctatggtaaaaggccaaaggttgatccgcgcatctataggggcccaagcgacagagatgagacacgttgagggcctgtgggagtcgctgcaaaaggcggcctctgaaattaagtag

SEQ ID NO: 41628 - protein, 167 aa, Unknown
  Obtained from environmental sample
  misc_feature (1)..(167): Xaa is any amino acid
MKDPQPLIRVMGTDPSYLRTAFDAEVNNFRDWGIPLGRRFRSLKLWFLILDRGVEAIQELVRRNVSYAAWLAAQIDSAPNWQRMGPAHLQTVSLRHVPPSISGDEDALSNHNLALADAINAAGRHFVTTAMVKGQRLIRASIGAQATEMRHVEGLWESLQKAASEIK

SEQ ID NO: 41629 - DNA, 1089 bp, Unknown
  Obtained from environmental sample
  misc_feature (1)..(1089): n is a, c, g, or t
atggctgaaacaggaacccgccgtcgcggactattatttttcccgcccggagatgggcggttttggcagaacggaagttattctcaagaggtaagtatggaaaaaattaacgccgccattatcggcctgggccgcattgccagcctgctcgaagaagacagcctgcgggaaaaaccctgtacccatgccggcgcattggccgctaatcccgattgcgtccttgccgccggctgcgacattgacgaagaacgccgccgcctttttgcggaaaagtggcaggttcccgtttacgcggacgccgccgaaatgctgcgccttcacgcgccgcggattctggcgattgccacccacccggacagccattaccattactgccgccttgccgccgcttccgacgttccggtaataatctgtgaaaagccgttagctgataatatcagtgaagcccgcaaaattgcccgtttaacatataacggcccggtcattatcaccaaccacgaacgccgctatgctaatgattatatccgcgccaaagccattctggacaaagcggcattgggccggctgttaagtgtgcgggctgttttatacatgggcaagaccaagcggctgatagacgttctctggcatgacggcactcatctggcggacgcgattatgtttcttgccaacggaacattgaaacaccagcggcgctggggcgcaaaacttactgccaataccggcaccgcatggctggaaggggaattacacgtgaaaaaacccgcgatgccggttccggttgttatagaagccggcgcggggcgggattacctggcatttgaaatggaattctcctgcgaaaaaggccgtttacggattggcaacggcatttttgaagtgtgggaaagcgcccccagtccttacgccgaagaattccgttccctcaaacgtaccaatgaaatttttaccggccccaccggttattttgccaacatgatacaggacgccgttacctgcgtaaaagaacccggcagacagccccgttccggcgcagccgacggcttgcgggtaattgagtacctgaattcagttaaggcctggcggtag

SEQ ID NO: 41630 - protein, 362 aa, Unknown
  Obtained from environmental sample
  DOMAIN (36)...(166): Oxidoreductase family, NAD-binding Rossmann fold
  misc_feature (1)..(362): Xaa is any amino acid
MAETGTRRRGLLFFPPGDGRFWQNGSYSQEVSMEKINAAIIGLGRIASLLEEDSLREKPCTHAGALAANPDCVLAAGCDIDEERRRLFAEKWQVPVYADAAEMLRLHAPRILAIATHPDSHYHYCRLAAASDVPVIICEKPLADNISEARKIARLTYNGPVIITNHERRYANDYIRAKAILDKAALGRLLSVRAVLYMGKTKRLIDVLWHDGTHLADAIMFLANGTLKHQRRWGAKLTANTGTAWLEGELHVKKPAMPVPVVIEAGAGRDYLAFEMEFSCEKGRLRIGNGIFEVWESAPSPYAEEFRSLKRTNEIFTGPTGYFANMIQDAVTCVKEPGRQPRSGAADGLRVIEYLNSVKAWR

SEQ ID NO: 41631 - DNA, 1098 bp, Unknown
  Obtained from environmental sample
  misc_feature (1)..(1098): n is a, c, g, or t
gtgttaatccgaacatcaggcgaaacccagatctacgcctgcgcagcaggcttcgcttactggaacagcccccttttccgcacagggcattacgccggggcctttagtgccggccaggtgctgatgtgcggacataatgaggcagtggaaagatttcactccctgtgcaatgacaggatcgccgcagaaaaattcggtatgatgcttaaggaagtaactgaaaagaaacatcaggaaatccaggcaatggcccgcctgcttgggctttgcgccgcggaaatatccgaaaaagaaaaagaccttgacaaaaccattcgccgcatggcctggctcaaagaacttccaaggggaatgaaagaacaaggcaaagccaaaacaacaatcacttcttcagtgcaggaaaaagcaggaacagaagagattttggagaaagaacggctgctcctggcggcgtttcaaaggggcgacagcgaaacaggaaccaaaacaataaatgagcttatgcactgcactctgtcaagatacccgcatgattttgagcttatccgtttcagagccatagaaattttggtactgctttcaagggcctcggatagtaccgccccattggaaattaacaatcgcattttgacacagattcttgaatccagaacgaccgaagagctgataaaaaacctcacccgggcagccggccacatggcggataaaatattttcttttcggggtatgcgccactcatctgtcctccgcaaagcgcagagattcatatgggaaaattacagcagaaaaattaacctcgaagaaatatcaaaagccgcgggattatccgcgccgtatttcagcacgatttttaacgaagagatgggagaaaaactctcgcgttaccttaaccgtcttagggtggaaaaagcctctactttgcttacagaaaccaataaaccaatgaatctaatcgccgaactctgcggatttgaagaccaaagctggttttcaaaagtatttaaaagttttaccggagtaaatcccggaagatacagggaagccggaaaaatggggtatgagataaaaaatggaaaaaactttaaaacaaaacaatga

SEQ ID NO: 41632 - protein, 365 aa, Unknown
  Obtained from environmental sample
  DOMAIN (251)...(297): Bacterial regulatory helix-turn-helix proteins, AraC family
  misc_feature (1)..(365): Xaa is any amino acid
MLIRTSGETQIYACAAGFAYWNSPLFRTGHYAGAFSAGQVLMCGHNEAVERFHSLCNDRIAAEKFGMMLKEVTEKKHQEIQAMARLLGLCAAEISEKEKDLDKTIRRMAWLKELPRGMKEQGKAKTTITSSVQEKAGTEEILEKERLLLAAFQRGDSETGTKTINELMHCTLSRYPHDFELIRFRAIEILVLLSRASDSTAPLEINNRILTQILESRTTEELIKNLTRAAGHMADKIFSFRGMRHSSVLRKAQRFIWENYSRKINLEEISKAAGLSAPYFSTIFNEEMGEKLSRYLNRLRVEKASTLLTETNKPMNLIAELCGFEDQSWFSKVFKSFTGVNPGRYREAGKMGYEIKNGKNFKTKQ

SEQ ID NO: 41633 - DNA, 1476 bp, Unknown
  Obtained from environmental sample
  misc_feature (1)..(1476): n is a, c, g, or t
atgaaggcgaccggcgaggtcatggccatagccgacactttcgaggaagctctgctgaaggcggtgcgcggcgcggaaatcggcctgtcgaacctgaacctgccgcgcctcgccgcgaagtctgacggcgaaatacgcgatatgctcaagactgtgaccgacgagcggctgttcgcgctctacgaggcgataaaacgcggcgtaagcgtcgacgaattgttcgatataacgaaggttgaccgctggttcttgcacgggcttgtcaatatacataaggggctgttcgacgataattcccaatcaatagacggcggtaaattaatctacaagatggtcgatacctgcggcggcgagtttgaggctaagacgccgtacttctactctataagaaacggcagtgaaaacgaggctctgccgttcatcgaaaagagttccaagccgcgaatagtagtgctgggcagcggccctatacggatagggcagggcattgagtttgactacgcctgcgtgcattgcgtgtggacgctgaaaaacctggactacgacgtaatcgtgattaacaacaaccccgaaacggtatccaccgacttcgataccgccgacaggctgtattttgagcccctgtgcattgacgacgtgatgagcataatcgagattgagaagccgttaggtgtaatcgtggcgtttggaggcggcacggcgattaagctgacaaaaaagcttcatgaacgcggcgttaagattatcggcacttcggcggacagcatagacatctgcgaggacaggcagcggtttgacgccctgctggaaaatctgcaaatcaaacgccccaaaggttacggcgttatgacagaggcgcaggcgctggatgccgccgagaaactgggctttcccgtgcttatgcgcccttcctatgtattgggcggccagaacatgatcatcgcgttctcaccggatgatatccgcgagtatatggaaataatcctccgctcaaaacaggaaaaccccgtgctgattgataaataccttgaagggctggaaatagaggttgacgcgttatgcgacggcgatccttcgcggggcgggcagggcagcgtgtttattccgggtattatggaacacattgagcgcaccggcatccattccggcgacagcatagccgtatatcccgcgattaacatagacgacgcgttagccgaaaagattttcaatgttacgcataaattgtgcatggcgcttgatgttaaaggacttgtcaatattcaatatgtcctctatgagaacgacgtgtatgttattgaggtaaatccccgcgcgtcccgtaccgttccgtaccttagcaaagttacgggaattcccatgtgcgagcttgccacaaaaataagcgcggggcagacgctttcctctttggggtatatatccggcttggaagaataccgccatatatcgccgttaaagtgccggtcttctctttga

SEQ ID NO: 41634 - protein, 491 aa, Unknown
  Obtained from environmental sample
  DOMAIN (261)...(463): D-ala D-ala ligase C-terminus
  misc_feature (1)..(491): Xaa is any amino acid
MKATGEVMAIADTFEEALLKAVRGAEIGLSNLNLPRLAAKSDGEIRDMLKTVTDERLFALYEAIKRGVSVDELFDITKVDRWFLHGLVNIHKGLFDDNSQSIDGGKLIYKMVDTCGGEFEAKTPYFYSIRNGSENEALPFIEKSSKPRIVVLGSGPIRIGQGIEFDYACVHCVWTLKNLDYDVIVINNNPETVSTDFDTADRLYFEPLCIDDVMSIIEIEKPLGVIVAFGGGTAIKLTKKLHERGVKIIGTSADSIDICEDRQRFDALLENLQIKRPKGYGVMTEAQALDAAEKLGFPVLMRPSYVLGGQNMIIAFSPDDIREYMEIILRSKQENPVLIDKYLEGLEIEVDALCDGDPSRGGQGSVFIPGIMEHIERTGIHSGDSIAVYPAINIDDALAEKIFNVTHKLCMALDVKGLVNIQYVLYENDVYVIEVNPRASRTVPYLSKVTGIPMCELATKISAGQTLSSLGYISGLEEYRHISPLKCRSSL

SEQ ID NO: 41635 - DNA, 711 bp, Unknown
  Obtained from environmental sample
  misc_feature (1)..(711): n is a, c, g, or t
atgattcgacaagcaaaggggaaaccggatattgaagcggtcgatcttactacccgcctgcaggacctgaccaatattctggaatgtacgacaaagccgattatcttcgacggtgacacgggagggcatcatttcgcctttaccgtaaaaacccttgaaagaaacggcatatccgccgtcattatagaagacaagaccggccttaaaagaaattcgctttttggcaccgatgtaaatcaggaattatgccccattccggatttctgtaaaaaaataaaagacggcaagcaggcgcaggttacaaaagaatttatgattatcgcgcgtcttgaaagtttaattgccggttttccggttccacacgcgcttgaaagagcgcgcgcttttaccgaagcgggcgcggacggcgttatgatacacagcaaagaaaaaacaggcggggacataaaagaattttgttcgcttttccgcgcagaatatccgcatattccgctggtgctggttccgacaacatataaccagtttacggaaaaagaacttgcctcatggggcgcgaatatcgttatctacgcgaaccatatgctccgttcggcgtatcccgcgatgttaaacaccgcaaaaatgattttacaaaacgaacgttctcttgaggcggattcggtttgtatgccaataaaagagatacttgaattgattccgggctctaaataa

SEQ ID NO: 41636 - protein, 236 aa, Unknown
  Obtained from environmental sample
  misc_feature (1)..(236): Xaa is any amino acid
MIRQAKGKPDIEAVDLTTRLQDLTNILECTTKPIIFDGDTGGHHFAFTVKTLERNGISAVIIEDKTGLKRNSLFGTDVNQELCPIPDFCKKIKDGKQAQVTKEFMIIARLESLIAGFPVPHALERARAFTEAGADGVMIHSKEKTGGDIKEFCSLFRAEYPHIPLVLVPTTYNQFTEKELASWGANIVIYANHMLRSAYPAMLNTAKMILQNERSLEADSVCMPIKEILELIPGSK

SEQ ID NO: 41637 - DNA, 963 bp, Unknown
  Obtained from environmental sample
  misc_feature (1)..(963): n is a, c, g, or t
ttgaagggcagccggggggacacagaggtatacattctgcggggaaaagaaccgggtggtagtatgctggtgcttggaggtacccatcccaacgaaccaagcggatatatgtccgccatacttctgattgaaaatgccacggtatcgaaaggaaccctctatgtgattccaaggtcgaacaattccgctttctcccacaatgacccgcaagaaggcgcgcccgctttctttacaattaaaaaacccgacggttctgaacggaaattccgttttggttcacgggcaacaaatcctttggatcaatggcccgatcctgatatgtatattcacgcttccagcggccagcgcctttcagggaatgaaacgcgcaatttgaacagggggtatccgggcaggacaaacggcacctttactgaaaaagtttgctatggcattactcagcttattattaacgaaaacataactctgactattgatctgcatgaagcgtctcccgagtatccggttatcaacgcaattgtagcgcatgagcgggctatgactttggcggccgatgtggtgcttgggctggaaatatcagacattaagatcgggcttgagccttctccaaaaaacctgcgcggtttaactcaccgcgaactgggagacgctaccaagacctttgccgtcctcatggagaccgccaatccttcacagggtaggttgcggggaaggactgatgaacaccttgtgctcaccggccaggacacctactatgtaaaagcccaaaagctgggccgcctctatgttccctttgatgaaaccggtcatccccttgaacgccgtgtaggtcggcaccttgccggaattggggaatttgcttttgctctttgcatggaatatccggaatacgaagtggtcattgacggaattcctgattattacgacttgctggagaagggtatcggcgcgtatctgaaataa

SEQ ID NO: 41638 - protein, 320 aa, Unknown
  Obtained from environmental sample
  DOMAIN (18)...(320): Succinylglutamate desuccinylase / Aspartoacylase family
  misc_feature (1)..(320): Xaa is any amino acid
MKGSRGDTEVYILRGKEPGGSMLVLGGTHPNEPSGYMSAILLIENATVSKGTLYVIPRSNNSAFSHNDPQEGAPAFFTIKKPDGSERKFRFGSRATNPLDQWPDPDMYIHASSGQRLSGNETRNLNRGYPGRTNGTFTEKVCYGITQLIINENITLTIDLHEASPEYPVINAIVAHERAMTLAADVVLGLEISDIKIGLEPSPKNLRGLTHRELGDATKTFAVLMETANPSQGRLRGRTDEHLVLTGQDTYYVKAQKLGRLYVPFDETGHPLERRVGRHLAGIGEFAFALCMEYPEYEVVIDGIPDYYDLLEKGIGAYLK

SEQ ID NO: 41639 - DNA, 777 bp, Unknown
  Obtained from environmental sample
  misc_feature (1)..(777): n is a, c, g, or t
atggtggctgtggacatcatagcaaaattgcgggaggaatggggcgaggtttccgagatgccgcctggctggaaagagcaggaacgggacatgcaggatagtttccgtgaaagccggacactgcattttgccggaagagccgccgcaataacagatatggctgctttttgcgtgggcggagatataacgccgcagcttcttatgctgcaaggagaagccggcagcggcaaaagcgggctgttatgcaaggtgatggacgagctcgaagatcaatgcttgctgttgccgtttagctgcggaatatcatcccgttcaagccttgttgaaaatatgctgcggtattttatttccctgctttgcgaaaaattggcgctggaagacgacagcgatgacataacaaaattccaggatattaaagaccgtttcagtgaactcctgttcgccgcctgtacgaagaggcgggtcgtggcggttgtggatgcccttgaccaactggcgggaagcgatgaagcccggcgtatgctgtggattagcgggaagctgcctgaaaatttccgcttactgtgttcaattatcgaaggaccggaaacagaagctgtcaaacagcttggcggcgaagtacgccctgtgccttttatcagtacagaagacaaggcggctattatatacggcattgcggcgcgtcatcacaagcaaatcagcggcgcggtggtggaacatatccttcgaaagcagacaccggacggctctcatgccgcgcaaaccccctctacttaa

SEQ ID NO: 41640 - protein, 258 aa, Unknown
  Obtained from environmental sample
  DOMAIN (65)...(227): NACHT domain
  misc_feature (1)..(258): Xaa is any amino acid
MVAVDIIAKLREEWGEVSEMPPGWKEQERDMQDSFRESRTLHFAGRAAAITDMAAFCVGGDITPQLLMLQGEAGSGKSGLLCKVMDELEDQCLLLPFSCGISSRSSLVENMLRYFISLLCEKLALEDDSDDITKFQDIKDRFSELLFAACTKRRVVAVVDALDQLAGSDEARRMLWISGKLPENFRLLCSIIEGPETEAVKQLGGEVRPVPFISTEDKAAIIYGIAARHHKQISGAVVEHILRKQTPDGSHAAQTPST

SEQ ID NO: 41641 - DNA, 900 bp, Unknown
  Obtained from environmental sample
  misc_feature (1)..(900): n is a, c, g, or t
atgaccgttaaccacatcaaagaagaaggtttactgctgttggagtgcatcagcggtagccgtgcgtatggattggatacgccacagtcggacgttgatttgaaaggagtattctatctgccaaaggaaaaattctatggattgggctacattcctcaggtaagcaacgaaaaaaacgatgaagtgtattatgaacttggacgttttgtggagctgcttgctaaaaacaatccaaacatacttgaagtacttgcaacgcctgacgattgcacgctgtttcgtcatcctgtaatgaacaggttgaatatagacatgtttctgtcgaaactgtgcaaggttacgtttgccggatatgccatagctcagatacacagagcgcgcggcttgaaaaagaaaatagtgaatccgatacctaaagaaagacagtcggtactcgatttttgttatgtgatacatggttattctactgtttcggcgcgccactggttggcaaggcagggattaatgcaggaacggtgcggacttgcagcagtgcctcatgcaaaaggactgtatgcactgttttatgatatgaatggcgcttttcgatacaaaggaattatgggtagagattcgtctaacgatgtttcggtaagttccattccaaaaggagagaaagaacttgcaatactgtttttcaacaaagacggatattctgcatactgccgcgaataccgcgaatactgggaatgggttgataatcgcaatgaagagcgttacaggggaacaatgcagcacggcaaaaattacgacgccaagaacatgatgcatacaatccgattgcttcaggtagccgaagagatactgactacaggacgattaaacgtaaaacgtcctaaccgtgacgagttgtgtcgataa

SEQ ID NO: 41642 - protein, 299 aa, Unknown
  Obtained from environmental sample
  misc_feature (1)..(299): Xaa is any amino acid
MTVNHIKEEGLLLLECISGSRAYGLDTPQSDVDLKGVFYLPKEKFYGLGYIPQVSNEKNDEVYYELGRFVELLAKNNPNILEVLATPDDCTLFRHPVMNRLNIDMFLSKLCKVTFAGYAIAQIHRARGLKKKIVNPIPKERQSVLDFCYVIHGYSTVSARHWLARQGLMQERCGLAAVPHAKGLYALFYDMNGAFRYKGIMGRDSSNDVSVSSIPKGEKELAILFFNKDGYSAYCREYREYWEWVDNRNEERYRGTMQHGKNYDAKNMMHTIRLLQVAEEILTTGRLNVKRPNRDELCR

SEQ ID NO: 41643 - DNA, 546 bp, Unknown
  Obtained from environmental sample
  misc_feature (1)..(546): n is a, c, g, or t
atgtataccgacgacatgcgaagtgaaggtaaacatcgcagcgacctgtgggtgggaattacaggagtaataagagcagcgctgaaacatttcgacagcagcgttaaacatgctgccggaaagttgaaaataatagcagacacttacggtaatgtaaccacaaaaccgtatgaagaagagacaagcgcgatttacaatttcattaaggacgttcgtgaaaaatgcagcgacgagatacagttaatcactgattttgaaggatggattgacgaacttgacgcagccaacaagaagtttgaaagtttgatgatgaacagatacgacgaaatggcttcgaaaccggcgctgaaattaagggaaatacgtctgaatacagacgatgcctaccacaacgtagtagaatgtattaatgcccacataacacttgaaggcgaagaaaattaccgcgaatttgttgtcactttaaacgcagtgataaaaagatatacagacgtgatggcgaaacataagggaagagtggcagcaaagaaggaacataaaccttag

SEQ ID NO: 41644 - protein, 181 aa, Unknown
  Obtained from environmental sample
  misc_feature (1)..(181): Xaa is any amino acid
MYTDDMRSEGKHRSDLWVGITGVIRAALKHFDSSVKHAAGKLKIIADTYGNVTTKPYEEETSAIYNFIKDVREKCSDEIQLITDFEGWIDELDAANKKFESLMMNRYDEMASKPALKLREIRLNTDDAYHNVVECINAHITLEGEENYREFVVTLNAVIKRYTDVMAKHKGRVAAKKEHKP

SEQ ID NO: 41645 - DNA, 1647 bp, Unknown
  Obtained from environmental sample
  misc_feature (1)..(1647): n is a, c, g, or t
atggtcgaaggcggagcaaaagaggtcagcgaggatctgatgatacaggccctggacaaggcccataacatgatcatagagttatgcgtttttcaggaaaagctgcgggaacttgccggcaagccgaaactcccgctggttgtccccactcatgtccttgaaaacagcgacgctatccgcgccaacgcttacccgaaacttgagaaagcctgtttcctcgctaccaaacaggagcgccacgagggcattaaagcgatacaaacggaactggcaacgcagtacgcggcccagcttgaggacgaaaaacagaaaaaactcttccacgcgttgttcgaggacatgcagtacaatattctccgctcatcgatccttaacaatggccgccgcgttgacgggcggggcaccgaggacatacgcaatatcacctgcgaagtggacatactcgcgagaacccacggatcagcgctctttacccgcggcgagactcaggctttggtagtgacaacccttggcactgtgtttgacgagcaggtgtttgacgacatcgaaggcgacaagcgggagcattttatgctccattacaacttccctccatattcagtgggcgaaaccggcaggctgggaacaggccgccgcgagataggccacggcaacctggcccggcgctcgctggaagctatggttccctccaaagaagaattcccctacacaatccgcgtggtttcagagatcatggaatccaacggctcgtcatccatggcctcggtctgcggcggtactcttgccatgctgcacgccggcgtgccaatgaaaaagccggtggccggcattgccatgggccttattaccgaaagcgcgccggggagccgttacgcggtgttatccgacattctgggcgaagaagaccacctgggcgacatggactttaaggtggccggaaccgaagacggcataaccggcttccagatggatataaaaattgccggggtaagcccggaaattatgcgaaaggcgctggatcaggcaaagcggggaaggatgcacatcctctcaataatgaatcagaccatcagcaagcctgccgacgagataagcgagtacgccccaaaaattgttacattgcggatagacatcgacaagataggcacgttaattggcccgggcgggaaaaacatcaaggccctgtgcgagcagtacagtgtcaagattgacaccgcggacgatggcacggtaacgatattcgggaagaacaccaaagatgccgaagacgcgaaaatcgccgtgatgggcgttacatcggatccggaagtggaccgggtgtacaacggcacggtaaagcggataatggaatttggcgcctttgtggaaatacttcccggcaaggaagggctggtacatatcagcaagctttctcgccagcgcatagcgcaggtgacggacgtggtaaaagaagggcaggaaattcccgtcaagcttaccgaaatgacaaaatggggcaggcttaatctttcgtatattgacgccatcgatccggatggcgccgattccgacccgaagagccacagcggcagcgctcatagcagcggccattcgggtcacgacaataaaggatctaataaatccggcagggatcgcccccggcattaa

SEQ ID NO: 41646 - protein, 548 aa, Unknown
  Obtained from environmental sample
  DOMAIN (371)...(428): KH domain
  misc_feature (1)..(548): Xaa is any amino acid
MVEGGAKEVSEDLMIQALDKAHNMIIELCVFQEKLRELAGKPKLPLVVPTHVLENSDAIRANAYPKLEKACFLATKQERHEGIKAIQTELATQYAAQLEDEKQKKLFHALFEDMQYNILRSSILNNGRRVDGRGTEDIRNITCEVDILARTHGSALFTRGETQALVVTTLGTVFDEQVFDDIEGDKREHFMLHYNFPPYSVGETGRLGTGRREIGHGNLARRSLEAMVPSKEEFPYTIRVVSEIMESNGSSSMASVCGGTLAMLHAGVPMKKPVAGIAMGLITESAPGSRYAVLSDILGEEDHLGDMDFKVAGTEDGITGFQMDIKIAGVSPEIMRKALDQAKRGRMHILSIMNQTISKPADEISEYAPKIVTLRIDIDKIGTLIGPGGKNIKALCEQYSVKIDTADDGTVTIFGKNTKDAEDAKIAVMGVTSDPEVDRVYNGTVKRIMEFGAFVEILPGKEGLVHISKLSRQRIAQVTDVVKEGQEIPVKLTEMTKWGRLNLSYIDAIDPDGADSDPKSHSGSAHSSGHSGHDNKGSNKSGRDRPRH

SEQ ID NO: 41647 - DNA, 570 bp, Unknown
  Obtained from environmental sample
  misc_feature (1)..(570): n is a, c, g, or t
atgttactgggacaaaaatttttcaatcagccgaccgcgaacctggcaaggtcgcttttgggtaagcacctggttttgggagatttgcgggggaagattgtggaaaccgaagcttaccttttccatgacgaccctggctgccacgcaagcaggggccttaccccccgcaacgctcccatgttcggcccagccggccatacttacgtttactttatctacgggatgtactattgcctaaacattgtcagcggtaaaaccggcgaaggcgaagcggtgttgatccgcgccctggaacccatccagggaatcgagatcatgatgaaaaggcgaaacacaaacaaaatagaaaacctctgcaacgggccgggcaaattgacgcaggccttcggcatcaccaaagagtacaacaacaaaagcttgttcacaggtgatttgcagatccacaacagcagggaaaaaccggaaatcggaaccagtaagcggattggcttaacagcgggcggcgagcttgagttaaggttttttgttaggggaaacaggtttgtgtcaaagcaggcaaaaaccccttaa

SEQ ID NO: 41648 - protein, 189 aa, Unknown
  Obtained from environmental sample
  DOMAIN (4)...(181): Methylpurine-DNA glycosylase (MPG)
  misc_feature (1)..(189): Xaa is any amino acid
MLLGQKFFNQPTANLARSLLGKHLVLGDLRGKIVETEAYLFHDDPGCHASRGLTPRNAPMFGPAGHTYVYFIYGMYYCLNIVSGKTGEGEAVLIRALEPIQGIEIMMKRRNTNKIENLCNGPGKLTQAFGITKEYNNKSLFTGDLQIHNSREKPEIGTSKRIGLTAGGELELRFFVRGNRFVSKQAKTP

SEQ ID NO: 41649 - DNA, 498 bp, Unknown
  Obtained from environmental sample
  misc_feature (1)..(498): n is a, c, g, or t
atggaagatgtacttgacgtatactcccgaaaatatgacaaaaaatgtactttggtgtgcatggatgaaatcccccggcagcttattggtgaatcccggcctcctattccagccgagccggggaaacccgaacgattcgatacagaatatgtccgtaatgggacatgcgttatattcatgtttgcagccccgcttgagaaatggaggagggctgaggtaaccgagcggcggacaagaattgattgggcgcatcagataaaaaagctggtaacagttgattttcctgattcggagaaaattgttcttgtaatggataatcttgacatacatactatgggttccctgtataaggcgtttccccctgaagaagcaaaacggctaagagacaaacttgaagtacattacacgccgaaacatgggagttggcttaatatggcggaaatagaaaacaatgtacttataaaccatggcctttcaaaaacggattccaacaattga

SEQ ID NO: 41650 - protein, 165 aa, Unknown
  Obtained from environmental sample
  misc_feature (1)..(165): Xaa is any amino acid
MEDVLDVYSRKYDKKCTLVCMDEIPRQLIGESRPPIPAEPGKPERFDTEYVRNGTCVIFMFAAPLEKWRRAEVTERRTRIDWAHQIKKLVTVDFPDSEKIVLVMDNLDIHTMGSLYKAFPPEEAKRLRDKLEVHYTPKHGSWLNMAEIENNVLINHGLSKTDSNN

SEQ ID NO: 41651 - DNA, 888 bp, Unknown
  Obtained from environmental sample
  misc_feature (1)..(888): n is a, c, g, or t
atggattttaacgtcatgatggcggttaatatgctctatatgtcggcattagctgatattttaaacgataaagagacaagttttcagtacaagcgccagtatttttctctgaaaacaaggattaattcccttatgtataatacagcggacggtttttactatgatatctgcaagaatgaaaaacaggttcccattaaaacaattgcgggtttttggccgctgttagctgaaatccctaacggggaaaaagcggaacaaataatcgccaaacttaccgatcccaagttcttcggcactcctcatcctttcccgtctctttctgtttctgagaaagactttgatgaaaacgggcgcggttaccgcggctcggtgtatcctcatcttgtttttatggtaataaaaggtcttgaacgttaccagcggtgggacatcgcaagggagagcgcaataaggcatgtttattttatgctggattctatgagtcctgacggaaatcatcatagaggcaacctttgggaagcgtatatgcctacaaaggaagggcctgcaaaatggccggggaaggcggcctttccgcgtcctcagtaccttacctatgacgcgctttctataatttgcctgacaatagagaatatcgttgggctgtcaatttcacttccgcgcaaaacagtagactgggttattccaaatcttgaaattatgggcgtggaaaatctttccctaaaaaataatatgataacaattctttccaacaagagcggcaggggctgggaaatacaaatggaaagtgaaaaactctattattttacaattaacattctcggcgttaaggaaaagactctgcccattccttccggaaaatgttcaatacttatagataaattgtaa

SEQ ID NO: 41652 - protein, 295 aa, Unknown
  Obtained from environmental sample
  misc_feature (1)..(295): Xaa is any amino acid
MDFNVMMAVNMLYMSALADILNDKETSFQYKRQYFSLKTRINSLMYNTADGFYYDICKNEKQVPIKTIAGFWPLLAEIPNGEKAEQIIAKLTDPKFFGTPHPFPSLSVSEKDFDENGRGYRGSVYPHLVFMVIKGLERYQRWDIARESAIRHVYFMLDSMSPDGNHHRGNLWEAYMPTKEGPAKWPGKAAFPRPQYLTYDALSIICLTIENIVGLSISLPRKTVDWVIPNLEIMGVENLSLKNNMITILSNKSGRGWEIQMESEKLYYFTINILGVKEKTLPIPSGKCSILIDKL

SEQ ID NO: 41653 - DNA, 339 bp, Unknown
  Obtained from environmental sample
  misc_feature (1)..(339): n is a, c, g, or t
atgaaaagtacaactcttaccgctattcttgaaattggctccaccggaatcaggcttcatgttgcggaaatttaccctgacggtcagtggcaggtgcttgagcgcgctgtgcggcctgtagggcttggacgcgatgtgtttacttctggcgtgctctcccgtgaatcgatacttgaatgccttactgtccttcaaaattaccgcgagcttttggaaggctgggaaatagcagataacaacattcatgtaatagcgacaagcgctctgcgtgcggcgcgtaacagggatgtttttattgaccgcgtgaggcaggagactggttttatttatccattgtag

SEQ ID NO: 41654 - protein, 112 aa, Unknown
  Obtained from environmental sample
  misc_feature (1)..(112): Xaa is any amino acid
MKSTTLTAILEIGSTGIRLHVAEIYPDGQWQVLERAVRPVGLGRDVFTSGVLSRESILECLTVLQNYRELLEGWEIADNNIHVIATSALRAARNRDVFIDRVRQETGFIYPL

SEQ ID NO: 41655 - DNA, 1323 bp, Unknown
  Obtained from environmental sample
  misc_feature (1)..(1323): n is a, c, g, or t
ttgccaaaggcttgccgccacgaagaagctaccgctccagcggcaaaatccgcacccgacttagacgctttgatagcggagcagttggcccccaaagagaaagaccttcccgacttgactggtgatatggattctctgcttgccaagggtttaccgcccgaagaagctaccgctccagtggcaaaatccgcacccaacttagacgccttgatagcggaacagctggcagacgaagcagaaaatcttcccgacttgactggagacatggattcgttgcttgctaaaggcttaccgcccgaagaagctaccgctccagtggcaaaatccgcacccgacttatacgccttgatagctgagcacttggcccccgaagagaaagaccttcccgacttgactggtgatatggattctctgcttgccaaaggcctgccgctcgaagaggatgctgttccagcggcaaaatccgcacccaatttagatgctttgatagctgagcagttggcccccaaagagaaagaccttcccgacttaactggtgacatggattctttgcttgccaagggcttgccgcccgaagaggatgctgttccagcggcaaaatccgcacccaatttagacgctttgatagctgagcagttggcccccaaagagaaagaccttcccgacttaactggtgacatggattctttgcttgccaagggcttgccgcccgaagaggatgctgttccagcggcaaaatccgcacccgacttagatgctttgatagctgagcagttggcccccaaagagaaagaccttcccgacttaactggtgacatggattctttgcttgccaaaggcctgccgcccgaagaggatgctgttccagcggcaaaatccgcacccgacttagatgctttgatagctgagcagttggcccccaaagagaaagaccttcccgatttgacaggtgacatggattccttgttagccaaaggtttgccgccggaagaagatactgctcctgcagctgcaacaaaatccgcacccgacttagatgctttgatagctgagcagttggcccccaaagagaaagaccttcccgatttaaccggagatatggattccttgttagccaaaggtttgccgccggaagaagatgctgctcctgcagctgcaacaaaatccgcgcccaacttagacgccttaatagcagaacaacttgcagacaaagcagaaaaccttcccgatttgacaggtgacatggattctctgcttgccaagggtttaccgccggaagaagatgctgctcctgcagctgcaacaaaatccgcgcccaattag

SEQ ID NO: 41656 - protein, 440 aa, Unknown
  Obtained from environmental sample
  misc_feature (1)..(440): Xaa is any amino acid
MPKACRHEEATAPAAKSAPDLDALIAEQLAPKEKDLPDLTGDMDSLLAKGLPPEEATAPVAKSAPNLDALIAEQLADEAENLPDLTGDMDSLLAKGLPPEEATAPVAKSAPDLYALIAEHLAPEEKDLPDLTGDMDSLLAKGLPLEEDAVPAAKSAPNLDALIAEQLAPKEKDLPDLTGDMDSLLAKGLPPEEDAVPAAKSAPNLDALIAEQLAPKEKDLPDLTGDMDSLLAKGLPPEEDAVPAAKSAPDLDALIAEQLAPKEKDLPDLTGDMDSLLAKGLPPEEDAVPAAKSAPDLDALIAEQLAPKEKDLPDLTGDMDSLLAKGLPPEEDTAPAAATKSAPDLDALIAEQLAPKEKDLPDLTGDMDSLLAKGLPPEEDAAPAAATKSAPNLDALIAEQLADKAENLPDLTGDMDSLLAKGLPPEEDAAPAAATKSAPN

SEQ ID NO: 41657 - DNA, 2505 bp, Unknown
  Obtained from environmental sample
  misc_feature (1)..(2505): n is a, c, g, or t
ttggccgagccgcctgatccggctggaggagaatttggcggcggaaaaacccgggacttgatggaaaacttctgcggaaagtttccgccaaaggatgtgtacgatggcaaaaccgacgttccggggtaccttgtgggaagcgacggcgttgaaagctgccggaatctttcccttgaagaaatgctccttttggctattgccaatctaaatccggccttcaggcagtttctcttcctttttgacgattcactgcttgcgaaagaaacggtttaccccgtggcaattgacgaattgaaggcgcaccttgcgaatcttccggttttcggccccgacggcatgaacctttgggatctgctcagggcaccggcccttgcttcccccgattcgctttttgggcagcttgaatacatgcggaagcactggggcctgcttttgggcaaatactcaggcaggcttcttaccagcctggacataataaacgaagaagataaaccttctttctttggcccaggcccgacccaggtcctggatttccgcgcctatgaaaacgagtatgaaaaatttacgccggatcaggaatggatgccccggacggttcttatagcgaaaagcacgctggtctggcttttccagctttcccaaaaatacggaaaggagtttacaaggcttgatcaaatcccggacgaagagctggacgagcttgcccgccggggctttaccggcctctggctcatcggcgtttgggaacgcagccaggcaagcaaaaccataaagcagtggacaggcaaccccgaagcggcggcatctgcttacagcctttacgattacgacatagcctcggagctgggcggatggngatcgctggcaaatctgcgttcccggtgcatgcagaggggcatacggcttggctccgacatggtgcccaaccacaccggcatagacagccgctggatggtggaacatcctgaccgctttttacagcttccctatccgcccttccccacctacaactacaactgcggcaatttatcgggcagggatgatataaccgttcaaatcgaagaacattatttttcccgcagtgacgcggcggttgtctttaagcggatcgataaccgttcgggcgaagtccgctatatctatcacggcaatgacggtacatccatgccctggaatgataccgcacaaattgacttccttaatcccgaagcccgcgaagcggtgatccgcacgattatcggcgtgtgccagcagttttccattgtgcgctttgacgcggcgatgactctggcgaagcggcatattcaacggctgtggtttccgatgccggggcatggcggagctattgccagccgcgcggagcacgcccttaccaacgatgaatttaaccgccggatacccaatgaattctggcgtgaagtggtagaccgctgcgccgccgaagcgccccacacccttctgctggcggaagccttctggatgatggaaggctattttgtccgcaccctgggaatgcaccgcgtatataattcggcgtttatgaatatgctaaaaaatgaagaaaacgcanaatatcgcctaacgataaaaaacacccttgaatttgatcctgaaattcttaaacgctttgtcaattttatgaacaaccctgacgaagaaacggcggtcgctcaattcggcaaaggcgataaatatttcggtatttgtacactgcttgtaacaatgcccggtttgcccatgttcggacacggacagattgaaggctttgaagaaaaatacggaatggaataccgccgttcgtatcgggacgaaaaaccggacggctacatgatagaccgccacgagcgggaaattttcccgttgatgaaacgccgcttcgtgttttcaggcagcgcaaacttcaggatttacgatctttactgcaacggctccgtaaacgaaaatgttttcgcctactcgaaccgtgcgtggataaacggacatgaagaaaaagcgttaattttctataataactcatactatgaaacttcgggctggataaaagtaagcgatcctgccgttccctgcgaaggcggaacacgaagggacaatttaagcgaagcccttgcgatacacggcgaaagccaatacttcacccttcttcgtgaacaaaaatcgaacctgtggtatatccgatcttcaaaatcaatttgcgaaagcggattttttgtcggcttaaaaggatacgagacgcaagtttatcttgatgttcatgaagttgaggacgatgcaaaaggcagatgggcaagactgaacaacgacttgaacggcggcggcgtaagcgatccgcttgcggcgataaaagatattttccttggagaactttattatcgcttcttggaaatcttaaaaccggaaattattattgagatgaatgactctctggataaaaaagactatgccgattcgtttaaggattctgtcgagacatttatgctaccgcagaaattatcgcgctcgcgataa

SEQ ID NO: 41658 - protein, 834 aa, Unknown
  Obtained from environmental sample
  DOMAIN (214)...(635): Alpha amylase, catalytic domain
  misc_feature (1)..(834): Xaa is any amino acid
MAEPPDPAGGEFGGGKTRDLMENFCGKFPPKDVYDGKTDVPGYLVGSDGVESCRNLSLEEMLLLAIANLNPAFRQFLFLFDDSLLAKETVYPVAIDELKAHLANLPVFGPDGMNLWDLLRAPALASPDSLFGQLEYMRKHWGLLLGKYSGRLLTSLDIINEEDKPSFFGPGPTQVLDFRAYENEYEKFTPDQEWMPRTVLIAKSTLVWLFQLSQKYGKEFTRLDQIPDEELDELARRGFTGLWLIGVWERSQASKTIKQWTGNPEAAASAYSLYDYDIASELGGWXSLANLRSRCMQRGIRLGSDMVPNHTGIDSRWMVEHPDRFLQLPYPPFPTYNYNCGNLSGRDDITVQIEEHYFSRSDAAVVFKRIDNRSGEVRYIYHGNDGTSMPWNDTAQIDFLNPEAREAVIRTIIGVCQQFSIVRFDAAMTLAKRHIQRLWFPMPGHGGAIASRAEHALTNDEFNRRIPNEFWREVVDRCAAEAPHTLLLAEAFWMMEGYFVRTLGMHRVYNSAFMNMLKNEENAXYRLTIKNTLEFDPEILKRFVNFMNNPDEETAVAQFGKGDKYFGICTLLVTMPGLPMFGHGQIEGFEEKYGMEYRRSYRDEKPDGYMIDRHEREIFPLMKRRFVFSGSANFRIYDLYCNGSVNENVFAYSNRAWINGHEEKALIFYNNSYYETSGWIKVSDPAVPCEGGTRRDNLSEALAIHGESQYFTLLREQKSNLWYIRSSKSICESGFFVGLKGYETQVYLDVHEVEDDAKGRWARLNNDLNGGGVSDPLAAIKDIFLGELYYRFLEILKPEIIIEMNDSLDKKDYADSFKDSVETFMLPQKLSRSR

SEQ ID NO: 41659 - DNA, 624 bp, Unknown
  Obtained from environmental sample
  misc_feature (1)..(624): n is a, c, g, or t
ttgctctcactttgggatctgcttcgggcccgaagaaatagcgagtaccgtgattatttattcaacgctgttttggttatcccgatttcaaaaagccttgtttcaggggccaggtttttaaccggtaaaaaagtataccggtatatgccttttaagtttgtcatctcccttttgagccttctggaaaagcgggagtatcctctttatctcctcggcggcaaaagtccgatattaagaaaagccgaaaaaaacatccgcgcgacctttcccggccttaaagttataggccgctgcgaaggcaaaatccgaaaacatgaagaaccctctgtaatagaagcgataagaaagtcttcgccatccattcttctggccggtaaaggcatccgtggaggagaactctggatagccagaaactcaaaccgcctcaattcgggcttccgcctgtggtgcagcgatctttttgaggtgtttgcggagaaaaaacaccggcccaaggacgcggtatttgaaaaaggtcttgaaagcataggctactgtttcagaaaccccctgaaatttttccgggtttttccgtttatttactataatttactgctgttggtatataagatttcaaagaagtaa

SEQ ID NO: 41660 - protein, 207 aa, Unknown
  Obtained from environmental sample
  DOMAIN (18)...(189): Glycosyl transferase WecB/TagA/CpsF family
  misc_feature (1)..(207): Xaa is any amino acid
MLSLWDLLRARRNSEYRDYLFNAVLVIPISKSLVSGARFLTGKKVYRYMPFKFVISLLSLLEKREYPLYLLGGKSPILRKAEKNIRATFPGLKVIGRCEGKIRKHEEPSVIEAIRKSSPSILLAGKGIRGGELWIARNSNRLNSGFRLWCSDLFEVFAEKKHRPKDAVFEKGLESIGYCFRNPLKFFRVFPFIYYNLLLLVYKISKK

SEQ ID NO: 41661 - DNA, 534 bp, Unknown
  Obtained from environmental sample
  misc_feature (1)..(534): n is a, c, g, or t
atggataacaagttagtcgcaatcattgaaataggctccaccggcatcaggctgcttgtcgcgcagatcgaggaaggcaaaagccgccacggcgacaactggaaaatcatggacagcgccggccgtcctgtcgccctgggccgcgacgtctttaactcgggcgagctttcccgcgaatcccttctggattgtttatcggtctttcaaaatttcagggaactgcttgaaagctggaatatttccgcgcatgacgtccatgtaatcgcgacaagcgccctgcgcgtcgcccgcaaccgcgacatctttatagacaggatacggcaggaatccggtttcaatattttcgtcgtggacggggttgaggaaaaccgcctgttgtacctcgccgtgcgcttcgtggtgaaacatgacttgcccatgttctggcgggccaattcaatgatcctggacatcggcggaggctcaaccgaggtaatggtgcttcgccgggggcagatggtagtcgcccacagcatcaaatatggggacaagtaa

SEQ ID NO: 41662 - protein, 177 aa, Unknown
  Obtained from environmental sample
  misc_feature (1)..(177): Xaa is any amino acid
MDNKLVAIIEIGSTGIRLLVAQIEEGKSRHGDNWKIMDSAGRPVALGRDVFNSGELSRESLLDCLSVFQNFRELLESWNISAHDVHVIATSALRVARNRDIFIDRIRQESGFNIFVVDGVEENRLLYLAVRFVVKHDLPMFWRANSMILDIGGGSTEVMVLRRGQMVVAHSIKYGDK

SEQ ID NO: 41663 - DNA, 1608 bp, Unknown
  Obtained from environmental sample
  misc_feature (1)..(1608): n is a, c, g, or t
atgggaactaagaaagctatcgggatagaccttggcgggacggctataaagggggctgttattgacgagggggggatttgcggcggcgtcactcgggtgcctaccgaggcgcacgagggggggcggcgcattatggagaacataatgtcgctcattgacaagcttgcgtcgggcgggggcggcccggaggcttttataggggtcggcataaggacgccgggctttgtggaccgcaacggggtgattttgaacggcggggcgaatatgccggggtggacggggatgccggtgtaccaaccgataaaggagcgtttcgggctcagggcctcggcggcaaacgacgtgacgtccgtggcgctggcggagcttatgttcggggcggggcgcggggttcaaaacatggtctgcttcgccctcggaacgggagtgggcgggggcatcgtgaccaacgggcggctctacaagggcagtcacgggatggcgggggatatcgggcatatcgtcgtggagacggacggggagccgtgcccgtgcggccagcgcggttgcgtggagcgctacgcctcggcgaccgggatcgtgaaaatggcggtcgaggcggccaaggatgatggatacgagactgagcttacaaaaatcgttcgcgaaaatccgggcgaagttaccagcaagacggtgtacgagtacgtggctaagggcgacgcgctggcgttgcacgtgcatgagaaaacctgcgatatgctggggccgcgcggtggggataatcataaacaccttctcgcccgaccgtgtggtgttgggcggcggcgtgatgatggcggggagcgtggtgatcgagacggtcaaaaaatacgcggcgcagcactgctggccggagatattcaagctctgcgagatcgtgccggcgcagatgggcgaggactctggagtgctcggcgcgggggcgctggcgctggaggagttcggttaaggcgctatgctgaaagagctgcttaccccagagatcgtacagctgatccgcgagcggcagtggacggatatgcgcgacgcgcttattatctggccgccggcggaggtggccgatctcatagagtctatagacgagcctacgcgggtgctgttgctgcgcttcttgccgagggactacgaggcggaggtatttgccgagctcacgccggggttgcagaacgacctgctcaaagagctgaccaaccgcgaggtgcgcgggctgctctcggaactcagccccgacgaccgcaccgcgcttatagacgagatgccggcggaggtgacgcgcagactgctcggcctgctctcgccggaggacttggccgagacgcgccagcttttgggatatcccgagggcagcgtcggcagggtgatgacgccctatttcttagacattcgggcggacatgactgcggcggaggcgctggatcatatacgggagcacggccccgagagcgagacggtgaacgtagtctacgtggtcgacgcggaggggaagctcttagacgaaatatccctgcggcatatggtattggcgccgctggagaagagcgtagagtctatcatggacggcaacttcgtgacgcttacgggatatag

SEQ ID NO: 41664 - protein, 535 aa, Unknown
  Obtained from environmental sample
  DOMAIN (8)...(193): ROK family
  misc_feature (1)..(535): Xaa is any amino acid
MGTKKAIGIDLGGTAIKGAVIDEGGICGGVTRVPTEAHEGGRRIMENIMSLIDKLASGGGGPEAFIGVGIRTPGFVDRNGVILNGGANMPGWTGMPVYQPIKERFGLRASAANDVTSVALAELMFGAGRGVQNMVCFALGTGVGGGIVTNGRLYKGSHGMAGDIGHIVVETDGEPCPCGQRGCVERYASATGIVKMAVEAAKDDGYETELTKIVRENPGEVTSKTVYEYVAKGDALALHVHEKTCDMLGPRGGDNHKHLLARPCGVGRRRDDGGERGDRDGQKIRGAALLAGDIQALRDRAGADGRGLWSARRGGAGAGGVRLRRYAERAAYPRDRTADPRAAVDGYARRAYYLAAGGGGRSHRVYRRAYAGAVAALLAEGLRGGGICRAHAGVAERPAQRADQPRGARAALGTQPRRPHRAYRRDAGGGDAQTARPALAGGLGRDAPAFGISRGQRRQGDDALFLRHSGGHDCGGGAGSYTGARPRERDGERSLRGRRGGEALRRNIPAAYGIGAAGEERRVYHGRQLRDAYGI

SEQ ID NO: 41665 - DNA, 363 bp, Unknown
  Obtained from environmental sample
  misc_feature (1)..(363): n is a, c, g, or t
atgatggatacgagactgagcttacaaaaatcgttcgcgaaaatccgggcgaagttaccagcaagacggtgtacgagtacgtggctaagggcgacgcgctggcgttgcacgtgcatgagaaaacctgcgatatgctggggccgcgcggtggggataatcataaacaccttctcgcccgaccgtgtggtgttgggcggcggcgtgatgatggcggggagcgtggtgatcgagacggtcaaaaaatacgcggcgcagcactgctggccggagatattcaagctctgcgagatcgtgccggcgcagatgggcgaggactctggagtgctcggcgcgggggcgctggcgctggaggagttcggttaa

SEQ ID NO: 41666 - protein, 120 aa, Unknown
  Obtained from environmental sample
  misc_feature (1)..(120): Xaa is any amino acid
MMDTRLSLQKSFAKIRAKLPARRCTSTWLRATRWRCTCMRKPAICWGRAVGIIINTFSPDRVVLGGGVMMAGSVVIETVKKYAAQHCWPEIFKLCEIVPAQMGEDSGVLGAGALALEEFG

SEQ ID NO: 41667 - DNA, 339 bp, Unknown
  Obtained from environmental sample
  misc_feature (1)..(339): n is a, c, g, or t
gtggacggggatgccggtgtaccaaccgataaaggagcgtttcgggctcagggcctcggcggcaaacgacgtgacgtccgtggcgctggcggagcttatgttcggggcggggcgcggggttcaaaacatggtctgcttcgccctcggaacgggagtgggcgggggcatcgtgaccaacgggcggctctacaagggcagtcacgggatggcgggggatatcgggcatatcgtcgtggagacggacggggagccgtgcccgtgcggccagcgcggttgcgtggagcgctacgcctcggcgaccgggatcgtgaaaatggcggtcgaggcggccaaggatga

SEQ ID NO: 41668 - protein, 112 aa, Unknown
  Obtained from environmental sample
  misc_feature (1)..(112): Xaa is any amino acid
MDGDAGVPTDKGAFRAQGLGGKRRDVRGAGGAYVRGGARGSKHGLLRPRNGSGRGHRDQRAALQGQSRDGGGYRAYRRGDGRGAVPVRPARLRGALRLGDRDRENGGRGGQG

SEQ ID NO: 41669 - DNA, 690 bp, Unknown
  Obtained from environmental sample
  misc_feature (1)..(690): n is a, c, g, or t
atgagacaaaaattgtgccttcttgcgtgcattgtcctcctttgcggctgttcgcgtaacggagactgggttcagttccggggcgagggcgggcgcggcgtaagttcttcccgtatcgctccgccccttggcctgcgctggaagataaaacttcaggaaagcggcgaacgaatccgctctcttaatccgccggtggtaattggggacactatttatttcggttccgacgacggcaacttttacgcgctggatgttgaaagcggttatatgcgctgggtatttaaaagcggggcggagatcaactcaattccctacgccgacaaagacaaagtttactttggcagcaaggacggcaaactttacgccctttcccgcgagacgggggaagaggtttggaattttcagactcaaagccagatcaattcccaggttcagcgttacggcgattatattatttttgtcggagacgcggacgcgatttattttctttctccggacggcaaagaacaattcagtatttataatcccggctggtataactacaccttccttatggccgacgatgtgatgtacttcggcaccggtcccaggccccacttaataggtccttatgacattaacaaaagggaatttctttggtttctcaattacagtgaaattagagctacctggtatcttcttccgcggtag

SEQ ID NO: 41670 - protein, 229 aa, Unknown
  Obtained from environmental sample
  SIGNAL (1)...(21)
  DOMAIN (69)...(106): PQQ enzyme repeat
  misc_feature (1)..(229): Xaa is any amino acid
MRQKLCLLACIVLLCGCSRNGDWVQFRGEGGRGVSSSRIAPPLGLRWKIKLQESGERIRSLNPPVVIGDTIYFGSDDGNFYALDVESGYMRWVFKSGAEINSIPYADKDKVYFGSKDGKLYALSRETGEEVWNFQTQSQINSQVQRYGDYIIFVGDADAIYFLSPDGKEQFSIYNPGWYNYTFLMADDVMYFGTGPRPHLIGPYDINKREFLWFLNYSEIRATWYLLPR

SEQ ID NO: 41671 - DNA, 1263 bp, Unknown
  Obtained from environmental sample
  misc_feature (1)..(1263): n is a, c, g, or t
atgataaagaccgtaaaaaccgttgaccttaagggtaaacgggtgattatgcgcgtggactttaacgtgccgatgaaagatggcgttgtgcaggatgatacccgcattgtggcggctctgccaactatcaaatatatccttgatcagggggttaaaaccctgacgcttatgtctcacctgggcgacccctccaaggatgccaaaaaagcacaggaaaaagccgagaaagacggtaagacgtttgacaaggatgcttacatcaagggcaaacaccgcatggcgccggttgccgcttatctggagaaaaaattgggcaagccggtaatctttgccggggaagacggctgttacggcaagaaggcgtttatcgaaagccagcccgatggctcggtcatcatgctggaaaacacccgtttccacaaggaagagaccgccaaggatgccgcagatctggacaagctggcgaaagagcttgccacttacggcgacgtgtttgtaaacgacgcttttggcacggcccacagggatcacgcctctaccgcgtccatcgcgaaattcgcgccggttgctgtggcgggtttcctcatggagaaagaagtcaactaccttgaaccgattgttacaaacccgcaaaagccgctggtcgcgattatcggcggggcgaaagtttcttccaaaatcgcggtgctggaaagcctgttgaaaaactcagccgcgctggtcatcggcggcggcatggcctatactttccttaaagtgcaggggcacaaaatcggcaaatctcttgtagaagacgatcagcttgataccgctcagaaaatccttgacgcagcgaagaaagcgaacgtgcagattgttctgccgcttgaccatgtcgccgcgacaagttttgacgctaattcatctcccgttccggtcgacggtctcgatcttcccgacaatatgcttgggttggacgtaggaccgaagacgcttgccaaatacaaagaagtgctcgccggagccaagaccatcgtatggaacggcccggtaggcgtttttgaatttgacgcttttgccaaaggcactgaagcggtggcgaagctcgtggcggaagccaccggcaagggagtcattaccgttgtcggcggcggcgactccgtggctgcggtgaacaagtttaaacttgccgacaaaatgagccatgtctccaccggcggcggcgcgtccctggaactgctggaaggcaagaaactgcccggcatccaagtgtgcagaggttaa

SEQ ID NO: 41672 - protein, 420 aa, Unknown
  Obtained from environmental sample
  DOMAIN (1)...(418): Phosphoglycerate kinase
  misc_feature (1)..(420): Xaa is any amino acid
MIKTVKTVDLKGKRVIMRVDFNVPMKDGVVQDDTRIVAALPTIKYILDQGVKTLTLMSHLGDPSKDAKKAQEKAEKDGKTFDKDAYIKGKHRMAPVAAYLEKKLGKPVIFAGEDGCYGKKAFIESQPDGSVIMLENTRFHKEETAKDAADLDKLAKELATYGDVFVNDAFGTAHRDHASTASIAKFAPVAVAGFLMEKEVNYLEPIVTNPQKPLVAIIGGAKVSSKIAVLESLLKNSAALVIGGGMAYTFLKVQGHKIGKSLVEDDQLDTAQKILDAAKKANVQIVLPLDHVAATSFDANSSPVPVDGLDLPDNMLGLDVGPKTLAKYKEVLAGAKTIVWNGPVGVFEFDAFAKGTEAVAKLVAEATGKGVITVVGGGDSVAAVNKFKLADKMSHVSTGGGASLELLEGKKLPGIQVCRG

SEQ ID NO: 41673 - DNA, 432 bp, Unknown
  Obtained from environmental sample
  misc_feature (1)..(432): n is a, c, g, or t
atgccgggcagtttcttgccttccagcagttccagggacgcgccgccgccggtggagacatggctcattttgtcggcaagtttaaacttgttcaccgcagccacggagtcgccgccgccgacaacggtaatgactcccttgccggtggcttccgccacgagcttcgccaccgcttcagtgcctttggcaaaagcgtcaaattcaaaaacgcctaccgggccgttccatacgatggtcttggctccggcgagcacttctttgtatttggcaagcgtcttcggtcctacgtccaacccaagcatattgtcgggaagatcgagaccgtcgaccggaacgggagatgaattagcgtcaaaacttgtcgcggcgacatggtcaagcggcagaacaatctgcacgttcgctttcttcgctgcgtcaaggattttctga

SEQ ID NO: 41674 - protein, 143 aa, Unknown
  Obtained from environmental sample
  misc_feature (1)..(143): Xaa is any amino acid
MPGSFLPSSSSRDAPPPVETWLILSASLNLFTAATESPPPTTVMTPLPVASATSFATASVPLAKASNSKTPTGPFHTMVLAPASTSLYLASVFGPTSNPSILSGRSRPSTGTGDELASKLVAATWSSGRTICTFAFFAASRIF

SEQ ID NO: 41675 - DNA, 606 bp, Unknown
  Obtained from environmental sample
  misc_feature (1)..(606): n is a, c, g, or t
gtgggcgccattgtcaaaggcaccaatatacggcttggggcgcaggactgcgcgtgcgaagagcagggcgcccataccggcgaggtttctgtcctgcagttgaaagaccttggcgtgcagactatcatcctgggccacagcgaaagacgccatgtctacaaggaagacgacacgcttatcaacaaaaaggtgaagctggctctgaagcacggctttgaagtgatcctctgcattggggaactgctggaagagcgcgaggcgggcaaggttgagactgtctgcgaatcccagaccgtaaaaggtcttgagggtgtcagcgcctctgatttggcgaatatcgtcattgcatacgagccggtctgggccattggcaccggaaagaccgccacgccggaagacgcggaggcggttcatgcctttgtgcgcaaggttatcgcccgtctttacggacaacccgccgcggataaaatcatcatccagtacggtggctcggttaaaccggacaacgccgcccagttaatggccaaagaaaacatcgacggcgcccttgtcggcggcgcggcccttaaaccggatacttttgttcccatcgcaaaatttaactaa

SEQ ID NO: 41676 - protein, 201 aa, Unknown
  Obtained from environmental sample
  DOMAIN (2)...(198): Triosephosphate isomerase
  misc_feature (1)..(201): Xaa is any amino acid
MGAIVKGTNIRLGAQDCACEEQGAHTGEVSVLQLKDLGVQTIILGHSERRHVYKEDDTLINKKVKLALKHGFEVILCIGELLEEREAGKVETVCESQTVKGLEGVSASDLANIVIAYEPVWAIGTGKTATPEDAEAVHAFVRKVIARLYGQPAADKIIIQYGGSVKPDNAAQLMAKENIDGALVGGAALKPDTFVPIAKFN

SEQ ID NO: 41677 - DNA, 504 bp, Unknown
  Obtained from environmental sample
  misc_feature (1)..(504): n is a, c, g, or t
gtgcctggaacacatacagatatacgctccgccatagctctttctcaagattactgtcaactttggaacggtggcttccgcataagcgtagagcagttttgctccgtgccttattatgccgttgtattcctggtcagtgcccggcaaaaatcccggaacatccacaagcgttatgagagggatgttaaaagcatcgcaaaagcgcacaaaacgagcagccttgtcgctggcattcacatccaagcaaccagcggattcccgtgggttattcgccacaatgcctacagaagtcccacccaaacgtccaaagcctattatcacattgcgggcataattttcctgcaattccaaaaaagaatttatatccaagatattcttcacaacctcagacatgtcataaggcttgttcacgttagcgggcacaagctcctctatatccgctggcatttcaatctgaggcacagagttcacagagggaggggtttccgcattgctaccaggtag

SEQ ID NO: 41678 - protein, 167 aa, Unknown
  Obtained from environmental sample
  misc_feature (1)..(167): Xaa is any amino acid
MPGTHTDIRSAIALSQDYCQLWNGGFRISVEQFCSVPYYAVVFLVSARQKSRNIHKRYERDVKSIAKAHKTSSLVAGIHIQATSGFPWVIRHNAYRSPTQTSKAYYHIAGIIFLQFQKRIYIQDILHNLRHVIRLVHVSGHKLLYIRWHFNLRHRVHRGRGFRIATR

SEQ ID NO: 41679 - DNA, 795 bp, Unknown
  Obtained from environmental sample
  misc_feature (1)..(795): n is a, c, g, or t
gtgaactctgtgcctcagattgaaatgccagcggatatagaggagcttgtgcccgctaacgtgaacaagccttatgacatgtctgaggttgtgaagaatatcttggatataaattcttttttggaattgcaggaaaattatgcccgcaatgtgataataggctttggacgtttgggtgggacttctgtaggcattgtggcgaataacccacgggaatccgctggttgcttggatgtgaatgccagcgacaaggctgctcgttttgtgcgcttttgcgatgcttttaacatccctctcataacgcttgtggatgttccgggatttttgccgggcactgaccaggaatacaacggcataataaggcacggagcaaaactgctctacgcttatgcggaagccaccgttccaaagttgacagtaatcttgagaaagagctatggcggagcgtatatctgtatgtgttccaggcacttaggcgctgattttgttgcagcttggcccggtgctgagattgcggttatggggccggatggcgcggtgaatatagtgttcaaaaaagacatagacgccgtgaaagaagctggtggcgatgcagaggctaaagccgctgaatgtaagcaggaatatatagacaagttcgcaaatcccaccattgccgcatcccgtggctatgttgatgatgttattgaaccggcaaaaacccgtagcgttcttttggcgtatttaagggcactttcaacaaagcaccaagaaggccccaaaagaaagcacgggaatataccttttataagatga

SEQ ID NO: 41680 - protein, 264 aa, Unknown
  Obtained from environmental sample
  DOMAIN (1)...(260): Carboxyl transferase domain
  misc_feature (1)..(264): Xaa is any amino acid
MNSVPQIEMPADIEELVPANVNKPYDMSEVVKNILDINSFLELQENYARNVIIGFGRLGGTSVGIVANNPRESAGCLDVNASDKAARFVRFCDAFNIPLITLVDVPGFLPGTDQEYNGIIRHGAKLLYAYAEATVPKLTVILRKSYGGAYICMCSRHLGADFVAAWPGAEIAVMGPDGAVNIVFKKDIDAVKEAGGDAEAKAAECKQEYIDKFANPTIAASRGYVDDVIEPAKTRSVLLAYLRALSTKHQEGPKRKHGNIPFIR

SEQ ID NO: 41681 - DNA, 396 bp, Unknown
  Obtained from environmental sample
  misc_feature (1)..(396): n is a, c, g, or t
atgttcgggcttttgatagctttggagataatggccgtaacgggcaaaaatttaggcgaatatttagaccttttgtatgcggaatatggccgcctttaccccgaacgttcgggttttgaagtggaaaaatccatggttggcgatccacttctggcaaaagtggcggaaatcgcaaaatctgcgcaaccaggcacacaaatctccattggtaaaaaaagcaaggttgtacgcgaactattgaccatagacggcgttaaaataatcttcaatgacgattcctggatgctcatccgcccaagcggaacagagccaaaagtacgtatttatgccgaatgccgcgatagcgaggaaaaagaggacatgtttaccgccgcaaaagacctattttttaagtaa

SEQ ID NO: 41682 - protein, 131 aa, Unknown
  Obtained from environmental sample
  DOMAIN (52)...(131): Phosphoglucomutase/phosphomannomutase, C-terminal domain
  misc_feature (1)..(131): Xaa is any amino acid
MFGLLIALEIMAVTGKNLGEYLDLLYAEYGRLYPERSGFEVEKSMVGDPLLAKVAEIAKSAQPGTQISIGKKSKVVRELLTIDGVKIIFNDDSWMLIRPSGTEPKVRIYAECRDSEEKEDMFTAAKDLFFK

SEQ ID NO: 41683 - DNA, 378 bp, Unknown
  Obtained from environmental sample
  misc_feature (1)..(378): n is a, c, g, or t
atgggagtttatctcagtaccgaatacatcaaatctataccgcaatccgtaatcgagtccgcccgtatggatggcgcaaagtatctgcttatcttttggaaaattatcatgccgatagcggctccggtggcagtgacaatggcaatacttggggttactggaacctggaatgagtttatgttaattaacattttggtttccaaaaccgaactcaaatccctgccggttggcatcaatcaattttcaggcgcccgggcttctgactttggcaagcagttttctgccctgactataggcatgacacccatgataattttttatatgatcttcagaaagcagattactaaaggggttgttgctggtgcgattaaaggttaa

SEQ ID NO: 41684 - protein, 125 aa, Unknown
  Obtained from environmental sample
  misc_feature (1)..(125): Xaa is any amino acid
MGVYLSTEYIKSIPQSVIESARMDGAKYLLIFWKIIMPIAAPVAVTMAILGVTGTWNEFMLINILVSKTELKSLPVGINQFSGARASDFGKQFSALTIGMTPMIIFYMIFRKQITKGVVAGAIKG

SEQ ID NO: 41685 - DNA, 1800 bp, Unknown
  Obtained from environmental sample
  misc_feature (1)..(1800): n is a, c, g, or t
gtggtttcgtttttcctcgtgcttctgctcgtgtcaattatgttaatacgaagccgcaccgccggcaaacagttggaaaaactggtagcgcagcggacaggcgctctcgcgttcgagacatccaaacttcagtcggtgtttgcttcgattcccgatcttatgtataccaaggataaagatttaagatacacgcaatgtaacaaagcctatgaacaatttatgggcatcaatcaagaggctattctcggcaaggccaacagcgatggcgcatggtttactcccgaagatgtagagaagattcaaattaccgacgaggttgtaataaatgaagaccggataatttcccatgaagtgagaattcgctcgccttcaaccggaatagaaagagtttatgaaacggttaaagctccgctcaggcaggacggagccgtcgtagggctcgtctccattatacgcgatgtaaccaagcacaaggagatggaaagggacttgtcgcttcaaacttcattgtttaagacaatgctcacctctcttcccgacgccgtattctgcaaaaatttgaatttcaagtacaccttatgcaacaattacatggcgtcaatattcggcaagaaagtagaggaaatactcggcaaggatgacgtaaatgccctgggattgccgcccgaaacggcggccattgccgcggaaagcgacctgaaagttatgaacgaacagcagcgcatagtttatgaggaatgggttccctgtgccgacggcgtcaagcggctttttgaaacggtaaaatcgccgcttatacttgaaggcgatgtagtcgggattatggcgatagggcgcgatgtaaccaagcgcaaggaaatggaagaggaggctctggccgctaaccgcgccaagtcgtctttccttgccaatatgagccatgaactcaggacgccgcttaacgtcgttatcgggcttaccgatttattgatggaagacgaaatgtctcccaatatgaggatgaatctactgaagataagcaatgcggggaacactctcttgagcattgtcaacgatattctggatttttcaaaaattgagtcgggcaaactcgaattatcgccggttgagtattacgtgtccagcctgctgaacgatatcataacacttgttattacgcgcctcggggaaaaacccatacagttccatttgaaaatcaacgacgatctcccaaacaaactgttcggcgacgatctcagggtaaaacaaatactgaccaacctgctcactaacgccgtcaagtacacccgccagggaagcatcgagctagacgtacgctgtatgcgcgaaggcgatgccatgtggctggacgctgctgtcagcgacaccggcatgggcataccaaaggaggacataccaaacctgttccttgattattatcaggtctccgccaaatccaaccgcaacattgaaggcacgggcttgggcttgcccattaccaaaaggcttgtagagatgatggacgggaaaatcggcgtggaaagcgaacatggcaagggctcgacattcagtttccgcgtaaagcaaggctatgtaaacgacgcggtcctcggccaggatgtctcggacaaactccgcaacttctgctattccgatgacaaacgcgttgttgccaaaaaactggcaagagtcaatttgagctatgccagagtactggtggtagacgacatggaaaccaacctggacgtggcatcgggcattttacacagatacaatatgcatgttgactgcctgaataagcgggccgctcggccgatctga

SEQ ID NO: 41686 - protein, 599 aa, Unknown
  Obtained from environmental sample
  SIGNAL (1)...(21)
  DOMAIN (297)...(362): His Kinase A (phosphoacceptor) domain
  misc_feature (1)..(599): Xaa is any amino acid
MVSFFLVLLLVSIMLIRSRTAGKQLEKLVAQRTGALAFETSKLQSVFASIPDLMYTKDKDLRYTQCNKAYEQFMGINQEAILGKANSDGAWFTPEDVEKIQITDEVVINEDRIISHEVRIRSPSTGIERVYETVKAPLRQDGAVVGLVSIIRDVTKHKEMERDLSLQTSLFKTMLTSLPDAVFCKNLNFKYTLCNNYMASIFGKKVEEILGKDDVNALGLPPETAAIAAESDLKVMNEQQRIVYEEWVPCADGVKRLFETVKSPLILEGDVVGIMAIGRDVTKRKEMEEEALAANRAKSSFLANMSHELRTPLNVVIGLTDLLMEDEMSPNMRMNLLKISNAGNTLLSIVNDILDFSKIESGKLELSPVEYYVSSLLNDIITLVITRLGEKPIQFHLKINDDLPNKLFGDDLRVKQILTNLLTNAVKYTRQGSIELDVRCMREGDAMWLDAAVSDTGMGIPKEDIPNLFLDYYQVSAKSNRNIEGTGLGLPITKRLVEMMDGKIGVESEHGKGSTFSFRVKQGYVNDAVLGQDVSDKLRNFCYSDDKRVVAKKLARVNLSYARVLVVDDMETNLDVASGILHRYNMHVDCLNKRAARPI

SEQ ID NO: 41687 - DNA, 576 bp, Unknown
  Obtained from environmental sample
  misc_feature (1)..(576): n is a, c, g, or t
atgtattatctttttaaagatatgatttcagaatattcagataatgcacttattggtaaagcacacgtatttaaagatattttttttcgagcagataattacgaattaatgatttgtaagccaaatgcaaagatagaagtaaaagatcatgattttactattggtgcaagaataaacgcaacaatgaatacattaggttccgatgacatagaaaaatatacatgggatattcccgcaatagctattgagtgtaaaacttatcttgacaaaacaatgttgcaagatgcttcaactgccgcagaagaattaaaacatcgaaaccccaatgcaatatatattgtagtcgcagaatggttaaaattaaccgacgcagtaaatcttaaaaaatttaaaattgatcaaatatatgttattcgaaaacagaaaaatactgacagagaatttagatatgaaaaggattatataaaaaacccaatttatctcgatgtaatatttcatctttctaattttgtgagggattttcttacaaaagattgggaaagtggaattgattttggtctttcaaaggatatttaa

SEQ ID NO: 41688 - protein, 191 aa, Unknown
  Obtained from environmental sample
  misc_feature (1)..(191): Xaa is any amino acid
MYYLFKDMISEYSDNALIGKAHVFKDIFFRADNYELMICKPNAKIEVKDHDFTIGARINATMNTLGSDDIEKYTWDIPAIAIECKTYLDKTMLQDASTAAEELKHRNPNAIYIVVAEWLKLTDAVNLKKFKIDQIYVIRKQKNTDREFRYEKDYIKNPIYLDVIFHLSNFVRDFLTKDWESGIDFGLSKDI

SEQ ID NO: 41689 - DNA, 372 bp, Unknown
  Obtained from environmental sample
  misc_feature (1)..(372): n is a, c, g, or t
ttgcaagagagaataaagagcaacccaaaaatcaaaattatgtggaacagcattccggttgagtttaagggaggcaaatttttggaatcggttactctgcaaaatactttgacaagcgaaaaaacagaactaggagtatctggatttttttatgccattgggcataaccccaatacggaatttttgggtgggcaattaaagctagatgagcagggctttataataacaaagccgggcagcacaaaaacaagcgtagaaggagtttttgcagcaggcgatgttcaaaacccacaccacaggcaagccataatagccgcaggctcaggatgcttggccgcgcttgaatgcgaagagttcatcaatctttattga

SEQ ID NO: 41690 - protein, 123 aa, Unknown
  Obtained from environmental sample
  misc_feature (1)..(123): Xaa is any amino acid
MQERIKSNPKIKIMWNSIPVEFKGGKFLESVTLQNTLTSEKTELGVSGFFYAIGHNPNTEFLGGQLKLDEQGFIITKPGSTKTSVEGVFAAGDVQNPHHRQAIIAAGSGCLAALECEEFINLY

SEQ ID NO: 41691 - DNA, 531 bp, Unknown
  Obtained from environmental sample
  misc_feature (1)..(531): n is a, c, g, or t
atggaagaagttgttataataggttctggacctgcggggcatactgcggctatttatttgggcagggcaaaaagggagcctcttatgtttgagggctttatggctggcggcattgcagcaggcgggcagctcaccaccaccgaaaccattgagaatttcccaggttttgcagatggaattttgggaccaacgcttatggagcaaatgcgcgagcagtctttgaagaattctgttcgcatagttacagaaactgttgtttccgttgatttttcaaaaaagccttttgtactgactttggaaagcggcgagcaaatagagacaaaaagcgttatagttgcaacaggggcaactgcaagaattttagacattcctggcagcaagcaatattggcaaaaaggaatttctgcttgtgctgtgtgcgatggcgcgcttcccattttcaggaataaaaccatagccgttgttggcggcggagataccgcaatgggcgaagcggagcatcttggccaaattcgccaagcgaagtggtga

SEQ ID NO: 41692 - protein, 176 aa, Unknown
  Obtained from environmental sample
  DOMAIN (3)...(176): Pyridine nucleotide-disulphide oxidoreductase
  misc_feature (1)..(176): Xaa is any amino acid
MEEVVIIGSGPAGHTAAIYLGRAKREPLMFEGFMAGGIAAGGQLTTTETIENFPGFADGILGPTLMEQMREQSLKNSVRIVTETVVSVDFSKKPFVLTLESGEQIETKSVIVATGATARILDIPGSKQYWQKGISACAVCDGALPIFRNKTIAVVGGGDTAMGEAEHLGQIRQAKW

SEQ ID NO: 41693 - DNA, 423 bp, Unknown
  Obtained from environmental sample
  misc_feature (1)..(423): n is a, c, g, or t
gtggaaacagccggcaatacggttggccggattcgggtcggcatactgacggatgcttcccaagccagtctccgtaacttcattcatgaaagtgtagaaccggggagcgccatagttactgacggctggcggggatacagcgggattgaatcctatggatgcacccatgaagttattgaacatctgaccgaggatacgcttctcccccatgttcataccgttatttccctgataaaacggtggatcatgggaaccatgcaagggtcatgctctcaggaatatttggcatattatcttgatgaatatacctttcgatttaacaggcgtaaatcaaagagcagggggttgttgttctaccgtttgctccaaaatgctgtccttttggaaccagttacttatcacaatatcaccccaaaatcataa

SEQ ID NO: 41694 - protein, 140 aa, Unknown
  Obtained from environmental sample
  misc_feature (1)..(140): Xaa is any amino acid
METAGNTVGRIRVGILTDASQASLRNFIHESVEPGSAIVTDGWRGYSGIESYGCTHEVIEHLTEDTLLPHVHTVISLIKRWIMGTMQGSCSQEYLAYYLDEYTFRFNRRKSKSRGLLFYRLLQNAVLLEPVTYHNITPKS

SEQ ID NO: 41695 - DNA, 540 bp, Unknown
  Obtained from environmental sample
  misc_feature (1)..(540): n is a, c, g, or t
ttgaattttaacaggaatttagttgtgaaaagaaattttggaaaatttgtaaagaggagatatgcggacggggtatatacctgtccgttatgcggaagcaagaagtcctggccggtgagaaaacacacctacgaatgtgctgaatgccatcaccaggaatcaatgttatcggggacattgtttcaagacactcataaaccgttgatgctctggtttagggcaatctggtatattacctctcaaaagaacgggaccagcgcgcttgggttgcaacggatattaggcatagggagttacaagactgcttggacgtggttgcacaaattgcggcgggcgatggtacgccccggcagggaccggctttcaggacgggttgaagttgatgaagcgtatataggagcgcctgaaaagggggggaaaacgcggtcgaggagcagaaaacaaggtacttgccgcgattgcggtggaaacagccggcaatacggttggccggattcgggtcggcatactgacggatgcttcccaagccagtctccgtaa

SEQ ID NO: 41696 - protein, 179 aa, Unknown
  Obtained from environmental sample
  misc_feature (1)..(179): Xaa is any amino acid
MNFNRNLVVKRNFGKFVKRRYADGVYTCPLCGSKKSWPVRKHTYECAECHHQESMLSGTLFQDTHKPLMLWFRAIWYITSQKNGTSALGLQRILGIGSYKTAWTWLHKLRRAMVRPGRDRLSGRVEVDEAYIGAPEKGGKTRSRSRKQGTCRDCGGNSRQYGWPDSGRHTDGCFPSQSP

SEQ ID NO: 41697 - DNA, 429 bp, Unknown
  Obtained from environmental sample
  misc_feature (1)..(429): n is a, c, g, or t
gtgagaataaaggagaaagctccggaagcctggaggacaattcttcttagaatggcgatggtggactgcgcagagaaattggcaataagggagagagacaaatgccttataagcggggaaagcctctctcaggtggcaagccaaactatagaaaatattacctgtgtccagcacaggctgaaactgcccgtgctgcggcccctcataggaaccaacaaagaagacataatcgccatgggagaaagcattggtacctataaaacgtcaattcttccctacgaagactgctgcgttcttttcagcccccctcacccgatactcaggggaaacacaatagaggcgggaaaactttacgaggatttgtgcgcggagccgctaatcgaagacgccctaaaaaacgtggagataataaaatgctcatttttttaa

SEQ ID NO: 41698 - protein, 142 aa, Unknown
  Obtained from environmental sample
  DOMAIN (1)...(123): Thiamine biosynthesis protein (ThiI)
  misc_feature (1)..(142): Xaa is any amino acid
MRIKEKAPEAWRTILLRMAMVDCAEKLAIRERDKCLISGESLSQVASQTIENITCVQHRLKLPVLRPLIGTNKEDIIAMGESIGTYKTSILPYEDCCVLFSPPHPILRGNTIEAGKLYEDLCAEPLIEDALKNVEIIKCSFF

SEQ ID NO: 41699 - DNA, 315 bp, Unknown
  Obtained from environmental sample
  misc_feature (1)..(315): n is a, c, g, or t
ttgactttgccagaatattgtattacactttgtaatatggaggtgtctatgaacaggcaggcaatcactacagccagactccccgtggatactacgaataagctacttgcccttgccaggatcaagggcaagacaaaatcagacatcattaaggagtctttggatttctattacgaccacgaagagaatgaaatagactcttttaccctgggcgagccatactttggcaaatatagctctgacgatagcgatctttcgacaacatacaaggaacgcctaaggggaatcctccgtgctaagcacaattctgattga

SEQ ID NO: 41700 - protein, 104 aa, Unknown
  Obtained from environmental sample
  misc_feature (1)..(104): Xaa is any amino acid
MTLPEYCITLCNMEVSMNRQAITTARLPVDTTNKLLALARIKGKTKSDIIKESLDFYYDHEENEIDSFTLGEPYFGKYSSDDSDLSTTYKERLRGILRAKHNSD

SEQ ID NO: 41701 - DNA, 399 bp, Unknown
  Obtained from environmental sample
  misc_feature (1)..(399): n is a, c, g, or t
ttgacgcangtcctcttattgccctttttgctgccaatgataagcatcataaaggaattcgggattttcttaaagacatccgtaccgttttgtagtaccctcgctgtttttagcgaggtttcgcacatattgggattcagcgtaaaggctcagagggatttttatgaatgggtgatgtacaaaggggtaataatcagcgatataaaccaaaatgatatgccccggattgttgagttgaccgataagtacgcggatcttccaatggattttgcagatgccacgctggtcattaccgcggaaaaggccaatatccgggagataatcagtttggacaaggatttcgatgtctacaggcttcccggcagggagcaaatacacaacatatataaacctggttga

SEQ ID NO: 41702 - protein, 132 aa, Unknown
  Obtained from environmental sample
  misc_feature (1)..(132): Xaa is any amino acid
MTXVLLLPFLLPMISIIKEFGIFLKTSVPFCSTLAVFSEVSHILGFSVKAQRDFYEWVMYKGVIISDINQNDMPRIVELTDKYADLPMDFADATLVITAEKANIREIISLDKDFDVYRLPGREQIHNIYKPG

SEQ ID NO: 41703 - DNA, 1257 bp, Unknown
  Obtained from environmental sample
  misc_feature (1)..(1257): n is a, c, g, or t
ttgtcctttggaacaagaagagatggttttcagggttttatttctcccacgggcattgcggcccgcaacggcaagatatacgccgccgacagccttttaaagcagatctatattttcgaccgcaacgggatttacttaggcccccttgttcaggaggaccttcattctcctgaaagccttcgttttctttcggacgggaaattgcttgtcgcggattcaaaccgggtcttattgatagatccggacacggcaataatccgcgaacttggcgttttccgtaattcctccgccgtaaggataaccggagcggaaatggacataaacggcaatgtgctattagcggatttcaagacaggggaagtagccgtcatgacccgcattgacgatatggcctccggcctttttgttgaaattaccaggatcattagcgatgaattccccaaagtaactgtagaaatggaagttaccgaccggctccgcaggcctgtggtcggcctggatcagaggaatttcctgctcagcgaaggcggctttgctgtcagggaacagagctttgtcgcttcttattttaattcggccaacctggatatttcggttctttttgaacgctcccccgccaccctcccccttagggatgactttgccacagccctccgcgatatcagcgccgcaggaaggatcgtctcgatagtttcagcgggcgaactgcccgttaaagaaaacccggcttccgccgccggagcgacgccagaggcaaagctgacctcggtggccaggggaacggcggcgtcttactctgcccgctggcgatttgatcttgccctgcgtcttgcggccaccgatcttttgccgggcgaaaagaagcgggcggtggtttttgtgggcgcgggcgttgctcccggcgcgtcagggagtttaggcacctttgatcaatacagcctttcagagcttgccgcatacctttccagcaacaatgtggttttttacgccgtcattgtcggcggaggatctgccggagcagacctgcgtttcctttgcgaacaaacaggcggccaggttctgtcacttttccggagtgaaggcattacacctgaaatccgcagcctacgcgagaggccgtccggttactatgtcctaagttacagatccaacctgccgacggatttcgggcgggcatatctgcctgttgaagctgaggtgtatctaatggaaagatcaggcagggacagcaccggttattttgcgcccatgcaatag

SEQ ID NO: 41704 - protein, 418 aa, Unknown
  Obtained from environmental sample
  misc_feature (1)..(418): Xaa is any amino acid
MSFGTRRDGFQGFISPTGIAARNGKIYAADSLLKQIYIFDRNGIYLGPLVQEDLHSPESLRFLSDGKLLVADSNRVLLIDPDTAIIRELGVFRNSSAVRITGAEMDINGNVLLADFKTGEVAVMTRIDDMASGLFVEITRIISDEFPKVTVEMEVTDRLRRPVVGLDQRNFLLSEGGFAVREQSFVASYFNSANLDISVLFERSPATLPLRDDFATALRDISAAGRIVSIVSAGELPVKENPASAAGATPEAKLTSVARGTAASYSARWRFDLALRLAATDLLPGEKKRAVVFVGAGVAPGASGSLGTFDQYSLSELAAYLSSNNVVFYAVIVGGGSAGADLRFLCEQTGGQVLSLFRSEGITPEIRSLRERPSGYYVLSYRSNLPTDFGRAYLPVEAEVYLMERSGRDSTGYFAPMQ

SEQ ID NO: 41705 - DNA, 1164 bp, Unknown
  Obtained from environmental sample
  misc_feature (1)..(1164): n is a, c, g, or t
ttgtcgcgattccgcgcccaagatacagttccaataccgagctttgacataacgctgaaagccagagattataattttttagggactatgagccctttaagaattgatcttggatactcttatgatgaaaacaaacaaaaaacttttttctttttatttgattccaatattccttttacggccggcggtttaaactggaatataaaatttttaaatgatttttcatacaggccggataccgaaaagccttattattacggaaatacaaccggtctatctgttgaattgcctgtaaaatttactaccattacagtcggaataaatgaatcatttacattaaacgaagaaaacgaagatgtatataaaaaagattacggagaatttcaagacggttattatatgtcaactaacccttatatatcatggaaaatacccataggaattgacgccggcaattacggtgaaattattcttactcccggcatttccgccgttttcccccatgaattttcaagatggcctttagatgacataagaaaaggccctatccttatttttagccagaatttaggctttaaccgcgtagactgggctggaaatttcagaaaaggtttagacatatccgtaaacaattcttttgattataatttttacagggctaaaaacgatatgaacacatggaatgacaaaataataatttccggcataggtcattttaagcttacggattttttcggcgtttcaacaaaccttatgtaccgccaatggatattttacgactacggatacgattgtgccggagacgttcttcgcggcgttattgacaaggatatttccgcggattatatgctttcctggaaccttgatttatattttatgatactaaaattcctgccgtccgtctggtttaacaaaccaaaactgcgtatttttaactttgagctttttgccgtcccttttattgacatggctgtatatcacgatcctgtaaataaaaccgactttaaattaaaaaatacggtttatacaggcgggttagaaacaataatttttcctgagttctttcgcagtttatttttacgcttatcgtttggttggaatgtaaagaataaaccggactatgataatatggaaatatatatcggcaccgactttttttattaa

SEQ ID NO: 41706 - protein, 387 aa, Unknown
  Obtained from environmental sample
  misc_feature (1)..(387): Xaa is any amino acid
MSRFRAQDTVPIPSFDITLKARDYNFLGTMSPLRIDLGYSYDENKQKTFFFLFDSNIPFTAGGLNWNIKFLNDFSYRPDTEKPYYYGNTTGLSVELPVKFTTITVGINESFTLNEENEDVYKKDYGEFQDGYYMSTNPYISWKIPIGIDAGNYGEIILTPGISAVFPHEFSRWPLDDIRKGPILIFSQNLGFNRVDWAGNFRKGLDISVNNSFDYNFYRAKNDMNTWNDKIIISGIGHFKLTDFFGVSTNLMYRQWIFYDYGYDCAGDVLRGVIDKDISADYMLSWNLDLYFMILKFLPSVWFNKPKLRIFNFELFAVPFIDMAVYHDPVNKTDFKLKNTVYTGGLETIIFPEFFRSLFLRLSFGWNVKNKPDYDNMEIYIGTDFFY

SEQ ID NO: 41707 - DNA, 912 bp, Unknown
  Obtained from environmental sample
  misc_feature (1)..(912): n is a, c, g, or t
gtggcgtccacgcatacgcacgaagcgcgggatacgatgggcatatggggcagttcatatatcaaaagcggcgttaacaaacaatggcgagaatacatcaagcggcgtatcgtacaatccgtggcggaagcggtgggtagtatgcgtccggctgttttgcggttttcgcagaatttgacagacggtgaggacactgttgccgatacccgcgaaccgcgcgtgtttgataatggattacacatgctgcaaactgttgacgccgaagatgggcatacgctcggtacgctgatacaatggtctaaccatcctgaaacactttggggcggtaatttattgattagttccgattttccgcactacatccgcgaagcggttgaaaaaggcgtttacaacaatggcaatcttgttgaggaaggtcttggcggcgtggcagtttacgtcaacggcgctatcgggggtcttatgaccacaaatccttcgttaggcgtaaaagacccgtttggcaataccgtttattctcagccctcattcgataaagcacgcgctcagggcgatactgtcgggatgatcattttaagaaccatgcgcgatgaaccggttgtagtgaaagaagccggtatcagcctgcgtgcgaaaacttttacagtgccgcttgctaacaaccttttccgtctgggttctgtacttggagtgttggataccggcatgagcggctggatgaaaaaacataccgaaggggcggtatggagtattgggccggcggaatttcttcagatacccggcgagttgtatcccgaaatcctcaacggtggaattgtcgcgttgccaggtcgcgattacgaaatcgcgcctgtagaaactccgcctttgcgggaattgatgggcggcagctttcgtttcgcaatcggttag

SEQ ID NO: 41708 - protein, 303 aa, Unknown
  Obtained from environmental sample
  misc_feature (1)..(303): Xaa is any amino acid
MASTHTHEARDTMGIWGSSYIKSGVNKQWREYIKRRIVQSVAEAVGSMRPAVLRFSQNLTDGEDTVADTREPRVFDNGLHMLQTVDAEDGHTLGTLIQWSNHPETLWGGNLLISSDFPHYIREAVEKGVYNNGNLVEEGLGGVAVYVNGAIGGLMTTNPSLGVKDPFGNTVYSQPSFDKARAQGDTVGMIILRTMRDEPVVVKEAGISLRAKTFTVPLANNLFRLGSVLGVLDTGMSGWMKKHTEGAVWSIGPAEFLQIPGELYPEILNGGIVALPGRDYEIAPVETPPLRELMGGSFRFAIG

SEQ ID NO: 41709 - DNA, 1209 bp, Unknown
  Obtained from environmental sample
  misc_feature (1)..(1209): n is a, c, g, or t
gtgcttgcttttgcaagcttagcggcgattgtcttgtcacgaactatcagcaagcccattgtaaaggtaacggaaacttttcgggatatttcagaaggcgagggcgatctgacccggattattgcggtcagttcaaaagatgaaattggcgatcttgcccgtttcttcaacctgactttggcaaagatcagaaatcttgtagtaagcattaaaaaagaagcgtttaagctttccgaaatcggcacggatctggccagtaatatgactgagaccgccgcggcggtaaatgaaattaccgccaacattcagaatatcaagggacaaacgattaaccaaagcgccagtctgagcgaaacaaacgccacaatgaaacaggtcgtttcaaacattgacaaacttaaccgccatattgaaaaccagagcgataatgtaaatcagtcttcgtcggccattgaggaaattgtggcaaatatcaattcggttacctccacccttgtcaacaacgcgggcaatgttaagacgttgcaggattcttcggaaatcgggcgcaggggattgcaggaagtcgtatcggatattatggaaatcgcgcgtgattctgaggggcttttggagatcaattcagtgatgaacaatattgccagccaaaccaacctattgtctatgaacgcagctattgaggcggcgcacgccggcgatgccggcaaaggctttgccgtagtcgccaacgagatccgcaaacttgcggaattatncagcacgtcatcaaaaactataggcacggtattaaaaaagataaaagactctatcgacaagataagcagagcagccgatggcgtgcttaccaagtttggggcaattgactcaagcgtcaggatcgttgcgcaacaggaagaaaacatacgcaaagcaatgcaggaacagggcgcggggagcaagcagcttcttcaaagtgcggataatctgaacgatattacgcggcaggtaaaaaccggttctgaagatatgcttcgcgggtcaaaggaagtcatacaggaaagccagaacctggaaaaaataaccgcggagatcaccgggggcatgaacgagatggcttcgggtgcggaacagatcaatgtagcggtgaaccacgtcaacgagctaagcggtaagacccgcgagggtatcgatacgctgctacgggaagtctcgctgtttaaggtggagtga

SEQ ID NO: 41710 - protein, 402 aa, Unknown
  Obtained from environmental sample
  DOMAIN (2)...(65): HAMP domain
  misc_feature (1)..(402): Xaa is any amino acid
MLAFASLAAIVLSRTISKPIVKVTETFRDISEGEGDLTRIIAVSSKDEIGDLARFFNLTLAKIRNLVVSIKKEAFKLSEIGTDLASNMTETAAAVNEITANIQNIKGQTINQSASLSETNATMKQVVSNIDKLNRHIENQSDNVNQSSSAIEEIVANINSVTSTLVNNAGNVKTLQDSSEIGRRGLQEVVSDIMEIARDSEGLLEINSVMNNIASQTNLLSMNAAIEAAHAGDAGKGFAVVANEIRKLAELXSTSSKTIGTVLKKIKDSIDKISRAADGVLTKFGAIDSSVRIVAQQEENIRKAMQEQGAGSKQLLQSADNLNDITRQVKTGSEDMLRGSKEVIQESQNLEKITAEITGGMNEMASGAEQINVAVNHVNELSGKTREGIDTLLREVSLFKVE

SEQ ID NO: 41711 - DNA, 504 bp, Unknown
  Obtained from environmental sample
  misc_feature (1)..(504): n is a, c, g, or t
ttgctccccgcgccctgttcctgcattgctttgcgtatgttttcttcctgttgcgcaacgatcctgacgcttgagtcaattgccccaaacttggtaagcacgccatcggctgctctgcttatcttgtcgatagagtcttttatcttttttaataccgtgcctatagtttttgatgacgtgctgnataattccgcaagtttgcggatctcgttggcgactacggcaaagcctttgccggcatcgccggcgtgcgccgcctcaatagctgcgttcatagacaataggttggtttggctggcaatattgttcatcactgaattgatctccaaaagcccctcagaatcacgcgcgatttccataatatccgatacgacttcctgcaatcccctgcgcccgatttccgaagaatcctgcaacgtcttaacattgcccgcgttgttgacaagggtggaggtaaccgaattgatatttgccacaatttcctcaatggccgacgaagactga

SEQ ID NO: 41712 - protein, 167 aa, Unknown
  Obtained from environmental sample
  misc_feature (1)..(167): Xaa is any amino acid
MLPAPCSCIALRMFSSCCATILTLESIAPNLVSTPSAALLILSIESFIFFNTVPIVFDDVLXNSASLRISLATTAKPLPASPACAASIAAFIDNRLVWLAILFITELISKSPSESRAISIISDTTSCNPLRPISEESCNVLTLPALLTRVEVTELIFATISSMADED

SEQ ID NO: 41713 - DNA, 480 bp, Unknown
  Obtained from environmental sample
  misc_feature (1)..(480): n is a, c, g, or t
atgcgcttccgcattgaacttttggcaaaacacaatttgaagctcaaagacatacagagggtcataggggggatggatgttctgaggggcgctgaggattttgtacgctcactgcgcgaaagaacccagctcatcatcctttcggacacctttgagcaattcgcaaagccgcttatggcaaagctgggttaccccaccctcttctgcaactgcatcgaaaccgccgctgacggttcagtctccggctacgccctccgccagcagggcggcaagaagtgcgcggtggcggcctttaaaaccctcaacttcaaagtcttcgcggcgggggactccttcaacgatttggcgatgatcgccgaagccgatgccggctgcctgttccgcgcgcctgagaaaataagaaaagacaactctcatttgttttgcgcggatacttacggggagctcttggaacggatagatgtttttttgggggagtag

SEQ ID NO: 41714 - protein, 159 aa, Unknown
  Obtained from environmental sample
  misc_feature (1)..(159): Xaa is any amino acid
MRFRIELLAKHNLKLKDIQRVIGGMDVLRGAEDFVRSLRERTQLIILSDTFEQFAKPLMAKLGYPTLFCNCIETAADGSVSGYALRQQGGKKCAVAAFKTLNFKVFAAGDSFNDLAMIAEADAGCLFRAPEKIRKDNSHLFCADTYGELLERIDVFLGE

SEQ ID NO: 41715 - DNA, 588 bp, Unknown
  Obtained from environmental sample
  misc_feature (1)..(588): n is a, c, g, or t
atgaaattattgaaactgaacaatcccttcggcgctccggtttaccatgaggaaacggtttccagcacttttgaccttgcgcgtattctcgccgggcagaatgagccccacggcacggtgatcacggcggattttcaggaatcgggcaggggcaggcttaaccgcaggtgggttaccgagcgcgggaagagcctgatgtttacaataatactccgttacgcgggcgcttcgtccataccgactgcccttactctgagggccggccttgcggtctcccttgcgatagaagacctcgcacccgctttaggcggctctgtgcggatcaagtggcctaacgatgtgatgataagcggccgtaaggcggccggcatcctgaccgaggccgacggtaaaactgtgtttataggcgtgggtgtaaatgtcgcccaggaggaatttcctgagcagtaccgttccaaggctggaagcataatccactcttttccggctctggccgaaaatgcccgttttgatctgcttgaaaagctcctctcgcggctttacgcggagattgaaaaccctactgccgaaaacccatgcgtggcgtga

SEQ ID NO: 41716 - protein, 195 aa, Unknown
  Obtained from environmental sample
  DOMAIN (15)...(117): Biotin/lipoate A/B protein ligase family
  misc_feature (1)..(195): Xaa is any amino acid
MKLLKLNNPFGAPVYHEETVSSTFDLARILAGQNEPHGTVITADFQESGRGRLNRRWVTERGKSLMFTIILRYAGASSIPTALTLRAGLAVSLAIEDLAPALGGSVRIKWPNDVMISGRKAAGILTEADGKTVFIGVGVNVAQEEFPEQYRSKAGSIIHSFPALAENARFDLLEKLLSRLYAEIENPTAENPCVA

SEQ ID NO: 41717 - DNA, 1032 bp, Unknown
  Obtained from environmental sample
  misc_feature (1)..(1032): n is a, c, g, or t
ttggattttaacggaagatcaacccttatgctaggaaacaaatattttatcgcggaaacatgtgaatatcagaaacattttttgtcgttccgcccaaggcgaataatactgactgccgtagagtgggatcatcaggattattttgaaagttacgaatcaatccgtgatgcgtttgttgaatattgcagattgcttccagaaggagggcagcttatctactgtgccgatgacagcggtgcgagcgatttattccagatcatcgaaaaggaaaatcgcacggtccaattaattccatacggctttaccgcagacggcgattatagaatacttttttataacgtggaagacggacgggctgtttttactcttgctggaataccggaggctttttcaatacggatacccggacggcacgaggcgttaaattcagccgcggcaattgcccttaccgtattattggcaagggaagaatttcagacagcaaaaggaactgcgcttcttagtcaggaaaaaataagttccataaagaatgcgctggataattttaaaagtacaaaacgaagatgtgaaattttaggcaaagcgggaggaattctttttattgacgattacggacatcatcctacagccattaaaacaacgcttgcgggcataaaaagtttttatccatcatgcaggctgattgtaagttttatgtcgcatacctacacgcggacatccgcccttatcgatgaatttgcttcggcttttgacgatgcggatattctttttctgcataaaatttatgcgtccgcaagggaaaattatacaggcggacttgacggaaagactcttttcgaaaaagccgccgctgtaagacggggagaaacccgttatgttgacgaacctgccgatgcctttgaagcattatgcggaatattgaaggacggagacatttttatcacgcttggagcgggaaacaattggcctcttggcgagaaactttttgcccattttaaattaactgccggcgcggaggttcaccatggttag

SEQ ID NO: 41718 - protein, 343 aa, Unknown
  Obtained from environmental sample
  DOMAIN (1)...(150): Mur ligase middle domain
  misc_feature (1)..(343): Xaa is any amino acid
MDFNGRSTLMLGNKYFIAETCEYQKHFLSFRPRRIILTAVEWDHQDYFESYESIRDAFVEYCRLLPEGGQLIYCADDSGASDLFQIIEKENRTVQLIPYGFTADGDYRILFYNVEDGRAVFTLAGIPEAFSIRIPGRHEALNSAAAIALTVLLAREEFQTAKGTALLSQEKISSIKNALDNFKSTKRRCEILGKAGGILFIDDYGHHPTAIKTTLAGIKSFYPSCRLIVSFMSHTYTRTSALIDEFASAFDDADILFLHKIYASARENYTGGLDGKTLFEKAAAVRRGETRYVDEPADAFEALCGILKDGDIFITLGAGNNWPLGEKLFAHFKLTAGAEVHHG

SEQ ID NO: 41719 - DNA, 639 bp, Unknown
  Obtained from environmental sample
  misc_feature (1)..(639): n is a, c, g, or t
atggttgttcatccgggagcgggaaacaggcagggtactcttgtaaatgccctctgtttcaggagatcaaacagcgggagtaattttgccggtatacgcccaggtattgttcaccgcttggacagggagacatcgggaatcattattgccgcatacaatgatgaaactcacgcttttcttgcacagcagttttatacgcgcaaaacaaaaaaaacatacattgcggttatttgcggaataccaaaagaaaaaacaggccgcattgaaacttttatcgcaagggatccgaagaatcgcaaacgttttacagtttctccctcagggaaaacagccgttactctttacaaggtaataaagacatggaaaaattattcgctgatttttctgcgtccaaaaacaggacgcactcatcagcttcgcgtgcatatgcgctgccttggacatccaattcttggagattctgtttacggctgcgatgacaaaaaatttaaggacgcaagcctaatgcttcattcaaaaaaacttgagattaccctgccaggagaagcaagggcgcgagttttttcatctaacgttcctgaacgttttatggaagtaataaaaaaactggatagggaagtttctgcaaatgggaaataa

SEQ ID NO: 41720 - protein, 212 aa, Unknown
  Obtained from environmental sample
  DOMAIN (1)...(145): RNA pseudouridylate synthase
  misc_feature (1)..(212): Xaa is any amino acid
MVVHPGAGNRQGTLVNALCFRRSNSGSNFAGIRPGIVHRLDRETSGIIIAAYNDETHAFLAQQFYTRKTKKTYIAVICGIPKEKTGRIETFIARDPKNRKRFTVSPSGKTAVTLYKVIKTWKNYSLIFLRPKTGRTHQLRVHMRCLGHPILGDSVYGCDDKKFKDASLMLHSKKLEITLPGEARARVFSSNVPERFMEVIKKLDREVSANGK

SEQ ID NO: 41721 - DNA, 732 bp, Unknown
  Obtained from environmental sample
  misc_feature (1)..(732): n is a, c, g, or t
atgggaaataatgctcctttcattgttgacgaaacagataattttgccgtagtttttaaacctcctaaaatgcacagcgtcccgttaaagaaaaaggacggcggaaccctccttgaatggtatgcttcccaatcttcgcctgtttttgatttaatgcatcgcctagattttgaaacacacgggcttgtgcttgttgcaaaaaaagcaaaaagttatgattttcttaaagcattgcaggaaaacggcgggtttattaaagaatactcagccgtttgtaaaaaaaccgattccggcggctctgtttccccaggttatccgaagcctcctaatttatatgttgaaaaccgcaaaccttcaataagtgagccgctggtcattgaaagttacttccgccccttcggcgcaggcagaaaacttgtccgtcctgttacagaaataaaaaaacgccgcgaaattgccgcagacaggggaggtttatacctgacggaaatcattggcataaacaaaaatgtttttactgtgcggattaagcggggtttccgccaccagatacgctgtcatctttgctggattggttttccgatactgaatgatccgttataccaatcatcgcatcaaccgcccgtaaacagcgaacttgcccttaggtctcatgcgcttttgtttatcgatccttcaaccggaaaacaaaaagaataccgtattgatccgctggaatcattgttgttttaa

SEQ ID NO: 41722 - protein, 243 aa, Unknown
  Obtained from environmental sample
  DOMAIN (14)...(190): RNA pseudouridylate synthase
  misc_feature (1)..(243): Xaa is any amino acid
MGNNAPFIVDETDNFAVVFKPPKMHSVPLKKKDGGTLLEWYASQSSPVFDLMHRLDFETHGLVLVAKKAKSYDFLKALQENGGFIKEYSAVCKKTDSGGSVSPGYPKPPNLYVENRKPSISEPLVIESYFRPFGAGRKLVRPVTEIKKRREIAADRGGLYLTEIIGINKNVFTVRIKRGFRHQIRCHLCWIGFPILNDPLYQSSHQPPVNSELALRSHALLFIDPSTGKQKEYRIDPLESLLF

SEQ ID NO: 41723 - DNA, 1515 bp, Unknown
  Obtained from environmental sample
  misc_feature (1)..(1515): n is a, c, g, or t
atggaatttattgaaaaaaccctaagccgggtgctgcgcgataaaacacaggcccaccccgatcatgattttcttgtttattctgaccgcagccttcattttacttacgcccagtttgacaagagggtggatgatttggcgaagggctttatcgctatgggcataaagaaaggcgacaatgtgggaatttgggcgacaaacgtgccggattggaacacggtgcttttcgcctgcgccagaataggcgccattcttgttacgattaacacaggctataaaacccacgaattggaatatgtgttaaaacaatccgacatggtctgtctgtgccttacaaacggctggcgcgattccgactatataggcatggtaaacgagcttgtgcccgagttaaaaacttcgcagagggggcatatcaattccgaaaaattccccttcttaaaatacgtcgtccatgtaggacagcaaaaacaccgtggaatgtacagttttaacgaagttctgcttttaggacagcataccgatcccgcgttgttaagcgaaattgaaaaaacgcttgataccaacgatgtcgtaaacatgcagtacacttcaggcactacgggctttcccaagggcgtaatgcttactcacagaaatatccttaacaacgggcttggcataggcgacaaccagcgccttaccgaanaagacattgtatgccttcccgtgccgctgtttcactgtttcggccttgtgcttggaatgatggcaatccttacccacggctccaccgccgcgatgatagagtggttcgatcctctgcttgtacttgcgacaattcaaaaggaaaaatgcaccgccgtttacggagtaccgacaatgtttatcgccgagcttaaccatcctatgtttaaaatgttcgatctttccagcctgcgtacgggcattatggctggttctccctgtccgattgaagcgatgcgtcaggtaattgatctgatgtatatgaaggaagttactatctgttacggactgacggaatcgtcgcccgttatgacccagacgcgctacgatgacgacattatcgtgaaggtggaaaccgtaggccgcgccctgcccggcgtggaagttacaatccgcgatcctgaaacaggcgaagaatgtcccgacggcgtacacggggagttctgctgtcgcggctacaattcaatgaaaggctactacaaactaccggaagcgaccgcccagtgcatcgataaaaacggatggcttcattcgggagaccgcggagttaaagatgagaacggcaattttaaagtgacaggccgcttaaaagacatgatcatacgcggaggagaaaatatttcccccaaagaagtagaggactttttgtatacaatgccggggcatcaaggacgtgcaggtggtcggaattgccagcgagaaatacggcgagggaatcggcgcttttgtcattcttcaccccgacataaaaagaaacgtggaagacgtgcgcgactattgccgcgataa

SEQ ID NO: 41724 - protein, 504 aa, Unknown
  Obtained from environmental sample
  DOMAIN (35)...(468): AMP-binding enzyme
  misc_feature (1)..(504): Xaa is any amino acid
MEFIEKTLSRVLRDKTQAHPDHDFLVYSDRSLHFTYAQFDKRVDDLAKGFIAMGIKKGDNVGIWATNVPDWNTVLFACARIGAILVTINTGYKTHELEYVLKQSDMVCLCLTNGWRDSDYIGMVNELVPELKTSQRGHINSEKFPFLKYVVHVGQQKHRGMYSFNEVLLLGQHTDPALLSEIEKTLDTNDVVNMQYTSGTTGFPKGVMLTHRNILNNGLGIGDNQRLTEXDIVCLPVPLFHCFGLVLGMMAILTHGSTAAMIEWFDPLLVLATIQKEKCTAVYGVPTMFIAELNHPMFKMFDLSSLRTGIMAGSPCPIEAMRQVIDLMYMKEVTICYGLTESSPVMTQTRYDDDIIVKVETVGRALPGVEVTIRDPETGEECPDGVHGEFCCRGYNSMKGYYKLPEATAQCIDKNGWLHSGDRGVKDENGNFKVTGRLKDMIIRGGENISPKEVEDFLYTMPGHQGRAGGRNCQREIRRGNRRFCHSSPRHKKKRGRRARLLPR

SEQ ID NO: 41725 - DNA, 570 bp, Unknown
  Obtained from environmental sample
  misc_feature (1)..(570): n is a, c, g, or t
gtgtacgccgtcgggacattcttcgcctgtttcaggatcgcggattgtaacttccacgccgggcagggcgcggcctacggtttccaccttcacgataatgtcgtcatcgtagcgcgtctgggtcataacgggcgacgattccgtcagtccgtaacagatagtaacttccttcatatacatcagatcaattacctgacgcatcgcttcaatcggacagggagaaccagccataatgcccgtacgcaggctggaaagatcgaacattttaaacataggatggttaagctcggcgataaacattgtcggtactccgtaaacggcggtgcatttttccttttgaattgtcgcaagtacaagcagaggatcgaaccactctatcatcgcggcggtggagccgtgggtaaggattgccatcattccaagcacaaggccgaaacagtgaaacagcggcacgggaaggcatacaatgtcttnttcggtaaggcgctggttgtcgcctatgccaagcccgttgttaaggatatttctgtgagtaagcattacgcccttgggaaagcccgtagtgcctga

SEQ ID NO: 41726 - protein, 189 aa, Unknown
  Obtained from environmental sample
  misc_feature (1)..(189): Xaa is any amino acid
MYAVGTFFACFRIADCNFHAGQGAAYGFHLHDNVVIVARLGHNGRRFRQSVTDSNFLHIHQINYLTHRFNRTGRTSHNARTQAGKIEHFKHRMVKLGDKHCRYSVNGGAFFLLNCRKYKQRIEPLYHRGGGAVGKDCHHSKHKAETVKQRHGKAYNVXFGKALVVAYAKPVVKDISVSKHYALGKARSA

SEQ ID NO: 41727 - DNA, 561 bp, Unknown
  Obtained from environmental sample
  misc_feature (1)..(561): n is a, c, g, or t
ttgggctgtattgtgtttaaggatactcccagagacgacgcggcgcagacggtaaatcagcttaaaaacttgggcgtttcaaaaacctgtttactgacaggagatcatttccaatcggcgaaaaaaattcaagacgccgttggaattgatgaaatgcaatgcgaattactgccggaacagaaattaagccacgttgaaaaaatgatggaaacccacaccgttacggttatcggcgacggcatcaacgacgctcttgccctctcggaagctcatgtaggaatagcgatgggagcgatgggttccgacactgctattcaaagcgccgacatcgctttaatgaacaacaatctttccaatattccgtttgtaatcaaacttgcccaaaaaacaaaaaacattatttatcaaaacattattttagcgttttcagtaagcatcgttatgatatttttagccggagcgggaataataacgccaatcgtgggcgcgttttttcataacatcggagcgtttctggttttgattaacagcggtcgagtactgggcaagctgtcaaattaa

SEQ ID NO: 41728 - protein, 186 aa, Unknown
  Obtained from environmental sample
  misc_feature (1)..(186): Xaa is any amino acid
MGCIVFKDTPRDDAAQTVNQLKNLGVSKTCLLTGDHFQSAKKIQDAVGIDEMQCELLPEQKLSHVEKMMETHTVTVIGDGINDALALSEAHVGIAMGAMGSDTAIQSADIALMNNNLSNIPFVIKLAQKTKNIIYQNIILAFSVSIVMIFLAGAGIITPIVGAFFHNIGAFLVLINSGRVLGKLSN

SEQ ID NO: 41729 - DNA, 504 bp, Unknown
  Obtained from environmental sample
  misc_feature (1)..(504): n is a, c, g, or t
atggcgcgtacgctggttccttttgccctgaggctctgttccaggttcggcaggtttttttcgcccgggccgacgcacagtttccacgcctcccttccgtcacggcttgatagaatttcaagccgggcaaccgccgccgccgccgccagggcctcgccgcggaaaccgagcgtttccacggtatccaaatcatcaagggaacggattttgcttgtcgcgtggggaagaacgcacttttcaaggttttccctgtccatgcctgaaccgttatctgacacttcagcctttttgccgccgccgccctcgatcgaaacctctatggcggaagctcccgcgtcaatggcgttgtcaatgaattcccggattaaggccgcgggcctgtcgattacctcaccggctgctatacgcctggcctcctgcggaggcagtacctgtatgtcatgcgtgtttatgttagtggtatgtaacgccataaactttactcacttctcatttaacaattag

SEQ ID NO: 41730 - protein, 167 aa, Unknown
  Obtained from environmental sample
  misc_feature (1)..(167): Xaa is any amino acid
MARTLVPFALRLCSRFGRFFSPGPTHSFHASLPSRLDRISSRATAAAAARASPRKPSVSTVSKSSRERILLVAWGRTHFSRFSLSMPEPLSDTSAFLPPPPSIETSMAEAPASMALSMNSRIKAAGLSITSPAAIRLASCGGSTCMSCVFMLVVCNAINFTHFSFNN

SEQ ID NO: 41731 - DNA, 630 bp, Unknown
  Obtained from environmental sample
  misc_feature (1)..(630): n is a, c, g, or t
atgaaccttgcggcggtatnggaagattacaagacccgccttgaatgccttgagctctacaccgaagcctaccgccgttactgctggcccgtttcttcggcggacgactaccgagtcgccccctttcacgttctcgccacagaaggcaaggtctggcacgatgaaaaccaccttcgccatctggaagtaatccgcaactatataacctcaagcaatgatcctgtttttatcaatacaaatcacataacagttgatttaaacgatgacgcgtcaattgccgccgcccttgactggtggctgaagcttacaaatgccgggggagaaggaatggtcgtcaaaccacaggactttatcgcccgtgacaaagacgccctcttgcagccggcggtaaaatgcagaggacgcgaatacctgcgcataatttacggcccggattacacaacacaagcccaccttaaccggctgcgaaaacgctctctgcgcagaaagcaggaactggccctttccgaattcgcgcttggtatggaatcgctggaacgttttgtcaacaaagaaccgttctaccgcgttcacgaatgtgtcttcgcggtgctggcgctggaaaatgaaaccgttgatcccagattgtaa

SEQ ID NO: 41732 - protein, 209 aa, Unknown
  Obtained from environmental sample
  misc_feature (1)..(209): Xaa is any amino acid
MNLAAVXEDYKTRLECLELYTEAYRRYCWPVSSADDYRVAPFHVLATEGKVWHDENHLRHLEVIRNYITSSNDPVFINTNHITVDLNDDASIAAALDWWLKLTNAGGEGMVVKPQDFIARDKDALLQPAVKCRGREYLRIIYGPDYTTQAHLNRLRKRSLRRKQELALSEFALGMESLERFVNKEPFYRVHECVFAVLALENETVDPRL

SEQ ID NO: 41733 - DNA, 438 bp, Unknown
  Obtained from environmental sample
  misc_feature (1)..(438): n is a, c, g, or t
atggcatccaggcggaagagccgaattttggcgtttcaggccctctacttttgggagtctaacagagtccccgtagaggagcttgtaaatttcgcgtggcttgatgaagataaattaaaaaatcttaacgaagaaatgtccgcttttgcgaagctgataattacaggcgcgattgaaaatatcggcgctgttgacgagatgataaaaaaacatctgcaaaattgggatattacgcgccttaaccgagtagaccttgctattctgcgaatatcggtttatacattaatgtttcaacgcgacatatccccttccatcgtcatagacgaggcaataggtatttgcgtagaattcggcgcaaatgactcttttaagtttgtcaacggcgttcttgacagtattcgcataacgctgcagcaaacgcaggcggcgcagacatga

SEQ ID NO: 41734 - protein, 145 aa, Unknown
  Obtained from environmental sample
  DOMAIN (5)...(137): NusB family
  misc_feature (1)..(145): Xaa is any amino acid
MASRRKSRILAFQALYFWESNRVPVEELVNFAWLDEDKLKNLNEEMSAFAKLIITGAIENIGAVDEMIKKHLQNWDITRLNRVDLAILRISVYTLMFQRDISPSIVIDEAIGICVEFGANDSFKFVNGVLDSIRITLQQTQAAQT

SEQ ID NO: 41735 - DNA, 1143 bp, Unknown
  Obtained from environmental sample
  misc_feature (1)..(1143): n is a, c, g, or t
gtgcgccgcctctttgcgttccgctttctcctgtacggagagcgactcgtcgcggtcgattttgccgagcgtcacggcgaggtccggcacggtgaagaactccgggttgtttccgcccacaagcgcccttcccttttccgtgaggtcggcgctgtggcccgattcgtctattgtatagaacagctcttcgtcgatttcgtgcaattttttgtcgcgcaagaactccgtttccaccattttcatgtactttgcggcgccctgttcctttatgagtttcatgaagcgcttgtttctcggcgcgcccttgtgcatcaccatgagcttgaagccggcctcgaactctttgccgtcttgcttgagcagctcctcggcctcgtcaacgaccttttgggtcagggccgcctgggcgctgaccagcttgaccacgcggggcttgagttcctcgtattcgcggttggacttggtgaccggccccgatatgatgagcggcgtgcgagcctcgtctatgaggatattgtccacctcgtcgacgatggcgaagttaagttctctctgtacgcagtgctccggtgcgcctgccatgttgtcgcgaaggtagtcgaagccgaactcgttgttggtaccgaaggtgatgtccgccgagtaggccgcctgccgctgcgggctgtgcggctcggtgacgtcgaggcatccgacggtcagccccagaaagccgaatatctttcccatccactcgctgtcgcgccgcgccaagtagtcgttgacggtgatgacgtggacgcctttgccgctgagggcgttgaggtaagccgccatagccgcgacctgcgttttgccctcgcccgtcttcatctccgatatcttgccttgatggaggactatggcgcccatgacctggacgtcgaagtgggccatgaattggatctgctcgcccgtggcgccgtcggttatggttttgcgttcgccgaggacgcggtgcgtcgcctcgcggacaacggagtaggcttctgggaggaggtcgtcgagcgtttctccggcggctatgcggtcgcggaactcggcggtcttggccttcagggcgtcgtcggagagcgcggcgtagaaagcgcggaactcgttcaccctctcaagaatcggttttag

SEQ ID NO: 41736 - protein, 380 aa, Unknown
  Obtained from environmental sample
  misc_feature (1)..(380): Xaa is any amino acid
MRRLFAFRFLLYGERLVAVDFAERHGEVRHGEELRVVSAHKRPSLFREVGAVARFVYCIEQLFVDFVQFFVAQELRFHHFHVLCGALFLYEFHEALVSRRALVHHHELEAGLELFAVLLEQLLGLVNDLLGQGRLGADQLDHAGLEFLVFAVGLGDRPRYDERRASLVYEDIVHLVDDGEVKFSLYAVLRCACHVVAKVVEAELVVGTEGDVRRVGRLPLRAVRLGDVEASDGQPQKAEYLSHPLAVAPRQVVVDGDDVDAFAAEGVEVSRHSRDLRFALARLHLRYLALMEDYGAHDLDVEVGHELDLLARGAVGYGFAFAEDAVRRLADNGVGFWEEVVERFSGGYAVAELGGLGLQGVVGERGVESAELVHPLKNRF

SEQ ID NO: 41737 - DNA, 1668 bp, Unknown
  Obtained from environmental sample
  misc_feature (1)..(1668): n is a, c, g, or t
gtgaacgagttccgcgctttctacgccgcgctctccgacgacgccctgaaggccaagaccgccgagttccgcgaccgcatagccgccggagaaacgctcgacgacctcctcccagaagcctactccgttgtccgcgaggcgacgcaccgcgtcctcggcgaacgcaaaaccataaccgacggcgccacgggcgagcagatccaattcatggcccacttcgacgtccaggtcatgggcgccatagtcctccatcaaggcaagatatcggagatgaagacgggcgagggcaaaacgcaggtcgcggctatggcggcttacctcaacgccctcagcggcaaaggcgtccacgtcatcaccgtcaacgactacttggcgcggcgcgacagcgagtggatgggaaagatattcggctttctggggctgaccgtcggatgcctcgacgtcaccgagccgcacagcccgcagcggcaggcggcctactcggcggacatcaccttcggtaccaacaacgagttcggcttcgactaccttcgcgacaacatggcaggcgcaccggagcactgcgtacagagagaacttaacttcgccatcgtcgacgaggtggacaatatcctcatagacgaggctcgcacgccgctcatcatatcggggccggtcaccaagtccaaccgcgaatacgaggaactcaagccccgcgtggtcaagctggtcagcgcccaggcggccctgacccaaaaggtcgttgacgaggccgaggagctgctcaagcaagacggcaaagagttcgaggccggcttcaagctcatggtgatgcacaagggcgcgccgagaaacaagcgcttcatgaaactcataaaggaacagggcgccgcaaagtacatgaaaatggtggaaacggagttcttgcgcgacaaaaaattgcacgaaatcgacgaagagctgttctatacaatagacgaatcgggccacagcgccgacctcacggaaaagggaagggcgcttgtgggcggaaacaacccggagttcttcaccgtgccggacctcgccgtgacgctcggcaaaatcgaccgcgacgagtcgctctccgtacaggagaaagcggaacgcaaagaggcggcgcaccgcgagtacgcggaaatttcagagcgcatacacagcgtagggcagctgcttcgcgcctactcgctattcgaaaaggacgtcaactacgtggtgcaggaggggcagatactcatagtcgacgagttcaccggccgcatactgcacggacgccgttacagcgaggggcttcaccaagcgttagaggctaaggaaggggtcaaggttgccggtgagaatcagacgctcgccaccatcactttccagaacttcttcaagatgtacaacaaactcgccggaatgaccggcaccgccgtcacggaggcggcggagttccaagaaatatacaaactcgacgtggtgaccgtccccaccaaccgcgggcttaaaaggcaagattacgaagacgagatatacaaaacgcaccgcgaaaagtacaatgccatagtgcaggacataagggccatgaacgaactgggccgcccgtgtttggtaggcaccacctccatagaaaagtcggaactgctgagccgtatgctcttgcgggcgggcgttcagcacgaggtgtga

SEQ ID NO: 41738 - protein, 555 aa, Unknown
  Obtained from environmental sample
  DOMAIN (285)...(435): SecA preprotein cross-linking domain
  misc_feature (1)..(555): Xaa is any amino acid
MNEFRAFYAALSDDALKAKTAEFRDRIAAGETLDDLLPEAYSVVREATHRVLGERKTITDGATGEQIQFMAHFDVQVMGAIVLHQGKISEMKTGEGKTQVAAMAAYLNALSGKGVHVITVNDYLARRDSEWMGKIFGFLGLTVGCLDVTEPHSPQRQAAYSADITFGTNNEFGFDYLRDNMAGAPEHCVQRELNFAIVDEVDNILIDEARTPLIISGPVTKSNREYEELKPRVVKLVSAQAALTQKVVDEAEELLKQDGKEFEAGFKLMVMHKGAPRNKRFMKLIKEQGAAKYMKMVETEFLRDKKLHEIDEELFYTIDESGHSADLTEKGRALVGGNNPEFFTVPDLAVTLGKIDRDESLSVQEKAERKEAAHREYAEISERIHSVGQLLRAYSLFEKDVNYVVQEGQILIVDEFTGRILHGRRYSEGLHQALEAKEGVKVAGENQTLATITFQNFFKMYNKLAGMTGTAVTEAAEFQEIYKLDVVTVPTNRGLKRQDYEDEIYKTHREKYNAIVQDIRAMNELGRPCLVGTTSIEKSELLSRMLLRAGVQHEV

SEQ ID NO: 41739 - DNA, 891 bp, Unknown
  Obtained from environmental sample
  misc_feature (1)..(891): n is a, c, g, or t
ttgatcgcgagagcgcaatcgttctattacattgtcattgtttgtatcatcgcttattacatcctggcgacgcttctgcccatcgacaaattgatcggcagaatttaccccgttttcggcgcgtgcctcttaatcatggcgattggcatgacctttatgatgttcatttcaggcgaaattaaaaacattcccgagtttgcgtttgaaaacttaaggccggacaaaggaaccaacattatggcgcaccttttcccgttcctgtttatcaccattgcctgcggcgccatatcgggtttccacgcgactcagtctccgcttatggcgcgctgcgtgaaaaatgaaaaagagggccggatggtgttttacggcgcaatgatcatggagggcattatcgccatgatctgggccgccgttacaatggcccacttcaattatgtcggtgttgtaagctcggttgctgcgccggttatcgttacccaaagctctgttgaatacatgggctggatcggcggagtactggcggtctttggcgtggtggcctgtcccatcacttccggggataccgctttccgcagcgccaggctgaccattgccgatatcttcaagtttgatcaaaagcccataaagaacaggctggctgtggcaattcccctctttgcgataggcgtagttctggtgctgttcgccatttcaagcgccaagaacttcaacattatttggcggtatttctcctggtcgaatcagacactggcaaccatcgccctgtgggcggccagcgcgtatcttgccaagaccgccaaactctactggtttacgcttttgcctgcggcctttatgactgtggtagttacttcctacttctttacctccgcgaatgtttgggccccctga

SEQ ID NO: 41740 - protein, 296 aa, Unknown
  Obtained from environmental sample
  DOMAIN (1)...(167): Carbon starvation protein CstA
  misc_feature (1)..(296): Xaa is any amino acid
MIARAQSFYYIVIVCIIAYYILATLLPIDKLIGRIYPVFGACLLIMAIGMTFMMFISGEIKNIPEFAFENLRPDKGTNIMAHLFPFLFITIACGAISGFHATQSPLMARCVKNEKEGRMVFYGAMIMEGIIAMIWAAVTMAHFNYVGVVSSVAAPVIVTQSSVEYMGWIGGVLAVFGVVACPITSGDTAFRSARLTIADIFKFDQKPIKNRLAVAIPLFAIGVVLVLFAISSAKNFNIIWRYFSWSNQTLATIALWAASAYLAKTAKLYWFTLLPAAFMTVVVTSYFFTSANVWAP

SEQ ID NO: 41741 - DNA, 405 bp, Unknown
  Obtained from environmental sample
  misc_feature (1)..(405): n is a, c, g, or t
ttgatcaaacttgaagatatcggcaatggtcagcctggcgctgcggaaagcggtatccccggaagtgatgggacaggccaccacgccaaagaccgccagtactccgccgatccagcccatgtattcaacagagctttgggtaacgataaccggcgcagcaaccgagcttacaacaccgacataattgaagtgggccattgtaacggcggcccagatcatggcgataatgccctccatgatcattgcgccgtaaaacaccatccggccctctttttcatttttcacgcagcgcgccataagcggagactgagtcgcgtggaaacccgatatggcgccgcaggcaatggtgataaacaggaacgggaaaaggtgcgccataatgttggttcctttgtccggccttaa

SEQ ID NO: 41742 - protein, 134 aa, Unknown
  Obtained from environmental sample
  misc_feature (1)..(134): Xaa is any amino acid
MIKLEDIGNGQPGAAESGIPGSDGTGHHAKDRQYSADPAHVFNRALGNDNRRSNRAYNTDIIEVGHCNGGPDHGDNALHDHCAVKHHPALFFIFHAARHKRRLSRVETRYGAAGNGDKQEREKVRHNVGSFVRP

SEQ ID NO: 41743 - DNA, 759 bp, Unknown
  Obtained from environmental sample
  misc_feature (1)..(759): n is a, c, g, or t
gtggacgcgggcatacatgcggagtacacgtccggccctgaagcctggcggaaaagcgttgccctcgcggaagaaaacaatctgcgttttcaactgcacttgagcgaaacaaaagaagaacatgaagggtgcataaaaaaatatgggaaaacaccaacggaaatattaagcgaatacggcgtgttttcccgaaaagccaccgccgctcacggctgctggctgacagaaaacgacatggcggttctggcctcaagtggcgcgactgtagcccactgtcccataagcaatctaaagctatcgtccggtatagcgcctgtcatgaagatgcgcgatcacggcttgaatgtggccctgggtacagacggggtttgctccaacaacaaccatgacatgttcgaggagataaaaaccgcggcgttgctgcaaaagtatttaacaggcgatccgtctgtgctgccagcttacgaggccataaaaatggcaacggtaaacggagccgcagggcagggccgcgaaaaggaaaccggccggattgcccccggttacgatgctgaccttataatgctggatttggatgcgcctcatctcttcccgctgaacgaccccttagccgcggttgcttacgcggccaggggcagcgatgtgtgcctgacaatggtgcagggccgcatcctctaccaaaatggcgaacataatacgattgatgtagaaaaagtccgtcatgaggtagagaattacgtcattccgcgcatcagctaa

SEQ ID NO: 41744 - protein, 252 aa, Unknown
  Obtained from environmental sample
  DOMAIN (1)...(190): Amidohydrolase family
  misc_feature (1)..(252): Xaa is any amino acid
MDAGIHAEYTSGPEAWRKSVALAEENNLRFQLHLSETKEEHEGCIKKYGKTPTEILSEYGVFSRKATAAHGCWLTENDMAVLASSGATVAHCPISNLKLSSGIAPVMKMRDHGLNVALGTDGVCSNNNHDMFEEIKTAALLQKYLTGDPSVLPAYEAIKMATVNGAAGQGREKETGRIAPGYDADLIMLDLDAPHLFPLNDPLAAVAYAARGSDVCLTMVQGRILYQNGEHNTIDVEKVRHEVENYVIPRIS

SEQ ID NO: 41745 - DNA, 1113 bp, Unknown
  Obtained from environmental sample
  misc_feature (1)..(1113): n is a, c, g, or t
atgccggcgttccccaaaagaagaagcaatgcagaccccggtgaacgggcttacgcgtacgccaaagcttgcgggatcattggcaaatcttttgtgggaaagcggatctccgcgctggcaaggctgaacgcgctcaacgaattcggacggctggtttttcctgacgcgtcttatgagcttcccggaagggaactgttgatcgatcttgaaagacggcttttacagcgcacgacaaagcacataaccgccgtgatcgattcattttcaaacccgccggaactgctggtacgccagcttcgctcctgcgaatacgccgaccttaaaacctgccttcaccatattgtcgccgacaagccaattcccaatgcgttatgcgacatagggaaatacggaaccgtccgctttaaagcgtatcccgatcttaaggcgatggttggcggaaccgaatttgaatttatcctttcaaagaaccttaaagcccctgattttgatataacctcgctggaagcggagcttgatttgcagtattacaccctgcttttgaaaagccttcaatgccttcctgccgaagaccgccttcttgcccagcggatacttgccgaggaaatttccctgcgtaactgcgtatgggcgttgcggctgcgtacctattttgaaaaatcatcggaggaaacgcaaaaatatctgatgaacctggagatgcccgaatgtccgccgtcggaaatccccggggatatacctgtccgtttttcatcccaaaggaacgcggatcccggtaaaatctccctggttcaggaagcatacgactcattgtattttccgctggacagccgcgccgcctggaaaggatggcgctgggaaagactgctcaatccggaggaaggcagggaaatatgggccgctaatccgcgctttttccaaaacgccgcgtcacggtatgtttaccgtctctccatgcgctgtttcaggcgcatgcctttttcgtttaacgcgggattctgctacatcaaactcaaacaatttgaggaagatcttttaaccagcgtggccgagggattggggcttgggatgggcggcagtgatgtttttaatatgatcgaggtgtctgcatga

SEQ ID NO: 41746 - protein, 370 aa, Unknown
  Obtained from environmental sample
  misc_feature (1)..(370): Xaa is any amino acid
MPAFPKRRSNADPGERAYAYAKACGIIGKSFVGKRISALARLNALNEFGRLVFPDASYELPGRELLIDLERRLLQRTTKHITAVIDSFSNPPELLVRQLRSCEYADLKTCLHHIVADKPIPNALCDIGKYGTVRFKAYPDLKAMVGGTEFEFILSKNLKAPDFDITSLEAELDLQYYTLLLKSLQCLPAEDRLLAQRILAEEISLRNCVWALRLRTYFEKSSEETQKYLMNLEMPECPPSEIPGDIPVRFSSQRNADPGKISLVQEAYDSLYFPLDSRAAWKGWRWERLLNPEEGREIWAANPRFFQNAASRYVYRLSMRCFRRMPFSFNAGFCYIKLKQFEEDLLTSVAEGLGLGMGGSDVFNMIEVSA

SEQ ID NO: 41747 - DNA, 771 bp, Unknown
  Obtained from environmental sample
  misc_feature (1)..(771): n is a, c, g, or t
atggctaacagccaaaatatattggtaatcaatgacgaagcccaccacgcatggcggaaaaaccctgaaataaaaggcaaatacgaagggctggacaaaaaggaagaacaggaagctacgatatgggttagcggtcttgaccgcattcataaagccagaaaaattttaacctgttacgatttttcagccacaccctttgcgccttcaggcaagaaaaacgaaagcgaagcccttttcccgtggatagtcagcgatttcggcttgaacgacggcatagaatccggccttgttaaaacaccccgaatggtagtccgtgatgacaacacccctaatgccaggaatttccgttcaaaattaaatcatatctatgctgatgagacggtaaaagataatatcaatcaacctgccgaatcgaccgttccgcttcccgatctgattatacaagcgtacaatcttttaggttccgactggctggaaacatataagaaatgggaaaaaaacggcatggatgttcctcccgttatgataactgtcgctaaccgtaccgaaacttcaagccgcatagaacacgcttttaaatctgaaaaaatattaataaaagaactatgcgatcctgaatatttacggcgtattgactcaaaaataatggaacaggcggaagcaggaaatatttctgttgacgatatttcaacaggtgatggcgatgattccgatggaaaacgtaaattaacaaaaaagcaggaaagccgccccttttacgcgacactataa

SEQ ID NO: 41748 - protein, 256 aa, Unknown
  Obtained from environmental sample
  misc_feature (1)..(256): Xaa is any amino acid
MANSQNILVINDEAHHAWRKNPEIKGKYEGLDKKEEQEATIWVSGLDRIHKARKILTCYDFSATPFAPSGKKNESEALFPWIVSDFGLNDGIESGLVKTPRMVVRDDNTPNARNFRSKLNHIYADETVKDNINQPAESTVPLPDLIIQAYNLLGSDWLETYKKWEKNGMDVPPVMITVANRTETSSRIEHAFKSEKILIKELCDPEYLRRIDSKIMEQAEAGNISVDDISTGDGDDSDGKRKLTKKQESRPFYATL

SEQ ID NO: 41749 - DNA, 801 bp, Unknown
  Obtained from environmental sample
  misc_feature (1)..(801): n is a, c, g, or t
atgcttacagaaggctgggatgcaaaaaccgttacgcatataatggggcttcgggctttctccagccagttgttatgcgaacaggtagtaggacgaggcttgcgccgtacttcctatgaaatcggtgaaaacggtttatacaaacctgaatacgtaaatatattcggcatacctttttcattcctgccccaggaaggcggcggcgatggcggtgatcctcctccgcctaaatatataataaaagtgaacgaaaaagcagcgcaatatgaaattacatggccaaacatcattcggatagaccatgaacctgcccctcgtcttcacgttgacctttcaaagattgaaccgctaacccttgacgcaagccagacacgcctaagcgccgaagtagccccctttcttgacggtaacccagacctgacaaaatgcgaaccgattaaacttataagccttgaaaaacagttgcgtatgcaggaaataattttcagaacttctgcccaagtttatgaaagaataccgactaattggaaagacaaaggaactccctatgccttgctcggacaagttttccgttgggtggaacgctatcttgaatccggtaaaataattttggaaccagcgctttttatgcaagatgatccgcttaaaagaaagctattgtatatgctgaacatgaataaaatagtagagcatctttggaaatccattgaatgtcaaatgaccaatcggatattgccatcgttaatcccaacagcaaagtccgctctacaggcgatatgccaacatggtgactcgccataa

SEQ ID NO: 41750 - protein, 266 aa, Unknown
  Obtained from environmental sample
  misc_feature (1)..(266): Xaa is any amino acid
MLTEGWDAKTVTHIMGLRAFSSQLLCEQVVGRGLRRTSYEIGENGLYKPEYVNIFGIPFSFLPQEGGGDGGDPPPPKYIIKVNEKAAQYEITWPNIIRIDHEPAPRLHVDLSKIEPLTLDASQTRLSAEVAPFLDGNPDLTKCEPIKLISLEKQLRMQEIIFRTSAQVYERIPTNWKDKGTPYALLGQVFRWVERYLESGKIILEPALFMQDDPLKRKLLYMLNMNKIVEHLWKSIECQMTNRILPSLIPTAKSALQAICQHGDSP

SEQ ID NO: 41751 - DNA, 369 bp, Unknown
  Obtained from environmental sample
  misc_feature (1)..(369): n is a, c, g, or t
atggagatcaaccgtgaaatttttactacgcttctggaagatacccatattaccattgacagcgcggaaaacggattaatcgctgtttctaaattcagggaaaaccccgaaaaatacaaccttatagtcatggatgtccagatgccggaaatggacgggtatgaggcgacaagaaccatcagggcgatggatatgcccagagcaaagaccattccgattatagcgatgacagctaacgccttcaaagaagacgttgaccgctgtcttgatgcgggaatgaatgaccatttggcgaaaccgattgacgaaaaatccgtgctggagaagattgcgcgatatgccagagaacaggtaacagagaacaggtaa

SEQ ID NO: 41752 - protein, 122 aa, Unknown
  Obtained from environmental sample
  DOMAIN (2)...(111): Response regulator receiver domain
  misc_feature (1)..(122): Xaa is any amino acid
MEINREIFTTLLEDTHITIDSAENGLIAVSKFRENPEKYNLIVMDVQMPEMDGYEATRTIRAMDMPRAKTIPIIAMTANAFKEDVDRCLDAGMNDHLAKPIDEKSVLEKIARYAREQVTENR

SEQ ID NO: 41753 - DNA, 921 bp, Unknown
  Obtained from environmental sample
  misc_feature (1)..(921): n is a, c, g, or t
atggcagttgacgcaataacacagcaggcttacgctgatttttcccgcgccagaggaaaagcgatgttatctcagatacagaattttttaaatactgacagggataaattgctttcttttaatgatgtcaaggggattttaaaaccaaaaaacgaagtgtacatgggaagccagacagtaccgataaaaatgattgtcggaagcgaaggacgttaccacgattttaataaatattttcttccgcgcaaggaacatttgcgccaccgctggcaaagagttgacgaagcgcacataaaagatattattcttcccccgattcttttgtatgaaataggcggagtgtattttgtccgcgacggaaaccaccgcgtgtccgtggcgaaaatgcagggcgtggaatttatcgacgccgaggttatcagtcttacgacagagatgaatattaacccgtccatgactacggacgagttaacggcggagcttatcgaatacgaaaaaaatattttctacaccgaaacattgttcggcgatttaacggatcattgggatatgaatttcagcgctcccggtcgttatgacgttatttataaccatatacttgtgcataaatattatttaaatgaggatattgaggaagaaatacattttaacaacgcccttgtatcatggtacaataatgtatataatcctgttataaagataatcagggaacagtggttacttgcaaatttccccggaagaacggaagccgatctttatgtgtggataataaagcactgggatttcttaaaaaagaaatacggaacatattcgctcaacaaagcggcgggagacttttccagaaaatacggacaaagccacggcaaatttttaagggttttagggttgttggttgacaggatatttcaccataagcgttaa

SEQ ID NO: 41754 - protein, 306 aa, Unknown
  Obtained from environmental sample
  misc_feature (1)..(306): Xaa is any amino acid
MAVDAITQQAYADFSRARGKAMLSQIQNFLNTDRDKLLSFNDVKGILKPKNEVYMGSQTVPIKMIVGSEGRYHDFNKYFLPRKEHLRHRWQRVDEAHIKDIILPPILLYEIGGVYFVRDGNHRVSVAKMQGVEFIDAEVISLTTEMNINPSMTTDELTAELIEYEKNIFYTETLFGDLTDHWDMNFSAPGRYDVIYNHILVHKYYLNEDIEEEIHFNNALVSWYNNVYNPVIKIIREQWLLANFPGRTEADLYVWIIKHWDFLKKKYGTYSLNKAAGDFSRKYGQSHGKFLRVLGLLVDRIFHHKR

SEQ ID NO: 41755 - DNA, 699 bp, Unknown
  Obtained from environmental sample
  misc_feature (1)..(699): n is a, c, g, or t
atgacaaaaaaaattacaatgatttgggtgttgttattttttgccggtttttgttatgggcagtcgagctttgcgaagggcgaggaactgttgatgcagaataaacccgctcaggctgagggctttctcatgcaggctatttcttatgatcccgctaatcctgtaacgtatatttacttaggtcttgtatatgaacagcttggcaggacggaagaagccataacagtttacagacgggttttaccaatggcgggaagactttccgcaaatgtcgcgaataatctgggaaacgtatattttcaaacaggaaatacggaaacagccgaacagtactatactcaggcaatcggtcttgatatgggatatgccggcgcgtatcttggcagagcgaacacccgcgttaaaacggggaatttgcaaaatgccattttagattatgaacagtatttacgattggaaccgcgttctccgcagcgcgctaaaatagaacagttgataaatttaatacgcatggaagcagcggcggcggaagtgaaaaggcagttagctgaagaagaagcgcgccgtcttgccgaggaaagacaaaaacttttagattcggtttccgcttctctgcaatctggcgcttcttccggcaaggggctttcttccggcacggaaagcgttgaaaattatgaaggtgaatttgtgcttgattga

SEQ ID NO: 41756 - protein, 232 aa, Unknown
  Obtained from environmental sample
  SIGNAL (1)...(25)
  DOMAIN (123)...(156): Tetratricopeptide repeat
  misc_feature (1)..(232): Xaa is any amino acid
MTKKITMIWVLLFFAGFCYGQSSFAKGEELLMQNKPAQAEGFLMQAISYDPANPVTYIYLGLVYEQLGRTEEAITVYRRVLPMAGRLSANVANNLGNVYFQTGNTETAEQYYTQAIGLDMGYAGAYLGRANTRVKTGNLQNAILDYEQYLRLEPRSPQRAKIEQLINLIRMEAAAAEVKRQLAEEEARRLAEERQKLLDSVSASLQSGASSGKGLSSGTESVENYEGEFVLD

SEQ ID NO: 41757 - DNA, 519 bp, Unknown
  Obtained from environmental sample
  misc_feature (1)..(519): n is a, c, g, or t
ttgggaatgatcggcgcttacatcgtgatacttgtcattgttttctttctgggattcttcgcgatctttgcggaacccggtcttgcggttaccgccgctaccgtagaggagatgacaacaggaactttcaagcgttcaaaattgataatgatcgcggctatgggagtaggtggcggcatggtgattggtttcgcgcgggttctgttcagtaatatgctgcctgcggggggcatacatctttcatggattctggctccatgttacgccattgccctgatcctgacaatattcgcgcctgaagatttttcttcgatagcgtgggacgttgccggtattgccacgggtcccattaccgttcccataattataactacagggcttggactcggccgcgattcactgaaggcggacggcgcgttcggcattgtggcaacggcgagcgttttcccgattatcgtaattcttatatcgggcattgtcgataaggttagatcgaaacgtatgttaaataatatgtag

SEQ ID NO: 41758 - protein, 172 aa, Unknown
  Obtained from environmental sample
  SIGNAL (1)...(24)
  DOMAIN (1)...(162): Protein of unknown function (DUF1538)
  misc_feature (1)..(172): Xaa is any amino acid
MGMIGAYIVILVIVFFLGFFAIFAEPGLAVTAATVEEMTTGTFKRSKLIMIAAMGVGGGMVIGFARVLFSNMLPAGGIHLSWILAPCYAIALILTIFAPEDFSSIAWDVAGIATGPITVPIIITTGLGLGRDSLKADGAFGIVATASVFPIIVILISGIVDKVRSKRMLNNM

SEQ ID NO: 41759 - DNA, 420 bp, Unknown
  Obtained from environmental sample
  misc_feature (1)..(420): n is a, c, g, or t
atgcatgacgagaaaaaacgcgtcctgaaattgctgacccacaataaaatcccgctaagcttttattatactcccggtgagaactgggaaaataccaggcatttccggtatatccgtatctttaaactcctcgttcctgaattggccctgggtaaaagcacggcggaaatttcccgattccttggcacggtgcttaaccccgatttggataacacggttcgcaaggattatccgaccccgtcaaacacgataaaaaagatcatggcggatttcgcgacgctgaaactggtaggctgtatcaacggcgaacgggggaacgccggtgatgagatatgggaaattacccagcatggaaaggatatattctctgcatatcgcataacacagcttgagaaggccatggagaaaagaagtgaatga

SEQ ID NO: 41760 - protein, 139 aa, Unknown
  Obtained from environmental sample
  misc_feature (1)..(139): Xaa is any amino acid
MHDEKKRVLKLLTHNKIPLSFYYTPGENWENTRHFRYIRIFKLLVPELALGKSTAEISRFLGTVLNPDLDNTVRKDYPTPSNTIKKIMADFATLKLVGCINGERGNAGDEIWEITQHGKDIFSAYRITQLEKAMEKRSE

SEQ ID NO: 41761 - DNA, 801 bp, Unknown
  Obtained from environmental sample
  misc_feature (1)..(801): n is a, c, g, or t
ttgagaaggccatggagaaaagaagtgaatgaaattgggagtaatatttatggaaaaaatttctcttcacttcatacacataccattttctgcgacggcaaagacgatatagaaacgatgtgccgggccgcttatgaaaaaggactcgcgtccgtcgggttcagttctcatgcccctatcgggaaaacagggctgaaatcgacatggcacatgaaagatgagaaactggaggaatatgttagtgaggtgaacgccgcccgccttcgctgggaaggaaagctcgccgtctatcttggacttgaggtagattacatcaaaggattgcgctcggcactggacagggacattaaggacttaaaccttgattacaccatcggttcggtacattatctgatgccggatcgcggagagccgtttaccgttgacggcccgcttgaagaactggaaaccggtatattggacggttttgacggcgacggagagtcaatgctgagcgcctacttaaacaatattatggaaatggtcaccctggggggatttgacattgtaggccatcttgatctggtaagaaaaaatcaaaaatcgcaaagaagcccctgttttcaggagaggcagggccgttggttcgagacggaaaacggggattacatgcagcgagtggaagagatagtccgcgccatttcatccgcgaaccttgtagtgaagccaacaccggcgggattaaccgcggctatagaacagacacttacccctcgcttgcggtattacgcctgctgcacagatataaggttccggttatga

SEQ ID NO: 41762 - protein, 266 aa, Unknown
  Obtained from environmental sample
  DOMAIN (22)...(235): PHP domain
  misc_feature (1)..(266): Xaa is any amino acid
MRRPWRKEVNEIGSNIYGKNFSSLHTHTIFCDGKDDIETMCRAAYEKGLASVGFSSHAPIGKTGLKSTWHMKDEKLEEYVSEVNAARLRWEGKLAVYLGLEVDYIKGLRSALDRDIKDLNLDYTIGSVHYLMPDRGEPFTVDGPLEELETGILDGFDGDGESMLSAYLNNIMEMVTLGGFDIVGHLDLVRKNQKSQRSPCFQERQGRWFETENGDYMQRVEEIVRAISSANLVVKPTPAGLTAAIEQTLTPRLRYYACCTDIRFRL

SEQ ID NO: 41763 - DNA, 1338 bp, Unknown
  Obtained from environmental sample
  misc_feature (1)..(1338): n is a, c, g, or t
atggcggagcttgaggctattatcggtatgactgcgttaaaaaaagaaatcaaaagcctttacacgcaattaaaccagatcgccgaaatggaaaagaaaggcgtcaagacggagaaacccgcccagcattttgtaattaccggcaatccgggaaccggtaaaactacggtggcaaggctgctgggaaaaatattcgaagggctgggcctgctggattccggccatgtcgttgaggtagacagaagcaagctggttgcgggttacgtaggccagaccgcgcctcttaccaacaacgcctgcgatcaggcggcggggggaatactctttattgacgaagtgtacacgttaaaacaaaatgacagcgacagtttcggccaggaatgtatcgacaccctgctgaaacggatggaagacgaccggggcaagttcatggttgtcgtcgccgggtacaaaagcccgatggaaaaattccttacagctaacgaaggcttaaaaagcaggtttacaaaatattttaaccttgaagattacagcccggaagaactcgcggcgatatttgaatcccttgccaagaaacagcgctttatagtgccgccacagacaagggttaaaattgtcgcttttttcaaagacaggtgcgcgcggaaaaccaaagactttgccaacggaagggaagcgagaaaccttatggacgaggcgaggaagaaccaggcggaacgtttgtctcaggcggacattgcgggcatgtccggtgaagacacccttacatttctcccggaagacattcccggaacgactgccgataaaatggtttccattgacgaggcgctcaaagacctcaacatgctggtggggcttaaatcggtcaaggacgcggtaaacaggataaccaactctttgcaggcccaaaaacttaccggcgaaacggaagcgcttgcaaagcactttgtttttacgggcaaccccggcacaggaaaaacgacggttgcgcggataatgggcgacgtgttcaaggccgtagggatgcttcccaccaacaatttgatagaagcggacaggggaaaactggtggcatcctatgcaggccagacggccaagctggtggcgcagcaatgcgacaacgctatgggcggaattctatttattgacgaagcgtactcgctgaaacagggtccgcaggacagtttcgggcaggaagcggtggatacgcttcttaagcggatggaagacgacaggggcaaatttgtggttatagccgcgggctatacaaaagagatggaagagtttttggcgtccaacagcgggtttaaatcgcggtttcggatctcggccatctga

SEQ ID NO: 41764 - protein, 445 aa, Unknown
  Obtained from environmental sample
  DOMAIN (43)...(239): ATPase family associated with various cellular activities (AAA)
  misc_feature (1)..(445): Xaa is any amino acid
MAELEAIIGMTALKKEIKSLYTQLNQIAEMEKKGVKTEKPAQHFVITGNPGTGKTTVARLLGKIFEGLGLLDSGHVVEVDRSKLVAGYVGQTAPLTNNACDQAAGGILFIDEVYTLKQNDSDSFGQECIDTLLKRMEDDRGKFMVVVAGYKSPMEKFLTANEGLKSRFTKYFNLEDYSPEELAAIFESLAKKQRFIVPPQTRVKIVAFFKDRCARKTKDFANGREARNLMDEARKNQAERLSQADIAGMSGEDTLTFLPEDIPGTTADKMVSIDEALKDLNMLVGLKSVKDAVNRITNSLQAQKLTGETEALAKHFVFTGNPGTGKTTVARIMGDVFKAVGMLPTNNLIEADRGKLVASYAGQTAKLVAQQCDNAMGGILFIDEAYSLKQGPQDSFGQEAVDTLLKRMEDDRGKFVVIAAGYTKEMEEFLASNSGFKSRFRISAI

SEQ ID NO: 41765 - DNA, 771 bp, Unknown
  Obtained from environmental sample
  misc_feature (1)..(771): n is a, c, g, or t
atgcaatgtgttaaatgtaataccaataaccgcggttccgcaaagttttgcaagcagtgcggtgccgcgataagcaacgcggatactacagccaacctgggttcttctctcggtttttctatcgcgcagcttgtagggcttgatgaaataaaaaaagatttgtccgaattgcaggcgatccttgaagggatgaaacagagcaataaaggcacccgttacccttacgacacgattattatcggatcttccggcaccgcaaagacgctcatctccaatctcattgccgatctgttttttaaattcagcatgatcacaaaaggcaagccggaaaaagcggacggcgcgagtctcaacggaatgtccaaaaaagatattgacagccttttttcaaaagcaaagggcggaatgttatttattgacaacgcccaaaagcttctggattccgaaggtaaggcagtgccggctttttcccatttcattgacgctatggacgccaacccggacgaccctgtcgtgcttatggcgggccttcctgtgggcctgagagaaatggtaaaaagctccgaatcggcaaacaagcagatagtcaaccgttttgaaaaaatatttattatccccgattatacgccggaacagtatgttaaaatcacagagaacgaattanaaaaacaaagttttacattcagccccgaattttccgaaaaactactccagcggttccgttactctacaaggaactcaagaagcccgacaacaacattaaatccgtaa

SEQ ID NO: 41766 - protein, 256 aa, Unknown
  Obtained from environmental sample
  misc_feature (1)..(256): Xaa is any amino acid
MQCVKCNTNNRGSAKFCKQCGAAISNADTTANLGSSLGFSIAQLVGLDEIKKDLSELQAILEGMKQSNKGTRYPYDTIIIGSSGTAKTLISNLIADLFFKFSMITKGKPEKADGASLNGMSKKDIDSLFSKAKGGMLFIDNAQKLLDSEGKAVPAFSHFIDAMDANPDDPVVLMAGLPVGLREMVKSSESANKQIVNRFEKIFIIPDYTPEQYVKITENELXKQSFTFSPEFSEKLLQRFRYSTRNSRSPTTTLNP

SEQ ID NO: 41767 - DNA, 1146 bp, Unknown
  Obtained from environmental sample
  misc_feature (1)..(1146): n is a, c, g, or t
ttgatggcagagcattctgccccttgtccccaggaaggctctgtaggcgcttcaggcgatcttactcccctttcataccttgcgggcgcgctcatcggggaacggcaggtccgctatcagggtaaagtccgcccttctgcggaagtgttcgcggaactgggcaaacagccttatcgattccgtcccaaagaagctatcgccataatgaacggaaccgctgtaatgaacgcggtcgccgctctcgctttttccgacgcggaatatcttgccgatcttgcatgtcgtataaccgcgatgaattccattgtccttaaaggaaacgcttaccattttaacaaacggcttttcgagttaaagcctcattcgggacagtctcttgccgcagaaaaaatccgcaccagcctgccgcaggaaaatcagggcgctcttgccgcccccgccagaattcaggacatgtattcaattcgctgcgctcctcatgtaatcggtttgttctatgatatgcgtgataccctgcgtaattttatcgaaaccgagatgaatagcggcaacgataatccgcttattgatccggaaacacaatccgtataccacggcggacatttctacggcggacatatctgctttgcgatggattcgcttaaaaacataatcgccaatatcgcggatcttttggacaggcagcttgccctgatcgtggataccaaatacaaccgagggctgtccccgaaccttaccggaacgtgcggagccattgcatgcaatcacggattcaaggctgtgcagattgccgtatccgcatggacagccgaagccctgaaaaacacgatgcctatgagcgtattctcccgttctacggaatgtcataaccaggacaaggtaagcatggggactatcgccgcccgcgactgcgtgcggatcaacagattgaccgcgcaggtaacatctgccctgctgttagccgcttttcaggctgtcgatctgcggctgaaaaaaggcgaactgaagaaatcggatttgggacagacggaaaagacatacaatgaaattgccgctttttttaaaccccttgaagatgaccgcccgcttgaagacgatctgcgtaagactttaaaattgatagaggaacggcatttttgcctataa

SEQ ID NO: 41768 - protein, 381 aa, Unknown
  Obtained from environmental sample
  DOMAIN (1)...(359): Phenylalanine and histidine ammonia-lyase
  misc_feature (1)..(381): Xaa is any amino acid
MMAEHSAPCPQEGSVGASGDLTPLSYLAGALIGERQVRYQGKVRPSAEVFAELGKQPYRFRPKEAIAIMNGTAVMNAVAALAFSDAEYLADLACRITAMNSIVLKGNAYHFNKRLFELKPHSGQSLAAEKIRTSLPQENQGALAAPARIQDMYSIRCAPHVIGLFYDMRDTLRNFIETEMNSGNDNPLIDPETQSVYHGGHFYGGHICFAMDSLKNIIANIADLLDRQLALIVDTKYNRGLSPNLTGTCGAIACNHGFKAVQIAVSAWTAEALKNTMPMSVFSRSTECHNQDKVSMGTIAARDCVRINRLTAQVTSALLLAAFQAVDLRLKKGELKKSDLGQTEKTYNEIAAFFKPLEDDRPLEDDLRKTLKLIEERHFCL

SEQ ID NO: 41769 - DNA, 336 bp, Unknown
  Obtained from environmental sample
  misc_feature (1)..(336): n is a, c, g, or t
ttgcctataataatgaaactaaaacttatttatccaaagtggaataaactttccggacagactacttttaatctgcctccccacggacctgtagtatttgccgccgcccttcctgattatgttgacgtaacttttaccgatgaaaatgtccaggatcttgactttgatgaagactgtgatcttgtagcaatctccatgatgctaagtacgcaggtaaagcgaggctgggctattgcggatgaatacngaagacgcggcaaacaggttatttcggcggcattgccgttatgctgcacgcggaggaaacaatcccgcacgcggactcggtatttttag

SEQ ID NO: 41770 - protein, 111 aa, Unknown
  Obtained from environmental sample
  misc_feature (1)..(111): Xaa is any amino acid
MPIIMKLKLIYPKWNKLSGQTTFNLPPHGPVVFAAALPDYVDVTFTDENVQDLDFDEDCDLVAISMMLSTQVKRGWAIADEYXRRGKQVISAALPLCCTRRKQSRTRTRYF

SEQ ID NO: 41771 - DNA, 807 bp, Unknown
  Obtained from environmental sample
  misc_feature (1)..(807): n is a, c, g, or t
atgacacaaaaacaggtggaaaacctgtttaacgaatatacgcactttaacatgaaagccaacaggactaccgagggagccggacttggaatgactgttacgcgaaatctagttgacttgatgaacgggcagatcaatataaaaagcgtgataggagaaggaacgacggtaaccgtgcgtttgccgcaaaaaactcccggtatcggcgtgcgcgatttaattgggaaagaaatgaccgaaaacctgaagcagttcaagcttggcaatgtcgtgcggatgaaaaaatcgcaggtaaaacatgaatatatgccttacggcaacgttcttattgtagacgatgtagaaacaaatttatatgtggctaaagggcttatggccccgtacgggcttaacattgacgttgctacaagcggttttgaagctatcgaaaaggtaaagaacggcaacgtattcgacattatctttatggatcacatgatgcccaaactggacggaattgaaactacaaaaattatccgcgaacatggatatacgcatccaattgttgcgttgacagctaacgcgcttgcggggcaggccgacgtgttcatgaaaaacgggtttgacggcttcatttccaagccgattgacatccgtcagttaaatatttcgcttgtaaaatttatccgcaataaacaatctcaggaaacgcttgacgccgcgcaaaatgaaaaagcggaatttgacaaaaaacaggcggcaaaatccgcgcaggggcggcaaatagactcgcagtggcggctatttcatagagtgccgccgccataa

SEQ ID NO: 41772 - protein, 268 aa, Unknown
  Obtained from environmental sample
  DOMAIN (106)...(219): Response regulator receiver domain
  misc_feature (1)..(268): Xaa is any amino acid
MTQKQVENLFNEYTHFNMKANRTTEGAGLGMTVTRNLVDLMNGQINIKSVIGEGTTVTVRLPQKTPGIGVRDLIGKEMTENLKQFKLGNVVRMKKSQVKHEYMPYGNVLIVDDVETNLYVAKGLMAPYGLNIDVATSGFEAIEKVKNGNVFDIIFMDHMMPKLDGIETTKIIREHGYTHPIVALTANALAGQADVFMKNGFDGFISKPIDIRQLNISLVKFIRNKQSQETLDAAQNEKAEFDKKQAAKSAQGRQIDSQWRLFHRVPPP

SEQ ID NO: 41773 - DNA, 435 bp, Unknown
  Obtained from environmental sample
  misc_feature (1)..(435): n is a, c, g, or t
atgaatacaattatgggcattaccgaaatacagctccagaacgaaaccttggcgcaaaatatgaaaaaagcatttattgatatttacaactcaagcgatttgcttttagatgttataaacaacattcttgatgtgtataaaatagaggctaacaaaatagaaattgcatttgtggaatatgatgttgcgagtttaatcaacgatattgtgcaactcaacattatgcgaatgaaaaacaaatccgttgaatttgaattccacgtggatgaaaatttgcctattatattgtttggcgatgttattcacattaagcagattttaaataatttgctatccaacgcttttaaatatacagaagaaggcgctgttacgctctccgcagaagccgaatgcatatcccggggccggaactgtttttgtaaccctcatttttaa

SEQ ID NO: 41774 - protein, 144 aa, Unknown
  Obtained from environmental sample
  misc_feature (1)..(144): Xaa is any amino acid
MNTIMGITEIQLQNETLAQNMKKAFIDIYNSSDLLLDVINNILDVYKIEANKIEIAFVEYDVASLINDIVQLNIMRMKNKSVEFEFHVDENLPIILFGDVIHIKQILNNLLSNAFKYTEEGAVTLSAEAECISRGRNCFCNPHF

SEQ ID NO: 41775 - DNA, 396 bp, Unknown
  Obtained from environmental sample
  misc_feature (1)..(396): n is a, c, g, or t
ttgttgatacctattgttttcaacactgaaagcgcggaagacaccgcatttctcgcggcgaaaaaagacgaactggcggcgttagccattgacattgaaaaggacggagacggctggcggattgacgcgctgccggaaggctggcaattaagcgactccgacaccgtgaagaagattcttgccctgcgcggcgccagcgaaaacatcgccgaacgctgggccgccacgctctgctgtcatcaggcaataaaagacggcgactacctcgacgatgctgccgcccttgctctggcaaaagaagcccttaacctacccgacccccattgcccccacggtcgccccatatggaccgaaatcacccgagccgccctctgcaaagccgtacgccgaacttaa

SEQ ID NO: 41776 - protein, 131 aa, Unknown
  Obtained from environmental sample
  misc_feature (1)..(131): Xaa is any amino acid
MLIPIVFNTESAEDTAFLAAKKDELAALAIDIEKDGDGWRIDALPEGWQLSDSDTVKKILALRGASENIAERWAATLCCHQAIKDGDYLDDAAALALAKEALNLPDPHCPHGRPIWTEITRAALCKAVRRT

SEQ ID NO: 41777 - DNA, 513 bp, Unknown
  Obtained from environmental sample
  misc_feature (1)..(513): n is a, c, g, or t
atgctgccgcccttgctctggcaaaagaagcccttaacctacccgacccccattgcccccacggtcgccccatatggaccgaaatcacccgagccgccctctgcaaagccgtacgccgaacttaaaagcgaaggtcaccgcggcgtgctggcggtttttggagaacgggtgggttttttccgtaaaatatctttattgaacaaaagggcaaacgcctcggcggcgttttcgacaaattcaacggcaatcgcggcgcggatgtctttgtccagttcatcccactcgccgcggttgtcggcgggcagaatggctttttccatgccgttgcgtatggctgccaggagtttttctttcaggccgcctatcggcaacaccctgccggtaagggtcagttccccggtcatggcgattccggcgcgcaacggtttttggcacaaagttgacaatagggaagcggcgatggcgatgcccgccgacgggccgtctttgggaatcgcaccttcgggaacgtga

SEQ ID NO: 41778 - protein, 170 aa, Unknown
  Obtained from environmental sample
  misc_feature (1)..(170): Xaa is any amino acid
MLPPLLWQKKPLTYPTPIAPTVAPYGPKSPEPPSAKPYAELKSEGHRGVLAVFGERVGFFRKISLLNKRANASAAFSTNSTAIAARMSLSSSSHSPRLSAGRMAFSMPLRMAARSFSFRPPIGNTLPVRVSSPVMAIPARNGFWHKVDNREAAMAMPADGPSLGIAPSGT

SEQ ID NO: 41779 - DNA, 1869 bp, Unknown
  Obtained from environmental sample
  misc_feature (1)..(1869): n is a, c, g, or t
atggataaaaaccaccgggaatacatactccacgagcagctcaaggaaatcaacaaggagctggggaaggacacggcggaggacgagtttgcggaacttgagcgcgtcatcatagagcgcaaccccggagaggaagtgctggcgaaagcccggaaggaaatcgcgaaactgagaaaactccagccctttacgcccgaagcgggggtgcttcggggatacattgaatggatcatggatctgccctggagtgagtactcggtcgattcctcggatctgggtgaggccgaaaagatcctcaacgaggatcactacgggatgaagaaagccaaggaaaggatcgtcgaattcatcgccgtgaggcagttatgcgcaatagagaattcaaatccgcctgttcccgcgaataccctttctccggaatccgccgttaaggatacggccgtaatgccggaaacggcagagcctgtttcccccagggcgaatccggaactgataagcgtcaaggggcccatactctgcttcgtggggccgccggggacaggcaagacgagcctcggcaaatcggttgccagggcgctggggcgcaaatttgtacgcatttccttgggaggcgtccgggacgaggcggagatccgggggcacagaaaaacctacgttggcgccctgccggggaagataatccagtccatgaggaaggccggaaccatgaacccggtcttcctcctcgacgagatagacaaactttcaagcgatttccggggagaccccggccagcgccctcccttgaagtgcttgaccccggaacaaaatgtcgcttttaccgatcattatatggaagtaacatacgatctttcccgcgtgttgtttatcaccaccgccaattccctgcacagcataccgtatcccctgcttgaccgcatggaaatcatcaacattcccggctacggggaaaatgaaaaactcgccatcgccaagcaattcctggttcccaaggcgttatcggaaaacgggctcgcgccggcgcgggttacttttaccgacgacgcgctgaggggtattatacgctactggacgatggaatccggcgtacgcagtcttgaacgggaaatagcccgctgtgtcaggcgcgtcgcccgtcaggcggtcgccgccaattacggaaagcccgaaggcaagcccatcggcgaatttaaaaaaatcgttaaaagcgaaaatctggagaaacttctgggcaggcggaaatacaaaaacgacgtggtgttcaaagaggcgcgggtaggaataagctgcgggcttgcctggacggaaaccggcggagctatactgccggtggaaagcacccgctttgggggaaacggcgaactgattatgaccggcaacctcggcgacgtgatgaaggagagcgcccgcactgccctttcgtatctgcgcagtgtgcaggatcattatcattttgaggtaaccaatatcggtaaaaccgattttcacattcacgttcccgaaggtgcgattcccaaagacggcccgtcggcgggcatcgccatcgccgcttccctattgtcaactttgtgccaaaaaccgttgcgcgccggaatcgccatgaccggggaactgacccttaccggcagggtgttgccgataggcggcctgaaagaaaaactcctggcagccatacgcaacggcatggaaaaagccattctgcccgccgacaaccgcggcgagtgggatgaactggacaaagacatccgcgccgcgattgccgttgaatttgtcgaaaacgccgccgaggcgtttgcccttttgttcaataaagatattttacggaaaaaacccacccgttctccaaaaaccgccagcacgccgcggtga

SEQ ID NO: 41780 - protein, 622 aa, Unknown
  Obtained from environmental sample
  DOMAIN (171)...(315): ATPase family associated with various cellular activities (AAA)
  misc_feature (1)..(622): Xaa is any amino acid
MDKNHREYILHEQLKEINKELGKDTAEDEFAELERVIIERNPGEEVLAKARKEIAKLRKLQPFTPEAGVLRGYIEWIMDLPWSEYSVDSSDLGEAEKILNEDHYGMKKAKERIVEFIAVRQLCAIENSNPPVPANTLSPESAVKDTAVMPETAEPVSPRANPELISVKGPILCFVGPPGTGKTSLGKSVARALGRKFVRISLGGVRDEAEIRGHRKTYVGALPGKIIQSMRKAGTMNPVFLLDEIDKLSSDFRGDPGQRPPLKCLTPEQNVAFTDHYMEVTYDLSRVLFITTANSLHSIPYPLLDRMEIINIPGYGENEKLAIAKQFLVPKALSENGLAPARVTFTDDALRGIIRYWTMESGVRSLEREIARCVRRVARQAVAANYGKPEGKPIGEFKKIVKSENLEKLLGRRKYKNDVVFKEARVGISCGLAWTETGGAILPVESTRFGGNGELIMTGNLGDVMKESARTALSYLRSVQDHYHFEVTNIGKTDFHIHVPEGAIPKDGPSAGIAIAASLLSTLCQKPLRAGIAMTGELTLTGRVLPIGGLKEKLLAAIRNGMEKAILPADNRGEWDELDKDIRAAIAVEFVENAAEAFALLFNKDILRKKPTRSPKTASTPR

SEQ ID NO: 41781 - DNA, 300 bp, Unknown
  Obtained from environmental sample
  misc_feature (1)..(300): n is a, c, g, or t
ttgacgatggcgttatgcggttcggtgatgatccgccgcaaatcctcgcgcttcagttcatcaagactcacgacaatgggaagcctgccgatgaattcggggatcatgccgaagtggatcaaatcgtccgggtgcagcgcgtcaaacagttctttcaggtttttttctccgactccggactcggttccgaagcccaacgggtgctgtaccacccggcgggcgataaatttatcaaggccgacaaaagcgcctccgcatataaacagtatgttggtggtgtcaatgcggatcatttcctga

SEQ ID NO: 41782 - protein, 99 aa, Unknown
  Obtained from environmental sample
  misc_feature (1)..(99): Xaa is any amino acid
MTMALCGSVMIRRKSSRFSSSRLTTMGSLPMNSGIMPKWIKSSGCSASNSSFRFFSPTPDSVPKPNGCCTTRRAINLSRPTKAPPHINSMLVVSMRIIS

SEQ ID NO: 41783 - DNA, 546 bp, Unknown
  Obtained from environmental sample
  misc_feature (1)..(546): n is a, c, g, or t
atgatccgcattgacaccaccaacatactgtttatatgcggaggcgcttttgtcggccttgataaatttatcgcccgccgggtggtacagcacccgttgggcttcggaaccgagtccggagtcggagaaaaaaacctgaaagaactgtttgacgcgctgcacccggacgatttgatccacttcggcatgatccccgaattcatcggcaggcttcccattgtcgtgagtcttgatgaactgaagcgcgaggatttgcggcggatcatcaccgaaccgcataacgccatcgtcaaacagtatcaggcgtccctcgcctacgatgacgttacgctggaatttaccgaaggggctattgacgccattgccgataccgccatcaaacaaaaaaccggcgcgcgcggactgcgggccatcgttgaaaaactgatgaccgatataatgtttgaaataccttcaatgaagggcaacaaacaggtaactatcaccgaggacgttgtcgaaaagtccgaagcgcccatcatccaacagctccagaagagcgcctag

SEQ ID NO: 41784 - protein, 181 aa, Unknown
  Obtained from environmental sample
  misc_feature (1)..(181): Xaa is any amino acid
MIRIDTTNILFICGGAFVGLDKFIARRVVQHPLGFGTESGVGEKNLKELFDALHPDDLIHFGMIPEFIGRLPIVVSLDELKREDLRRIITEPHNAIVKQYQASLAYDDVTLEFTEGAIDAIADTAIKQKTGARGLRAIVEKLMTDIMFEIPSMKGNKQVTITEDVVEKSEAPIIQQLQKSA

SEQ ID NO: 41785 - DNA, 834 bp, Unknown
  Obtained from environmental sample
  misc_feature (1)..(834): n is a, c, g, or t
gtgaaacgcggcggcaatgcgaaaaagaccaccgggctttcttcatttctgtccggccttaaacgggtaaatgccggctggctttctgaaggtggcggcagactcaccaaagaaatatttaccctgctccctctgcacgaactggtactgtatccccataccgtcgttccgatttttatcaccgcccatgacggcatagccgccgttgatgaggcgctccgccgcgacaaccggctttttgccgcctgtctgaaaaagcgcgatcaaacctaccctgagggtgaagaaccctggccggtcggaaccgtcgtccgcgtcattcagcatttgaggcttcccgacaatacttatcgcgttgttttgcagggggaataccggggcagaataatcggcatagaacagcgggttgattattccctggtaaaaattgagccgatagactcaggctttttttccaacccgccgctaccggaagatgtcgccctgatgcgggccgtacagcggtcttttgcccagtacgcggagctttcaaaaaaaatcggatcggagactctgctggcggtagagcgcacggaaagtcccgaacgcctcgccaaccttatctgtaactccatgcagcttaaacctgaaaagaaaattgaactgcttgccatatcgggagccgccgaacggctggtggcgatactggaaacgcttgaacgggaaaatgaaatatacggcatacagaaaaatatttcgggcaaggtcagaagccgcatggagaaacaccagcgcgaatactaccttcatgaacagctaaaagaaattacaaagaactgggcaaggataaagtag

SEQ ID NO: 41786 - protein, 277 aa, Unknown
  Obtained from environmental sample
  DOMAIN (42)...(234): ATP-dependent protease La (LON) domain
  misc_feature (1)..(277): Xaa is any amino acid
MKRGGNAKKTTGLSSFLSGLKRVNAGWLSEGGGRLTKEIFTLLPLHELVLYPHTVVPIFITAHDGIAAVDEALRRDNRLFAACLKKRDQTYPEGEEPWPVGTVVRVIQHLRLPDNTYRVVLQGEYRGRIIGIEQRVDYSLVKIEPIDSGFFSNPPLPEDVALMRAVQRSFAQYAELSKKIGSETLLAVERTESPERLANLICNSMQLKPEKKIELLAISGAAERLVAILETLERENEIYGIQKNISGKVRSRMEKHQREYYLHEQLKEITKNWARIK

SEQ ID NO: 41787 - DNA, 759 bp, Unknown
  Obtained from environmental sample
  misc_feature (1)..(759): n is a, c, g, or t
gtggcgaaagcggaacttgacgcggaaggcgatataattattcatcaaggtatcaatggaaagagtggggagaaaaggattcgcgcggggcattcactttggtcgcgctttattgagaacgcgaatgtggaagccgggaatatggttgtcgttaccgacggaataattaattcaaatgttgacgcgataaagagcattgtttgcatgggtaaacgcgcaagtataatgggcggccgtctgcgcgcgggagaggaaataaacgccaaagttcttggcaactcgacaagcggaaccgaaacaatttgcgaagtcggttttgacccgcacagtaagctggaactggaacgccttcttgaaatgaaaacgtcgtctgaaacggaattggatgcgatcaggctggatttgcaaaccttaatcaatacgaaaaaacagcgtaaaaccttacccgaagataaagaagcgtacatgcaggaattaatggaacggcggcaaatactaaccgatgaattgaaagacacgaatgaaagtattgaaaaagtccaggaattcatgaatcaaatagaagttcgcggacgggtatcagcgtctacaaaagtatggccgggcgtaaaaatatggattcgtgacgtgaaagaagatgtaaaaacggactatcgcgcggtaacttttattcttgataacggccttatcagggcgaccaagtatgaggaacctgacgagcttgcgaagaaggggttagatggctatagcgccgattga

SEQ ID NO: 41788 - protein, 252 aa, Unknown
  Obtained from environmental sample
  DOMAIN (1)...(235): Protein of unknown function (DUF342)
  misc_feature (1)..(252): Xaa is any amino acid
MAKAELDAEGDIIIHQGINGKSGEKRIRAGHSLWSRFIENANVEAGNMVVVTDGIINSNVDAIKSIVCMGKRASIMGGRLRAGEEINAKVLGNSTSGTETICEVGFDPHSKLELERLLEMKTSSETELDAIRLDLQTLINTKKQRKTLPEDKEAYMQELMERRQILTDELKDTNESIEKVQEFMNQIEVRGRVSASTKVWPGVKIWIRDVKEDVKTDYRAVTFILDNGLIRATKYEEPDELAKKGLDGYSAD

SEQ ID NO: 41789 - DNA, 1722 bp, Unknown
  Obtained from environmental sample
  misc_feature (1)..(1722): n is a, c, g, or t
atgtcaggaagcataaatccgtcatttaaagcactctcccctttcatttccaatatatcaatttccagcatttctacatcggtatcttttaatgaattaaccgacaatactattaccaatatatattcaccaacccgttttttttacgcgccggacaagtatacaatttacagtatatcaggttcggtttccggaactccgctttccttaggcggcgtacaatcaaaaccggcggctaagacctctggttctcaaacggttgaagatccgtttaacggcattggaatacccatatccccatgggcgacggacgacgctggcgatgaaaaaacaacatcatcggaaattttagttccccccgtcctttctcaaacttttagcctgccggcggcaggaaatattaaattcaacattgattattcattatcccctacaacctcttcagagatgcaatttatgaaaaataaatggaaaacttatgaagatatggactggaacgattcccaatcaatactgacaagcgttagtggaaatacaaatttaaatttccgtattgatcattcaactggtttgttcagcaataccatatctttttcaggcagcggaacatggcgtgattattcatacttgaatgaagaaatgtatactgatcctgttacaggcgttgtaaatacggaagcgattaaaacggcccgccaacaacaatacgctttgacaaactacacgtcttcttactcttataacggcacggtaaaaccgtttttttcagatcctttattttccccaacaaatcttcaatattcattcaggggcactttggtaaaatcaaagaaatttacagaaggagacggacctgagcttacgccgcaatggggaggatgggtaaaagaagatctcagcgaggatatacttggacttaatagccacaggatttcaacaaatcttgcggcaaatataatggacaaagagcaaagtatttccgccagcgcggaactgcctcctcttgacggacttattaacgcaaatgccacatttaaagtctggatatcaacgtcaaatttcagatacagcatggaaaaaaaagaaactgacgaagaatggcaaattaaacctttttacataacagaaactttaagattcgaaaatatagtaacattcacacataatatgacatatacccctcgcaatgataccactacgcccgaagaggaaaataaaataacatatcttaattcgtctttatcgttattcagttcttttaccgcgacttatacaatgacatggatacaaaaatcagtttttaaaccggataatcccgacactccatatacgggaggtaaatgggtaaaggaagatgaaaaagagctgcttccaaaagatttaagacttgtatatagccgttctttccctagttcaaaatattttaacaaccgttttaatctttcatataatattaatacgtcgttaaattttgatttacaggaacacactagttccaactttcaatttgaaaccggtattactatgggcattaccaagtttatggatcttaaagtatcggcgacgtcgcaaaacgccgtaatattcaggtatttcaagggcngtaaaggtatggaagagctaaccgccatgtacnatgaaggcgaacaaaataatctttttaccgatttacttgattcgttaanttttctgatgaagaaaacgcaaaagatcaggttttaa

SEQ ID NO: 41790 - protein, 573 aa, Unknown
  Obtained from environmental sample
  misc_feature (1)..(573): Xaa is any amino acid
MSGSINPSFKALSPFISNISISSISTSVSFNELTDNTITNIYSPTRFFYAPDKYTIYSISGSVSGTPLSLGGVQSKPAAKTSGSQTVEDPFNGIGIPISPWATDDAGDEKTTSSEILVPPVLSQTFSLPAAGNIKFNIDYSLSPTTSSEMQFMKNKWKTYEDMDWNDSQSILTSVSGNTNLNFRIDHSTGLFSNTISFSGSGTWRDYSYLNEEMYTDPVTGVVNTEAIKTARQQQYALTNYTSSYSYNGTVKPFFSDPLFSPTNLQYSFRGTLVKSKKFTEGDGPELTPQWGGWVKEDLSEDILGLNSHRISTNLAANIMDKEQSISASAELPPLDGLINANATFKVWISTSNFRYSMEKKETDEEWQIKPFYITETLRFENIVTFTHNMTYTPRNDTTTPEEENKITYLNSSLSLFSSFTATYTMTWIQKSVFKPDNPDTPYTGGKWVKEDEKELLPKDLRLVYSRSFPSSKYFNNRFNLSYNINTSLNFDLQEHTSSNFQFETGITMGITKFMDLKVSATSQNAVIFRYFKGXKGMEELTAMYXEGEQNNLFTDLLDSLXFLMKKTQKIRF

SEQ ID NO: 41791 - DNA, 579 bp, Unknown
  Obtained from environmental sample
  misc_feature (1)..(579): n is a, c, g, or t
gtgaacgagacggcggcgaaaatagaaaaagaagtgggcgtggtggatatccttgtcaataacgccggaatcatcaaacgcatacccatgatggagatgagcgccgcggattttaggcaagtaatagacatagaccttaacggcccatttattgtggcaaaagcggtcattccgtccatggtaaaaaaaggcggcggcaaaattattaatatttgcagtatgatgagcgagcttggccgcgagacggtgggcgcttatgccgccgcaaaaggcgggctgaagatgcttaccaaaaatatcgccagcgaatacggcaggttcaatatacagtgcaacggacttggtcccggttacattgaaacgccgcagacggctccattacgggaacgtcaaagcgacggaagccgccacccatttgaccagttcatcattgccaaaactcccgccgcccgctggggtaagccggaagaccttgaaggtcctgcggttttccttgcatcaggcgcttcggattttataaacggccatatattatatgtggacggcggcatccttgcctatattggaaaacaaccgtag

SEQ ID NO: 41792 - protein, 192 aa, Unknown
  Obtained from environmental sample
  DOMAIN (1)...(105): short chain dehydrogenase
  misc_feature (1)..(192): Xaa is any amino acid
MNETAAKIEKEVGVVDILVNNAGIIKRIPMMEMSAADFRQVIDIDLNGPFIVAKAVIPSMVKKGGGKIINICSMMSELGRETVGAYAAAKGGLKMLTKNIASEYGRFNIQCNGLGPGYIETPQTAPLRERQSDGSRHPFDQFIIAKTPAARWGKPEDLEGPAVFLASGASDFINGHILYVDGGILAYIGKQP

SEQ ID NO: 41793 - DNA, 333 bp, Unknown
  Obtained from environmental sample
  misc_feature (1)..(333): n is a, c, g, or t
atggaagaattaacatccatgtataccgaaggggagcaaaataatctgtttgtggacttatttgattcatttaatttttccgatgaatcaaaacggcgcaggtcagggtttaaaatgcagagattcaatctggatttaaatcatcatttgggcgattggacggcgacgatgggaatcagtatgtatccgtaccagaagcctgccgcggcgggggaaataccgacaattaatattgtctccgatttttccttccttgtaacatggaaaccaattacggaaattaaaactgatatcaaatatgacggcaggcttgacagatgggcggtaaaataa

SEQ ID NO: 41794 - protein, 110 aa, Unknown
  Obtained from environmental sample
  misc_feature (1)..(110): Xaa is any amino acid
MEELTSMYTEGEQNNLFVDLFDSFNFSDESKRRRSGFKMQRFNLDLNHHLGDWTATMGISMYPYQKPAAAGEIPTINIVSDFSFLVTWKPITEIKTDIKYDGRLDRWAVK

SEQ ID NO: 41795 - DNA, 813 bp, Unknown
  Obtained from environmental sample
  misc_feature (1)..(813): n is a, c, g, or t
ttgatggcgaaaaatgatcaagaacgggcaatgtactatgagaaagttaagccttatacaacaatgaccaaggcgttattggatactgaaaaaaaacttgctatggaagctaaaaaaaatccctcaacagcgtccattcaaaaattggctttagccgatgagatgcttaatcttgcttcatattatatcgttataagcggaatggctaatgctgttcttaaatctaaaaatgaagaagcgttaaatgacgccagaaaatcgctttacaaggcggtaatttatcttgaagaagttgtcagtaattatatagacgctccgttttccgactacgaagaaaaattattggcgatagaatcgtttaatcaggaccaaaggtataatttgattagcaaaatgggatttgccatagacctcttagagcatgcttacggcgacaattcaaaatggagatggacatttgtcgagttggaaggtcgttttgcggtaacggcgaaaaatattattgatttaaaaggtatttacgaacatttaaatcccggagccgaatattatgattctaccgtgtatcatcttagattggtaaaaaaacttatatcgcaagccgctgaccgctaccgtgaaaaatatgagttgaatacagggcagatgcttgattttaaaacgggaataaattttctcggcgcattacgccgtctgcacattgttctttccgaaaacgaagaatcacaggaaacgaaaaagaaaatggcgatttggtcagccaaacttgaaaccgatcagaaaaaacaggaagaagccaaaaagagagcatga

SEQ ID NO: 41796 - protein, 270 aa, Unknown
  Obtained from environmental sample
  misc_feature (1)..(270): Xaa is any amino acid
MMAKNDQERAMYYEKVKPYTTMTKALLDTEKKLAMEAKKNPSTASIQKLALADEMLNLASYYIVISGMANAVLKSKNEEALNDARKSLYKAVIYLEEVVSNYIDAPFSDYEEKLLAIESFNQDQRYNLISKMGFAIDLLEHAYGDNSKWRWTFVELEGRFAVTAKNIIDLKGIYEHLNPGAEYYDSTVYHLRLVKKLISQAADRYREKYELNTGQMLDFKTGINFLGALRRLHIVLSENEESQETKKKMAIWSAKLETDQKKQEEAKKRA

SEQ ID NO: 41797 - DNA, 687 bp, Unknown
  Obtained from environmental sample
  misc_feature (1)..(687): n is a, c, g, or t
gtggacggacaactgcgtttcgcggcaagcccaagagcggcgctggaacttaacgaatcttatatcagcgaggaattaattacaggtgcggaagttgtcgtccttgacggttatattctggaccgacgtcccttagttcaccacattttaaaactggcaagcaaactgggaattcccgtcgctcttgacgccgcgtccgtttttcaagtattaagcaaggccgaggaaattcttacatacagccgcagttaccctctgtttgtttttatgaacgccgatgagactatcgctttttacaatacgctcagaaaaaaccgcgatgatacatccggattatcagaaaaagaaaaagaggaaatcattatacgcgacgtctgcccaatgttaaaaataatcaccgacggtgaaatatacccgattatagttgtcaaactcggaggttatggcgcaatagtaatcgcgggcggaaatgtttaccgcgaggctacatttactatcactccgcgaaatactgtcggagccggagacgctttttgcgccgctttcatttccgcgtggctgcgggacaaatcgctttccgagtgcgccgcgcttgggaacaaagtcgcgcgggaaatccttgaggttccgggtacgcatattaaaagtacaaaattaaaatctttcgcgaagattttacaaaaataa

SEQ ID NO: 41798 - protein, 228 aa, Unknown
  Obtained from environmental sample
  misc_feature (1)..(228): Xaa is any amino acid
MDGQLRFAASPRAALELNESYISEELITGAEVVVLDGYILDRRPLVHHILKLASKLGIPVALDAASVFQVLSKAEEILTYSRSYPLFVFMNADETIAFYNTLRKNRDDTSGLSEKEKEEIIIRDVCPMLKIITDGEIYPIIVVKLGGYGAIVIAGGNVYREATFTITPRNTVGAGDAFCAAFISAWLRDKSLSECAALGNKVAREILEVPGTHIKSTKLKSFAKILQK

SEQ ID NO: 41799 - DNA, 561 bp, Unknown
  Obtained from environmental sample
  misc_feature (1)..(561): n is a, c, g, or t
atgccaaaagcgttagttttactagcggacggttttgaggatgtcgaagcagtaacgccgatagactatttgcgccgcgccggaatagaagttaccaccgtatcaatttccgaaagccttaccgtaacaagcaaatggggcggtataaagatgtttgccggtactacgctgaccgaactaacaaaacagggcactgacagctatgacgcggtgatccttcccggcggaatgcccggcacgtcaaatcttgcggcttcaaaagagacgggcttgctggtaaaaaaaatggcggcagcgggaaaaacaatctgcgccatttgcgccgctcccgctcttgtactcgctccccttggcctgctggccgggaaaaattttacctgctacccgggaatggaagagaaagtgaacgggagcaaatggtcggacagccgcgttgtggttgacggcaatgtgattacaagccggggcgcgggaacggcgggagagtttgccgccgcgattatcgagaaattactggacaaggccgccgcgaaaaaaatagcggacgctgttttactgtaa

SEQ ID NO: 41800 - protein, 186 aa, Unknown
  Obtained from environmental sample
  DOMAIN (30)...(172): DJ-1/PfpI family
  misc_feature (1)..(186): Xaa is any amino acid
MPKALVLLADGFEDVEAVTPIDYLRRAGIEVTTVSISESLTVTSKWGGIKMFAGTTLTELTKQGTDSYDAVILPGGMPGTSNLAASKETGLLVKKMAAAGKTICAICAAPALVLAPLGLLAGKNFTCYPGMEEKVNGSKWSDSRVVVDGNVITSRGAGTAGEFAAAIIEKLLDKAAAKKIADAVLL

SEQ ID NO: 41801 - DNA, 1305 bp, Unknown
  Obtained from environmental sample
  misc_feature (1)..(1305): n is a, c, g, or t
ttgccatgggaaacctgcttaccgataaatacgccgagggggttccataccatcgagttttacgcagcgacagaaaatgtggacgctgttgaggccctggccgcagaagaggcaaggaacctttttggcgccgaatacgccaacgtccagccccactgtggtgccgacgccaacattctggctttttgggcggtacttgccaccaggatagaaaatccccttctggaaaaatacggcgaaacaaatttatatagactgactgacgagcaatggaaggagctaaaaaaagagctgggaaatcagcgcctgttggggctggactattattcaggcggtcaccttacccacggctaccgctataatatttcgtcaaggctgttcgatgtttcgacctattcggtttccaaagaaaccggccttcttgattacgacgtgattgaaaagcaggccagggaattgaaacctctgattctgcttacaggctattctgcatacccaaggaagatagattttaagaggatgaggcagatcgccgattcggtcggggcggtgttcgtggtggatatggcacactttgccggccttgtggcaggcaaggtttttacaggcgaatacgatccggtgccgcacgcccacgttgttacgactacgactcacaaaaccttgcgcgggcccagagccggccttatactttccaccagggaatttgccgaacccctggacaagggatgccccctgactatgggcgggcccctgccccatgtgatagcggcaaaagcggtcgcttttcgcgaggcttcacagccggaatttaaaaaatacgcgcagaatatcgtcgacaactgccaggctcttgccgcctcctgtattgaaaatgggcttagcgtgcttacgggcggaacggacaaccacctgattttgattaatgttcacaaggactcgcttacgggcaggcaggcggaaagcgccctgcacgagtgtcacataacgcttaaccggaacagccttccgcgcgacccgaacggcccgtggtatacgtccgggataaggcttgggacggcggccgtaacaagtcttggaatgggcaaggcggaaatgaaggaactgggcgcgcttatcgcggaagtgataaaggggacaacacagccgccggacaagaaagatccttccaaaaaaagcaaggcaaaatacgaaattaacgcgggcgtgaaagataaagtaatagggcgcgtgaaaatcttattggaccgcttccctgtgtatccggaactggatctggaactcttaaaaaaagcctttgtgtag

SEQ ID NO: 41802 - protein, 434 aa, Unknown
  Obtained from environmental sample
  DOMAIN (7)...(373): Serine hydroxymethyltransferase
  misc_feature (1)..(434): Xaa is any amino acid
MPWETCLPINTPRGFHTIEFYAATENVDAVEALAAEEARNLFGAEYANVQPHCGADANILAFWAVLATRIENPLLEKYGETNLYRLTDEQWKELKKELGNQRLLGLDYYSGGHLTHGYRYNISSRLFDVSTYSVSKETGLLDYDVIEKQARELKPLILLTGYSAYPRKIDFKRMRQIADSVGAVFVVDMAHFAGLVAGKVFTGEYDPVPHAHVVTTTTHKTLRGPRAGLILSTREFAEPLDKGCPLTMGGPLPHVIAAKAVAFREASQPEFKKYAQNIVDNCQALAASCIENGLSVLTGGTDNHLILINVHKDSLTGRQAESALHECHITLNRNSLPRDPNGPWYTSGIRLGTAAVTSLGMGKAEMKELGALIAEVIKGTTQPPDKKDPSKKSKAKYEINAGVKDKVIGRVKILLDRFPVYPELDLELLKKAFV

SEQ ID NO: 41803 - DNA, 741 bp, Unknown
  Obtained from environmental sample
  misc_feature (1)..(741): n is a, c, g, or t
atgttaggcggcatatcatcagattttggcatagatttgggaacttgtaataccctgatttacattaaaggcaagggcatagtattaaatgaaccttccgtggttgcggtcgaacgcggcacaaaaaaaattgttgcggttggcgcggacgcaaaaagaatgctttggaaaactcccgagaatattatagccataaggccgatgcgcgacggcgtaatagcggatattgaatcaacggaaaaaatgatacgctgctttattgaccgcgtatttccgcgttaccgtttttttaagcccagaatggtaattggggtgccttcctgcattaccgaggtggaaagacgcgccgttgaagaaagcgcgtataagtcaggcgcgaaggaagttcgcgtaatagaagaaagtcttgccgccgcgataggcgcggatataccgataagggagcccgcggggcatatgattttggatatcggcggcggaactacggaaatatcggttatttcgctgggagggatggtcgttacaagcgccatccgcataggcggcgatgaatttgacgagtctataatagaacatatgcgcagcgtccataacctgataatcggggaaccgatggctgatgagctgacaatagaaattggaaacgcgtctcctgaaaaaatgattgacaaatggaagttaaaggcaatgacgccattacgggccttccccgcaggcttgaaattgactcagttgaggtaa

SEQ ID NO: 41804 - protein, 246 aa, Unknown
  Obtained from environmental sample
  DOMAIN (6)...(245): MreB/Mbl protein
  misc_feature (1)..(246): Xaa is any amino acid
MLGGISSDFGIDLGTCNTLIYIKGKGIVLNEPSVVAVERGTKKIVAVGADAKRMLWKTPENIIAIRPMRDGVIADIESTEKMIRCFIDRVFPRYRFFKPRMVIGVPSCITEVERRAVEESAYKSGAKEVRVIEESLAAAIGADIPIREPAGHMILDIGGGTTEISVISLGGMVVTSAIRIGGDEFDESIIEHMRSVHNLIIGEPMADELTIEIGNASPEKMIDKWKLKAMTPLRAFPAGLKLTQLR

SEQ ID NO: 41805 - DNA, 393 bp, Unknown
  Obtained from environmental sample
  misc_feature (1)..(393): n is a, c, g, or t
ttgtcaatcattttttcaggagacgcgtttccaatttctattgtcagctcatcagccatcggttccccgattatcaggttatggacgctgcgcatatgttctattatagactcgtcaaattcatcgccgcctatgcggatggcgcttgtaacgaccatccctcccagcgaaataaccgatatttccgtagttccgccgccgatatccaaaatcatatgccccgcgggctcccttatcggtatatccgcgcctatcgcggcggcaagactttcttctattacgcgaacttccttcgcgcctgacttatacgcgctttcttcaacggcgcgtctttccacctcggtaatgcaggaaggcaccccaattaccattctgggcttaaaaaaacggtaa

SEQ ID NO: 41806 - protein, 130 aa, Unknown
  Obtained from environmental sample
  misc_feature (1)..(130): Xaa is any amino acid
MSIIFSGDAFPISIVSSSAIGSPIIRLWTLRICSIIDSSNSSPPMRMALVTTIPPSEITDISVVPPPISKIICPAGSLIGISAPIAAARLSSITRTSFAPDLYALSSTARLSTSVMQEGTPITILGLKKR

SEQ ID NO: 41807 - DNA, 357 bp, Unknown
  Obtained from environmental sample
  misc_feature (1)..(357): n is a, c, g, or t
atggaagttaaaggcaatgacgccattacgggccttccccgcaggcttgaaattgactcagttgaggtaagggaatcgcttaaagacccgattaatcaaattattgacgagataaaaatagtgcttggaaaaactccgcctgagcttgccgcggatatcgtagatcgcggaattgtaatgacgggaggcggttcgcttcttaaaggacttgataaacttatacagaaagaaacgggcgttcccgcgataatagcggaaaaccccgagctttgcgtagccctgggcgccggcaagtattttgattatattaaaggcgccgaccttaccaagaatatttatgacagattaaacggataa

SEQ ID NO: 41808 - protein, 118 aa, Unknown
  Obtained from environmental sample
  DOMAIN (1)...(108): MreB/Mbl protein
  misc_feature (1)..(118): Xaa is any amino acid
MEVKGNDAITGLPRRLEIDSVEVRESLKDPINQIIDEIKIVLGKTPPELAADIVDRGIVMTGGGSLLKGLDKLIQKETGVPAIIAENPELCVALGAGKYFDYIKGADLTKNIYDRLNG

SEQ ID NO: 41809 - DNA, 780 bp, Unknown
  Obtained from environmental sample
  misc_feature (1)..(780): n is a, c, g, or t
ttgcttgctcttgggcaaataaaagaaggttttaagctgtgcgattctcccgtctccgtgttaagaatgatcaaccactgggacaattttgacggcacggtagagcgcggctacgcgggaaattcgctcttttataaaaacggtcaatttgatttcgacaaacagcgcatagaggactacgcgcgcctgctggcctccgttggaattaaccgtgtttcaataaataacgtaaatgtccgcgccaacgcaaaactccttattacggatgaatatcttaaagaagcggcaaaattagccggcattttccgcaggtttgggattaggctttttatcagtattaatttcggcgcgccctggtctttgggaaaactaccttcggccgacccgcttgatgaaagcgtcgccgcgtggtggaaaaaaagagcggcgctaatttacaaatacattccagatttagccggttttcttgtaaaagccgattccgaaggagaaccgggaccttttcaatactcgcgcacacacgcggacggcgcgaatatgctggcgaaggcggtaaaacctttcggcggggtaatagtttggcgttgttttgtttacaacagcgcgcaggactggagggacaaaaacacagaccgcgcccgcgccgcttacgatcattttatgcctcaggacggcgcgtttgacggcaatgtcatcctgcagataaagcacggtccttatgattttcaggtgcgcgaacctgtatccccgctttcggcgcctaaaaaaaacccgccatga

SEQ ID NO: 41810 - protein, 259 aa, Unknown
  Obtained from environmental sample
  DOMAIN (2)...(258): Glycosyl hydrolase family 67 middle domain
  misc_feature (1)..(259): Xaa is any amino acid
MLALGQIKEGFKLCDSPVSVLRMINHWDNFDGTVERGYAGNSLFYKNGQFDFDKQRIEDYARLLASVGINRVSINNVNVRANAKLLITDEYLKEAAKLAGIFRRFGIRLFISINFGAPWSLGKLPSADPLDESVAAWWKKRAALIYKYIPDLAGFLVKADSEGEPGPFQYSRTHADGANMLAKAVKPFGGVIVWRCFVYNSAQDWRDKNTDRARAAYDHFMPQDGAFDGNVILQIKHGPYDFQVREPVSPLSAPKKNPP

SEQ ID NO: 41811 - DNA, 534 bp, Unknown
  Obtained from environmental sample
  misc_feature (1)..(534): n is a, c, g, or t
gtgaaggccgccgtgtttaccaactgcgaagaagttgaattatgggttaacggcaagaagatgggacggcgtatgcttgcggattttgagaacggaataattgaatggcctctagagtacaaaagcggcaatatggaaataaaaggattcaacaaggggaaagaagtttgttcttatgttttaaaaaccgcaggcctgccgcaaaaaataaaacttatgcccgataaaacaaaattgagagcgggagaaatcgcgcatattgaaataaatattaccgataaagacggattgccgtatccaaatgatgaattccttgttgagttttcattgacaggagacggagaaattatgggcgcgtgttcaggcgatttaagccaaaatctcggctttactctgcctaaagtatttacttttgacggcagagcgcttgcggtaatcagggcgggggattcatccggcgatttggtgttacgcgcttattccgaaaaactggaaaaagcagaattgcggtttataacggaaggggagagataa

SEQ ID NO: 41812 - protein, 177 aa, Unknown
  Obtained from environmental sample
  misc_feature (1)..(177): Xaa is any amino acid
MKAAVFTNCEEVELWVNGKKMGRRMLADFENGIIEWPLEYKSGNMEIKGFNKGKEVCSYVLKTAGLPQKIKLMPDKTKLRAGEIAHIEINITDKDGLPYPNDEFLVEFSLTGDGEIMGACSGDLSQNLGFTLPKVFTFDGRALAVIRAGDSSGDLVLRAYSEKLEKAELRFITEGER

SEQ ID NO: 41813 - DNA, 633 bp, Unknown
  Obtained from environmental sample
  misc_feature (1)..(633): n is a, c, g, or t
atgtacatgaacgacgcgctcaccgttctggaagccgacacctcgcagcgtagcgacctgcacatctcctccgacggggctacgctgcttttcgcgtctaagtataaagacgacaaatgggacatatacgcgcttgacacttcgggaaaagccgcgccggtgagattgacagacggcaaagccgaccaccgccgcccgcgcataagccccgacggcaaatacgtcgcgtacctctcgaaccgcacgggctttagcggcaaaatggatctgtgggtgtacgacagggccgcgaccgagcacagacagctaacgttcaacaccgaagtgcagagcttcacttggagcgacgactccgaggcgatctatttctcggcgggcgtaaacctgctggaaatctgccgcgtagacatgaagtacggcctaataagaaacatgataccgcacccgtttggagctataaaatcgtggagcgaaagctccccgcggtttatgcgatacaacggcgagccgatgatcgtgtacacgagaatataccccaacggtaagcggcggatctattggtacgacataaacaccgcanaggacgtcatgatgtactccgtcgggaagtttgacgagtggaatgacgattaa

SEQ ID NO: 41814 - protein, 210 aa, Unknown
  Obtained from environmental sample
  DOMAIN (54)...(92): WD40-like Beta Propeller Repeat
  misc_feature (1)..(210): Xaa is any amino acid
MYMNDALTVLEADTSQRSDLHISSDGATLLFASKYKDDKWDIYALDTSGKAAPVRLTDGKADHRRPRISPDGKYVAYLSNRTGFSGKMDLWVYDRAATEHRQLTFNTEVQSFTWSDDSEAIYFSAGVNLLEICRVDMKYGLIRNMIPHPFGAIKSWSESSPRFMRYNGEPMIVYTRIYPNGKRRIYWYDINTAXDVMMYSVGKFDEWNDD

SEQ ID NO: 41815 - DNA, 1209 bp, Unknown
  Obtained from environmental sample
  misc_feature (1)..(1209): n is a, c, g, or t
atgcaataccgacctgacaaattcaaaaaagatctatccattttaggtttcgggtgcatgcgcttcccgcgcgtccgaggacgtatcgacatggctaaatccgagtccatgttgctcagcgccgtggctcgcggcgtgaactactttgatagcgcctacctctatccgggcagcgaggaggcggtggggcagatagtcgccaaaaacgggttgcgccaaaggatatatcttgcgaccaaactgccgctctttatgtgcaagtcttacgcggacttcgacaagttcttcaataagtcgctcgaacgtttgcaaaccgactacatcgactactacctcatgcacatgatcaccacgccggagcaatggcggtcgctctgcgacatggggatagaaaagtggatagacgagaaaaaaacgcagggcaagataaagcagctgggtttctcattccacgggaagcgtgaggacttcgtgggcgttgttgacgcgcgggattgggacttctgcatgatacagtacaactacctcgacatcaacaaccaagcgtcgcggacggggcttgtctacgccgcctccaaggggatcccggttttcataatggaaccgctcttgggcgggcgcctcgcaaaccccaaatccttgccgaacaaggcgttgcaaatgatgaacgacgccgatccgtcgctctcgccggcggcaagggcgcttaggtggatatggaatcacaaagaagtcacgctccttttatccggaatgagcacgcaagaccaactcgacgagaatatcggtttagccgaacgcgtcgccgcgccgaactttctctccgacggcgaactcggggttattgacaaggtgataggaattgtaaacgagtccaacaagataccgtgcaccggttgcggctactgcataccgtgtccggcggggatcaacatcccggggtgcttttcctcctacaacgattcctacagaaacggacgtttcgcggcgctaaaaccttacgtgatggccaccgcggcgcttaccacaaaacgcgggctggcaagcgcttgcgtgtcctgcggcaagtgcgaggcccactgcccgcagagcataaagatcagcaaatcgctgaaaaccgtcgccaagcgccttgagcctttttggttcacggccgccatatccgccgcccgatggttcacgggcttcaaggcgaagaagaggcgctaa

SEQ ID NO: 41816 - protein, 402 aa, Unknown
  Obtained from environmental sample
  DOMAIN (8)...(273): Aldo/keto reductase family
  misc_feature (1)..(402): Xaa is any amino acid
MQYRPDKFKKDLSILGFGCMRFPRVRGRIDMAKSESMLLSAVARGVNYFDSAYLYPGSEEAVGQIVAKNGLRQRIYLATKLPLFMCKSYADFDKFFNKSLERLQTDYIDYYLMHMITTPEQWRSLCDMGIEKWIDEKKTQGKIKQLGFSFHGKREDFVGVVDARDWDFCMIQYNYLDINNQASRTGLVYAASKGIPVFIMEPLLGGRLANPKSLPNKALQMMNDADPSLSPAARALRWIWNHKEVTLLLSGMSTQDQLDENIGLAERVAAPNFLSDGELGVIDKVIGIVNESNKIPCTGCGYCIPCPAGINIPGCFSSYNDSYRNGRFAALKPYVMATAALTTKRGLASACVSCGKCEAHCPQSIKISKSLKTVAKRLEPFWFTAAISAARWFTGFKAKKRR

SEQ ID NO: 41817 - DNA, 936 bp, Unknown
  Obtained from environmental sample
  misc_feature (1)..(936): n is a, c, g, or t
ttgagcaaacagctaagccccggctccgcatacggcgatttaccgactgttaccagaggcgggtacaaattcgacggctggtataccgaggcatcaggcgggactaaaatagaaccgtcaagcaggtttaccggcaacgtcacaaagctgtacgcgcactgggctgtaacggttaccttcaactccaacggcggcagcacgcccaaccccgcgaccaaacagttaaccgccggttcccgcattggcgctctgccgaccgtcaccagaagcggatacatcttcgacggctggtacactgcggctacaggcgggaccaaattaaccgcggatcattcgtatagcggcacctacacaacgattttcgcgcgctggactgccaacgcgcctgccccgaaaactgatccggcacccgctccggcaactcccgacactaaaacggttaccttcaactccaacggcggcagcgcgcccaaccccgcgaccaggcagttaaccgtcggctcccgcttcggcgctctgccgaacgtcaccagaagcggatacaccttagacggctggtacaccgcgtcttctggagggactaaattaactgcggatcattcgtatagcggcagctacacaacggtttacgcgcgctggactgccaacgcgcccgccccgcaacctccggcacctgcgcctccgcagcctgcgccagctccggcagctcccgtcaccaaaacggttaccttcaacagccagggcggtacgcccagctccacgaccaagcagataaccgtcgactcccgcttcggtacgctgccgaacgtcaccagagacggatacaccttcgacggttggtacaccgcgtcttcaggagggactaaattaaccgcagatcattcgtatagcggcagctacacaacggtttacgcgcaatggaccgccaaaacttaa

SEQ ID NO: 41818 - protein, 311 aa, Unknown
  Obtained from environmental sample
  misc_feature (1)..(311): Xaa is any amino acid
MSKQLSPGSAYGDLPTVTRGGYKFDGWYTEASGGTKIEPSSRFTGNVTKLYAHWAVTVTFNSNGGSTPNPATKQLTAGSRIGALPTVTRSGYIFDGWYTAATGGTKLTADHSYSGTYTTIFARWTANAPAPKTDPAPAPATPDTKTVTFNSNGGSAPNPATRQLTVGSRFGALPNVTRSGYTLDGWYTASSGGTKLTADHSYSGSYTTVYARWTANAPAPQPPAPAPPQPAPAPAAPVTKTVTFNSQGGTPSSTTKQITVDSRFGTLPNVTRDGYTFDGWYTASSGGTKLTADHSYSGSYTTVYAQWTAKT

SEQ ID NO: 41819 - DNA, 345 bp, Unknown
  Obtained from environmental sample
  misc_feature (1)..(345): n is a, c, g, or t
gtggcattgcaaatgctaaaagaagggaatgagcgttatttaaaagggaatcttaccgataagacagattataaggaagagcgggatgttcttgacaacgagcaagacccttttgcggtagtcctgacttgttcggattcacgcgtggctccggaaatattttttgacatgaaattgggggatattttcgttatccgcaatgccggcaatgttgtcgatacggaagctcttggaagtatagagtacgcggttgagcatcttaagaccaaattggttgttgtatgcggtcacaggcattgcggcgcggtaacggcggcgtatcaagcgggaactcggccgatctga

SEQ ID NO: 41820 - protein, 114 aa, Unknown
  Obtained from environmental sample
  DOMAIN (32)...(114): Carbonic anhydrase
  misc_feature (1)..(114): Xaa is any amino acid
MALQMLKEGNERYLKGNLTDKTDYKEERDVLDNEQDPFAVVLTCSDSRVAPEIFFDMKLGDIFVIRNAGNVVDTEALGSIEYAVEHLKTKLVVVCGHRHCGAVTAAYQAGTRPI

SEQ ID NO: 41821 - DNA, 558 bp, Unknown
  Obtained from environmental sample
  misc_feature (1)..(558): n is a, c, g, or t
atgggacagaaaagcgccgtcgaccgcctgccgaaaaaactccgcgacaagctgattgaaatgctccacgatcctgccgtaacgcaggcggaaatagtggacgccataaacgccgaggccggggagccgctcctttcaagggcgtcgatgaaccgctacgcgcaaaaatttaaacgcttcgccgaaaagaaccgccaggctaaagaaatcgccgacgcgtacatcgacaaatacggcagcgacaaccgcgtaaaacttggcaaggtggtaaacgaacaaatacgcttggccgcgtttgatctgatcggcgatattgatgaaatacaatcagacccggaaaccaagaaaaccgaaattgccgacatgctatataaattatcgcgaggccttaaagaactggagtcggccgaaaagctgaacgccgagcgcacggaaagcatccgcaaggccgcccttgccgaagccgccgaggttgtggaaaaagaaggaaagtccgccggcgttgacgatgccaagatggaaatcatcaggcgcaaaataataggcctttgcacatga

SEQ ID NO: 41822 - protein, 185 aa, Unknown
  Obtained from environmental sample
  misc_feature (1)..(185): Xaa is any amino acid
MGQKSAVDRLPKKLRDKLIEMLHDPAVTQAEIVDAINAEAGEPLLSRASMNRYAQKFKRFAEKNRQAKEIADAYIDKYGSDNRVKLGKVVNEQIRLAAFDLIGDIDEIQSDPETKKTEIADMLYKLSRGLKELESAEKLNAERTESIRKAALAEAAEVVEKEGKSAGVDDAKMEIIRRKIIGLCT

SEQ ID NO: 41823 - DNA, 837 bp, Unknown
  Obtained from environmental sample
  misc_feature (1)..(837): n is a, c, g, or t
ttgggtggaatcggaacccggagaaggctcaaattttacctttccattcagttgctgcgcggtacaaatgaaatacacacgcttttatcccctgatattcatttggagaatctccgtgtcttaaccgtggacgacgacccggatattttatcgtacttccttgaaatagcgcagagcttcggcataatgtgcgatgtctccataagcggagaaaaggcgctcgaacttataaatcaaaaaaaaggctaccatatctattttatagactggaaaatgccgggtatcgacggcatacagcttgtccgtgaaataaaggggattaataccgcggggcagcatgtggcggaaaatcccgttgtaataatgatttccgccgccgaatggggcgtgattgccgatgaagcgagagcggcgggcgttgataaattcctttcaaagcccttgttcccctctaccattgcggaagtgattaatgaatgtctgggcgtggacaaaaagcaggcggaaaaatcgcaggacgcggacatcgcaggcatctttgaggggcggcacatactgctggttgaagacgtggacattaaccgcgagattgtactgaccctgcttgaaccgacaaagctggagatagactgcgccgagaacggcgtggaagcggtccgaatgtttatcaatgcgccgaataagtacgaattgattttcatggacatacagatgcccgaaatggacggctatgaggcgacgcgctgtatcagggcgagggagactccaagggcaaaaaccataccgatagttgccatgacggcgaatgtattaaggaagatattgaaaaatgcctga

SEQ ID NO: 41824 - protein, 278 aa, Unknown
  Obtained from environmental sample
  DOMAIN (183)...(276): Response regulator receiver domain
  misc_feature (1)..(278): Xaa is any amino acid
MGGIGTRRRLKFYLSIQLLRGTNEIHTLLSPDIHLENLRVLTVDDDPDILSYFLEIAQSFGIMCDVSISGEKALELINQKKGYHIYFIDWKMPGIDGIQLVREIKGINTAGQHVAENPVVIMISAAEWGVIADEARAAGVDKFLSKPLFPSTIAEVINECLGVDKKQAEKSQDADIAGIFEGRHILLVEDVDINREIVLTLLEPTKLEIDCAENGVEAVRMFINAPNKYELIFMDIQMPEMDGYEATRCIRARETPRAKTIPIVAMTANVLRKILKNA

SEQ ID NO: 41825 - DNA, 1746 bp, Unknown
  Obtained from environmental sample
  misc_feature (1)..(1746): n is a, c, g, or t
gtgccaatacccgcatttttatcaaaacgtctcctttacatacagattctgtttaccgctttcgcgtttttgttgatggttttattaagttacttctttaccgccagaatcgtgcgggacaaccttgtacgtaatgtagacaacatgcttgacactgtggaatcccagatctactccgatctgctggaatcgcgcacgacactggataatttcgcggaatccatacgaagtttagtcatacgcggtgacggaaccgccaaactgatcgcctataataaggacttatccgcccatatactctcagaaaacaatgctactttcagtaataacggcccttttggctatatcgaaaaaatttatgacggaccgtcttttattaacggcattggatggaaaatgccggaagattgggatccgagggatcgcccctggtacaaggcggccattgaggccaatggcggcattgccgaaacagttccgtatacggacacggtgacgggcgaaattgttttatcattctcccgttgtatttttgacagcgacggcagccgtataggcgttgtctgcattgatgttcgggccggtcatattggggaaagggtcgccaataccgcttttgccaaagactcaagcgatggggtattggtcagccaggatttaacgataatcggccatagaaatccggattttatcggattaaaaatgaacaatccgataatccctctctcgtttataactgatgaattggtaagaacgggaaaaatttcaggactcgaatgggttaattacagaggcgaaaaggtcgtcggttttttcaagacgctttccaacggatggcgtcttggccttttggcgccaaaagatatatattataaacccgtatataatatggcgctgaccctcagcgccctgggcattgtcctcgcggcggtgctgattatcgtgctgattaacgttgataaggcaaaaaacaaatctgattccgagaacaggcacaagagcgcgttccttgccaacatgagccacgagatacgcacgcccatgaacgcgataatcggcatgaccacgataggaaaatccgcctctgatatcgaacacaaaaattactcctttacaaaaatagaagaagccgcgaaccacttgctgggagtaataaacgatattctggatatgtcgaaaatcgaggcaaacaaatttaaactttctccggaggaatttaatctggaggaaatgttccggcgggtggtaaatgtgattaatttccgcatagaagaaaaacatcaaaaactcacggtagatatagatccttcaattccccggactctcataggggacagtcagaggatatcgcaagtcatcaccaacctgctgggaaacgcggtaaaattcacccccacagacggcgctataaggcttgccgcgtatcccggcggagaggaaaaccagcagtatacattacagatttcggtcagcgacacagggatcggcataaaacccgaacacaaggaaaagattttcttgtcttttgagcaggcggaatccagcacaacccgcaaatacggcggtacggggctgggtctcgcgatctccaagagaatagtagaaatgatgggcggcagtatttgggtggaatcggaacccggagaaggctcaaattttacctttccattcagttgctgcgcggtacaaatgaaatacacacgcttttatcccctgatattcatttggagaatctccgtgtcttaa

SEQ ID NO: 41826 - protein, 581 aa, Unknown
  Obtained from environmental sample
  DOMAIN (332)...(397): His Kinase A (phosphoacceptor) domain
  misc_feature (1)..(581): Xaa is any amino acid
MPIPAFLSKRLLYIQILFTAFAFLLMVLLSYFFTARIVRDNLVRNVDNMLDTVESQIYSDLLESRTTLDNFAESIRSLVIRGDGTAKLIAYNKDLSAHILSENNATFSNNGPFGYIEKIYDGPSFINGIGWKMPEDWDPRDRPWYKAAIEANGGIAETVPYTDTVTGEIVLSFSRCIFDSDGSRIGVVCIDVRAGHIGERVANTAFAKDSSDGVLVSQDLTIIGHRNPDFIGLKMNNPIIPLSFITDELVRTGKISGLEWVNYRGEKVVGFFKTLSNGWRLGLLAPKDIYYKPVYNMALTLSALGIVLAAVLIIVLINVDKAKNKSDSENRHKSAFLANMSHEIRTPMNAIIGMTTIGKSASDIEHKNYSFTKIEEAANHLLGVINDILDMSKIEANKFKLSPEEFNLEEMFRRVVNVINFRIEEKHQKLTVDIDPSIPRTLIGDSQRISQVITNLLGNAVKFTPTDGAIRLAAYPGGEENQQYTLQISVSDTGIGIKPEHKEKIFLSFEQAESSTTRKYGGTGLGLAISKRIVEMMGGSIWVESEPGEGSNFTFPFSCCAVQMKYTRFYPLIFIWRISVS

SEQ ID NO: 41827 - DNA, 918 bp, Unknown
  Obtained from environmental sample
  misc_feature (1)..(918): n is a, c, g, or t
ttgcgtagcgggcccgtccgcgattacctgccctgtggtaattttatcgccggtattaacaatgggacgctggttataacatgtgtcctgattggttctctgaaactttaccagtttataaacatcgttgccgtgattatcaagcgatacctgcgccgcaggtttcgggttgcccgccctctccggttttactacaatctcctgcgatgttacgcgaagaactgttccgtttctgcgggcttttacaagcacgcccgaatcgtacgcgcattttccttccattcccgtgcctacgcgcggcgcttccgggaaaacaaggggaaccgcctgacgctgcatgttggaacccatcaaagcgcggttagcgtcgtcgtgctcaaggaaaggaatcaacgaagcggataccgaaatgatctgtttgggagagacgtccatgtattgaatgtctttcggctcgcgggttgtgtaatcgcccttacttcggcaggaaatttgatcgtcggcgaaagtgccgttgttgttcactttggcggaagcctgcgctataaaataacggtcctcgtcaattgcggaaaggtactcaatgtcagttgtcgcaattcctttgcttactttccggtatggggtttccaaaaagccgtattcgtttacgcgggtataattcgcaagcgaaacaataaggccgatattcggaccttccggcgtctcaatggggcacattctgccgtagtgggtgtaatgtacgtcgcgcacttcaaagcccgcgcggtcgcgggaaagtccgcccggccccagggcgttaaggcgcctcttgtgcgtaagctccgcaagcgggtttacctgatccataaactgggaaagctggctggaaccgaaaaattccttgatggccgcgacaatgggttttatggaaattaa

SEQ ID NO: 41828 - protein, 305 aa, Unknown
  Obtained from environmental sample
  misc_feature (1)..(305): Xaa is any amino acid
MRSGPVRDYLPCGNFIAGINNGTLVITCVLIGSLKLYQFINIVAVIIKRYLRRRFRVARPLRFYYNLLRCYAKNCSVSAGFYKHARIVRAFSFHSRAYARRFRENKGNRLTLHVGTHQSAVSVVVLKERNQRSGYRNDLFGRDVHVLNVFRLAGCVIALTSAGNLIVGESAVVVHFGGSLRYKITVLVNCGKVLNVSCRNSFAYFPVWGFQKAVFVYAGIIRKRNNKADIRTFRRLNGAHSAVVGVMYVAHFKARAVAGKSARPQGVKAPLVRKLRKRVYLIHKLGKLAGTEKFLDGRDNGFYGN

SEQ ID NO: 41829 - DNA, 450 bp, Unknown
  Obtained from environmental sample
  misc_feature (1)..(450): n is a, c, g, or t
atgatgatgacgatagcccagtctcaagatgaaataagaaaaatcttcgctgattttaaaagccctgacgataaatggaaatatttattggagattgcacgtgagcatattggaatggctgattcgctgaaacaggaaaaatttattgtgaaaggctgtgccgcaaagatgtttttagtgccagaatataaagatggcttgttatatttttttatggataccgagggaggggaatcaacgccgcttttgagcaggggcttgggctgccttgccttgaaaatttacaacgagcaaaagccagcggatattttggcagccgacccgattttttttcaagatataggtctgcaaataggattaaccccaacaagggcgaatggttttgctagtttattaaaacaaatttatatgtatgcgcaagcgtattccctaattgccgatagaaaatga

SEQ ID NO: 41830 - protein, 149 aa, Unknown
  Obtained from environmental sample
  DOMAIN (12)...(140): Fe-S metabolism associated domain
  misc_feature (1)..(149): Xaa is any amino acid
MMMTIAQSQDEIRKIFADFKSPDDKWKYLLEIAREHIGMADSLKQEKFIVKGCAAKMFLVPEYKDGLLYFFMDTEGGESTPLLSRGLGCLALKIYNEQKPADILAADPIFFQDIGLQIGLTPTRANGFASLLKQIYMYAQAYSLIADRK

SEQ ID NO: 41831 - DNA, 690 bp, Unknown
  Obtained from environmental sample
  misc_feature (1)..(690): n is a, c, g, or t
gtgggcagcggcagctatactgagaaaggcaacaacatagcgaattatagaaccaagcaaattgttgggcaggtttggatggctgagaatttgaactatgccgttgaaggcagcagatgtcacggcgaaggcggtttagtctataacgtggaaactggagatcctgatataacactatcagactctgaaatacaagccaactgcgacaaatatggccgtctctacgactgggcaactgctatggctcttccttccaaatgcaataccgttgtttccacaagtgatgcagattgcgctatagcaactcccaaccatcgtggcatttgccccagcggttggcatataccgagcgatgccgactggaatgttttgatgaaggtcgcaaatccgagctgctctgacaatactaattgtgaaggtgctgggaaaaagctgaaagcgaccagcggctggaatggagagagtggcaacggcacggatgatttcgggtttgcggctctgccgggcggcctcggctattccgatggctatttcggcagtgttggcaacggcggctactggtggagtgcctcggagaacgatgctaactacgcctgctaccggttcatgggctacttcaacgagtacgtctactggctctacctcaataagggcgactacttgttcagtgttcgttgcctccaggactag

SEQ ID NO: 41832 - protein, 229 aa, Unknown
  Obtained from environmental sample
  misc_feature (1)..(229): Xaa is any amino acid
MGSGSYTEKGNNIANYRTKQIVGQVWMAENLNYAVEGSRCHGEGGLVYNVETGDPDITLSDSEIQANCDKYGRLYDWATAMALPSKCNTVVSTSDADCAIATPNHRGICPSGWHIPSDADWNVLMKVANPSCSDNTNCEGAGKKLKATSGWNGESGNGTDDFGFAALPGGLGYSDGYFGSVGNGGYWWSASENDANYACYRFMGYFNEYVYWLYLNKGDYLFSVRCLQD

SEQ ID NO: 41833 - DNA, 879 bp, Unknown
  Obtained from environmental sample
  misc_feature (1)..(879): n is a, c, g, or t
atggtatccttcatcttgacggcatggatcacaagactaacgataaaatcgagcccatgttacagcttcaggagcggatattggcaaagctgtcaaaaaagcaaatcctcgggaggagcgcatgaaaggtccattttcgggcatttcaaaaacaaagaaataaaagaccttgaagaagacaagcaggagatgatcaggggcgtggtggagctttccgccacgactgtaaaagaagtaatggttcccaggacggacacggtattcctgcccgtaacagcgtccattgaggaagtgctttcgacgattattaagagcggtcattcccgcttcccggtttatgaggaaaccatagacagcgttatcgggattctccatgtcaaggacgtgcttaaaatccttgttgacaagaccccgttggatataaagtctcttgtccgcaagcctttctttgtgcctgtctccaaacacattgacgatctgcttaaggaactccgccgtaaaaaggtgcatatcgccgtggtagtggacgagtacggcggcgtttccggcattgtgtgtatggaagatataatagaagaaattgtcggcgacatacaggacgagttcgaccacgagaccgaagacgtagtcgccctcggtgaaaaaacctggctttgcgacgcccgcgtaaacttaagcgatcttgcggataagaccggtctggaactgccggtagacgattttgacaccctcggcggttttgtatttgaccttttcggcaagatcccggtgaaatacgaaaaaaccgtgtaccagggaaccgagcttattgtgcaggaaatggacggacataagattaaatcagtgaagatagtgggtaattttctctcgaatcactaa

SEQ ID NO: 41834 - protein, 292 aa, Unknown
  Obtained from environmental sample
  DOMAIN (210)...(288): Transporter associated domain
  misc_feature (1)..(292): Xaa is any amino acid
MVSFILTAWITRLTIKSSPCYSFRSGYWQSCQKSKSSGGAHERSIFGHFKNKEIKDLEEDKQEMIRGVVELSATTVKEVMVPRTDTVFLPVTASIEEVLSTIIKSGHSRFPVYEETIDSVIGILHVKDVLKILVDKTPLDIKSLVRKPFFVPVSKHIDDLLKELRRKKVHIAVVVDEYGGVSGIVCMEDIIEEIVGDIQDEFDHETEDVVALGEKTWLCDARVNLSDLADKTGLELPVDDFDTLGGFVFDLFGKIPVKYEKTVYQGTELIVQEMDGHKIKSVKIVGNFLSNH

SEQ ID NO: 41835 - DNA, 510 bp, Unknown
  Obtained from environmental sample
  misc_feature (1)..(510): n is a, c, g, or t
ttgaatatccaaagggagaagagcaggagaagaatgaaccgggtaatggtacacgccgctgagatggaaattcccggatgggtcaaagccctcaggagttttgtccgggaagtccttttgattctgaaaaaggacagatgggatctttccatcctgctctgcggggacaagacgataaaagacctcaatacgatatacaggggaaaagcggaagccacggacatcctttcattctcgttaggcgaaagcgcgtcgtttccccctgggggaaaacgacgcggccgacatacgccgggggacatagtgatttcgcttgacagcatgaaggaaaacgcccgccgctttcaggttgaagaggatgaggagttacgccgtctgctgattcatggtatccttcatcttgacggcatggatcacaagactaacgataaaatcgagcccatgttacagcttcaggagcggatattggcaaagctgtcaaaaaagcaaatcctcgggaggagcgcatga

SEQ ID NO: 41836 - protein, 169 aa, Unknown
  Obtained from environmental sample
  DOMAIN (54)...(152): Uncharacterized protein family UPF0054
  misc_feature (1)..(169): Xaa is any amino acid
MNIQREKSRRRMNRVMVHAAEMEIPGWVKALRSFVREVLLILKKDRWDLSILLCGDKTIKDLNTIYRGKAEATDILSFSLGESASFPPGGKRRGRHTPGDIVISLDSMKENARRFQVEEDEELRRLLIHGILHLDGMDHKTNDKIEPMLQLQERILAKLSKKQILGRSA

SEQ ID NO: 41837 - DNA, 858 bp, Unknown
  Obtained from environmental sample
  misc_feature (1)..(858): n is a, c, g, or t
atgcgggccgcggccttcacggagtatccgtccatgctcttatgggccgccattaacggcattgtatcgggaatgttagtcctcggcgtactgccgccgctggagcatgtcatgaaagccgccaccaccttcaggctgatcgagctttccgacctgaacgcgcctatccttcgaaaactctttaccaccgcgcccggcacttacagccattcgctgatggtcgccacgcttgccgagcaggcctgccaggacataggcgcgaacgccctgctcgcgagggtgggcggttattaccatgacatcggcaaaatggataaccccgattatttcatagagaaccaaaccgaccacaaccggcacgacgatatcgccccgcggctctcggccacggttatacggagccatctgaagctggggattgaaaaagccagaagcctgggcctgccggcggacgttgtagacattatcgcggaacaccacggcaactcccttatagtgtggttttacaaaaaagcctcccagcaggaagatcaggttaattccgatgattttgcctatccgggaaccccgccccgttccagggaatccgccgtggttatgcttgccgacgttaccgaagccgcggtcaggaccatggcaaagcccaccgtggcaaaaatggaaaaatttatccagcagctttttgacgggaaagttgagaccggacagcttgcccagtgcgatcttactttcagggaccttgagacgattaaaaaagcttttataaaagtgctggcggggtactatcattccagaattgaatatccaaagggagaagagcaggagaagaatgaaccgggtaatggtacacgccgctga

SEQ ID NO: 41838 - protein, 285 aa, Unknown
  Obtained from environmental sample
  DOMAIN (67)...(208): HD domain
  misc_feature (1)..(285): Xaa is any amino acid
MRAAAFTEYPSMLLWAAINGIVSGMLVLGVLPPLEHVMKAATTFRLIELSDLNAPILRKLFTTAPGTYSHSLMVATLAEQACQDIGANALLARVGGYYHDIGKMDNPDYFIENQTDHNRHDDIAPRLSATVIRSHLKLGIEKARSLGLPADVVDIIAEHHGNSLIVWFYKKASQQEDQVNSDDFAYPGTPPRSRESAVVMLADVTEAAVRTMAKPTVAKMEKFIQQLFDGKVETGQLAQCDLTFRDLETIKKAFIKVLAGYYHSRIEYPKGEEQEKNEPGNGTRR

SEQ ID NO: 41839 - DNA, 825 bp, Unknown
  Obtained from environmental sample
  misc_feature (1)..(825): n is a, c, g, or t
atggtactgccgtcgctggttcccgaaggaacaggcaatgtttccgtaagcctttcgacttcacggatggcgacgcttaaagaagccgtgcgatatttgctggattacccttatggctgccttgaacagcgcacggcccgcctgctgccaatcgtcgcctttggcgagtaccttgacacgttcaacctcgaaagcccgcttgtcgcttttggcgagtaccttgacaccttcgatcttgcaaacccgttgcgcgggttttctccatggaacccccaaaaactcgttgagaaagaactggcggaaatcgccaaattccaactggccgacggttcgttcccctattggccggggggccgctacggcagtcttttcgtcagcataagggtggcgcatatcgcgacgctggcaaaggcaaaaaacatgaaggttccggattcgcttgatacacgaaaacttttatcgtatatcggaacagaatcaaacaatgttaatttcaaagacccgtttctcaaaggttactcattgtgggtcagaaccatgtataacgaaaaaatcagttcggaaataacagcctttttaacgcgcggggacgagctgggagtttcaggctgggcattcgcgggacttgccgcgctggagatggggcagaaagatttggcagtatccgccggggatcgcgtgcgccgtttcatccggccgggaccccgcagcctggacctggccgacacctacgagcggcagggcaattactgggactacgatatcgaccgttacgccctggcgctgatgctcttccattcgctcaatccaaggacgatgatatga

SEQ ID NO: 41840 - protein, 274 aa, Unknown
  Obtained from environmental sample
  misc_feature (1)..(274): Xaa is any amino acid
MVLPSLVPEGTGNVSVSLSTSRMATLKEAVRYLLDYPYGCLEQRTARLLPIVAFGEYLDTFNLESPLVAFGEYLDTFDLANPLRGFSPWNPQKLVEKELAEIAKFQLADGSFPYWPGGRYGSLFVSIRVAHIATLAKAKNMKVPDSLDTRKLLSYIGTESNNVNFKDPFLKGYSLWVRTMYNEKISSEITAFLTRGDELGVSGWAFAGLAALEMGQKDLAVSAGDRVRRFIRPGPRSLDLADTYERQGNYWDYDIDRYALALMLFHSLNPRTMI

SEQ ID NO: 41841 - DNA, 846 bp, Unknown
  Obtained from environmental sample
  misc_feature (1)..(846): n is a, c, g, or t
ttgccacgtccccttattgaaaggcagcgcaagggcgtatggaacaacacgncatcttctttctgggcggcgcttgcctttggcatgttaggcgattccgaatcagccgaatggaaaacggctaacggcgcgccgtttacgccgccgcctgcggcgccgccgctcgcggtgacaacgagccttggcggaacctcactgtttaaggccgaatttaaaacttacgtcggggtcccagtgtcgtttaacgggcacttcacggaaaagcccataatcgatcttcagcgcgacacccttttgcccctgcggatcgagcgttcggggcccggcagactctactacacggcaagcctgcgctacggcattccagtcgaactggccgccgcccgcgatgaggggattagtgtgtttatggaaacctttgattcagaaggcaaacccgtcaggaacggcagactccaggccggcaagacctatacaaggcgcgttaccgtttccacttcccgcgaccgcacttttgtcgctctgcgctcgcccatcccctcaggggctgaaattgtagacgccgtctttgtcaccagttccaccgttcctccctcgccaagaaatgaatctgatgatagagatgaagacgattggtataactacaaaccggggccggtgcgtttcctgatggacgacgaggcccgtttccactgggacttttttaaggcgggcatggagcangttgaattccggttccgcgcggtaatgcccggtatataccccaccccgcccgccgtctccgagtgtatgtacgaggaggaaattttcggcagaacagccggggaactgatcaggattgagtaa

SEQ ID NO: 41842 - protein, 281 aa, Unknown
  Obtained from environmental sample
  misc_feature (1)..(281): Xaa is any amino acid
MPRPLIERQRKGVWNNTXSSFWAALAFGMLGDSESAEWKTANGAPFTPPPAAPPLAVTTSLGGTSLFKAEFKTYVGVPVSFNGHFTEKPIIDLQRDTLLPLRIERSGPGRLYYTASLRYGIPVELAAARDEGISVFMETFDSEGKPVRNGRLQAGKTYTRRVTVSTSRDRTFVALRSPIPSGAEIVDAVFVTSSTVPPSPRNESDDRDEDDWYNYKPGPVRFLMDDEARFHWDFFKAGMEXVEFRFRAVMPGIYPTPPAVSECMYEEEIFGRTAGELIRIE

SEQ ID NO: 41843 - DNA, 690 bp, Unknown
  Obtained from environmental sample
  misc_feature (1)..(690): n is a, c, g, or t
ttgactcgatatggaacagaacaagcagcgtctgctccgcagccgtttcttttcgcggttggcgacggcaatcattccctggcaagcgccaaaggaatttgggatgaatacaagagggcgaatggagaagtaaataaccacccctgccgctatgcccttgttgaaattgagaacatctatgatccggccattaaattcgagccgatccaccgcgttgtgtttggtctggggtttgaggaggctcttgatattctttcagcgcttccgggtttttccggccgtatgattggagcggcagaggaacttgcccgactgatccgcgaacctgtaaaggggaaccgttttggcattgtttgtaaaaacgctgctaaccaggatcgttacgcgctagtcgagacagaggccggcggcgtgcctacggcatttttacagcccctgcttgataataacgtcaataattccaaaggcgctttgtccgttgactacattcacggcgaggatgaattgttccgccttgcgcgtggctatgactccggaaaacctgtaaccggcatactgctgccgcctgtacagaaagccggtttttttgaaacaatcgcccaaaacggccccctgccccgtaaaagtttttccatgggggaggccttcgagaagcgcttttatatcgaatgcagaaggctatttggttag

SEQ ID NO: 41844 - protein, 229 aa, Unknown
  Obtained from environmental sample
  misc_feature (1)..(229): Xaa is any amino acid
MTRYGTEQAASAPQPFLFAVGDGNHSLASAKGIWDEYKRANGEVNNHPCRYALVEIENIYDPAIKFEPIHRVVFGLGFEEALDILSALPGFSGRMIGAAEELARLIREPVKGNRFGIVCKNAANQDRYALVETEAGGVPTAFLQPLLDNNVNNSKGALSVDYIHGEDELFRLARGYDSGKPVTGILLPPVQKAGFFETIAQNGPLPRKSFSMGEAFEKRFYIECRRLFG

SEQ ID NO: 41845 - DNA, 555 bp, Unknown
  Obtained from environmental sample
  misc_feature (1)..(555): n is a, c, g, or t
atgcgcttcgggtgggacctgaaaaaattggaggcggagggcaaactcaaggtcatcttctccgaccccgagacggcgatatgcgagttcgacaatcccgacgggcgattcgtccggcttttggaggaactcggggtgaagcgcgtagtcgtggactccatgacccacttcgagccgctggcgcaagacccgcttgcgcggcgcgatctggaaaggcgcttcataaacgctctgaagcgcgagggcgtcacaagcatcctgctgcgcgagaacgatagtctcttgggtaacctctcgcagatcacaagcaagataccgtttatagtggacacctacgtgcttttgaggtacgtggagatagacagcgccatagagaaggcgctatgctttttgaagatgcgcggcagcgaccaccaaaaggacatacgctgcttcagcgtgaccgataagggcatagagatttcatcgaaattcagcggcagggagggcattatgagcgggatcacccactcgaaaccccaagacgcattcatgaacgcattcgggaaaaagtga

SEQ ID NO: 41846 - protein, 184 aa, Unknown
  Obtained from environmental sample
  DOMAIN (2)...(87): KaiC
  misc_feature (1)..(184): Xaa is any amino acid
MRFGWDLKKLEAEGKLKVIFSDPETAICEFDNPDGRFVRLLEELGVKRVVVDSMTHFEPLAQDPLARRDLERRFINALKREGVTSILLRENDSLLGNLSQITSKIPFIVDTYVLLRYVEIDSAIEKALCFLKMRGSDHQKDIRCFSVTDKGIEISSKFSGREGIMSGITHSKPQDAFMNAFGKK

SEQ ID NO: 41847 - DNA, 423 bp, Unknown
  Obtained from environmental sample
  misc_feature (1)..(423): n is a, c, g, or t
atgaagaagaaaatcctagtcattgaggacgacagcgacatcgccgatctcgtcaaactcgtgcttgagaccgatatgtttgaggtgcgggcggttctcgaaccggagtcggccctaagcgcggtcaaagagtataggccggacgccatccttctcgacatctgtatgccggtattggacggttgggcggtgttcaagcagatccgaaatagcgaagagtttaaaaacgtccccatcgcgatcctatccggcaagagtcagcagttggaccagatggtgggcctgcacataatgaacgcggacgcgtacatatcgaaaccgttcgggaaacaggaactaatagataaaacgtatgggctcttcaaaagaaagaataggcgtgtcttggtcatcgacgacgacgcggacatccttggggtgtaa

SEQ ID NO: 41848 - protein, 140 aa, Unknown
  Obtained from environmental sample
  DOMAIN (3)...(118): Response regulator receiver domain
  misc_feature (1)..(140): Xaa is any amino acid
MKKKILVIEDDSDIADLVKLVLETDMFEVRAVLEPESALSAVKEYRPDAILLDICMPVLDGWAVFKQIRNSEEFKNVPIAILSGKSQQLDQMVGLHIMNADAYISKPFGKQELIDKTYGLFKRKNRRVLVIDDDADILGV

SEQ ID NO: 41849 - DNA, 1284 bp, Unknown
  Obtained from environmental sample
  misc_feature (1)..(1284): n is a, c, g, or t
atgagcgaatacattattgacggcggtgttccgctgaacggtacggtaaaggcaagcggcaataaaaacgccgccctgccgtgtattgcggcggcgctgttaaccaacgaacctgtcatattaagaaatatccccgagatagaagacgtacaggtgatgcttgaaatatacgcttcattgggaggaatagtagaacctcttgagcccaacgcgttccggatgcagcttgctaatatcaccgattccatgatacctgtcgagcaggcaaagaagatcagggcttcgatattgttcgccggcccgcttctggcgcagaccggcaaggtaatgctgccgccccccggcggggacgttataggcaggcggcggctggacacccactttctcgcgcttacggaactgggggcaaaggtaaaaacaaaagatacttttacctttaccgcaaaatcgctgaaaggggccgacatttttctggacgaggcgtccgttaccggaactgaaaacgcgataatggcggccgcgctcgcggatggaaagacgatactcaccaacgcggcgggcgagccgcatgtgcaggatctctgccgaatgcttgtttctatgggcgcgcagatcgagggcatcggttcaaacatattgactatcaccggcgtaaaaaaactttccggctgtgactttacaataggggctgattacatggaggtaggttcctttatcgggcttgccgccgtcaccggaggggatctccacatagaagggacgcggccccaggatctgcgcccggcgaaaatcgcctttggcaagctgggcatttcatgggcgcatgagggaacaactatccatgtcccgcaaaaacagccgctggaggttaactgcgacttagggggcatgataccaaaaatcgacgacgcgccctggcccggcttcccccccgaccttaccagcattatcaccgttgttgccacgcaggtaaaaggaacggtgttaatccacgaaaaaatgtttgaatcgaggatgttctttgtggacaagctcatcggcatgggggcgcggatagtgttatgcgatccccaccgggccgttgtttcaggcccagcgaggctgcatggctcagagcttaccagccccgacgtccgcgccggcatggcaatgctcatagccgccctctgcgccgaaggccgcagcgttatacgcaacgtctaccagatcgagcgcggttacgagcgcctggtagaaaggctttccgcccttggagcgcttgtaacaaagagcaaagagaaatga

SEQ ID NO: 41850 - protein, 427 aa, Unknown
  Obtained from environmental sample
  DOMAIN (6)...(414): EPSP synthase (3-phosphoshikimate 1-carboxyvinyltransferase)
  misc_feature (1)..(427): Xaa is any amino acid
MSEYIIDGGVPLNGTVKASGNKNAALPCIAAALLTNEPVILRNIPEIEDVQVMLEIYASLGGIVEPLEPNAFRMQLANITDSMIPVEQAKKIRASILFAGPLLAQTGKVMLPPPGGDVIGRRRLDTHFLALTELGAKVKTKDTFTFTAKSLKGADIFLDEASVTGTENAIMAAALADGKTILTNAAGEPHVQDLCRMLVSMGAQIEGIGSNILTITGVKKLSGCDFTIGADYMEVGSFIGLAAVTGGDLHIEGTRPQDLRPAKIAFGKLGISWAHEGTTIHVPQKQPLEVNCDLGGMIPKIDDAPWPGFPPDLTSIITVVATQVKGTVLIHEKMFESRMFFVDKLIGMGARIVLCDPHRAVVSGPARLHGSELTSPDVRAGMAMLIAALCAEGRSVIRNVYQIERGYERLVERLSALGALVTKSKEK

SEQ ID NO: 41851 - DNA, 459 bp, Unknown
  Obtained from environmental sample
  misc_feature (1)..(459): n is a, c, g, or t
gtgttaaatgaatatcttgatataaaactggatgatgagatacgtgaaaaactcggtggggtctattcgatttcctcaggcgtgtccgttacgcctgttccgcagggcgaactttccatgcaggtgtattttagctgcgatccaaagcgggcgcgggaactccaaaccgccgttatcgcgatattgaaccaggtggcggacggcgttatagactgcgatacttttacaaaagccgtggaagcccccaagaaagaatgggaagtctcgattcagagcaacgcctatatcgcacaaagctacgccaactcgtcggtattgctcagacttccgctgtcgcggctggacaagcggccaaaattgtttgacgccgtgacacagactgatattcaaaaggtatgcaagcagctattacaaagcaatggaccggcgattgtgatgctaatgccagatagcaaatag

SEQ ID NO: 41852 - protein, 152 aa, Unknown
  Obtained from environmental sample
  misc_feature (1)..(152): Xaa is any amino acid
MLNEYLDIKLDDEIREKLGGVYSISSGVSVTPVPQGELSMQVYFSCDPKRARELQTAVIAILNQVADGVIDCDTFTKAVEAPKKEWEVSIQSNAYIAQSYANSSVLLRLPLSRLDKRPKLFDAVTQTDIQKVCKQLLQSNGPAIVMLMPDSK

SEQ ID NO: 41853 - DNA, 1233 bp, Unknown
  Obtained from environmental sample
  misc_feature (1)..(1233): n is a, c, g, or t
atggcttttcctcccgaaggacgcggaattgctgctgatttttccggcattgttcacgcaggcgaaaccaatacacaagaagaatttgattatctgaattacatgggtgtaagctgggtgcttcatactttttattggaacgggattgagcctcaacagaataattggaattttgaaagttatgatgtcatggtgaataatgccggcaaagcaggcattaaagttctgggtgttttagcttatgacaacaggtggatacatcctgatcaaaaaggccatgattatattcctcctgaacggatgccggattttcttaattatgtcagaagaacagtagagcatttcaagggcagagtaggcgcttggtgtatatggaatgagcctaacagcagccgtttttggaacggaaccgttgacgaatatacagaattaatccgtcaggcagcggatgctattaaggaaacagatagtgacgtgattgttctgggaggagcttttaaccgcaatgttaccgggctgccaaaaaaaatgataaacagactttttgaatcaggcgctatggaaaatgttgacgctgtggcttttcatccttatgaaataagcgctaatcgctctttaaagctgtacaaacagtttgaagaaatagtaaatcaatacggttataaggataaaatttggattaccgaggttggttaccctaccggaggctggtatccaaccaaggtttcagaggagaactttcctttaaggatagtaaagactttcactcttctggctgccggcggagcaagaagattgttttggtatcaaatgtttgacgcttccaatccttcaaaaagcaattccgaggatttttttggtctggtaaggagtgaaaatgattatacttctaaaggggccgaagcattccgcttgtgcgcgtcatatatctccggttcagtatgttatgcgcttacgcaggataacctgcctgcgtctctgcgggttttttattttaaaagggaaaacggcggagctttagttttatggacagatggatttgattctacgcaggttaatttaaaattgccgggtatagatcatctgcggcatgatatttttactggaaacgcaagttctgtaaattctgacattacaattaaagcggaaagcgaaccggtgtttatcacatggcggactgttncagattcatcggagaatgaagaaaaccctgntattatgggaaaaaggtaa

SEQ ID NO: 41854 - protein, 410 aa, Unknown
  Obtained from environmental sample
  misc_feature (1)..(410): Xaa is any amino acid
MAFPPEGRGIAADFSGIVHAGETNTQEEFDYLNYMGVSWVLHTFYWNGIEPQQNNWNFESYDVMVNNAGKAGIKVLGVLAYDNRWIHPDQKGHDYIPPERMPDFLNYVRRTVEHFKGRVGAWCIWNEPNSSRFWNGTVDEYTELIRQAADAIKETDSDVIVLGGAFNRNVTGLPKKMINRLFESGAMENVDAVAFHPYEISANRSLKLYKQFEEIVNQYGYKDKIWITEVGYPTGGWYPTKVSEENFPLRIVKTFTLLAAGGARRLFWYQMFDASNPSKSNSEDFFGLVRSENDYTSKGAEAFRLCASYISGSVCYALTQDNLPASLRVFYFKRENGGALVLWTDGFDSTQVNLKLPGIDHLRHDIFTGNASSVNSDITIKAESEPVFITWRTVXDSSENEENPXIMGKR

SEQ ID NO: 41855 - DNA, 477 bp, Unknown
  Obtained from environmental sample
  misc_feature (1)..(477): n is a, c, g, or t
ttgccttccccaccacgcattttttctttgacttccgtcttcatttctttgcgttttatcagcatggttcaggatagaatttttacgggaaaaagggaaggggtgtgtacggtatgtaattttttaccgctaattttatctcttgacagactgttgaatatattctacactttaattatgaaagagatacgcagatcggatgtctttattaaatggctcaacaagcttcgggatgaccgtgccgtagcgcgtatcaataagcgtattaggcggctttcagaagggaaccctggtgatgtggagcctgccggagagggcatctcagaaatgcgtgaggactacggccccggttaccgtgtttattacaaggaaactaaaaaggaaataattatcctgctgtgtggcggcgacaaacgcactcagcaagcagatattgccaatgccaagaaaatagccaaactatatgaggaggagtaa

SEQ ID NO: 41856 - protein, 158 aa, Unknown
  Obtained from environmental sample
  DOMAIN (104)...(155): Phage derived protein Gp49-like (DUF891)
  misc_feature (1)..(158): Xaa is any amino acid
MPSPPRIFSLTSVFISLRFISMVQDRIFTGKREGVCTVCNFLPLILSLDRLLNIFYTLIMKEIRRSDVFIKWLNKLRDDRAVARINKRIRRLSEGNPGDVEPAGEGISEMREDYGPGYRVYYKETKKEIIILLCGGDKRTQQADIANAKKIAKLYEEE

SEQ ID NO: 41857 - DNA, 387 bp, Unknown
  Obtained from environmental sample
  misc_feature (1)..(387): n is a, c, g, or t
atgaggaggagtaagagtatgagaaccgtaaaaaagacaagaaagccggcgaaaacggcaagggctgcgaaggcaataaaaccggcaaaagcagagaaaaaagttaccttttcaaaatgggaccccgctgaaatcataacgactaaggagagggttattgcttttcttgaggaagcccttgaagaaaacgatcccgattttcttctggaaactataggacatatagcccgttcaaaaggcatggcgcaaatcgccagagagttgaatcttgaccgggttggcttgtataaatcgcttgctcctgacggaaacccttctttcaagacaatatacaagttgtttgatattttgggactgcgaatgaaactggagcaaaaaagcgcatag

SEQ ID NO: 41858 - protein, 128 aa, Unknown
  Obtained from environmental sample
  misc_feature (1)..(128): Xaa is any amino acid
MRRSKSMRTVKKTRKPAKTARAAKAIKPAKAEKKVTFSKWDPAEIITTKERVIAFLEEALEENDPDFLLETIGHIARSKGMAQIARELNLDRVGLYKSLAPDGNPSFKTIYKLFDILGLRMKLEQKSA

SEQ ID NO: 41859 - DNA, 396 bp, Unknown
  Obtained from environmental sample
  misc_feature (1)..(396): n is a, c, g, or t
atgcgccaggttcnccttaagcgtctgtataacgccggtgttacattgtgtggatcatcggattcaccgatacagaatcttgacccgtttctgcagatgctgggcatgacagattttaccattcccggtgaatctcttacaaactacgaagcgctgcgctgttatacggcgcatcctgcgcgcattgtggaacaggaatcccattttggcgttcttgaacccggtaaagaagccagctttttcacaaccgaaaccgatctgataagagccggccccgaagcgttatccgaaacaaaagtgatgcatacatttatcaggggaaaagaactggcccgtaaaaaaggaacgcttcccgaatttttatgtatgctgctgcgccgcgcgcggaaaatctag

SEQ ID NO: 41860 - protein, 131 aa, Unknown
  Obtained from environmental sample
  misc_feature (1)..(131): Xaa is any amino acid
MRQVXLKRLYNAGVTLCGSSDSPIQNLDPFLQMLGMTDFTIPGESLTNYEALRCYTAHPARIVEQESHFGVLEPGKEASFFTTETDLIRAGPEALSETKVMHTFIRGKELARKKGTLPEFLCMLLRRARKI

SEQ ID NO: 41861 - DNA, 711 bp, Unknown
  Obtained from environmental sample
  misc_feature (1)..(711): n is a, c, g, or t
atgcttcgttccgattcaacattttccagttttgaagcccgtgttttagaccttgccctcgttctgcatgccgagcacggcggcggcaataactcgacatttacgacccatgttgtcacctcttcccataccgatacctattcgtcggttgtagcgtctttaggctccctcaaaggtccccggcacggcggagcgaatgtcaaggtcgtgcggatgttccgcgacatgaaagaaaaaatttccgactggaatgacgacggccaaataaccgcctatcttgaaagaatgctcaacaaagaggaatttgaccgttcaggtttgatttacgggatgggacacgcggtctattcgctctccgatccccgcgcgcttgtcttccgccgttttgtcgaacagcttgccgctgaaaaagaccgtgttgatgaatacaaactctattcaaaggtagaaactctggccccgcaaatcatttcgaaggttcgcaagatttacaaaggcgtaagcgccaacatagacttttactcgggctttgtctacagcatgatggatctgcccgaagagctttttacaccgctgtttgccgtcgcccgcatagcaggctggagcgcccaccgcatagaggaacttgtaaacgccgggaaaattatccgccccgcgtacaagtcggtaacggtaaagcagccttatgtcccaatgaaggaaagaacttaa

SEQ ID NO: 41862 - protein, 236 aa, Unknown
  Obtained from environmental sample
  DOMAIN (1)...(218): Citrate synthase
  misc_feature (1)..(236): Xaa is any amino acid
MLRSDSTFSSFEARVLDLALVLHAEHGGGNNSTFTTHVVTSSHTDTYSSVVASLGSLKGPRHGGANVKVVRMFRDMKEKISDWNDDGQITAYLERMLNKEEFDRSGLIYGMGHAVYSLSDPRALVFRRFVEQLAAEKDRVDEYKLYSKVETLAPQIISKVRKIYKGVSANIDFYSGFVYSMMDLPEELFTPLFAVARIAGWSAHRIEELVNAGKIIRPAYKSVTVKQPYVPMKERT

SEQ ID NO: 41863 - DNA, 519 bp, Unknown
  Obtained from environmental sample
  misc_feature (1)..(519): n is a, c, g, or t
ttggaaaattcatggccggcggtcttatgctgctggaacttgtcagaggaggaatgtatgaacaacctcaattctatcttaatcgaaggcaatctggtgagagaccctctgcttcgatccacccccaaagggacgcaggtttgcacaatgagccttgcgtcgaaccgttattacaaacaggagtccggtttcgagaaggaagtatccttcttcaacgtggagtcctggtcccgtcttgccgagtcttgttacaacaagggaaaaaaaggcaggggagtgcgcgttgtaggccgtctgaaacaggatcgctggacgggcgccgacggaaaaccgcagtccagggttaccattgtggcggaacacgtggaattccgccccgaattcaagaaggacgcgaaaccggcggaagaagccgccgaaagcccgccttcgctgtattccggagaaattgtcgaagaagagtacgatgaggaaacggaggtgatgtcggacaaagaactggcggccgtaaccttctag

SEQ ID NO: 41864 - protein, 172 aa, Unknown
  Obtained from environmental sample
  DOMAIN (23)...(125): Single-strand binding protein family
  misc_feature (1)..(172): Xaa is any amino acid
MENSWPAVLCCWNLSEEECMNNLNSILIEGNLVRDPLLRSTPKGTQVCTMSLASNRYYKQESGFEKEVSFFNVESWSRLAESCYNKGKKGRGVRVVGRLKQDRWTGADGKPQSRVTIVAEHVEFRPEFKKDAKPAEEAAESPPSLYSGEIVEEEYDEETEVMSDKELAAVTF

SEQ ID NO: 41865 - DNA, 393 bp, Unknown
  Obtained from environmental sample
  misc_feature (1)..(393): n is a, c, g, or t
ttgcctgtgattattttttcggcgtcgggcggcgcgcgtatgcaggagggaattatctcccttatgcagatggcgaaaacatcaggcgctgtcgcaaggcacacggaagccggcggactttatattaccgtaattacagacccaaccacaggcggcgttacggcatccttcgctatgttaggcgacattattctcgccgagccgggggttactcttggttttgccggaaaacgggtaatacaggataccatcggagcggttttgccggacagattccaaacttcggaatttgtttatgaacacggatttatcgacgcggttatccaccgcaaggatatgccgcaggaacttgcgcatattatcagattacacggctacaaaggaggaaagtaa

SEQ ID NO: 41866 - protein, 130 aa, Unknown
  Obtained from environmental sample
  misc_feature (1)..(130): Xaa is any amino acid
MPVIIFSASGGARMQEGIISLMQMAKTSGAVARHTEAGGLYITVITDPTTGGVTASFAMLGDIILAEPGVTLGFAGKRVIQDTIGAVLPDRFQTSEFVYEHGFIDAVIHRKDMPQELAHIIRLHGYKGGK

SEQ ID NO: 41867 - DNA, 804 bp, Unknown
  Obtained from environmental sample
  misc_feature (1)..(804): n is a, c, g, or t
atggctttgaatgtgcaacaaaaactggaccttcttaaaaatcttggtcgtcccactattaacgattacattccgctggtttttaatgattttatagaattacacggcgaccgctatttcagcgacgacccggccgtattaagcggcatctgcttgttaggtgacattccagttaccgtaatttcgcaggtaagggcgaaagatattgagaccttgcagaagattaacttttccatgcctcatcctgaagggtacagaaaatctatgcgcctcgcgaagcaggcggaaaaatttaaacgccccattatttgttttattgacactcccggagctttctgcggcgtaggcgcggaagaacgaggacagggtgaagctatcgcccgcagtcttcatgattttatgatgcttaaaacgccggttatttccgtagttctgggcgaaggcggatcaggcggagcgcttgctctcggcgtttgcgatgaacttgccatgcttgagaacgctctctattcggttatctcgccgaagggctttgcttccattttgtggaaagacggttcaagggaaagggaagccgccgagctaatgaaaattaccgctgaagaccttaaacgtttcggcgtatgcgatcatatcgtcgctgaaccggacggcggggccgcgaaagacataaaccttaccgcgcagaatatcgcctcgtggcttggacagaccgtaaataagttaacaaaagaggattatgacggccttcccgaaaaacggtatcagaagttccgcaaaataggcgtatttacgggcggttga

SEQ ID NO: 41868 - protein, 267 aa, Unknown
  Obtained from environmental sample
  DOMAIN (1)...(96): Acetyl co-enzyme A carboxylase carboxyltransferase alpha subunit
  misc_feature (1)..(267): Xaa is any amino acid
MALNVQQKLDLLKNLGRPTINDYIPLVFNDFIELHGDRYFSDDPAVLSGICLLGDIPVTVISQVRAKDIETLQKINFSMPHPEGYRKSMRLAKQAEKFKRPIICFIDTPGAFCGVGAEERGQGEAIARSLHDFMMLKTPVISVVLGEGGSGGALALGVCDELAMLENALYSVISPKGFASILWKDGSREREAAELMKITAEDLKRFGVCDHIVAEPDGGAAKDINLTAQNIASWLGQTVNKLTKEDYDGLPEKRYQKFRKIGVFTGG

SEQ ID NO: 41869 - DNA, 1254 bp, Unknown
  Obtained from environmental sample
  misc_feature (1)..(1254): n is a, c, g, or t
atgtcggtacagggaaacacggtgattcacggctggattatctcaaataaaaatgaaaaaatagacgacgtacttgtctccgttttccgctccccaaaaagttacacgggacaggacagtcttgacatttgctgtcacggcggcatgaccgccggaaaagccgtaatggcggcgttaaaaagcgcgggtttccgagacgcgcttcccggcgagttcaccttccgcgcatttatgaacggcaaactcgatcttacaaaagccgaatccgtcatggaacttgtttccgcaaaaacggaaacaagccgccgccacgctgtcagtcgattatcaggctccttacacaatgaaattgacggtattaaaaaactgttagtagaggttcttgccgcagtagaaatttatcttgactactctgaagatgaaataagcgccgacgcggaagaagctgaaggcaaactacctaaaaaagataccgcgttggaagcgttaacgcgtctaaaaaaattgtccgcatcctggcagcttgaacgcatttttcaggaaggaattacagtagtaatagccggttgccccaactccggcaagtccagcctttttaacgccctgttaaaagaagatcgctccattgttacggaaatcccgggcacaacccgcgactggattgaagcgtgggtcagtattgaaggaataccaatccgccttattgacacggcaggtctacgcgagacgggagactccgttgaaaaaataggcgtagaacgcagtcgcaaacttttagaagagagcgatattattctttatttgattgacggctcgcgcggcctgacagacgaagacaaagcttttatagcgaacataaacagacacattctagtctggaataaatgcgatattgccccactgccggaatcattgcgagttagcggacaaatcccaattagtgtcagcgcgaaaacaggcgaaggactggttgaactcttcacggcaattacatccgaagcaggaataaaagatttacaattacacaatgattcatcatccgtcgccctcggcacagtacgccaaaaaaatcttgtcgatgccgcctgcgtctctcttgaagaagctctaaccctctcagataacgatgaacctttggacataatcgcccccttattaaaagatgccgtcaactctcttggtgaaatcacaggggaagtttccactgctgaccttctggaaaaaatgtttagtaacttctgtgtaggaaagtga

SEQ ID NO: 41870 - protein, 417 aa, Unknown
  Obtained from environmental sample
  DOMAIN (183)...(297): GTPase of unknown function
  misc_feature (1)..(417): Xaa is any amino acid
MSVQGNTVIHGWIISNKNEKIDDVLVSVFRSPKSYTGQDSLDICCHGGMTAGKAVMAALKSAGFRDALPGEFTFRAFMNGKLDLTKAESVMELVSAKTETSRRHAVSRLSGSLHNEIDGIKKLLVEVLAAVEIYLDYSEDEISADAEEAEGKLPKKDTALEALTRLKKLSASWQLERIFQEGITVVIAGCPNSGKSSLFNALLKEDRSIVTEIPGTTRDWIEAWVSIEGIPIRLIDTAGLRETGDSVEKIGVERSRKLLEESDIILYLIDGSRGLTDEDKAFIANINRHILVWNKCDIAPLPESLRVSGQIPISVSAKTGEGLVELFTAITSEAGIKDLQLHNDSSSVALGTVRQKNLVDAACVSLEEALTLSDNDEPLDIIAPLLKDAVNSLGEITGEVSTADLLEKMFSNFCVGK

SEQ ID NO: 41871 - DNA, 1338 bp, Unknown
  Obtained from environmental sample
  misc_feature (1)..(1338): n is a, c, g, or t
gtggaaatggtgaacggcattgtcggctacgcctgccatattttttacggcgccaaggctgtgcgctttgtcatcgggcggaactgcaacctgaaatacggggcgcggctgatccattcggtgttaggcgataactcgacggtgtcctgctgcgagatactcaataacctgatctttcccgtgcacgagcagcaccacaacaactcttttttaatcgcgagcctgatacaggggcagtccaacatcgcggcggcggccaccatcggcagcaaccacaacagcagggccaacgacggcgaactgcgcgcgaaacggggtttctggcccggactggcggtgacattaaagcacccgagcgtctttgcctcgtatgtcattatcgccaaaggggaatatccctcggaactcaatatccccctgccgttttccctggttgccaacaatgtccataaaaaccggctggaactgtcgcccgcgtacttctggcttcacaacctctacgcccttgagcgcaattcatggaaatcccgcgcccgcgaccgccgggtaataaagctccagcattttgagacggattacctcgcccccgatacggctgaggaaataattgcaggcctttccattctggaaggctggctcgccggggcgggctattcgtcaacggacctttccggcatagacggcgtccaccatgacatacgcatgatcccctgccaccatctggagaacagcaaacgcggacaggtggttaagtatccgctcagggcgattgccgcctaccgcctgatgctccgctggtacgcggtcaggaacatagccgttttcctcgatgaaaggcagtatctggactatcctgacctttgctcgcttctgagcccggggacccaaagggtgacagactgggttaacatgggcggacagattacccccgctttcagggtggacgagctgcgccgggacattgctctgggcaaatacaaaagctgggacgatatccaccatgtatacgccttttggcaggaagaataccccttggacaaggcccgccacgcctgggccgtactcgccctgttaaacggcgaggaaagccttgaaaacaaggctttccttaagcaggaattcgccgccgcagtggaaatcaggcgctggatgagcgaacagatatacaattccagggaaaaagaccactcgaatcccttcagaaaggcgactttccgcaatgacgccgagatggaacgggttttaggcagggcggatgacgattcttttgttcgtttttcctttcaggcggggaaaatatttgaagaattggcccatagggttatggggcggctgtaa

SEQ ID NO: 41872 - protein, 445 aa, Unknown
  Obtained from environmental sample
  misc_feature (1)..(445): Xaa is any amino acid
MEMVNGIVGYACHIFYGAKAVRFVIGRNCNLKYGARLIHSVLGDNSTVSCCEILNNLIFPVHEQHHNNSFLIASLIQGQSNIAAAATIGSNHNSRANDGELRAKRGFWPGLAVTLKHPSVFASYVIIAKGEYPSELNIPLPFSLVANNVHKNRLELSPAYFWLHNLYALERNSWKSRARDRRVIKLQHFETDYLAPDTAEEIIAGLSILEGWLAGAGYSSTDLSGIDGVHHDIRMIPCHHLENSKRGQVVKYPLRAIAAYRLMLRWYAVRNIAVFLDERQYLDYPDLCSLLSPGTQRVTDWVNMGGQITPAFRVDELRRDIALGKYKSWDDIHHVYAFWQEEYPLDKARHAWAVLALLNGEESLENKAFLKQEFAAAVEIRRWMSEQIYNSREKDHSNPFRKATFRNDAEMERVLGRADDDSFVRFSFQAGKIFEELAHRVMGRL

SEQ ID NO: 41873 - DNA, 360 bp, Unknown
  Obtained from environmental sample
  misc_feature (1)..(360): n is a, c, g, or t
atgggaagggacatattggatttatacagcgaatatttgctgtacagcagcgggcaaacaaccgcaacaggattatctgagatattagatggcgatataagccacgataagttaacgcgatatttagcaacagaattatttgatgaaaaaacactttggaagaaagttaaaaaggttgtaagggcatatgaagcggaagacgcgtgtttgatatatgacgacaccatagttgaaaagccctacatggatgagaatgacataatatgctggcattttgatcacaaggaaaacaagccggtaaaaggaataaatctattgagcgctttttaccatagtaaaaaagcggcaacctcgcgataa

SEQ ID NO: 41874 - protein, 119 aa, Unknown
  Obtained from environmental sample
  misc_feature (1)..(119): Xaa is any amino acid
MGRDILDLYSEYLLYSSGQTTATGLSEILDGDISHDKLTRYLATELFDEKTLWKKVKKVVRAYEAEDACLIYDDTIVEKPYMDENDIICWHFDHKENKPVKGINLLSAFYHSKKAATSR

SEQ ID NO: 41875 - DNA, 906 bp, Unknown
  Obtained from environmental sample
  misc_feature (1)..(906): n is a, c, g, or t
gtgacagcataccggtttatacaagcaaatcttgggcggtatgcagtcatggagatgaccgggcttttaggggtaagccgaggcgcatattacaaatgggttaaggcggggatttcaaatcagagtaaaggttctgatgacgctgaattaataaggcttattcgggaaatagtgattaggcatcaccgcagatacggcagtccacgcgtgaggcaggaattacgtaataaatacgggaaacgtgtaagtttgaaaaaagtagcccgattgatgcgggaaaacggcttaaacgcgcgccgcaggaggaaatatattccgaccacggactcaaaacattcattacctgtatgcgcaaacatactaaaccgtaatttttatgctgaaaaacnccgggcaaaaatgggtctcggatataacctatcttcgcacattaaagggcttgaatatctgactgtagtgcttgatttatttgatcgcaaggtcgtcggctgggcattaagtgacaacatggaaacatgcaatacaaccattccggcgattgaaatggcggtaaaaaaccgtcaaccggaaagagatttgatatttcattcggacagaggcgtccagtattgcgcgcattcattctttgaggttatgagcaatctatgtccgtctgttcgccggagcatgagccgtaaaggcaactgctgggacaacgcctgcgcggaatcgtttttcaaaacattaaaatcggaggaggaaaaacttaacggaaaatattcagccaatgatgtaaggcaggctgtatttttctatgtcgaaggttattataaccgcgaacggattcattcggtacttgactatcttgcacctaatgaatattatttaagtaactcatgttacgcaaaagagagaaaaaagatataa

SEQ ID NO: 41876 - protein, 301 aa, Unknown
  Obtained from environmental sample
  DOMAIN (128)...(289): Integrase core domain
  misc_feature (1)..(301): Xaa is any amino acid
MTAYRFIQANLGRYAVMEMTGLLGVSRGAYYKWVKAGISNQSKGSDDAELIRLIREIVIRHHRRYGSPRVRQELRNKYGKRVSLKKVARLMRENGLNARRRRKYIPTTDSKHSLPVCANILNRNFYAEKXRAKMGLGYNLSSHIKGLEYLTVVLDLFDRKVVGWALSDNMETCNTTIPAIEMAVKNRQPERDLIFHSDRGVQYCAHSFFEVMSNLCPSVRRSMSRKGNCWDNACAESFFKTLKSEEEKLNGKYSANDVRQAVFFYVEGYYNRERIHSVLDYLAPNEYYLSNSCYAKERKKI

SEQ ID NO: 41877 - DNA, 330 bp, Unknown
  Obtained from environmental sample
  misc_feature (1)..(330): n is a, c, g, or t
atggtaaggagaggaaaaatggcaaagaaaaacaatgaaaggcggtcttatacgaaagaattcaagaccgaagctgtagcgctggcggaaaaaaaagagaaaccggtaagccaagtcgctaaggatttgggtttaaatgaaaacgtgctaaggcgatggatcaatcagacaaaggatgctgaaggaaccaacatcagagtgtttccaggtcatggaaacgcaagagacgcggagcttatccgcctgcggaaagagaacaaagctcttcggaacgcgaatgaaatcctaaaaaaagcggcggtcatcttcgcgcaagaagacccccagtga

SEQ ID NO: 41878 - protein, 109 aa, Unknown
  Obtained from environmental sample
  DOMAIN (14)...(96): Transposase
  misc_feature (1)..(109): Xaa is any amino acid
MVRRGKMAKKNNERRSYTKEFKTEAVALAEKKEKPVSQVAKDLGLNENVLRRWINQTKDAEGTNIRVFPGHGNARDAELIRLRKENKALRNANEILKKAAVIFAQEDPQ

SEQ ID NO: 41879 - DNA, 402 bp, Unknown
  Obtained from environmental sample
  misc_feature (1)..(402): n is a, c, g, or t
atggacagattcggccgagagagattttttggcgcggcgcgcagcatagagggcgggggcagcctgacgatcatagccacggcgctgatagaaacaggcagccgcatggacgatgtcatattcgaagagttcaagggcaccggcaacagcgaaattatcttagacagaaagctgagcgaccacagaattttccccgcgatggacatccagcgctcgggcaccagaaaagaagacctgcttatcggcccgcagcgcctagccatgatctgggtgctgaggaaaatactctccagcagcggccccgccgaatcaatggaactattgctggaccgcttgggcaaaaccaagacaaacgatgagttccttgcaaacttgcatgagtctccagctggtaagaggtag

SEQ ID NO: 41880 - protein, 133 aa, Unknown
  Obtained from environmental sample
  misc_feature (1)..(133): Xaa is any amino acid
MDRFGRERFFGAARSIEGGGSLTIIATALIETGSRMDDVIFEEFKGTGNSEIILDRKLSDHRIFPAMDIQRSGTRKEDLLIGPQRLAMIWVLRKILSSSGPAESMELLLDRLGKTKTNDEFLANLHESPAGKR

SEQ ID NO: 41881 - DNA, 894 bp, Unknown
  Obtained from environmental sample
  misc_feature (1)..(894): n is a, c, g, or t
atgaagagcggcacaattttcaatatccagcgatattcgacgcaggacggcccgggcataaggactactattttttttaagggctgcccgctgaaatgcacttggtgccacaaccccgagggcatatcctttgcctgcgaactagccttacacggggagcgctgcatacgttgcgaggtctgcaaagaaacctgccctgttggcttggcgccagagcgggggctagatggatgccagtcctgcggccaatgcgccaacgcctgcccagcgggggcaaggaaccttttcggcaagcagactacggcaaaggaagtgatggccgaaatagtcaaagaccgcattttttacgaccagtcggggggaggggccacgttctctggcggtgaaccgttggcgcagccgcaatttttgggcgagctgctttcggagtgccaaaacgctggcatctccaccgcattggacacctgcggctacgcagacatagacgatctgctcaacctagccagccaagccgatttagtcctgtacgacctcaagggccacgatgacgagcgccacataaccaacaccggtgcccccgccgcgcccatcttgaacaatctggaagagttggcccaaacccacaaaaacatctggataaggctgccaatcatccaaggacgcaccgacgacgaaagcgaaatggaattgttggcgttgcgcttttgtaagctaaaatctattaagcgagttgtgctgctgccatatcacgcgatgggggaagccaaattgaaaaaacttggagcgttgccgaaaatggaagacgcagtggccccaagcccccaagcgctggatgttatttcagagatatggaggcggcacggattcgatgcacagataggaggccataaatga

SEQ ID NO: 41882 - protein, 297 aa, Unknown
  Obtained from environmental sample
  DOMAIN (71)...(94): 4Fe-4S binding domain
  misc_feature (1)..(297): Xaa is any amino acid
MKSGTIFNIQRYSTQDGPGIRTTIFFKGCPLKCTWCHNPEGISFACELALHGERCIRCEVCKETCPVGLAPERGLDGCQSCGQCANACPAGARNLFGKQTTAKEVMAEIVKDRIFYDQSGGGATFSGGEPLAQPQFLGELLSECQNAGISTALDTCGYADIDDLLNLASQADLVLYDLKGHDDERHITNTGAPAAPILNNLEELAQTHKNIWIRLPIIQGRTDDESEMELLALRFCKLKSIKRVVLLPYHAMGEAKLKKLGALPKMEDAVAPSPQALDVISEIWRRHGFDAQIGGHK

SEQ ID NO: 41883 - DNA, 753 bp, Unknown
  Obtained from environmental sample
  misc_feature (1)..(753): n is a, c, g, or t
ttggcggaacagggcgtaccattcagcattgaaaaattgagggcatttatccgcgcgaattataccgatagagaaacctatacgaccaacgtcaacagggacttccggaatgatttatgcggaaaactcggcgggctgcagccggggcggttttccgacttgttaaaaaaagccgtttccttcaaccccaatgtggatatcaggcaattcattactgaatttgtctgtggcgatgaacaaaaaataaccattgacgacatgaaggagaatatccgcagctacgattcgcttaaaaaagagtccgtcatcttgaaagagcgtattggtttattgacagaaatcgacgatgccttcaatgagtatatcaaaaataaagaaagtgaaacgctttacagttaccttatcgatcgcgcgcaatgggaaaccaagaaaaacgagatcgataaatgcaggcaaaacacgctgcggctcgtcaaagagctgaatgagctggaggggaagctggccaatgcggaaaacgaacagaagcagcttcaggcggaacgggatgttctgaaactgcagcttgacagtaatgaaaatgccagacggcttgaagaactacaaaaagaaatcgaagaaaaaaaacgccggtatggcgagatagaagacgggtttgaaaaaatgtctgctttactgcaccgtacattgtcttcctggaagtcctgtattatcgggtttcgggaagcaattgccgccgtcagtttcatgtaa

SEQ ID NO: 41884 - protein, 250 aa, Unknown
  Obtained from environmental sample
  misc_feature (1)..(250): Xaa is any amino acid
MAEQGVPFSIEKLRAFIRANYTDRETYTTNVNRDFRNDLCGKLGGLQPGRFSDLLKKAVSFNPNVDIRQFITEFVCGDEQKITIDDMKENIRSYDSLKKESVILKERIGLLTEIDDAFNEYIKNKESETLYSYLIDRAQWETKKNEIDKCRQNTLRLVKELNELEGKLANAENEQKQLQAERDVLKLQLDSNENARRLEELQKEIEEKKRRYGEIEDGFEKMSALLHRTLSSWKSCIIGFREAIAAVSFM

SEQ ID NO: 41885 - DNA, 2094 bp, Unknown
  Obtained from environmental sample
  misc_feature (1)..(2094): n is a, c, g, or t
atgatcagattcggccgagtcgagggttatgaagtcggggttcgggcgttgctcacggcgcgtctgccggggttgcgcgggattctcgccgatctcgttagcgtatccgacgacaagatgctgccgttcgtggagaagctggccgggagcgtggttcagacggtcgttttcgacaccgacgcgcagatggacgcggcgattgattttctgcaccgcgagaaggcgggtacggcgcgcatggcgtcgcttgagcgtttgcgccgcaaacgggccgagaaccatccgccgggccgggcgttcaccgccggtctgcttgacgtccgctcgctgataacggcggccgacgccgattgcgccgccctcgccgactgcttcttcgacaggttcgccatcgcccccgattacgcctccgccgcccgtgcggcgcgtgaaatgggcgcgtacgggacggcggccatcgtatccgtcgccgacggggcggtctgctacggcgacggcagcgtggtcgccggggagtccaagaaggagtcggcgggaatcatgcagcgcaagcagcagatagagaggctcacggcggagataggcgtcgcggagggcgagcttcaggcgatactcaccgaaaaggacgtctgcgttatagcccgcgacggggccaaggcggagcttatagagatcaacgaaaaaataaacggcggccagcgtcttcagcaggagcagcagacgacgatccgccattacgagaacgagatgcagggcatagtcgtgcgtgtgcaggccgtcgcgccggagattgaggcgcttacggccaagatagcggagcttacggagtcgatcggcggaatcgaggccgaggtcgccgtgatggacggccgccacaacgcgctggaggtgcggttggaggccgcccgcgccgacgtccgcgctatggaggaggagcgagcggcgctcgccgaacacctgaaaaacgtggaacttgaggtgcacggcctgacaaacaggataagcctcgacaggcgcgacattgagaggctgacaggcgacatagagcggttcggccaaaacaagcgggagaaggtagaggagcgcggcaggtgtctcttggagatatccggcttagaagagggtaagtctcggatgtcagccgaacttgaggcggcgagggagaggcgcgccgggcttgaggccgcgcgtgacgttatccgcgaagactacaacggacgccaatccaatatcaacgatttgcgcaatgagataaagggcataaacggcgatctttcggagaccggagatgctatccacgacgcggagttgaagcaagagcgcgacgagcaggagcgccgccgcatccgcgagagaatgtgggagtcatacgaacttgacattgaggacattgatcgcgagagccttgccgctgcggacggggacgacgagacgattatgcatgacatcgccatgtacaaggagcggataaagcatttgggacaagtgaacatggccgcgctggaagacttcgacacagagagcgggcgcctcaaggcgctcaccgcgcagcgggacgacctgcagggcgcggtgaacgagctggagagggccataacgaagctcgacaaggaggcgagggcgcagtttatagccaccttcgagcaggtgcagaggcacttcacggagatgttcacgacgctctttgagggcggcgaggcgagcatctctctagagaagggggttgaccccttagaggccgacatacacataaacgcgcgtcccgccggcaagaagatgcgcggcgtgcagctgctctcaggcggcgagcgggcgcttacggccatatcgttattgtttgcgctctacttggtcaaaccgtcggcgtactgcatattggatgagttggacgcgccgctcgacgaagctaacgtttcgcgttttgtcaaggtgctcggaaagttcgccgagaagacgcagttcatagtgataacccacaacaagaagacgatggaggccgcagacttgctgtacggcgttactcagcaggagtcgggcgtgtctaccatcgtgtctgtgaagtttgaggaagccggggcgttaaaagcggcgtga

SEQ ID NO: 41886 - protein, 697 aa, Unknown
  Obtained from environmental sample
  DOMAIN (511)...(676): ABC transporter
  misc_feature (1)..(697): Xaa is any amino acid
MIRFGRVEGYEVGVRALLTARLPGLRGILADLVSVSDDKMLPFVEKLAGSVVQTVVFDTDAQMDAAIDFLHREKAGTARMASLERLRRKRAENHPPGRAFTAGLLDVRSLITAADADCAALADCFFDRFAIAPDYASAARAAREMGAYGTAAIVSVADGAVCYGDGSVVAGESKKESAGIMQRKQQIERLTAEIGVAEGELQAILTEKDVCVIARDGAKAELIEINEKINGGQRLQQEQQTTIRHYENEMQGIVVRVQAVAPEIEALTAKIAELTESIGGIEAEVAVMDGRHNALEVRLEAARADVRAMEEERAALAEHLKNVELEVHGLTNRISLDRRDIERLTGDIERFGQNKREKVEERGRCLLEISGLEEGKSRMSAELEAARERRAGLEAARDVIREDYNGRQSNINDLRNEIKGINGDLSETGDAIHDAELKQERDEQERRRIRERMWESYELDIEDIDRESLAAADGDDETIMHDIAMYKERIKHLGQVNMAALEDFDTESGRLKALTAQRDDLQGAVNELERAITKLDKEARAQFIATFEQVQRHFTEMFTTLFEGGEASISLEKGVDPLEADIHINARPAGKKMRGVQLLSGGERALTAISLLFALYLVKPSAYCILDELDAPLDEANVSRFVKVLGKFAEKTQFIVITHNKKTMEAADLLYGVTQQESGVSTIVSVKFEEAGALKAA

SEQ ID NO: 41887 - DNA, 903 bp, Unknown
  Obtained from environmental sample
  misc_feature (1)..(903): n is a, c, g, or t
ttggggtggggggtaatcttggattttttagaattaagatcaataataaaagatgaatctaggaaaggaacattcatcccatcgactgatttgatacaaaaaatagtatttgaccttaaaaaagaaaggattatccccattattacggaaatagggtctataccggaagatattggacatgattccagcgaagaaaaattatatgcgaaggtatcggatataattttggcgaaatgttttcaagaattaggattaagatcatctgttaataaggaacgtgctaattgtgcggatgttatagccaaaagtcagtttcacaattattcattggttggagatgcaaaatcatttagattaagccggactgcaaaaaatcaaaaggattttaaagtaaaatcaatgagtgattggaaaggtgatagtgattactcggtattggtttgtccgtattatcaatatccaaaacataagagtcaaatttacggtcaagcgttaaatgataatataacattattttcatgggagtatcttgcaattttattggaaaatgatgtttgtgaaaatgaaggagtaaatatatcaaatctatggaatatttgcttagcattatctgtcaatacgaatattgcagatagaaataattgttttcttgaagatcagaacgagataataagattatgtctaaatttaacagtagcgcaatttgaaagctattttcacaaatctaaaatgaatataattacaaggggtgaaacagaaataagatattgggaagacaagataagaagagtaaatctttccacaagagaacaagccattgaggaattattgtcatcacttaaattatttgaaaaaatttctttcataaagaaatatattgattctcttaaaaatgaaggataa

SEQ ID NO: 41888 - protein, 300 aa, Unknown
  Obtained from environmental sample
  misc_feature (1)..(300): Xaa is any amino acid
MGWGVILDFLELRSIIKDESRKGTFIPSTDLIQKIVFDLKKERIIPIITEIGSIPEDIGHDSSEEKLYAKVSDIILAKCFQELGLRSSVNKERANCADVIAKSQFHNYSLVGDAKSFRLSRTAKNQKDFKVKSMSDWKGDSDYSVLVCPYYQYPKHKSQIYGQALNDNITLFSWEYLAILLENDVCENEGVNISNLWNICLALSVNTNIADRNNCFLEDQNEIIRLCLNLTVAQFESYFHKSKMNIITRGETEIRYWEDKIRRVNLSTREQAIEELLSSLKLFEKISFIKKYIDSLKNEG

SEQ ID NO: 41889 - DNA, 1002 bp, Unknown
  Obtained from environmental sample
  misc_feature (1)..(1002): n is a, c, g, or t
gtgtctgtccgagatatcggccctgaggagagcatggctcgaatgaccgccgaccttgacgcgcgcggggagagacggacagggcttgaggcggcgcgggatgttatccgcgaagactacaacgtacgcttggccgagataaacgatatgcgcaatgagataaaagttataaacggcgatcttgcggcggtgggggacgcgatccacgaaggtgagttgaaacaggagcgcgacgagcaagatcgccgccatattcgcgagaggatgtgggagtcctacgaactcgacatagaggggttggatcaggaggggcttacggccattgatgaagacgacgaggcggttatgcgcgatatcgccatgtacaaggagcggatcaagcacgtagggcaggtgaatatggccgccttagacgattttgagacggagagcgaacgcctgaaagttctaaccgcgcagcgtgacgatttgcagggtgccgttgacgaactcgagagggccatatcgaagctcgacaaagaggcgagaacgcagtttatcgccactttcgagcaggttaagaaaaacttcatggaaatgttcacgacgctctttgagggcggcgatgccagtatttcgcttgaggagggggtagacccgttagaggccgacatacacataaacgcccgtccggcgggaaaaaagatgcgcggcgtgcagttgctatccggcggcgagcgggcgctcacggccatatcgctgctcttcgctctctacctggtcaagccgtcggcgtactgcatcctggacgagcttgacgcgccgctggacgacgccaacgtttcgcgttttgtcaaggtgctcgggaagttcgccgagaagacgcagttcatagtgatcacccacaacaagaaaacgatggaggcggccgacttgctgtatggagttacgcagcaggagtcgggcgtgtctaccatcgtgtcggtgaagtttgaggaggcgggggcgcttagggcggcgtga

SEQ ID NO: 41890 - protein, 333 aa, Unknown
  Obtained from environmental sample
  DOMAIN (144)...(312): ABC transporter
  misc_feature (1)..(333): Xaa is any amino acid
MSVRDIGPEESMARMTADLDARGERRTGLEAARDVIREDYNVRLAEINDMRNEIKVINGDLAAVGDAIHEGELKQERDEQDRRHIRERMWESYELDIEGLDQEGLTAIDEDDEAVMRDIAMYKERIKHVGQVNMAALDDFETESERLKVLTAQRDDLQGAVDELERAISKLDKEARTQFIATFEQVKKNFMEMFTTLFEGGDASISLEEGVDPLEADIHINARPAGKKMRGVQLLSGGERALTAISLLFALYLVKPSAYCILDELDAPLDDANVSRFVKVLGKFAEKTQFIVITHNKKTMEAADLLYGVTQQESGVSTIVSVKFEEAGALRAA

SEQ ID NO: 41891 - DNA, 528 bp, Unknown
  Obtained from environmental sample
  misc_feature (1)..(528): n is a, c, g, or t
ttgatacctgcctattcagtgcttatcatttccggaaccaaggcaaaaggtttttcggacaacctgattcctgaaatggttcaaacagcccgtacacagggctgccggatcatccttgatgtcaggggacaagatcttccaaaaagccttccctttgggccaaatctggtaaagcccaatcttttcgaatttatttccacttttgcaccggagctgctttctgaaaaaaacgccgacaccgtcaaaaaagaggtggggaaggtctgggcgaagctctacgaaaaatacccctgcgcacttgtacttacgcggggagccgagccgttgtggtacgccgaaaagggggaacttgaggagtattcctttaaaagcgttgaaccccttaacaccaccggttccggcgatgcctttagcgccggacttgccgccgcccttgaagaaggcgcagacctggctgacgccgtggcagaaggtgcccgttgcggggcccttaacgcagtattattgaagcccggcgttatacgctag

SEQ ID NO: 41892 - protein, 175 aa, Unknown
  Obtained from environmental sample
  misc_feature (1)..(175): Xaa is any amino acid
MIPAYSVLIISGTKAKGFSDNLIPEMVQTARTQGCRIILDVRGQDLPKSLPFGPNLVKPNLFEFISTFAPELLSEKNADTVKKEVGKVWAKLYEKYPCALVLTRGAEPLWYAEKGELEEYSFKSVEPLNTTGSGDAFSAGLAAALEEGADLADAVAEGARCGALNAVLLKPGVIR

SEQ ID NO: 41893 - DNA, 600 bp, Unknown
  Obtained from environmental sample
  misc_feature (1)..(600): n is a, c, g, or t
ttggctattgaaattgaattaaaagcccgtgtaaaaggtggtgaacagaatatcgaagttttaaaatgcctcctttttgaaacagcggaataccagtgcgcctttgaaaaggaagacacttattatttccccttgagcccttcgaaaattccacagtcaggcatccggcttcgcaacgaaagcaaaacccttcctgacagaactgttaaaaaaacggcatatgtaacctataaaacaaaagaagtaagagacggtattgaagtgaatgatgagaaagagtttgaagtttcttcttcgcaatacagtccgataattatcttcgatgaattccttaaaatggcaggtctcgcccccggtctttccaaacacaaaagaggctgggcattttcgaaagacggtattaacgcggaacttttggaagtagagaaacttggctggtttttggaaatggaaattgttatgaacgatgttgaaacggacactatgatagaggaaaagaaaaaacagcttatggcatttctttcggatcttggcattgaaaaagacgcgatagaaagccggtattattcggaaatgctaaaggatcttgctagcgtataa

SEQ ID NO: 41894 - protein, 199 aa, Unknown
  Obtained from environmental sample
  DOMAIN (2)...(195): CYTH domain
  misc_feature (1)..(199): Xaa is any amino acid
MAIEIELKARVKGGEQNIEVLKCLLFETAEYQCAFEKEDTYYFPLSPSKIPQSGIRLRNESKTLPDRTVKKTAYVTYKTKEVRDGIEVNDEKEFEVSSSQYSPIIIFDEFLKMAGLAPGLSKHKRGWAFSKDGINAELLEVEKLGWFLEMEIVMNDVETDTMIEEKKKQLMAFLSDLGIEKDAIESRYYSEMLKDLASV

SEQ ID NO: 41895 - DNA, 372 bp, Unknown
  Obtained from environmental sample
  misc_feature (1)..(372): n is a, c, g, or t
atgtatcaggtcagggtagaagaagaatnttcggcagcccactttttaagccactacaaaggaaaatgcgaaaaacttcacggccacaattacagggttcgcctttggcttgtcggagaaaagcttgatgagggagggatgctttttgatttttcattgttaaaaaaattactgagagaagttctggccctcttggatcattcaaatttaaacgatatggaagttttttgcggagaccccagcgccgagcgtatcgcaaaattcatttttgaggaaattcaaaaaaaactgccgggcccggaaatagagtacctatgggcggtggatgtttttgaaaattcacgaagcatggcaaggtactcgctacggtga

SEQ ID NO: 41896 - protein, 123 aa, Unknown
  Obtained from environmental sample
  DOMAIN (1)...(123): 6-pyruvoyl tetrahydropterin synthase
  misc_feature (1)..(123): Xaa is any amino acid
MYQVRVEEEXSAAHFLSHYKGKCEKLHGHNYRVRLWLVGEKLDEGGMLFDFSLLKKLLREVLALLDHSNLNDMEVFCGDPSAERIAKFIFEEIQKKLPGPEIEYLWAVDVFENSRSMARYSLR

SEQ ID NO: 41897 - DNA, 768 bp, Unknown
  Obtained from environmental sample
  misc_feature (1)..(768): n is a, c, g, or t
ttgtctgcggaatggtttgcaaaccgctataaaataaatttagaagaatctgtggttccagcaaacggctttgccaatattcacgagcttttcacaagaaaattgaaaagcgatgctagaatcatagaagacaatgccgaggttgtttgccctgtagatggggttttaacggcttttggaatgctcaccgaagagccggaatatatgcaggcaaaggggaaatactatcttttgaaagatctgctccgcaacaaagaactagctaaaaaattcatcggaggcgtatgggcaaccatatacctttcaccgcacaactaccaccgcatacactcccctgtatctggaaacgtgactgctgcctattattgccccggaacgctttggcccgtgaatgctgggagcgttgaaagggtagaggggcttttttcaataaacgaaaggctcataacccaaatcaacacctacgatggcggcgaggttttgctggttaagataggagcaacaaatgtggggcgcattgccgtggattacaaaaaagactggttcacaaactcaatgccgatggtagcaaaccgcaatgcccttttcacaaaatgggaaccagagcagcaaatttacgcttacacaaaaggtcaagaaattgcccgctttgaaactggcagcacggtgataatggtttgcaacagagcaattttcaaaagaacaaaatacctctttgccgaactcgaaggcagagaagtgaaaatggggcaagggttaatgatttaa

SEQ ID NO: 41898 - protein, 255 aa, Unknown
  Obtained from environmental sample
  DOMAIN (27)...(255): Phosphatidylserine decarboxylase
  misc_feature (1)..(255): Xaa is any amino acid
MSAEWFANRYKINLEESVVPANGFANIHELFTRKLKSDARIIEDNAEVVCPVDGVLTAFGMLTEEPEYMQAKGKYYLLKDLLRNKELAKKFIGGVWATIYLSPHNYHRIHSPVSGNVTAAYYCPGTLWPVNAGSVERVEGLFSINERLITQINTYDGGEVLLVKIGATNVGRIAVDYKKDWFTNSMPMVANRNALFTKWEPEQQIYAYTKGQEIARFETGSTVIMVCNRAIFKRTKYLFAELEGREVKMGQGLMI

SEQ ID NO: 41899 - DNA, 1611 bp, Unknown
  Obtained from environmental sample
  misc_feature (1)..(1611): n is a, c, g, or t
gtgatggaagtcatagttttaaatgtagaattttctacattaagccttatgcaaagcaagcatagcattagggatttaggtaaaaaaaaattgctttggattctcatttttgggtttccaataattttaggcacggtggctattaaaatagtatggtataaacttaccccaaccctgccttcctttgaaaaactggaaacaatagaacctcgcttaataacaaaaatttatgataaggactctattttggctcatgaattttttgtggaaaaaagaatttggacacccatagacagcattcccgaaatggtgaaaaacgccgttttggcaacggaagaccgcaaattctggagtcactggggcatgaacccgcttgctattccaagtgcgatacttgagagcgttagatcaggcaataaaatgaggggggcaagctcactaactcaacaactcactaaacttttatttttaacaccggagcgttcaattacccgcaaaatacgcgaagctatgactgcagttcgcttagagaaaacctacacaaaagaagaaatattggaattttacatgaacgaggtttatttggcaggtggaaattatgggttccagtctgccggacagttttactttggtcgtcctttggattctctaactattccagaaatagccgtgcttgctggaatgctccaacgtccagaagcctaccgcccagaccgcaaacccgaagctgccattgctcgcagaaacactgttttatttgccatgagagatgcaggctatatctcaaaagatgattacaacaactacattagaacgcctttgattaccgaaacaaagatagactctaccgtggcaccctactatatggaagatatacgcaaatatctggaaaataaatatggcgagaattctctttattcagatggcatttcggtttacagtaccatagacccaaatgcgcaaagcatagttgaaaaagctgctttgactcaaagagccagagttgataggaggcttcgccagcgcgctatttggaaacttaacttggcaaaaaaatataatatgccaaacgataccgtgctcaataattttgattctgtttacgcagatttcactagaaattatctggcgaaagacactgcaaaaataatctacccagattcttcgcgctataggcaggcacaggtggcagttattttgatagagaatgaaacaggcgcgattagggcaatggttggcggaaaaaatttcaacgagagcaagtggaaccgcgcagtgcaaaccttaaggcagccgggttcttcgttcaaaccctttgtttatgcaaccgcaatggacaacggggcatctccttgcgattccgtaaatgatgctcccataacaattccagaccctttagataccgcaaaattttggagaccaggcaattactcaaaagaattcaagggtatgatgagctaccgcaaggcacttgcgctttcgcagaatttgccagcaattcaagttggcatgaagtatggtcttaggaatgttgtggagtatgcacgcaagttcggagtgaaaaaatccccttgcaagcagtgccaagcatgcctaggtcggtcgcgataa

SEQ ID NO: 41900 - protein, 536 aa, Unknown
  Obtained from environmental sample
  DOMAIN (74)...(241): Transglycosylase
  misc_feature (1)..(536): Xaa is any amino acid
MMEVIVLNVEFSTLSLMQSKHSIRDLGKKKLLWILIFGFPIILGTVAIKIVWYKLTPTLPSFEKLETIEPRLITKIYDKDSILAHEFFVEKRIWTPIDSIPEMVKNAVLATEDRKFWSHWGMNPLAIPSAILESVRSGNKMRGASSLTQQLTKLLFLTPERSITRKIREAMTAVRLEKTYTKEEILEFYMNEVYLAGGNYGFQSAGQFYFGRPLDSLTIPEIAVLAGMLQRPEAYRPDRKPEAAIARRNTVLFAMRDAGYISKDDYNNYIRTPLITETKIDSTVAPYYMEDIRKYLENKYGENSLYSDGISVYSTIDPNAQSIVEKAALTQRARVDRRLRQRAIWKLNLAKKYNMPNDTVLNNFDSVYADFTRNYLAKDTAKIIYPDSSRYRQAQVAVILIENETGAIRAMVGGKNFNESKWNRAVQTLRQPGSSFKPFVYATAMDNGASPCDSVNDAPITIPDPLDTAKFWRPGNYSKEFKGMMSYRKALALSQNLPAIQVGMKYGLRNVVEYARKFGVKKSPCKQCQACLGRSR

SEQ ID NO: 41901 - DNA, 921 bp, Unknown
  Obtained from environmental sample
  misc_feature (1)..(921): n is a, c, g, or t
ttggttggcgctcagggtattcgcatcaaggatgtcgcttccgtttccggacttgaagacgtgcagctcttcggttatggattggtagtcggccttgccggtacgggcgaccgcaatcagacggtttttaccgagcagacgatagtcaatatgctcaagaatatgggcgtggagcttcccgagcggcatattcgggtgcgcaacgtggcggcggtcatggtcacggggcagctcgcgccctttaagcgcaagggcacgaagtttgatattaccgtttcgtcaatgggcgacgcgacgagcttggaaggcgggacgctgatactcacgccgatacagggccccgacggccagatctacgcctcggcgcaggggccgctggccaccggcgggtacgatttgcgtgaccgcggcctcacgcacataaagaagaaccacgtcagcgtcggcaggattcccggcggagccatcgtccaaaaggagtaccagttcaacgtcttaaacggcgaaaacctgtccatctccctccacagccccgacttctcctcggcggtctcgatggcgcagtcgatcaacgcccagtacggcgtggccggccttgccaaagccacggacgccgcgacggtggagctcgacatggcgagagcgggcggcggcgtgtcgccgatggagttcatagcaagggtggaaaacatgacgttcgaggtcgcgtcgacggccaaggtggtgataaacgagcgcacaggaacgatagtagccggcggcacggtacgcatatcgcaagtggcggtcacacacggcggagttaaggtagaagtagtcaacctgccggaagtgatccaaccggtcccgttcgccctaggacgcacggaagtagtcccgaacccggccatggtagtagaagaaaggacgcggagatggtag

SEQ ID NO: 41902 - protein, 306 aa, Unknown
  Obtained from environmental sample
  DOMAIN (8)...(305): Flagellar P-ring protein
  misc_feature (1)..(306): Xaa is any amino acid
MVGAQGIRIKDVASVSGLEDVQLFGYGLVVGLAGTGDRNQTVFTEQTIVNMLKNMGVELPERHIRVRNVAAVMVTGQLAPFKRKGTKFDITVSSMGDATSLEGGTLILTPIQGPDGQIYASAQGPLATGGYDLRDRGLTHIKKNHVSVGRIPGGAIVQKEYQFNVLNGENLSISLHSPDFSSAVSMAQSINAQYGVAGLAKATDAATVELDMARAGGGVSPMEFIARVENMTFEVASTAKVVINERTGTIVAGGTVRISQVAVTHGGVKVEVVNLPEVIQPVPFALGRTEVVPNPAMVVEERTRRW

SEQ ID NO: 41903 - DNA, 1296 bp, Unknown
  Obtained from environmental sample
  misc_feature (1)..(1296): n is a, c, g, or t
gtgattttcagggtgcaggaagggccggttgtcaaggtaggcgacatcaatattgacgcaaagagattcaaagcggtcacggtcgagcgggaactctccatacgcaagggcgacacgctgaacctgcgtacggtacggcagtccgagcgcaatctctacaccaccggcctcttcaactacgtgcagataaaaccggagttcgataccactttagccgccgtagatctgccggacagcgtctacgacgtgagcgtgcgcgtgactcgcggcgagtacgtccgagcgcaggccggcctcggttacagcaccgacgaaggcgcgagggtctccgcctccgcaacgtggaagaacatgttcggacttgggcaaagcctcacgttgagcgccaaggtttcgcaggtatcccaaggcgcggaagcggttcacgccatcccgtggttcatgtatatgccgttgcagctcaacacaaaactgtattacacaaggtttgacaggccgcagctgtacaagggcaccttcgacggattgcggctctcgcttggccgtcagtccaaccacgatatactctaccaagtatggtcgcagtgggaggacgtgagctggatcacccccccggcccaagacaacgtccttgccgacgttcccaacgacccgacgcanagtatcggcggcgatatcgcttacgacataaggaacgatctgttcagcccgacaaagggcggcttcatccggctcggcgtggaactggcgggcgtcttcggcgggaaatccaatcagttcgtgaagacgactttcgactcccgcgtctacttcaccaaccgctcgcgataccacctctccatggccgcccgcactggatacgcgataccctacggcaaaagcgccgacgtcccgccgcaaagcaaattctacggcggcggcagcaccaccgtcaggggcttcccggtagacaaactcgccgtcctgccgaacaacgacccgctgcttggaaacttctacgtattcctgaacatcgctgacgtccgcgtccccatgttctggtggatacgcggggaatcgttcctgaactggttcaacgcggcggcgttcttagacgccggaaatgtgtggccgaatttcgacgatataaagtcggcgaaagaattattcggcgacctgagatggtcggcgggtcccggattgcgtgtggacacgccgataaagctggtggcgcggttggacttcgggttcaagatagacagacggccaagcgagagcgcgtatgagatacactttgatttggggcagccgttctga

SEQ ID NO: 41904 - protein, 431 aa, Unknown
  Obtained from environmental sample
  DOMAIN (11)...(90): Surface antigen variable number repeat
  misc_feature (1)..(431): Xaa is any amino acid
MIFRVQEGPVVKVGDINIDAKRFKAVTVERELSIRKGDTLNLRTVRQSERNLYTTGLFNYVQIKPEFDTTLAAVDLPDSVYDVSVRVTRGEYVRAQAGLGYSTDEGARVSASATWKNMFGLGQSLTLSAKVSQVSQGAEAVHAIPWFMYMPLQLNTKLYYTRFDRPQLYKGTFDGLRLSLGRQSNHDILYQVWSQWEDVSWITPPAQDNVLADVPNDPTXSIGGDIAYDIRNDLFSPTKGGFIRLGVELAGVFGGKSNQFVKTTFDSRVYFTNRSRYHLSMAARTGYAIPYGKSADVPPQSKFYGGGSTTVRGFPVDKLAVLPNNDPLLGNFYVFLNIADVRVPMFWWIRGESFLNWFNAAAFLDAGNVWPNFDDIKSAKELFGDLRWSAGPGLRVDTPIKLVARLDFGFKIDRRPSESAYEIHFDLGQPF

SEQ ID NO: 41905 - DNA, 846 bp, Unknown
  Obtained from environmental sample
  misc_feature (1)..(846): n is a, c, g, or t
atgaaaaataaaatatcggatctttttttaaaaagtcccctatatgtacaaatgctgtttacatctttcgcgtttttgttaatggtcgtattaagcattttcttcaccagcaggatcgtgcgggcgaacctgttacgcaatgttgaaagcgtacttaactcagtggaatcccaaattgactctgatctgatggaatcgcgcaccatactggacgaatacgcgcagtccatacaatacttaattttacatggggccaacgcttcagatttacgctcttataactcgtacatatcaaattatttactttcaaagcatattgacactttaggtccaagcggcccttacggatatattgaaacgcttgcgggggggccgttttttcttatcggtattgactgggatcaaccggaagatttttcatccgtggatcgtccctggtacaaagccgccctgaaagccggtggcgacatagcggaaacggagccgtatacggacgcgataacgggcgaaacggttataacgcacgcgcgttgtatttttgacgacgagggaaaccgtttgggcgtcgtcgccattcaagtacgggcgggatatatcggggaagaagttgttaatattttcacaaaagacggttacggggcgttgattagtcaaaatttaacaatcattgggcatcctaatcctgattttattaatatgaaaatgtacgaccccgcactccccgtctcttcctttgcggatgaattaatacgcaatggaaaaatttcagaggctgttttacaaactggaaggcgtaaaaacatcgcttctttcgaacgctcgccacgggctggtactggggcgtaa

SEQ ID NO: 41906 - protein, 281 aa, Unknown
  Obtained from environmental sample
  DOMAIN (160)...(238): Cache domain
  misc_feature (1)..(281): Xaa is any amino acid
MKNKISDLFLKSPLYVQMLFTSFAFLLMVVLSIFFTSRIVRANLLRNVESVLNSVESQIDSDLMESRTILDEYAQSIQYLILHGANASDLRSYNSYISNYLLSKHIDTLGPSGPYGYIETLAGGPFFLIGIDWDQPEDFSSVDRPWYKAALKAGGDIAETEPYTDAITGETVITHARCIFDDEGNRLGVVAIQVRAGYIGEEVVNIFTKDGYGALISQNLTIIGHPNPDFINMKMYDPALPVSSFADELIRNGKISEAVLQTGRRKNIASFERSPRAGTGA

SEQ ID NO: 41907 - DNA, 1956 bp, Unknown
  Obtained from environmental sample
  misc_feature (1)..(1956): n is a, c, g, or t
gtgacgcgcaacctcagcgcggtgttcgtcaacatcgcccgcggcaaaaaggcccagggcgcctccaccgtaacgcagcagctcgcgcgcaacctgtacctctcctccgacaagacgttcatccgcaaaatacgcgaggtgctcacagccgttcagctggagcggagctacaccaagcgcgagatcatggagctgtacctcaaccaagtctacctaggcgccggagtctacggaatgcaggccgccgccgaacactactacagcaaaaatgtcgacgaactcaccctcaacgagtgcgccgtgatcgccggaaccatccagctgcccgaacaccacaggcccgacaaacccgaaaacgccgagcgcaccaccgcccgccgcgacgccgtgctcaaggccatggtcgccgccaagttcatcggcaaagacgccgccaaagccgtcatggacgagccggtggccgccaatcccaagatataccgcccgcccgtggcgccgtacttcatggagatggtccgcaaatacgtctccgacaaatacggcgacgaggcgctctacaacggcggtctcgcaatccacaccacgctcgacccagccgcccaagactccacggaaaagagcgccgagcgcgccgtctcatcgctgcaaaaacgcctcaaccggatgttcatagacggcttcggcgccgaacgcaaactgggcatcccgcgacagacctacatagacaaattcgactcgatctacgccgcgaacgccgccgaatacgcgctcctgcacgacaccctcaagtaccgtaaggcgcagatagcggtggtagcgctcgaatcgtccaccggcgccatccgtaccctcataggcggacgcgacttccaggagagcaagttcaaccgcgccactcaggcgaggcggcagccggggtcgctcttcaaacccttcgtctacaccgccgccatggacaacggcctcaatcccgccacggtgatcttagaccagcccataaccctggtaacccccgacggcgaatggcgtccggagaactacgaccgcaaattccttggccccatgagcatccgcgacgccctcgcgaaatccaacaacctcgtcgccatacaggtattcaccaaaataggcggtcaggccgtcgtagactacgccgcgcagatgggcataaagcagaaactcagccccgtcccctcgctggccataggctcctgcgaggtgatacccatggagatcatctccgcctactcgtccttccccaaccgaggcatacgggccgaaccctacttcataaacaagataaccgataaaaacggcaggatattggagaaaacggtcgtcaaggagagtcaggtcatatcgccgcagaccgccttcttaatgacctcgatgctcggcagcgtggtatgctgcggcaccgcggcgtcgatacccggactgggcttccgcagaccggccggcggcaagacgggcacgaccaacgagtactccgacgcgtggttcataggcttcaccccgcagataaccaccggcgtgtggacaggcatagacgagcggcggtcgatgggccacggcgtaaccggttcagccgccgcggtccccgtttgggtagacgcgatgaaagagctccacaaaaacttgcctaggcaggatttttcgcgtcccataggtactaaggccctgatgatatgcgcacagtccttcggattggccaaaaactcgtgcccaaagcagaaagtagagtacttcaaatacgagactatggtagactcctgcaacgtgcacggcatagcgaggggtctgcgcagcggcgacgatatggatatcttcggcccgtcgaggcgcggtcccgtgagcggcgggggagcgggcggttcaaactcgggcggtagcggggggagcggcggtaacggtggcgggagccagccggccaagaagccgtcatttatgttttga

SEQ ID NO: 41908 - protein, 651 aa, Unknown
  Obtained from environmental sample
  DOMAIN (2)...(117): Transglycosylase
  misc_feature (1)..(651): Xaa is any amino acid
MTRNLSAVFVNIARGKKAQGASTVTQQLARNLYLSSDKTFIRKIREVLTAVQLERSYTKREIMELYLNQVYLGAGVYGMQAAAEHYYSKNVDELTLNECAVIAGTIQLPEHHRPDKPENAERTTARRDAVLKAMVAAKFIGKDAAKAVMDEPVAANPKIYRPPVAPYFMEMVRKYVSDKYGDEALYNGGLAIHTTLDPAAQDSTEKSAERAVSSLQKRLNRMFIDGFGAERKLGIPRQTYIDKFDSIYAANAAEYALLHDTLKYRKAQIAVVALESSTGAIRTLIGGRDFQESKFNRATQARRQPGSLFKPFVYTAAMDNGLNPATVILDQPITLVTPDGEWRPENYDRKFLGPMSIRDALAKSNNLVAIQVFTKIGGQAVVDYAAQMGIKQKLSPVPSLAIGSCEVIPMEIISAYSSFPNRGIRAEPYFINKITDKNGRILEKTVVKESQVISPQTAFLMTSMLGSVVCCGTAASIPGLGFRRPAGGKTGTTNEYSDAWFIGFTPQITTGVWTGIDERRSMGHGVTGSAAAVPVWVDAMKELHKNLPRQDFSRPIGTKALMICAQSFGLAKNSCPKQKVEYFKYETMVDSCNVHGIARGLRSGDDMDIFGPSRRGPVSGGGAGGSNSGGSGGSGGNGGGSQPAKKPSFMF

SEQ ID NO: 41909 - DNA, 693 bp, Unknown
  Obtained from environmental sample
  misc_feature (1)..(693): n is a, c, g, or t
atgtcaaaacccatctcttctttcaagcatcttgatgtagttgcgtcgttttttgtctcaattctcgttatcagcaatatcgcgtcttcggcgaagattgtagatgtcggaataactctgttttcaattccgcttgcttttgacggcggcactcttctgttcccctttgtctatgtgcttggggacgtattaaccgaagtttacgggttcaagacggcgcggcgcgttattttgacgggctttgcggtgatggttcttgccgcgctggtttttttcgtgcttggaatattgccggctgaagccggttgggaagccgaaaccggcgggaacgccgcgttcaatgccatactcggcggaatgagctacggcggcattgtgcttgcgagccttgcggcgtatcttgcgggggagctttccaattcgcttatcctttctaaactcaaagtaataatgaagggacggcttctttgggtgcgcacaataggttctactcttgtcggcgaattgcttgattcattgatcttcatactgattgccacagtcgcgggagttttcccatgggaaattttttggtctttggtaataacaaattatattttaaaatgcgcaatagaagctttggtaacgccttttacatattggctttccggtttcttaaaacgaaaagaagggatagatgtgtatgacgcgtaa

SEQ ID NO: 41910 - protein, 230 aa, Unknown
  Obtained from environmental sample
  DOMAIN (40)...(202): Uncharacterized ACR, YhhQ family COG1738
  misc_feature (1)..(230): Xaa is any amino acid
MSKPISSFKHLDVVASFFVSILVISNIASSAKIVDVGITLFSIPLAFDGGTLLFPFVYVLGDVLTEVYGFKTARRVILTGFAVMVLAALVFFVLGILPAEAGWEAETGGNAAFNAILGGMSYGGIVLASLAAYLAGELSNSLILSKLKVIMKGRLLWVRTIGSTLVGELLDSLIFILIATVAGVFPWEIFWSLVITNYILKCAIEALVTPFTYWLSGFLKRKEGIDVYDA

SEQ ID NO: 41911 - DNA, 462 bp, Unknown
  Obtained from environmental sample
  misc_feature (1)..(462): n is a, c, g, or t
atggatttttccaatctttcgcaggatgatctagccgcgcggctgggcaaaaaccgctccactgtagcaaacgctttgcgccttttaaaactgccgattgaaattcaaaaaagtattgaagagggaaaggtcagctccggacacgcgagggctctgctttccgtaaccgacgcaaaggcgagggataagttgtacatggagcttctcgccggggaaatttccgtcagggagacggagaagaaagcgtcggcgttgaacagcgaaaaggccaagagcgaaaaaaccgcgaagaagggaaaagagcgcccggcggaagtggacgcgatggaagaaaagtttattgaaaaacttggaaccaaagttgtaatagacggagatcagaataaagggcgcatacttattgattatttttcaatggaagatttggaacggctttatgaaatctttggcggagataaataa

SEQ ID NO: 41912 - protein, 153 aa, Unknown
  Obtained from environmental sample
  misc_feature (1)..(153): Xaa is any amino acid
MDFSNLSQDDLAARLGKNRSTVANALRLLKLPIEIQKSIEEGKVSSGHARALLSVTDAKARDKLYMELLAGEISVRETEKKASALNSEKAKSEKTAKKGKERPAEVDAMEEKFIEKLGTKVVIDGDQNKGRILIDYFSMEDLERLYEIFGGDK

SEQ ID NO: 41913 - DNA, 507 bp, Unknown
  Obtained from environmental sample
  misc_feature (1)..(507): n is a, c, g, or t
atgaccgaaaagttcattattggactggttggagctcctttcggcgttaagggttttgtaaaagtaattccctgttcaggggaaacagatcatcttctagaattaaagtcgatagttgtaaacaaggacggcagggagcagacgcttcaaatagaagaaatcactcccgcctcgccccatgtgcttatgcgctttgcggacatcgacagccccgaaaaagcgaagtctttgacaggggcacagttaattgcggggcgggatcaagccgcgcctttgcacgacggcgagttttacatcgaggacttaaagggtttatcagtaaccgatgaaaacggcgaagcaatcggcgctattgtcgatataatcgaaggcggcggcggagaactggcggaaattaaactttccaacggcgaaaaacggctcgttcccttcagaaaagagtttttttctgaaatttcgccgcaaaatggcagagtgctcctaaaaaatctttggattttagaatga

SEQ ID NO: 41914 - protein, 168 aa, Unknown
  Obtained from environmental sample
  DOMAIN (6)...(88): RimM N-terminal domain
  misc_feature (1)..(168): Xaa is any amino acid
MTEKFIIGLVGAPFGVKGFVKVIPCSGETDHLLELKSIVVNKDGREQTLQIEEITPASPHVLMRFADIDSPEKAKSLTGAQLIAGRDQAAPLHDGEFYIEDLKGLSVTDENGEAIGAIVDIIEGGGGELAEIKLSNGEKRLVPFRKEFFSEISPQNGRVLLKNLWILE

SEQ ID NO: 41915 - DNA, 1617 bp, Unknown
  Obtained from environmental sample
  misc_feature (1)..(1617): n is a, c, g, or t
gtgcccgcccttgttgacggcgcaggccaggctcatgcccttcattcgacggtagaccctgaaaaggaagcccaaagactggctgcaactctgaatgaaggctgggcggaaccgggtttcgtggtgtttctcggccttggcgcggcttacgcggcgaccgcggctttaagcagtggaaacgcgtcccatatccttgtgatagacttcgacatcaacggcgttgcggagcttttaagctcgcaaatgtacgcctcgttaggcgatccccgttttaccctgcttgtagaccctgactcaagccttatacaaaaaacaatactcgatctgtacaacccttgtctttccggcggtatcagggcgctgcccctcagggccagagtcgagcaggataaagaaaaatttgcttttgtccgggaagcggtacagcggacaatagaaaaagtctcggcggactattccgtgcaggctcattttggaatgcgctggttttccaatattatccgcaacatcggtatcgcgcagtcccaaaatttagtaatgccccaaatcagcaaagcggatatcagcgacgccgccatctgcgccgccgggccttcgcttaacgcccagatcccgcttctgcgaacgcggcggaaatctctttttatcattgccgccgatacctctttgcccgcgttgctggcgggaggcgtaaaacctgacgcggtagtgagcatagactgccagcatatcagttactatcattttgtcgggactgcctgcgcggatataccattattccttgacatagcaagcccgcctttgctgtcgggattttccaaccgcttctttttttcgccggcggccaccccccttgccgcgtacataagccaaaaatggatgcccttgctcccattggacactagtggcggcaatgttacttatgcctgcctgtccctcgccgggcagttgggtgcgaagcgcgtaacaatatacggggccgatttctcgtatcctctcggtaagccctatgccaggggaacgtatttctaccccttatttgaaagacagcagaacagactctcccctctggaagcccgtgtgtcgtcattcctctaccgcagcccctttctgccccctgaaaacgaaggacgccgtagcaaagtttccccttgttatgaaacaaccgctttgcgtttttaccgcaagagctttgaagccaaagcctcctcaatggaagcggaagttattgcggaggctggtcttggaatccctttggaaattcggaagaatgcctcacgcagaccatgcccgcgtgagcgggctccagaggcgcagaaagaggaaaagagaaggaactccaataagccgtttgcgtcaggcgggagaatagattttgtgcctggaaaaccgcagatggatgcaagagaatttcttgatcaatacaaaaaagatattaaagcgctgccaatttttgaccgcaacatgaatctaaatgccaatgaaaggcaagttttcacgacactgctcccgttacttgccgcgattaaacgccgccgccctgaattggttacaagcgaccttgttgaaactgttaaaacttactgcgttaaagaaatagaacgtgtgttaaagtaa

SEQ ID NO: 41916 - protein, 538 aa, Unknown
  Obtained from environmental sample
  DOMAIN (161)...(329): Protein of unknown function DUF115
  misc_feature (1)..(538): Xaa is any amino acid
MPALVDGAGQAHALHSTVDPEKEAQRLAATLNEGWAEPGFVVFLGLGAAYAATAALSSGNASHILVIDFDINGVAELLSSQMYASLGDPRFTLLVDPDSSLIQKTILDLYNPCLSGGIRALPLRARVEQDKEKFAFVREAVQRTIEKVSADYSVQAHFGMRWFSNIIRNIGIAQSQNLVMPQISKADISDAAICAAGPSLNAQIPLLRTRRKSLFIIAADTSLPALLAGGVKPDAVVSIDCQHISYYHFVGTACADIPLFLDIASPPLLSGFSNRFFFSPAATPLAAYISQKWMPLLPLDTSGGNVTYACLSLAGQLGAKRVTIYGADFSYPLGKPYARGTYFYPLFERQQNRLSPLEARVSSFLYRSPFLPPENEGRRSKVSPCYETTALRFYRKSFEAKASSMEAEVIAEAGLGIPLEIRKNASRRPCPRERAPEAQKEEKRRNSNKPFASGGRIDFVPGKPQMDAREFLDQYKKDIKALPIFDRNMNLNANERQVFTTLLPLLAAIKRRRPELVTSDLVETVKTYCVKEIERVLK

SEQ ID NO: 41917 - DNA, 930 bp, Unknown
  Obtained from environmental sample
  misc_feature (1)..(930): n is a, c, g, or t
atgatggccgagcggccgagaattgatgaggaacgctgcctaaggcttgctcatgatgaggcaatgtctttttttatcgccaaacgcaagcacccggcaatacagaggctttacccgaataaaagtcctgtatctatcgcaaatgatatttttgcatctgctttgtttaattacacccatattgataaacgtcccaatccgatgaaggattttgccaaacaatacgataccatttgcgatgaatggagagaacaaagcgctcttataatcaacatactgcaaaaacttgctgaagcaaacgcggaaaacgagaattaccttccggaccttacgcctgttataggccaattttcaaccggaggggaaccgagcttctctgaagcgacgcccgcttccacgagtacggcggggggaaccggcaggattatttttccaaacgcgcggcaactcagcgaatattttaaacagattgaagagatcccgcacaataaaattatcgaatggacggattctcaccctttacaaacaacgttaacaaatatcatggaatttcttttatcattaatttctatgagtttagtaaaaggtaaaaagcaaaataaccctgtaaaagaattaataaaagagttacgcgttatatttaaggaattttcgtcaataatggttttttgcatacaggcgggtctgacctgttcggtgctaaaactcttatccaatcttcagaatcgctaccttgacaggaaaagggccgaaaatgttttaacctatactgatgtcgcccgccttgcaagaaacattcttattgaacagcaagacatccgccaaagcgaaaaagaatcgttcaaggcgataatgatagatgaatttcaggataacaacaaactgcagaaagacctggctttttttaatagcggaaaaaaaagatattaa

SEQ ID NO: 41918 - protein, 309 aa, Unknown
  Obtained from environmental sample
  misc_feature (1)..(309): Xaa is any amino acid
MMAERPRIDEERCLRLAHDEAMSFFIAKRKHPAIQRLYPNKSPVSIANDIFASALFNYTHIDKRPNPMKDFAKQYDTICDEWREQSALIINILQKLAEANAENENYLPDLTPVIGQFSTGGEPSFSEATPASTSTAGGTGRIIFPNARQLSEYFKQIEEIPHNKIIEWTDSHPLQTTLTNIMEFLLSLISMSLVKGKKQNNPVKELIKELRVIFKEFSSIMVFCIQAGLTCSVLKLLSNLQNRYLDRKRAENVLTYTDVARLARNILIEQQDIRQSEKESFKAIMIDEFQDNNKLQKDLAFFNSGKKRY

SEQ ID NO: 41919 - DNA, 1608 bp, Unknown
  Obtained from environmental sample
  misc_feature (1)..(1608): n is a, c, g, or t
atgaatttcaggataacaacaaactgcagaaagacctggctttttttaatagcggaaaaaaaagatattaaaaataagaccgtaccgcccgcaaaagacctttctccgggaaaactcttttttgtgggggatgaaaaacaatccgtgtaccttttccggggggccgatgtttccgtgttccgaaaattaaaaagagatctcggcggttctcatcttccccttaaaacaaactaccgttccgcgcccgttctgataggagcgtttaacaccatttttggcggttttaaatttgatcctgaaggaaaagcgccagagtcggcgcctgcggcgaagggaaaaaaatccccctccgtatttgtcacaacagaatcgcaactggcaaaattgccgccggctgagagaacatacttgccgccatttgaggcttcctttaccccgcttcatgcccacaagaaaagcggaggaaaccttaccctttgcatactggacaaacaagactcatcggaaattgactcatccggtgatttagagggaagtgaatcagggcgtttgtcacccgaagaaaacgaggcgcgttatgtcgcctggcgaatcggggagctgttaaaagaaaaaaacgagacaggggaatccaaataccggcccggtgatattgccattctttttcgcacccgcagtccgcagtacctgtttgaaaaacacctgatgctgttgaatatcccctacgcgagcgaggacctgaacggttttttttacggaggcccggtggacgatcttatgtctgtcctccggcttgccgcctaccccaaggacagcgccgcctacgcgcagatgttacgctcgccttttgccggcctttccatgcagggactcgcgctttgtaccggcaaggccgccggcatgaccgccggcgccgctcctttcagcgacgagccgctttcccggctttccgaagatgacaggatcaagtacgcgcacggaaagcacgtttatcaaaaaattcttgacatagcgcaaaaagaaagcgtcagctcccttgtgagcgaattgtggtatggggaaggataccgttatgaaaccgaatggaatcccaggacggccgcctaccgggaattgtacgattacctttttcatcttgcggcacttgccgatgaaaaaaaccagggtcttgcggaattcaccgattacatccaaagcctgtacaactccgacgagcggttaagcgacattgaaatccctctggaacgcccgagcgcggtgcgccttatcaccatacataaaagcaagggccttgaattcccggtagtttttctctgttgctgcaataaaggaaccaaaaatgaaggcagcggggatttgtactataccgatgattcgggcctgacctttaccccccccctgccgcaggaatacggcgataacgccaatatcaggcgcagttacttttgggaacgatctcaggcggttagaaaggaaaaaagaacggcggaactgcgccggcttctttatgtcgccatgacacgggcggaaaacgaattgttcctttcgggcagcctggacatcagcaaggctctcggcccggaaaacaaagatcaaaagtcagattag

SEQ ID NO: 41920 - protein, 535 aa, Unknown
  Obtained from environmental sample
  misc_feature (1)..(535): Xaa is any amino acid
MNFRITTNCRKTWLFLIAEKKDIKNKTVPPAKDLSPGKLFFVGDEKQSVYLFRGADVSVFRKLKRDLGGSHLPLKTNYRSAPVLIGAFNTIFGGFKFDPEGKAPESAPAAKGKKSPSVFVTTESQLAKLPPAERTYLPPFEASFTPLHAHKKSGGNLTLCILDKQDSSEIDSSGDLEGSESGRLSPEENEARYVAWRIGELLKEKNETGESKYRPGDIAILFRTRSPQYLFEKHLMLLNIPYASEDLNGFFYGGPVDDLMSVLRLAAYPKDSAAYAQMLRSPFAGLSMQGLALCTGKAAGMTAGAAPFSDEPLSRLSEDDRIKYAHGKHVYQKILDIAQKESVSSLVSELWYGEGYRYETEWNPRTAAYRELYDYLFHLAALADEKNQGLAEFTDYIQSLYNSDERLSDIEIPLERPSAVRLITIHKSKGLEFPVVFLCCCNKGTKNEGSGDLYYTDDSGLTFTPPLPQEYGDNANIRRSYFWERSQAVRKEKRTAELRRLLYVAMTRAENELFLSGSLDISKALGPENKDQKSD

SEQ ID NO: 41921 - DNA, 498 bp, Unknown
  Obtained from environmental sample
  misc_feature (1)..(498): n is a, c, g, or t
ttgcgagagcaggttgatattgaactctacatgaaatcgcgcaaggagttttaccgccgttttgccgatacccatgttacgcggatactcaccattgaagcgtccggaatcggcgtcgcctgtatcactgcccaatactttaacgtgccggtggtctttgcccgtaaattcagggcaaagaatgttgatgacaatttgttctgcgcgtccgttacgtcctacacccacggagtggattataccattaccgttccccggccttacctcctggaaaccgactcggtgctgctcattgacgattttctcgccaacggctgcgcccttgaggggctggtaaaactcgtcgaaattgccggggcgaaacttgccggggccggagcggttatagaaaaaggttttcagaccggcggcaagcgtttgcgggaacaaaacatccgccttgaatcccttgccatcatcgaaagcatggaccccgaaacaggcatcgtattcaggtaa

SEQ ID NO: 41922 - protein, 165 aa, Unknown
  Obtained from environmental sample
  DOMAIN (6)...(148): Phosphoribosyl transferase domain
  misc_feature (1)..(165): Xaa is any amino acid
MREQVDIELYMKSRKEFYRRFADTHVTRILTIEASGIGVACITAQYFNVPVVFARKFRAKNVDDNLFCASVTSYTHGVDYTITVPRPYLLETDSVLLIDDFLANGCALEGLVKLVEIAGAKLAGAGAVIEKGFQTGGKRLREQNIRLESLAIIESMDPETGIVFR

SEQ ID NO: 41923 - DNA, 570 bp, Unknown
  Obtained from environmental sample
  misc_feature (1)..(570): n is a, c, g, or t
ttggccgctgccggcgatcccggccacaccaaggatctcgccgccgtacaagtcaaagctcatattgtccaggaggggcgttccttctgcgctgagacagccaaggccacgtatttccatcaccggtttttcccgggttacaggcggctccctcttgatctccagagaaacgctggcccccaccataagctcggtcagttcctgagggttggtttcggcggtgttgactgtagtcacgctcttccccctgttcataaccgtaacccggtcgctgatctccatcacttcgttgagcttatgggtgatgattatgacggcgcagccttcctgtttcatgttacgcagcatggtaaaaagctgatccgtttcctggggggtcagtaccgcggtcggctcgtcaaggacaagaacggaagccccccggtacaacattttgagaatctcaacggtctgcttttcgctgaccgacatatcgtaaatttttctgttgtgaaccgtaacaaggccgaaacgcttttcaatttcggagatcttttgatcgatacgtttttttttgataaacggatttaa

SEQ ID NO: 41924 - protein, 189 aa, Unknown
  Obtained from environmental sample
  misc_feature (1)..(189): Xaa is any amino acid
MAAAGDPGHTKDLAAVQVKAHIVQEGRSFCAETAKATYFHHRFFPGYRRLPLDLQRNAGPHHKLGQFLRVGFGGVDCSHALPPVHNRNPVADLHHFVELMGDDYDGAAFLFHVTQHGKKLIRFLGGQYRGRLVKDKNGSPPVQHFENLNGLLFADRHIVNFSVVNRNKAETLFNFGDLLIDTFFFDKRI

SEQ ID NO: 41925 - DNA, 621 bp, Unknown
  Obtained from environmental sample
  misc_feature (1)..(621): n is a, c, g, or t
ttgacatggtcagaatggccgagttctgctattgcggcattgagctgtgctaccaaattgcgagccagcaatggcgatggcggtttaaccaatttaatagacaaaaaagttccaaaccgcaaaagaccgatagttccggcgggtgcaggcagcttcaaaaattttcacgaccgttgcttaggttgccagttatgcacttctgtttgccccaacgatgtgttgtctaataaagcgtttggaaccacaaaacccaatatgtcttatgagcgtggttattgccgcccggaatgcgttaaatgctctgaggtttgcccaagcggagcaataaaaccaattttaagagccgaaaaatcttccatacaaataggctgtgcggtgtggaacaaggaactttgcatcataaatacagacaaagtagtttgcgacctatgctcacgcaaatgcccaaatgcagcaatagctatgataccccaaagcgcagatgcccccccagatgctccaaaaatcccgatgatagacaccaaccgttgcataggctgcggtgcctgcgagcatttatgccccgcccgcccgtatagtgcgattgttgttgagggtgttgaggttcacagaactatttaa

SEQ ID NO: 41926 - protein, 206 aa, Unknown
  Obtained from environmental sample
  SIGNAL (1)...(22)
  DOMAIN (52)...(75): 4Fe-4S binding domain
  misc_feature (1)..(206): Xaa is any amino acid
MTWSEWPSSAIAALSCATKLRASNGDGGLTNLIDKKVPNRKRPIVPAGAGSFKNFHDRCLGCQLCTSVCPNDVLSNKAFGTTKPNMSYERGYCRPECVKCSEVCPSGAIKPILRAEKSSIQIGCAVWNKELCIINTDKVVCDLCSRKCPNAAIAMIPQSADAPPDAPKIPMIDTNRCIGCGACEHLCPARPYSAIVVEGVEVHRTI

SEQ ID NO: 41927 - DNA, 933 bp, Unknown
  Obtained from environmental sample
  misc_feature (1)..(933): n is a, c, g, or t
ttgaagcatggcggaagcagcgttaccagccagaacgtaaactcaggcagtacggcgactcgtcccacaaacccgaccagaagcggctacacttttgataactggtacagcaattccgggctgacaacggtgtacaatttttctacagcggttaactctgatataatattatacgcgaagtggaatcagatcgcatctgctgccactgttaacacagccgccatccagggtataaccgctccggtaaccggcggagcgccggtaataaccattactgaaaatacgcagtacagcggaactatttcgtggtcgcctgctgtaacaggtggtacggcaagaacggtaaaaattgacatgtatgattctgctggtgatggctgggacggcggcggcgcgttgagaatcaatgtaaatgggactaatgttgccaatagtgtaaaagtacaaagcgggtctaccaatacatatacctttactgtcgcggcagacgatgccgttcaagtgtattgggttgcagggacgtatcaggaagaaaactcgtttgttatgtattactccgatacgcctccgagccccgcgtttaccacaagcaatcaaggaccgaccagttggagcggcagtaacgcattggtttatagagtgcgtaatacaatggacagtataagcggtggtacactgttaggttcatttaccaacgcgtcctttgctgccgcaacccagtacacggcgactattacgttgacggcgaanagtggctataccctgcaaggtgtgtcgtctaactttttcacggtttctggggcgacaactgtgagcaatagcgccaactcaggtattgttacagcnaagttcccggcgactgccgccacggttaaacaaaacccccgcagccggcgattacaacatcagcgggaccgggacatttacctatga

SEQ ID NO: 41928 - protein, 310 aa, Unknown
  Obtained from environmental sample
  misc_feature (1)..(310): Xaa is any amino acid
MKHGGSSVTSQNVNSGSTATRPTNPTRSGYTFDNWYSNSGLTTVYNFSTAVNSDIILYAKWNQIASAATVNTAAIQGITAPVTGGAPVITITENTQYSGTISWSPAVTGGTARTVKIDMYDSAGDGWDGGGALRINVNGTNVANSVKVQSGSTNTYTFTVAADDAVQVYWVAGTYQEENSFVMYYSDTPPSPAFTTSNQGPTSWSGSNALVYRVRNTMDSISGGTLLGSFTNASFAAATQYTATITLTAXSGYTLQGVSSNFFTVSGATTVSNSANSGIVTAKFPATAATVKQNPRSRRLQHQRDRDIYL

SEQ ID NO: 41929 - DNA, 762 bp, Unknown
  Obtained from environmental sample
  misc_feature (1)..(762): n is a, c, g, or t
atggtaacagattttgatacagtttttgatattgattttgccatttttggaaacggcttttttaaaatcagacttgaaaataatgtcattggttatacaagatacggaagattttctatgagtttaagtaattctgattctgaatttactttaaaaataccggaatatggttacgaattatatgatccaatagtaataccaaataatacattaaaattaatatatgaaaacaatacattatttgcattattgattaatgatacaaaaaaagaagttggcagaataaatatttacgatgtcgatgatgaaaaattaataagatataaagataatatatttattactttagataattatgaaagtaaaaaaataattgattcaaatattattaaaggatgtcttgaaatgagcaatgtttccgtaatagaaacattaatgagaatgcatattattttatgggaattaaaaaacagcgggtataattttgatgatagggatcaaataatattaatgcttatcaataacattccgatacttaatgagttggaagcaataaaaagagaattattgaatgtacaagaaataatattagataaagaaaatagattaacaacaacagaagatataaaaattacaactaatttattagaattaaagtttccggaaagaatttataatacattgcatcaaagaatgacaatgtatgaaatatttagagacaatttgttaaaaagcagtataaaatttctgaaaatcaaataa

SEQ ID NO: 41930 - protein, 253 aa, Unknown
  Obtained from environmental sample
  misc_feature (1)..(253): Xaa is any amino acid
MVTDFDTVFDIDFAIFGNGFFKIRLENNVIGYTRYGRFSMSLSNSDSEFTLKIPEYGYELYDPIVIPNNTLKLIYENNTLFALLINDTKKEVGRINIYDVDDEKLIRYKDNIFITLDNYESKKIIDSNIIKGCLEMSNVSVIETLMRMHIILWELKNSGYNFDDRDQIILMLINNIPILNELEAIKRELLNVQEIILDKENRLTTTEDIKITTNLLELKFPERIYNTLHQRMTMYEIFRDNLLKSSIKFLKIK

SEQ ID NO: 41931 - DNA, 714 bp, Unknown
  Obtained from environmental sample
  misc_feature (1)..(714): n is a, c, g, or t
atgcaactaaacgccaaatacagtgtcaaaagatatgtgaacataataaaaagaaattcgacagcggctgttctgcctttttatacaattggtgaagagatagcaaattccgtacttcacggtattggcgcgcttgccgcaataataggacttgtttttttgaatctcaaaaacacgggatttttggatggaaatagggccgccaatatggatattgtagcgacggttttatttaccgctacaatgatcggaatgtttttaatatcaaccttgtatcatgcgatacaacatcagggcgttaaaagtttcttccgtaaactggatcattcggtaatatttatttttatcgcaggaacttacacccctatatgtttatgcggcctacgcggagcgtggggttggagtctttttgcggttgaatgggcgctggctttgaccggcattatcttgaacattttaaattccaaaacgataaaaaaaattgaaataacagtttatataatgatgggttgggctataattatcgggttcgttcccttggttcatcgcgtgccgataatcagtataattttgttattggcaggaggagccgcatatactcttggagctgttttttataaaaagaaaagtatcaggcatactcatgttatatggcatacctttgttattatcggggcagtatgtcattggttttccgtatggcatttaaattaa

SEQ ID NO: 41932 - protein, 237 aa, Unknown
  Obtained from environmental sample
  DOMAIN (28)...(230): Haemolysin-III related
  misc_feature (1)..(237): Xaa is any amino acid
MQLNAKYSVKRYVNIIKRNSTAAVLPFYTIGEEIANSVLHGIGALAAIIGLVFLNLKNTGFLDGNRAANMDIVATVLFTATMIGMFLISTLYHAIQHQGVKSFFRKLDHSVIFIFIAGTYTPICLCGLRGAWGWSLFAVEWALALTGIILNILNSKTIKKIEITVYIMMGWAIIIGFVPLVHRVPIISIILLLAGGAAYTLGAVFYKKKSIRHTHVIWHTFVIIGAVCHWFSVWHLN

SEQ ID NO: 41933 - DNA, 726 bp, Unknown
  Obtained from environmental sample
  misc_feature (1)..(726): n is a, c, g, or t
atgaaaacaaaccctgtcgcggattatcttgccgctgtaacgcctgaaaaaattgattccggaatgctggcttatatttgcaatttagctgaaatcgcgaaagttactccggaaatcgcctcttctatcgtactggaacttgaaaaccagagaaaacgggtaaagctgattgcaagcgaaaattactgttccatggcggtacaactggctatggggaatcttttaaccgacaaatacgccgagggcgttcccaatcaccgtttttacgcggggaacgaaaatgttgacgctatcgaaactttggcggcgcaggaggcgtgcaagcttttcggcgcgcagtacgccaatgtgcagcctcactgcggagcggacgccaatttgcttgcatactgggctatccttagcacgcgcattgaaaatccggcgctggaaaaatggggcgaaaccaatctttacaaattaaccgattcccaatggaacgaattaagggcttctttcgggaaccagcgccttttgggtcttgattattattccggcggacatttaacacacggttacaggcataatctttccgggcgaatgtttgatatttacggatattccgtatccgccaaagacggaatgctggattacgatgaaattgaaaaacaggcgttacaggtgcgcccgttaattttattgacaggctattccgcctatccgcggaaaaaaattttaagcgcatga

SEQ ID NO: 41934 - protein, 241 aa, Unknown
  Obtained from environmental sample
  DOMAIN (32)...(241): Serine hydroxymethyltransferase
  misc_feature (1)..(241): Xaa is any amino acid
MKTNPVADYLAAVTPEKIDSGMLAYICNLAEIAKVTPEIASSIVLELENQRKRVKLIASENYCSMAVQLAMGNLLTDKYAEGVPNHRFYAGNENVDAIETLAAQEACKLFGAQYANVQPHCGADANLLAYWAILSTRIENPALEKWGETNLYKLTDSQWNELRASFGNQRLLGLDYYSGGHLTHGYRHNLSGRMFDIYGYSVSAKDGMLDYDEIEKQALQVRPLILLTGYSAYPRKKILSA

SEQ ID NO: 41935 - DNA, 1140 bp, Unknown
  Obtained from environmental sample
  misc_feature (1)..(1140): n is a, c, g, or t
gtggtgcgcgaagaccacggcagcggtcttgagggtatagaaatcgaaaaactccccacgccccaagagatgatggatttcttggatcagtacgtcatagggcaaaacgaggtcaagatggccgtgtgcgtcgccgcctacaaccacttcaaacgcctgttctcacgggggcaaaacgacgacgacgtggagatcgacaagtccaatatgctgatgataggcccaaccggcaccggcaaaacgctgatagcgcaaaccctcgcgagattcctaaaagtccccttcacaatagtggacgccaccatcttcacagaggccggctacgttggcgacgacgttgagaatatgctggttaggctgctgcaaaccgctaactacgacgtgccaaaggcggagaaaggcatcatttacatagacgagttcgacaaaatatcaagaaaatcggccaacccgtcgataacgcgcgacgtctccggcgagggcgtccaacaggccatgctgaaaatattggagggcacggtggccggcgtcccccccaagggagggcgaaaacacccggagcagagcctcatccaaataaacacaagggatatcctcttcatctgcggaggcgcgtttgaggggcttgacaagataatagaggcgagaatagaccagagccgcatgggtttcaacgccgacgtgaggagcaaaagccagaaaaagataggcgaggtgctgcgcaaggtcgagccggacgacctgatctctttcggcctgataccggagatcataggccgcctgccggtggtgatgggtttggatcaattggacgaagactccctgctgcgcatcctcacggagccgaagaacgcgcttgtcaagcagtaccaaaaactcttcgccatggaggggcgtgaaatgactttcgatatagaggcgcttaaagagacggtagataccgccgtgcgaaaaaagaccggcgccagagggcttcgcaacgtgctggagtcgtgcctgctgccggtgatgttcgaactgccgtcgagggacgatgtgtccgaagtgctggtgactaaggagtccgtggtgaacaaaacgccgccggaatatgtgttcaagggcggggaggataagcgggagggcaaaaagagtgcgtga

SEQ ID NO: 41936 - protein, 379 aa, Unknown
  Obtained from environmental sample
  DOMAIN (69)...(271): ATPase family associated with various cellular activities (AAA)
  misc_feature (1)..(379): Xaa is any amino acid
MVREDHGSGLEGIEIEKLPTPQEMMDFLDQYVIGQNEVKMAVCVAAYNHFKRLFSRGQNDDDVEIDKSNMLMIGPTGTGKTLIAQTLARFLKVPFTIVDATIFTEAGYVGDDVENMLVRLLQTANYDVPKAEKGIIYIDEFDKISRKSANPSITRDVSGEGVQQAMLKILEGTVAGVPPKGGRKHPEQSLIQINTRDILFICGGAFEGLDKIIEARIDQSRMGFNADVRSKSQKKIGEVLRKVEPDDLISFGLIPEIIGRLPVVMGLDQLDEDSLLRILTEPKNALVKQYQKLFAMEGREMTFDIEALKETVDTAVRKKTGARGLRNVLESCLLPVMFELPSRDDVSEVLVTKESVVNKTPPEYVFKGGEDKREGKKSA

SEQ ID NO: 41937 - DNA, 348 bp, Unknown
  Obtained from environmental sample
  misc_feature (1)..(348): n is a, c, g, or t
ttggaagcggttcacgcactctttttgccctcccgcttatcctccccgcccttgaacacatattccggcggcgttttgttcaccacggactccttagtcaccagcacttcggacacatcgtccctcgacggcagttcgaacatcaccggcagcaggcacgactccagcacgttgcgaagccctctggcgccggtcttttttcgcacggcggtatctaccgtctctttaagcgcctctatatcgaaagtcatttcacgcccctccatggcgaagagtttttggtactgcttgacaagcgcgttcttcggctccgtgaggatgcgcagcagggagtcttcgtccaattga

SEQ ID NO: 41938 - protein, 115 aa, Unknown
  Obtained from environmental sample
  misc_feature (1)..(115): Xaa is any amino acid
MEAVHALFLPSRLSSPPLNTYSGGVLFTTDSLVTSTSDTSSLDGSSNITGSRHDSSTLRSPLAPVFFRTAVSTVSLSASISKVISRPSMAKSFWYCLTSAFFGSVRMRSRESSSN

SEQ ID NO: 41939 - DNA, 537 bp, Unknown
  Obtained from environmental sample
  misc_feature (1)..(537): n is a, c, g, or t
gtgaaccgcttccaaaaatcagaatgcctatataaccgcgccgtatcaaacgacggcgccggtatctccgaagacgatatgcgggaaatcgccgagtggccgcttgatcggtcggcgttgctctttgccgccgccgaccaggcaagacggcattttttcggcggcgcggttgatccgtgcgcgattatgaacgtcaaatcgggcgggtgcggcgaggattgcgctttctgctcgcagtccgcgcataatcgggccgacgtcgccgtgcgcgggctttccgcttcgaaagagatcgtctctcggtgccgcgaggcgtggtctaaagggttgcctttttgcgctgtgtcaagcgggcggcgcctcagcccgtcggaatttaagacgctgtgcgatacgctttcggagtgcggaaatgacggagagaaacacgcgtcgctgggtatcctcggagatagcgatttcgcggcgctgcgggacgcgggcgtagtttgctacaaccacaatttggagaccggccgcgatttttcggcaaaatag

SEQ ID NO: 41940 - protein, 178 aa, Unknown
  Obtained from environmental sample
  misc_feature (1)..(178): Xaa is any amino acid
MNRFQKSECLYNRAVSNDGAGISEDDMREIAEWPLDRSALLFAAADQARRHFFGGAVDPCAIMNVKSGGCGEDCAFCSQSAHNRADVAVRGLSASKEIVSRCREAWSKGLPFCAVSSGRRLSPSEFKTLCDTLSECGNDGEKHASLGILGDSDFAALRDAGVVCYNHNLETGRDFSAK

SEQ ID NO: 41941 - DNA, 993 bp, Unknown
  Obtained from environmental sample
  misc_feature (1)..(993): n is a, c, g, or t
atggaaaagatacttacattttcggatttggagacccaaaacaagaagaaacgcacccgccgcgaggaatttctgagcaagatggaatccatcgttccttggtcagacatagtctcgctagtgaagccttactattacaccaaccggacaggccgccccgccactaggctagaggtgattcttcgcatgtattttctccagatatggttttccatgagcgatgaaggcttggaagatgccatatacgacagcaaggcattcagctcattcatgggtgtgtctctggattccatccccgatgcaaccgttctgggcaatttccgtaaaattgtaaacggcaacggtcttggcggcaagatgctttcccttgtgaatgcaaagatagagaagaacggtttgataatgcatggcggaacgataatggatgccaccatccacgaggcacccaagtccacgcgcaatgcgagccaatcccgcgatgcagagatggctagcactaagaagcatggcagctggcatttcggagccaaatcccacataggcgttgatgctggaactggtcttgttcacagcgttgagattacgcctgccaacgtgcacgacataaaggttgcccacaagcttatacgccccgatgacaaaacagccggaggcgatagcggttatgttggcttggagaatcgcgaggagatgaagggcgatccgtttctatcccaagtgaagtgcgagatagtgaagcgtccctcgttttggaagaaaaaagagttgagcaagcttgcggaggaatttgacagaaatgaagagcgcaggctcataagcaaaaggcagaaagtggaatatgtgttccatgtcatcaaggatatattcaaattcaaaaagcttccctacaagggcattgccaagaacgcggaacgccttctggcatcatttgccaatgccaatctttatatgcttgccatagcaggccgcaggttctgccagcagacgggttga

SEQ ID NO: 41942 - protein, 330 aa, Unknown
  Obtained from environmental sample
  DOMAIN (138)...(315): Transposase DDE domain
  misc_feature (1)..(330): Xaa is any amino acid
MEKILTFSDLETQNKKKRTRREEFLSKMESIVPWSDIVSLVKPYYYTNRTGRPATRLEVILRMYFLQIWFSMSDEGLEDAIYDSKAFSSFMGVSLDSIPDATVLGNFRKIVNGNGLGGKMLSLVNAKIEKNGLIMHGGTIMDATIHEAPKSTRNASQSRDAEMASTKKHGSWHFGAKSHIGVDAGTGLVHSVEITPANVHDIKVAHKLIRPDDKTAGGDSGYVGLENREEMKGDPFLSQVKCEIVKRPSFWKKKELSKLAEEFDRNEERRLISKRQKVEYVFHVIKDIFKFKKLPYKGIAKNAERLLASFANANLYMLAIAGRRFCQQTG

SEQ ID NO: 41943 - DNA, 351 bp, Unknown
  Obtained from environmental sample
  misc_feature (1)..(351): n is a, c, g, or t
atggtgttgtgcgacaaagccttattggacgaggtaacgtcgagggtctgcgccgccgctaaggaggtcttaggcgacaagttgaggaaagtaatcctttacggttcgtacgctcgcggcgactacgacgagtattcggacatagacttcttcgttcttgctgacatcccgcaggaggagtgttgcagggcgggttcaaacatctatcatcgcgtgtcgatgtttgagttggagcagggtataatgattagcccgcacgttacgggctacgagacgtttattagttggcggaatgttttgccgtattatatgaacgtcatacaagaggggatagagttgtatgccgcctga

SEQ ID NO: 41944 - protein, 116 aa, Unknown
  Obtained from environmental sample
  DOMAIN (9)...(113): Nucleotidyltransferase domain
  misc_feature (1)..(116): Xaa is any amino acid
MVLCDKALLDEVTSRVCAAAKEVLGDKLRKVILYGSYARGDYDEYSDIDFFVLADIPQEECCRAGSNIYHRVSMFELEQGIMISPHVTGYETFISWRNVLPYYMNVIQEGIELYAA

SEQ ID NO: 41945 - DNA, 405 bp, Unknown
  Obtained from environmental sample
  misc_feature (1)..(405): n is a, c, g, or t
atgccgcctgaagaacacactcctgaagatttggcgacttttcgtcttcatcaggcgagagtatcgttgcaagcggcattggctgctttggattttcagactgccgctaaccgctcgtattaccgtatcttttacgccatgcgcgcggttcaggcgcttgacagatttgattccagaaagcattccggcgtaatagacaattttcgcaaaaattatatcagaacagaaatcttctcacatgacttttcagatattatcggggatgcctttaaaatccgccttgaaagcgattatgaagatttttatcttatttcaaaggaagaggtcgccgctcaagtcgaaaacgccaaaacatttttagaggcgatggagaagtacgtcggcgagagaatcaaacacccatga

SEQ ID NO: 41946 - protein, 134 aa, Unknown
  Obtained from environmental sample
  DOMAIN (8)...(131): Protein of unknown function DUF103
  misc_feature (1)..(134): Xaa is any amino acid
MPPEEHTPEDLATFRLHQARVSLQAALAALDFQTAANRSYYRIFYAMRAVQALDRFDSRKHSGVIDNFRKNYIRTEIFSHDFSDIIGDAFKIRLESDYEDFYLISKEEVAAQVENAKTFLEAMEKYVGERIKHP

SEQ ID NO: 41947 - DNA, 1023 bp, Unknown
  Obtained from environmental sample
  misc_feature (1)..(1023): n is a, c, g, or t
gtgcaggaagttttaaggagaattattatgggtaaaatgtattatgacagcgattgcaatctcgcctttttaaagggtaaaactattgcaattatcggttacggttctcagggccacgctcacgcgcaaaatttaagggatagcggaatgcaggtgattgtgggattgtacgaaggctccaaaagcgcggagatcgcgaaaaaggacggctttaccgttctgaatacagacgaggctgttaaaaaagccgatatcgttatgctgcttgtcaatgatgaaaaaatgaaagcgatttatgacaagggagttgcacctaacctgaaggaaggcatgactctttgttttgcccacggctttaacatcagatacgagcaaatttccccgcccaaaaatgtgaacgtaataatgattgcgccaaagggtccggggcatacagtaaggagccagtatctggaaaacaagggagtaccctgcctaattgccgttgaaaacaacgcgacgggaaacgcgaaagaaattgcccttgcttacgcttccggtatcggcggaggccgtggaggaattctggaaaccacctttaccgaagaaaccgagaccgacctttttggcgaacagtgcgtgctgtgcggcggcgttaccgctttgatgaaggccgggttcgagacccttgtgaacgcgggctatcagcctgaaagcgcatactttgaatgtatacacgaaatgaagctgatcatcgatcttgtaataaaaggcggcttgtcctttatgcgctattcggtcagcgacacggcggagtacggggattactgcataggcgacaggatcatcacacaggctaccaaggacgaaatgaaaaaggttctggcggcgattcaggacggctctttcgcgaagcagtggctaaaagaaaatgccgacggaaggccgactttcacggcgcggcgcaaggccgagaccgagctacaggtagaagtagtcggcagggagcttagggaaaaaatgagctggagcgacaagaagtga

SEQ ID NO: 41948 - protein, 340 aa, Unknown
  Obtained from environmental sample
  DOMAIN (193)...(338): Acetohydroxy acid isomeroreductase, catalytic domain
  misc_feature (1)..(340): Xaa is any amino acid
MQEVLRRIIMGKMYYDSDCNLAFLKGKTIAIIGYGSQGHAHAQNLRDSGMQVIVGLYEGSKSAEIAKKDGFTVLNTDEAVKKADIVMLLVNDEKMKAIYDKGVAPNLKEGMTLCFAHGFNIRYEQISPPKNVNVIMIAPKGPGHTVRSQYLENKGVPCLIAVENNATGNAKEIALAYASGIGGGRGGILETTFTEETETDLFGEQCVLCGGVTALMKAGFETLVNAGYQPESAYFECIHEMKLIIDLVIKGGLSFMRYSVSDTAEYGDYCIGDRIITQATKDEMKKVLAAIQDGSFAKQWLKENADGRPTFTARRKAETELQVEVVGRELREKMSWSDKK

SEQ ID NO: 41949 - DNA, 672 bp, Unknown
  Obtained from environmental sample
  misc_feature (1)..(672): n is a, c, g, or t
atgaaaggcgcgtacgtcttctcctgcggcaagaatatgggcgtcttcaaggcggtgggcttcccggaggacgtggggcggttctacaaactggaggagtacgaggggtactgtttcacggcgcacgggcgctaccccaccaacacgccgggctggtggggcggagcccacccgttcgcgctgctcgactactccgtggtgcacaacggggagatatcctcctacgacgccaaccggcgggccatagagatgtacgggtacaagtgctcgcttcagaccgacaccgaggtcatcacctatataatagactacctgcaccggaggaagcgcctcaccctcgaggagatcgccacggtggtcgccgcgccgttttggcagaccatagagcgcatggaaccgcgcgaacgggaggaacacgagtacctgcgcacgatcttctcgtcgcagctcatcaccggcccgttctcgatcctcgtggggttcaacggcgggctgatggcgctcaacgaccgcctgaaactgcgcagcatggtcgtgggcgagaggggcgacatggtctacatagcgagcgaagaggcggctattcgggtgattgaaccgaaccttgacaacctgtgggctcccaagggcggagaacctgtgatcgttcacgcaaacggaggcgatgtgtaa

SEQ ID NO: 41950 - protein, 223 aa, Unknown
  Obtained from environmental sample
  DOMAIN (9)...(192): Glutamine amidotransferases class-II
  misc_feature (1)..(223): Xaa is any amino acid
MKGAYVFSCGKNMGVFKAVGFPEDVGRFYKLEEYEGYCFTAHGRYPTNTPGWWGGAHPFALLDYSVVHNGEISSYDANRRAIEMYGYKCSLQTDTEVITYIIDYLHRRKRLTLEEIATVVAAPFWQTIERMEPREREEHEYLRTIFSSQLITGPFSILVGFNGGLMALNDRLKLRSMVVGERGDMVYIASEEAAIRVIEPNLDNLWAPKGGEPVIVHANGGDV

SEQ ID NO: 41951 - DNA, 441 bp, Unknown
  Obtained from environmental sample
  misc_feature (1)..(441): n is a, c, g, or t
atgataatgaaaagagtctacgtaaacgaaaaatggtgtttgggctgccatctctgcgaatactattgcgcgttcgccgggacggacgagacggacatggctcgggcgctgaagacgataaagatcaatccgaagatcaaaatcgaggagaaggacggcgtgagtttcgccgtctcatgccggcactgcaaagagcctctgtgcgtcaaaggatgcatcacgggggcgctgaccatatcggcggacggcgtcatcacgataaatcacgaccgctgcgtgagctgcttcacctgcattttgagctgcccttacggggcggtctcgccgtcggacgacggggcggtgcagaagtgcgagctgtgcgtcaaaacggcaaaggggcagccggcttgcgtttcagggtgccccaacggcgcgatcgtctttgaggagagagggtga

SEQ ID NO: 41952 - protein, 146 aa, Unknown
  Obtained from environmental sample
  DOMAIN (85)...(108): 4Fe-4S binding domain
  misc_feature (1)..(146): Xaa is any amino acid
MIMKRVYVNEKWCLGCHLCEYYCAFAGTDETDMARALKTIKINPKIKIEEKDGVSFAVSCRHCKEPLCVKGCITGALTISADGVITINHDRCVSCFTCILSCPYGAVSPSDDGAVQKCELCVKTAKGQPACVSGCPNGAIVFEERG

SEQ ID NO: 41953 - DNA, 558 bp, Unknown
  Obtained from environmental sample
  misc_feature (1)..(558): n is a, c, g, or t
gtggccgcgatagcgagcggcatagcccgcagcggcgcggacatcatatcgatagacggcttcagaggcggcaccggggcggcacccacgcgcatccgcgacaacgtgggcatcccgatagagctggccttagcgagcgtagacaaccgtctgcgcgaagagggcatccgcgacgacgtgtcgataatcgtcggcggcagcataagatccagcgccgacatagtgcgcgccatagccctcggagccgactgcgtctacgtggccacgtccgcccttttagccctgggatgccacctatgcagaagctgccacgccggcaaatgcaactggggcatagcgacgcaagccccggaattagtaaaacgccttaatcccgatatcggatacaaacgtttagtcaacctgatgaccgcttggcaacatgagataaaggaaatgatgggcggaatgggaataaattccatagagagtctaaaaggaaaccgcctaatgttacgaggcgtgggcctaaacgaaaaagagctttcaattttggggattaagcacgcgggagaatga

SEQ ID NO: 41954 - protein, 185 aa, Unknown
  Obtained from environmental sample
  DOMAIN (1)...(153): Conserved region in glutamate synthase
  misc_feature (1)..(185): Xaa is any amino acid
MAAIASGIARSGADIISIDGFRGGTGAAPTRIRDNVGIPIELALASVDNRLREEGIRDDVSIIVGGSIRSSADIVRAIALGADCVYVATSALLALGCHLCRSCHAGKCNWGIATQAPELVKRLNPDIGYKRLVNLMTAWQHEIKEMMGGMGINSIESLKGNRLMLRGVGLNEKELSILGIKHAGE

SEQ ID NO: 41955 - DNA, 867 bp, Unknown
  Obtained from environmental sample
  misc_feature (1)..(867): n is a, c, g, or t
atgaacttcagtgaaaagataaagaatttttttacgggaaaacccgctgttaatgaagaattgtttgatgaactttgcgatttgttaatagaaggcgatttcggcgcgagtcaggcgtatcaaacggttgaacaattaaaagcgtattataaaaaagataactcagttacgttacctgaaaaattggctcaattactcgaagacgagttaaaaaaagcgcctgctgttaattcttccgatgcccccgataaactaacggctattttgcttctcggcgtaaacggggttggcaaaacaactaccgccgcaaaactttccaacctttacaacacaaagttaaataaaaaaaccatactcgccgcggcggacactttcagagccgcggcaattgatcaattaaaaatccacggagaaaaattaaatacgcgggtagtggctcataaacagggcggagaccccgcggcggtggtttatgacgcgttggaagccgcgcagtccgggggagcggatgttgttatcgctgacaccgccggaagaatgcatacaaaatcagcgttagttgaagaattgcgcaaaatagacagggtagtggagtcaagggcgggcggcgcgaattatcttaaatatcttgtgctggacgcgactaccggaagaaacgctttcgctcaggcggaaatatttcacggcgcggtcgttctggacggagtaatattgactaaatatgattctacggcaaagggcggagtggttttttctttggcggacgaattaaaactgcctgtggcgtatatatgcacgggcgaaaaatacgaggatatcgaattatttgatcctcataaatttgcgagggaatttgcgggtatttaa

SEQ ID NO: 41956 - protein, 288 aa, Unknown
  Obtained from environmental sample
  DOMAIN (84)...(287): SRP54-type protein, GTPase domain
  misc_feature (1)..(288): Xaa is any amino acid
MNFSEKIKNFFTGKPAVNEELFDELCDLLIEGDFGASQAYQTVEQLKAYYKKDNSVTLPEKLAQLLEDELKKAPAVNSSDAPDKLTAILLLGVNGVGKTTTAAKLSNLYNTKLNKKTILAAADTFRAAAIDQLKIHGEKLNTRVVAHKQGGDPAAVVYDALEAAQSGGADVVIADTAGRMHTKSALVEELRKIDRVVESRAGGANYLKYLVLDATTGRNAFAQAEIFHGAVVLDGVILTKYDSTAKGGVVFSLADELKLPVAYICTGEKYEDIELFDPHKFAREFAGI

SEQ ID NO: 41957 - DNA, 624 bp, Unknown
  Obtained from environmental sample
  misc_feature (1)..(624): n is a, c, g, or t
atggaggatatacttgatgtttacaccagaaaatatgatgaaaactgcattttggtatgtatggatgaagtcccccggcagttgattggtgaaaaacggatacctattccggcggggcgcggcaaaatcgcccgttacgacactgagtacaaacgcaacggcacatgtgaaattttcatgtttgcagcgcctttgaaaggctggagaagggcggaagtaatggaacatcggacaggccttgattgggctcagcagataaaaaaattgataacggttgattttccccatgctaaaaaaattgttcttgttatggacaacctcaatactcataccataggctccctgtataaagcgtttccgtctgaagaagcaagaaattatcgtaacaaacttgaaatccatttgacgccgaaacatggcagctggctcaatatggcggagatcgaaatcaatgtgcttgtgaatcacggcctttcaaaacgcgttccttccatgcggcagatgataaaagaagtctccgcgtggaacaaagcccgcaaccggagcgcaagtaaaatcaattggaggttttcaacggaggacgcaagaattaaacttaaacggctctatccacaatttatatag

SEQ ID NO: 41958 - protein, 207 aa, Unknown
  Obtained from environmental sample
  misc_feature (1)..(207): Xaa is any amino acid
MEDILDVYTRKYDENCILVCMDEVPRQLIGEKRIPIPAGRGKIARYDTEYKRNGTCEIFMFAAPLKGWRRAEVMEHRTGLDWAQQIKKLITVDFPHAKKIVLVMDNLNTHTIGSLYKAFPSEEARNYRNKLEIHLTPKHGSWLNMAEIEINVLVNHGLSKRVPSMRQMIKEVSAWNKARNRSASKINWRFSTEDARIKLKRLYPQFI

SEQ ID NO: 41959 - DNA, 1251 bp, Unknown
  Obtained from environmental sample
  misc_feature (1)..(1251): n is a, c, g, or t
atgaaggcccgctgggaagccgagaaagttgacatacagggtatccgcgaattaaagcagagaattgaagaactaaaaatagaagaaacccgttacgagcgggaggggaatcttttaaaagccgccgaggtaaagcacggaaaaattcccgaagcccagaaacagcttgccgcgcttgcgaaccttatggaaaagaagcgaaacgaagccgggggttcaggcacggcggctcttctgcgggaagaggtaagcgaggaagacattgccgccgtggtatcagcgtggacggggattcccgtttccaagatgctttccggcgaaatgcagaagtaccttgacctggaaaaagcgctggaacgacgggtagtcggacaagaccaggcgcttgccgcggtcgccgacgcgatcaggaggaacaaggccggtctctccgatgccgcaaagccttttggttctttccttttcctggggcccaccggcgtgggcaaaaccgaattggcaaagacccttgcggatttcctgtttaacgacgagaaagcccttgccaggatcgatatgagcgaatacggtgagaaacattcggtcagccgcttgatcggcgcgcctccgggctatgttggctacgagcagggcggacagcttacagaagtcgtgcgacgccggccctacagcgtggttctttttgacgaaatagaaaaagcccacccggaagtgtttaatgtttttttgcagatcctcgacgacggacgccttacggacggacagggccgcattgtggattttaagaatgtcattgtcattatgaccagcaacctcggttcggatttaattcttgaagcaagtaatcctgaagccgtaagaaatgctctggacgaattattaaaacagagctttaggccggaatttctgaaccgaattgacgaaacggtaatttttaaccggctgggcaaaaacgaaatcggcaaaattgtggacattcagcttgcccgcctgaccgcgcgtttagccgaacggaaaattattctgcgggtgagcaatgcggcaaaggaactgcttgccgaacggggctatgatccccagtttggggcgcggccactcaagcgctgtattcaggccgatcttgaaaatccgctggcaaagctagttattgcggggaaaatccgcgaaggcgacactattacagttgacagctcaatgtttggcaacgggctggagtttcaaaatgccgcaggaaaaacagagggtttataa

SEQ ID NO: 41960 - protein, 416 aa, Unknown
  Obtained from environmental sample
  DOMAIN (152)...(353): ATPase family associated with various cellular activities (AAA)
  misc_feature (1)..(416): Xaa is any amino acid
MKARWEAEKVDIQGIRELKQRIEELKIEETRYEREGNLLKAAEVKHGKIPEAQKQLAALANLMEKKRNEAGGSGTAALLREEVSEEDIAAVVSAWTGIPVSKMLSGEMQKYLDLEKALERRVVGQDQALAAVADAIRRNKAGLSDAAKPFGSFLFLGPTGVGKTELAKTLADFLFNDEKALARIDMSEYGEKHSVSRLIGAPPGYVGYEQGGQLTEVVRRRPYSVVLFDEIEKAHPEVFNVFLQILDDGRLTDGQGRIVDFKNVIVIMTSNLGSDLILEASNPEAVRNALDELLKQSFRPEFLNRIDETVIFNRLGKNEIGKIVDIQLARLTARLAERKIILRVSNAAKELLAERGYDPQFGARPLKRCIQADLENPLAKLVIAGKIREGDTITVDSSMFGNGLEFQNAAGKTEGL

SEQ ID NO: 41961 - DNA, 429 bp, Unknown
  Obtained from environmental sample
  misc_feature (1)..(429): n is a, c, g, or t
gtgggctttttctatttcgtcaaaaagaaccacgctgtagggccggcgtcgcacgacttctgtaagctgtccgccctgctcgtagccaacatagcccggaggcgcgccgatcaagcggctgaccgaatgtttctcaccgtattcgctcatatcgatcctggcaagggctttctcgtcgttaaacaggaaatccgcaagggtctttgccaattcggttttgcccacgccggtgggccccaggaaaaggaaagaaccaaaaggctttgcggcatcggagagaccggccttgttcctcctgatcgcgtcggcgaccgcggcaagcgcctggtcttgtccgactacccgtcgttccagcgctttttccaggtcaaggtacttctgcatttcgccggaaagcatcttggaaacgggaatccccgtccacgctga

SEQ ID NO: 41962 - protein, 142 aa, Unknown
  Obtained from environmental sample
  misc_feature (1)..(142): Xaa is any amino acid
MGFFYFVKKNHAVGPASHDFCKLSALLVANIARRRADQAADRMFLTVFAHIDPGKGFLVVKQEIRKGLCQFGFAHAGGPQEKERTKRLCGIGETGLVPPDRVGDRGKRLVLSDYPSFQRFFQVKVLLHFAGKHLGNGNPRPR

SEQ ID NO: 41963 - DNA, 765 bp, Unknown
  Obtained from environmental sample
  misc_feature (1)..(765): n is a, c, g, or t
ttgtcgtatataagattctgccgcgcggtgctgctcttcggcctgtgttttcttatcatacagcccctgctggacaagctcagcgttagctttatggagcatcaggacctgtatgacagtacggttataagcatcccacgccatttcacattgtcgaattacaacctggctggcgagcttcttactttttggccggcgctgtttcagacattaattatcgtagtagtcagttctgttttacagatttccgcgtgcgcccttgcgggttatggttttgcccgctataaatttccgcttaaaaatttttggtttatgtgcgttatgctgattattgtcgtcccgccccagaccataatggcttcgctctatctcaatttccgtttttttgacatattcaggctggcgaggctgataagcggaagtccgttgaatttattgaacagcgccgcgggttatttggcgctttccgctacgggaatggggctgaaaagcggattgtatatctttatgctcaggcagtatttccggggcatgcccaaagaacttgaagaagcggcctatgtggacggctgcggaaggttcatgacatttgtcaggataatgcttccagacgcggtgcccatgctcacttcgtgttttttattttcttttgtgtggcagtggacggattcgttttatacatcgctgtttttaagcgaatacaaaatattgtcggtgaacttaagccggattgccgacaagctcgcggtgtggggacggcgatga

SEQ ID NO: 41964 - protein, 254 aa, Unknown
  Obtained from environmental sample
  DOMAIN (63)...(254): Binding-protein-dependent transport system inner membrane component
  misc_feature (1)..(254): Xaa is any amino acid
MSYIRFCRAVLLFGLCFLIIQPLLDKLSVSFMEHQDLYDSTVISIPRHFTLSNYNLAGELLTFWPALFQTLIIVVVSSVLQISACALAGYGFARYKFPLKNFWFMCVMLIIVVPPQTIMASLYLNFRFFDIFRLARLISGSPLNLLNSAAGYLALSATGMGLKSGLYIFMLRQYFRGMPKELEEAAYVDGCGRFMTFVRIMLPDAVPMLTSCFLFSFVWQWTDSFYTSLFLSEYKILSVNLSRIADKLAVWGRR

SEQ ID NO: 41965 - DNA, 927 bp, Unknown
  Obtained from environmental sample
  misc_feature (1)..(927): n is a, c, g, or t
atgtattttattaaaaagaacgataaatattccctgacactggaaggcagaaacgccgtcgctgggtatctgtttattctgccttttattctcggccttctggcgtttatgtttttaccccttcttgaatctttgcgcatggtattcagcgaggttaatatcgaccttgacaggcacagatttgccatggatttcaccggccttgataacctgaagcgcgtgcttatgattgatgcggaatttaaccggctgcttgtcgaggaagtagggcgtatgctgctgatagtccccgcggtaattattttcagcctgtttatagccctgctcctgaatcaggaatttaaggcgaggggttttgtgcgggctatttttttcctgccggttatcctttcctcaggcatcatgatagggcttgagacaaacaatacgctccttaacagcatggctgacattatcaaggaaggcaacctgatgaagtcctcaattaccggcgcgcttgaggatatcctcgttaccgagggcgcggcgagcgactttatggcgtatatttttaatatcgtaaatcaaatttacaatatcgcgatggcttccggcatccagataatcatattcctttccgccctgcagactattccgcccagcatgtttgaggcggccaaaattgagggctcgacctcctgggagtgtttctggaaaatcacgttccccatggtcagccccctgatactcgtcaatgtggtctacagcgtggtggattatttcataagaacggataaccgcgttatggaaaaaataagggtaaccatgatgcagcgcatggaatacggtttttccaccgcgatggcctggatatattttctctccgttattgtgatcatcggaatcgcgatgtcgttgatttccagaaaggtgtactactatgaataa

SEQ ID NO: 41966 - protein, 308 aa, Unknown
  Obtained from environmental sample
  misc_feature (1)..(308): Xaa is any amino acid
MYFIKKNDKYSLTLEGRNAVAGYLFILPFILGLLAFMFLPLLESLRMVFSEVNIDLDRHRFAMDFTGLDNLKRVLMIDAEFNRLLVEEVGRMLLIVPAVIIFSLFIALLLNQEFKARGFVRAIFFLPVILSSGIMIGLETNNTLLNSMADIIKEGNLMKSSITGALEDILVTEGAASDFMAYIFNIVNQIYNIAMASGIQIIIFLSALQTIPPSMFEAAKIEGSTSWECFWKITFPMVSPLILVNVVYSVVDYFIRTDNRVMEKIRVTMMQRMEYGFSTAMAWIYFLSVIVIIGIAMSLISRKVYYYE

SEQ ID NO: 41967 - DNA, 666 bp, Unknown
  Obtained from environmental sample
  misc_feature (1)..(666): n is a, c, g, or t
atgcccatgctgggcctgcgtaacatcgctttcagaagcctgggcgcgaaactctcgggcgactaccatgaaaagaggctggtcagccgcgaagcctcgatgaaaatgcggcaggaaaaactggcggaattaaagaagcaggggacaggcgttctgctggatacaggttacgcctacgcggttccttgggccgattttattaccaatatggccgttgacgatcagagttttggcattaccgacgcttcggttccgttttaccagatggtccttcacggactggtgccatatacaggcccggcgataaaccttgccgaagattacactaaaaaccttcttaaaacaattgaaagcggagccgggctgtacttcagctttatgagtgaagaaagctccgtcctgcaggaaacaaagttccggcaattttacgccaacgaattcgataaatggtcgccggacgccaatgccctgtaccagcagtttaccgctgattttgcccgcctttatgatcaggcgattgtcaatcatgccattatagaggaaggactgacctggaccgaatacgaagacgggactgttgttatggtgaattatacggagaacgccgcttcttatgggggtgttgatatcggcgcgcgcagttatgtggttgtgcggtgggggtaa

SEQ ID NO: 41968 - protein, 221 aa, Unknown
  Obtained from environmental sample
  misc_feature (1)..(221): Xaa is any amino acid
MPMLGLRNIAFRSLGAKLSGDYHEKRLVSREASMKMRQEKLAELKKQGTGVLLDTGYAYAVPWADFITNMAVDDQSFGITDASVPFYQMVLHGLVPYTGPAINLAEDYTKNLLKTIESGAGLYFSFMSEESSVLQETKFRQFYANEFDKWSPDANALYQQFTADFARLYDQAIVNHAIIEEGLTWTEYEDGTVVMVNYTENAASYGGVDIGARSYVVVRWG

SEQ ID NO: 41969 - DNA, 414 bp, Unknown
  Obtained from environmental sample
  misc_feature (1)..(414): n is a, c, g, or t
atgataagtactgaaagttttgatgaatttatgcttccataccaaaagcgtatagttactaccattgaaaacgccggattgcatgttgctatgcactcatgcggggcaattgacaggattattccgcgtttgatcgatattggagtagaaatactacacccgcttcaagcccgggccaataacatggatgccgtgagcctggaaaaaaattacggcaaagatttggtttttatgggtggagttgatacccagcaattacttccttttggtactccgcaggaagtcagggaagaagttttacggctgcgggggatttttggcgatcattttattgtttccccaagtcatgaggcgctgctcccgaatgttccctttgaaaatgttatggcgatgagcaaagccgcgaaagaataa

SEQ ID NO: 41970 - protein, 137 aa, Unknown
  Obtained from environmental sample
  misc_feature (1)..(137): Xaa is any amino acid
MISTESFDEFMLPYQKRIVTTIENAGLHVAMHSCGAIDRIIPRLIDIGVEILHPLQARANNMDAVSLEKNYGKDLVFMGGVDTQQLLPFGTPQEVREEVLRLRGIFGDHFIVSPSHEALLPNVPFENVMAMSKAAKE

SEQ ID NO: 41971 - DNA, 828 bp, Unknown
  Obtained from environmental sample
  misc_feature (1)..(828): n is a, c, g, or t
atggtgataatgtacgactgcgaaaccagcgaaaggctggaattccggaaagttattcccggtggcggctggcggatgcctttgtctcttgataatgcttcggttgacagtcgttccgacgggttttttttaagaattcattcatggctggatataaagagcgtcatgctggaactcgatattaaaaggacacgcaaaaggccggcgtttacagcccatatagcgttcgattttgccgaaggggaacccacgcccatggcggtaagcctgttgttttccgaacggcaaaatatgtatgcctataaggcggtaacctcggtaaaaggggacgtagtatcgggggaaaagcacgttcatttcagtccggacaggactaccgggcttttttgcgattttaaggggtattatccgcgaaagaagtactcaacctggtgttccgccctgggctttgacggcgaaaaccggcgttttggtttttcctttggggaaaaccagaccaaagagtcttacagaaacaatgaaaacgccctttggattgacggcaaacttacccccatgccgccggttaaaattaccaggaacgtcaaggataaaagggattggattattcaggatatggaaggtatggtagatttggtgtttaatcccaaagagcctgaaaaaagcatagcgaaatcggttttttccgggtctgcaagcatgcttttgggatacaattacgagaatccattggggtgttttaacggccttttggttgacgctggcgggaaagagctgccggtacgaaacgcctggggaataggggaaaaactctttttacggatttaa

SEQ ID NO: 41972 - protein, 275 aa, Unknown
  Obtained from environmental sample
  misc_feature (1)..(275): Xaa is any amino acid
MVIMYDCETSERLEFRKVIPGGGWRMPLSLDNASVDSRSDGFFLRIHSWLDIKSVMLELDIKRTRKRPAFTAHIAFDFAEGEPTPMAVSLLFSERQNMYAYKAVTSVKGDVVSGEKHVHFSPDRTTGLFCDFKGYYPRKKYSTWCSALGFDGENRRFGFSFGENQTKESYRNNENALWIDGKLTPMPPVKITRNVKDKRDWIIQDMEGMVDLVFNPKEPEKSIAKSVFSGSASMLLGYNYENPLGCFNGLLVDAGGKELPVRNAWGIGEKLFLRI

SEQ ID NO: 41973 - DNA, 306 bp, Unknown
  Obtained from environmental sample
  misc_feature (1)..(306): n is a, c, g, or t
atgacagatctgagaaaggttttagcgtcaaatatgaagtattaccgtaaggttctgggtatatcacaggtaaagctggctgaaaaagcgcaagtaactgactattacatagcgttggtagaaacaggtaaacgtttcccatcggtaaatatacttgagcagatcgcggaagctctcgaaagggatactgttgaattattccctctgaaacaggataatttaattaaaaagcgggctttgaaaacaaaaattttggcggatattgacgcgattttgactgttagactgaatgaaaccgaaatttaa

SEQ ID NO: 41974 - protein, 101 aa, Unknown
  Obtained from environmental sample
  DOMAIN (12)...(66): Helix-turn-helix
  misc_feature (1)..(101): Xaa is any amino acid
MTDLRKVLASNMKYYRKVLGISQVKLAEKAQVTDYYIALVETGKRFPSVNILEQIAEALERDTVELFPLKQDNLIKKRALKTKILADIDAILTVRLNETEI

SEQ ID NO: 41975 - DNA, 1371 bp, Unknown
  Obtained from environmental sample
  misc_feature (1)..(1371): n is a, c, g, or t
gtgcctttcattctttcttgcgtacaccagcgtcggatttgtttttactcgccgtattatacgatgataatgaggataaccagaacttttcaactgctgactttttccttctttgccgtttttatgctggaatcggtgggattattcgggaataaaaagaaatatatcatcattagtattcttggctacagcgtactttgcgcttcgtacatagccatacaggaaacaaaacaatctataaacgcggcctactccctcatgacgaatttaaatacaataccgcttctcgcgtgcagtattattattctctcttacgttgttttattaaagaagaacatcaaagttgtgccgctgtttattatcgcgcttacctccgcgggcgccagccttcgcgatttaatagttctatcaaaaggcatagagccgctgttctgggcggctccctattctttcatcttcatggtaattttaatttacgcaatgctgataaaagaggaaaattttattcagggcgctttttcccgctatcttgcgcccgaaattatttcagaaattgtcaaagatcccaacaagctgaatcttggcggcgaaaaacgcgaaatgaccgcgttattcaccgacattcagggtttctccgcaatttccgaacagcttgatcccgcccaccttgttcggcttttaaacaagtaccttactgaaatgagcaacatcatcatggaacaccttggaaccatagataaatacatgggagacgcgattatcgcgttcttcggggctcctttgttccgcgccgatcatcccgcccttgcctgccgcagcgcacttgcgattaaggcggcggaaaaggaactgaataaaatgtttgccgaagaaaaaatgagccctatgccgatttttacccgcatcggagtaaatacaggcgaaatggtagtaggaaatatgggcgccgaaaaaaagatggactataccgttatggggaacgcggtaaacctcgcgtcgcgcattgaaggagttaacaaatattaccacacaggcggcatattgataagcgaatacaccagagcaaaaatcggagacgagtttaaagtgcgccgcattgaccgcgtccgagtggtagggataaacacccctctgcgtctgtatgaattgcttccgtctgacgccgaacaaggcgctgtggaaacatgggagaaggcgatagatctgtatgaacgcagggattttagaaaagcttttgcattctttgcttcgcttataaagcgttatccaaacgataatactgccaaagtttacgcgcgccagtgcaaggcgtttgttgaaacgccgccgccaaaagattgggacgcggtaaaaactttaacaaagaaatga

SEQ ID NO: 41976 - protein, 456 aa, Unknown
  Obtained from environmental sample
  DOMAIN (196)...(385): Adenylate and Guanylate cyclase catalytic domain
  misc_feature (1)..(456): Xaa is any amino acid
MPFILSCVHQRRICFYSPYYTMIMRITRTFQLLTFSFFAVFMLESVGLFGNKKKYIIISILGYSVLCASYIAIQETKQSINAAYSLMTNLNTIPLLACSIIILSYVVLLKKNIKVVPLFIIALTSAGASLRDLIVLSKGIEPLFWAAPYSFIFMVILIYAMLIKEENFIQGAFSRYLAPEIISEIVKDPNKLNLGGEKREMTALFTDIQGFSAISEQLDPAHLVRLLNKYLTEMSNIIMEHLGTIDKYMGDAIIAFFGAPLFRADHPALACRSALAIKAAEKELNKMFAEEKMSPMPIFTRIGVNTGEMVVGNMGAEKKMDYTVMGNAVNLASRIEGVNKYYHTGGILISEYTRAKIGDEFKVRRIDRVRVVGINTPLRLYELLPSDAEQGAVETWEKAIDLYERRDFRKAFAFFASLIKRYPNDNTAKVYARQCKAFVETPPPKDWDAVKTLTKK

SEQ ID NO: 41977 - DNA, 555 bp, Unknown
  Obtained from environmental sample
  misc_feature (1)..(555): n is a, c, g, or t
atgatccttaggcttgattcggatgaggggatcgtcaagatcggatcgccgcctgtagaaataccgggcatttttgaatccataaagatcagcgatgccctgctgatagaaaacgccgacatacagggccgatcggggaaggtaaaagtcgtgcagggctggggcgatgtcgctatgcaaatctcgctgtcgctgatcgacaatccgggcgcaaaaaaaacgcggtgggattcgttaaaagagatcgccggaattttcaaaaaagtcggtagcaacggaaagccggaagtctatacagtcagccatcccatgatcagcgcgtggggaacgaagcaacttcttatctcatcgctcgaatccaccgaaaacaggacgcgaagaaaaattgccgtggcaatcgagtttgtggaacacgacagcgcggttggaattgtacaggatcggcaaagccctgacgctccggtaggcgccgcgcagagcgaaccggctccgctggtctccgatcagcagaggagaggcttaggaaaactggaggagcgttatgccaaactttaa

SEQ ID NO: 41978 - protein, 184 aa, Unknown
  Obtained from environmental sample
  misc_feature (1)..(184): Xaa is any amino acid
MILRLDSDEGIVKIGSPPVEIPGIFESIKISDALLIENADIQGRSGKVKVVQGWGDVAMQISLSLIDNPGAKKTRWDSLKEIAGIFKKVGSNGKPEVYTVSHPMISAWGTKQLLISSLESTENRTRRKIAVAIEFVEHDSAVGIVQDRQSPDAPVGAAQSEPAPLVSDQQRRGLGKLEERYAKL

SEQ ID NO: 41979 - DNA, 597 bp, Unknown
  Obtained from environmental sample
  misc_feature (1)..(597): n is a, c, g, or t
ttgattggggttagcggcaagctggaagcattcacggccccattcaaagcaatcggaaatgtcgttagcggcgtgtttaatgggatcggcggatttttcaaaggcatgttgggaggcggaaaggaatctggaaccgcgctcaacgatgcctttgcatcaggcattcaaagcaacgcttccgcgcccggaacggcattcggaaattcgttgcagaccgttagccgccagatgccccattcggacgcgcaggaagggccgctttccaccctcacagcttcaggccgcgctttgaccgacaccttcgcttccggcatggatggctccgcaattgaacaaatgtctaccactgttttttcgcagatattgccggacgattcggatttcatggaaaaagcgtcccttgccttttctgccgtaatgccgcagagggatgcaattcaaatttcaaccggcggcgaaggctccccaaagggcgcgggatcgcaaaccatcaccattcagaatttgtacctgcaagcggaagaatgcgaaacccttcttgacttcgtgcggatgattatgcaatcggtcgaccgtccggagggggttccggtatga

SEQ ID NO: 41980 - protein, 198 aa, Unknown
  Obtained from environmental sample
  misc_feature (1)..(198): Xaa is any amino acid
MIGVSGKLEAFTAPFKAIGNVVSGVFNGIGGFFKGMLGGGKESGTALNDAFASGIQSNASAPGTAFGNSLQTVSRQMPHSDAQEGPLSTLTASGRALTDTFASGMDGSAIEQMSTTVFSQILPDDSDFMEKASLAFSAVMPQRDAIQISTGGEGSPKGAGSQTITIQNLYLQAEECETLLDFVRMIMQSVDRPEGVPV

SEQ ID NO: 41981 - DNA, 1692 bp, Unknown
  Obtained from environmental sample
  misc_feature (1)..(1692): n is a, c, g, or t
atgattgttttttttggcctttttagaaaaaacccctcaaattgctgtggtatatgtgaaaatagccaaaagccatgccatgataacaaaacctgtcaggccattaagggattcgtcaacaggacgttccttgctttttcaggcatcctttttctgataattgctgttgcggctattgtggcatatacaatttccacgcatcaaaccaacctttcttttattgagcagcagctttctataacgtctgaaacaatgatgctgcgtttggcaaccacggtaaacagcgaactggcccttgtgctgaaaatggcggatactccggttatcaggcagtactttatggatccctccgatccggctcttggcttgctggcgcaaaccgaatttaccctttaccaggaacatttcaataataaaatagttttctggatcaatgacgtggataagttgttttattttacaggaaatgcgccatacgttgtcaatccggatgatcctgagaattattggtacaatttaacgctgtacgaaacggaaaaatttaattttaatattaactataatcctgatttgggtgaaatcaacctttgggtcaatgtcccggtatttactgacgctggttccgtaaaaaaacctctgggtatgcttggtacaggcataaacctcactgacttttcaaattttgtcgcttccagctatctgaagtttgatacacatatcacctcatatatgttcaacaaatacaatgaaattacttcggcggtagattacaatctggttgaaaataaagtctgccttgacgaactgcttggcgaaaccggaaaagaattgatcaaagttgcgcatgagctttccgaaggggaagaaaggagctttgtctgcgataaaaaaatatatctggtaaactctatcccggcgatggaatggtatctggcagtgagctatccggcgccgggtttgttgtccctgaataacgccatgaatacagtatttttcagtatgttgttccttattttgttcttgttcatcattattaatgtttatattgcccgctctgaaaacgcgatagcgaaacaaaatttacaactgattgaggcaaaccgaaagactgaatccgcttctcgtgctaaaagcgactttctggcgaaaatgagccacgaaatccgcacgcccatgaacgcgattataggcatggcggaacttctgctgaggggggaactctcaagcgaagccagaagttatacgcaggatatcaaacaggcggggaataaccttgtttcgataattaacgatattcttgatctttcaaaaattgaagcgggaaaacttgaaattgttcccggtaaatatttgctttcatctttgatcaacgatactgtcaacattatccgcacaaggcttaaagagaaaccgatacggttttttaccaatattgacgggaatattcccaacagccttatcggagacgaagtgaggatgcgccagattctccttaacctgctgtccaacgcggtaaaatatacggaaaaggggcatgtcggtttgacaattaccgtggataaacaggacgacaaacaggtcttgctcaggatggccgtgttcgataccggaaaaggaataaaaccggagcatcttatgaacctatttgacgagtttgtccggatagatatgaagaaaaaccngtggcattga

SEQ ID NO: 41982 - protein, 563 aa, Unknown
  Obtained from environmental sample
  DOMAIN (488)...(560): Histidine kinase-, DNA gyrase B-, and HSP90-like ATPase
  misc_feature (1)..(563): Xaa is any amino acid
MIVFFGLFRKNPSNCCGICENSQKPCHDNKTCQAIKGFVNRTFLAFSGILFLIIAVAAIVAYTISTHQTNLSFIEQQLSITSETMMLRLATTVNSELALVLKMADTPVIRQYFMDPSDPALGLLAQTEFTLYQEHFNNKIVFWINDVDKLFYFTGNAPYVVNPDDPENYWYNLTLYETEKFNFNINYNPDLGEINLWVNVPVFTDAGSVKKPLGMLGTGINLTDFSNFVASSYLKFDTHITSYMFNKYNEITSAVDYNLVENKVCLDELLGETGKELIKVAHELSEGEERSFVCDKKIYLVNSIPAMEWYLAVSYPAPGLLSLNNAMNTVFFSMLFLILFLFIIINVYIARSENAIAKQNLQLIEANRKTESASRAKSDFLAKMSHEIRTPMNAIIGMAELLLRGELSSEARSYTQDIKQAGNNLVSIINDILDLSKIEAGKLEIVPGKYLLSSLINDTVNIIRTRLKEKPIRFFTNIDGNIPNSLIGDEVRMRQILLNLLSNAVKYTEKGHVGLTITVDKQDDKQVLLRMAVFDTGKGIKPEHLMNLFDEFVRIDMKKNXWH

SEQ ID NO: 41983 - DNA, 1089 bp, Unknown
  Obtained from environmental sample
  misc_feature (1)..(1089): n is a, c, g, or t
ttgaaaacaagctcgtcgctttacattcatattcccttttgcgtgtcattctgcgattactgtgattttttctccgtaacgtcgaaaaatttaaacgaaggttatattgattcatttattacctcgctgattaaagatataaattatcagataaagtatttaaacattggtgaaattcccacagcgtacataggcggcggaaccccgtccgtccttgggaaaaagctctcccgcctctttgacgcgttaaaagaaatccctttttttacgccgaaagaatttacagttgaagcaaaccccgagtccttaacggaagagtttctttccgtctgcaggcagggcggagtaaacagactgagtcttggagtgcaaacatttcatgaaccttcgcgtctttgcgtaaaccgcgcgggggactcttctttactggaagaccatttaaaaacagcgtcgcggtatttccccggcgcagatttatccgtagaccttatgacgggattaccgtaccaaaccgaagaaacaatcattgaagacataaaaaaaattagagtttttaacccgtcgcatatttcgctttacagcctgactgtggaaaataacacattgttggaagaaaagatacaaaaaaaagaaataacaatgcccaacggggataaggctgactctctttggcttttgggctgtgagttgcttgaaaacgaaggttacaatcattatgaggtttccaattttgcccttgccggaaagcagtgccttcacaatttgcgctattggcagatgaagaattggattggcgcgggtccttcggcgtcaggcactctgatagatgagcaaaccgtaacagcgaaacggtttacctacgcaaaagacgttgacgcgtatataaaaacgccgttaattactcaggcgaactgtgaagaaatagacaaaaaaactcttttaaaagatacgattttaatgggcttccgtatgaaagattggaatgaaagtgagttatttaaaaaccaggtttggctgttcactggaagagtgtataccaaagactatggaaaagtggaaagacagggatataatgtccttcttgaatag

SEQ ID NO: 41984 - protein, 362 aa, Unknown
  Obtained from environmental sample
  DOMAIN (8)...(182): Radical SAM superfamily
  misc_feature (1)..(362): Xaa is any amino acid
MKTSSSLYIHIPFCVSFCDYCDFFSVTSKNLNEGYIDSFITSLIKDINYQIKYLNIGEIPTAYIGGGTPSVLGKKLSRLFDALKEIPFFTPKEFTVEANPESLTEEFLSVCRQGGVNRLSLGVQTFHEPSRLCVNRAGDSSLLEDHLKTASRYFPGADLSVDLMTGLPYQTEETIIEDIKKIRVFNPSHISLYSLTVENNTLLEEKIQKKEITMPNGDKADSLWLLGCELLENEGYNHYEVSNFALAGKQCLHNLRYWQMKNWIGAGPSASGTLIDEQTVTAKRFTYAKDVDAYIKTPLITQANCEEIDKKTLLKDTILMGFRMKDWNESELFKNQVWLFTGRVYTKDYGKVERQGYNVLLE

SEQ ID NO: 41985 - DNA, 480 bp, Unknown
  Obtained from environmental sample
  misc_feature (1)..(480): n is a, c, g, or t
ttgtttaagcgcggcagtattgtgttagtggatatggggcgttataaagaaaaaaaattacccttgcgcgtaatcgacggaattgtaagattttttaccctgcaaaatacaagcatattttccgggaaaaaacagtatcacataaaaagagtaatagctcttcccggcgatgaaatttccatgagcaattatgtgttcagggtaaaagccgccggaagcgcttacagccttacggagtttgaactttccgaaaaaccgtatcaaccgtatattccgcacacgtcggaattatgggatgattcaattccgttctcgggcaatatggatacgattgttttaggacatgacgaatgttttgtaatatcagacgacagaagcaatacaaatgattctcgcacatggggagccgtgcctgtttcattaatcacagcgaaggcactgcttagattctggcccttcgcaaaaatagaactattttaa

SEQ ID NO: 41986 - protein, 159 aa, Unknown
  Obtained from environmental sample
  misc_feature (1)..(159): Xaa is any amino acid
MFKRGSIVLVDMGRYKEKKLPLRVIDGIVRFFTLQNTSIFSGKKQYHIKRVIALPGDEISMSNYVFRVKAAGSAYSLTEFELSEKPYQPYIPHTSELWDDSIPFSGNMDTIVLGHDECFVISDDRSNTNDSRTWGAVPVSLITAKALLRFWPFAKIELF

SEQ ID NO: 41987 - DNA, 1149 bp, Unknown
  Obtained from environmental sample
  misc_feature (1)..(1149): n is a, c, g, or t
ttggagatcagttccggaattgcgagctgggcagaaaccgaagcgatctatgcggtaagcggcggtacagtgggcagggtctttgcgagggaaggggaggcggtggaaagagatcaggttctttttgaaatggattttgacattgccgctgttgagaggcgttatgcggaaataggtaacaacatcggaaaacttgatgcggacataagcggccttcgtgccagactgggtaacatccgtacggccctcgcggcaaccgagtccgatgccggtgtggaggaacagaacgcggcggcaccagcatttaccgggcaggccggcattatcgcgctggaaatcagcaaggccaagcttgccctgaataacgcgcagttggcttttgaattgggttccataagcaaaaacgatcttataaacgtggaaaacaacctcaaggccctgcttttcaaatacagcgccgaagccgacgagctggaactcagcctgacttcgaagcttatggacatggagaacctcaaactttccagggaagccgtcagggatctgctaagggattatcggaacaacgcggtaattaaagccccggcgtcaggtatcgttcttaacctgccggtggagcggggaaagtactttcaggagaatgcattgcttgtgtcaatcggcgtangccaggaattttttgtgggatgcagtatttcccttgataataatttcgtaaacccgggcgacacctgcgaactcagcaacgccagccatgtgttgaacggtacggtcaggcggataaagccgtcgatgcaggggaagaccgtaactgtttccgtcagttctgacgaggtaagcgacggggagacttttgatgttacctttgaaaaaaacagcgccgcttcttttgtgctggttccaaacagcgcggtcaaccaggacaacgacggctactttctgtaccagattaaaaggcggaaaggcatcatgggggatgaatactacctggcgcggctcaacattttcatcggtgattcggatcgtcagaataccgcgattctgcgtgggcttaccttttttgatccgatagttctggtgagcggcaaggctttgtccgatggcgttacggtgtccctcaaaaacccggaggacttttttgagagttaa

SEQ ID NO: 41988 - protein, 382 aa, Unknown
  Obtained from environmental sample
  misc_feature (1)..(382): Xaa is any amino acid
MEISSGIASWAETEAIYAVSGGTVGRVFAREGEAVERDQVLFEMDFDIAAVERRYAEIGNNIGKLDADISGLRARLGNIRTALAATESDAGVEEQNAAAPAFTGQAGIIALEISKAKLALNNAQLAFELGSISKNDLINVENNLKALLFKYSAEADELELSLTSKLMDMENLKLSREAVRDLLRDYRNNAVIKAPASGIVLNLPVERGKYFQENALLVSIGVXQEFFVGCSISLDNNFVNPGDTCELSNASHVLNGTVRRIKPSMQGKTVTVSVSSDEVSDGETFDVTFEKNSAASFVLVPNSAVNQDNDGYFLYQIKRRKGIMGDEYYLARLNIFIGDSDRQNTAILRGLTFFDPIVLVSGKALSDGVTVSLKNPEDFFES

SEQ ID NO: 41989 - DNA, 786 bp, Unknown
  Obtained from environmental sample
  misc_feature (1)..(786): n is a, c, g, or t
gtggtcggtgggagtacgcgcattccgctcgtatcccgttttttggatgaaacctttggcattgcccccgagtcggcggtggatcnggatctggcgttcgttcgcggcgcggccatccaggcgggcgtattaagcggggcgctgataaaaaacgcgattgtcctgactgatgtttgtccctacagcctcagtacggaagcgttgatggattttgggctggatgacgatgatgaagactcgttaatctgtgatgttatcataaagcgtaacacgacccttccggctgccgcctccaaaatttacacgacttcccgcgactatcaaacaaaagtgcatgtaactgcgtatcagggcgaaagccttgaccctaacgaaaactaccttttgaattgctttgaactcagcggcatacctaaagccaaagcatacaaagaaaagataactctccgatttgaatatgatttgaacggtattttgacggttcaggctgaaatactctctaccggtaaatcggcggcagtgacggtaaatacattacagatgggtaaaaaccttgatctttcaaaatggaaggatgctcccggtgccagaacatgccggcagataataaataaagcggaaaggcttgcaaaggttcatggcggggaagccgcaggcgatgttatagccgccgccaacgaattgaaaaaagcgctcattatgaaatgggacgcggtgatcatcgaaaaactgaagtacaggcttaccggagcgattgacgagctggaagaggaagacgaagagtga

SEQ ID NO: 41990 - protein, 261 aa, Unknown
  Obtained from environmental sample
  misc_feature (1)..(261): Xaa is any amino acid
MVGGSTRIPLVSRFLDETFGIAPESAVDXDLAFVRGAAIQAGVLSGALIKNAIVLTDVCPYSLSTEALMDFGLDDDDEDSLICDVIIKRNTTLPAAASKIYTTSRDYQTKVHVTAYQGESLDPNENYLLNCFELSGIPKAKAYKEKITLRFEYDLNGILTVQAEILSTGKSAAVTVNTLQMGKNLDLSKWKDAPGARTCRQIINKAERLAKVHGGEAAGDVIAAANELKKALIMKWDAVIIEKLKYRLTGAIDELEEEDEE

SEQ ID NO: 41991 - DNA, 1065 bp, Unknown
  Obtained from environmental sample
  misc_feature (1)..(1065): n is a, c, g, or t
ttgtgggtcagattcggccgagatttcggaacatcgacatcggaaatagcgtatgttgacgataacggcaaaattatcattgttcccaatcatttgggggaaatgataactccgtcagtcgtatatatcgccgaggacggcagtcccgttgtcgggcttgaagccaaagaaaaggcgcttcttgaacctgaaaatacttttcttgaggttaagcggctttttggccaaaatacggaacttcaggcgcgggacaaggtttattcgcccgtagatgtcgcggcgatgattatacgttatttgactgactgcgcgcaaaaacactcaggtactgcggttgattccgctgtgattaccgtcccggcctatttcaccgattcgcagcgcaaggacgttatggccgcgggaaaggcggcagggcttgaagtcgagcgtattatcaatgagccgacggcggccagcctggactacggaatcgaacacatgcgggactgtaaatatatgctggtgtacgatctgggcgggggaacccttgatgttaccgtgcttgagctttttgagggcgtagtggaggtaaaatcaagctgcggaaacaacgcgctgggcgggaaagatttcgatcaggctatcatggatcacataacgggggcgattaaaaagcgcgataaaactgacgtttcaggcgacgcccgcgcgatgatgcggataaaaatcgccgccgagcagtgtaaaatcgcgctgagcgataagacggaaaacgtaatagaactgccgtttttattcagcaaggacggcaatcccgcagggtattccgaaaaaatcacgcggacggcctttgaatccatgatccgcgagaagatctattccaccgaacagcaaatcaaaacggcgttattcgacgcgaatttaggcgctgaagatattgatataacactgtggtcggtgggagtacgcgcattccgctcgtatcccgttttttggatgaaacctttggcattgcccccgagtcggcggtggatcnggatctggcgttcgttcgcggcgcggccatccaggcgggcgtattaa

SEQ ID NO: 41992 - protein, 354 aa, Unknown
  Obtained from environmental sample
  DOMAIN (4)...(353): Hsp70 protein
  misc_feature (1)..(354): Xaa is any amino acid
MWVRFGRDFGTSTSEIAYVDDNGKIIIVPNHLGEMITPSVVYIAEDGSPVVGLEAKEKALLEPENTFLEVKRLFGQNTELQARDKVYSPVDVAAMIIRYLTDCAQKHSGTAVDSAVITVPAYFTDSQRKDVMAAGKAAGLEVERIINEPTAASLDYGIEHMRDCKYMLVYDLGGGTLDVTVLELFEGVVEVKSSCGNNALGGKDFDQAIMDHITGAIKKRDKTDVSGDARAMMRIKIAAEQCKIALSDKTENVIELPFLFSKDGNPAGYSEKITRTAFESMIREKIYSTEQQIKTALFDANLGAEDIDITLWSVGVRAFRSYPVFWMKPLALPPSRRWIXIWRSFAARPSRRAY

SEQ ID NO: 41993 - DNA, 885 bp, Unknown
  Obtained from environmental sample
  misc_feature (1)..(885): n is a, c, g, or t
ttgattgccgagtttacgaaatgcttctaccttaccagcataaccataccgaacagtgttaccagcattggggatcgttcttttaccaattgcaccacccttaccagcgtaaccataccgaacagcgttacggccattgatgaaggagctttttccggttgcatcaaccttgccagcgtaactatacccaatagcgttaccagcattggggcaagagcttttatcggttgcaccagccttgccagcataaccatacctaacagagttaccagcattggggaaaaagctttttccaatacggcatggttaaataaccagacaaacgatttagtgtatgcaggaaaatgggcattagtctacaaaggcagcaaagatactattacaaatataactttggcaaatgacacaataggaataggcagcgaagcttttagcgaatactccaacattaccagcataaccataccgaacagtgttaccagcattgggagtagtgctttttggggttgcaccggccttaccagcataaccatacctaacagtgttaccagcattgggtggggggcttttatcggttgcaccggccttaccagcttaacaatacccaacagcgttaccagcattgggagtgtggcttttggcaattgcaccggccttaccagcttaacaataccgaacagtgttaccagcattgagggtaatgcttttgaaaattgtaccggcctaaccagcgtaaccataccgaacagcgttaccagcattgggaaggaggcttttattaattgcaccagccttgccagcgtaactataccgaacagcgttaccagcattgggggaaaaggctttttccggctgcaccagccttgccagcataaccatacctaa

SEQ ID NO: 41994 - protein, 294 aa, Unknown
  Obtained from environmental sample
  misc_feature (1)..(294): Xaa is any amino acid
MIAEFTKCFYLTSITIPNSVTSIGDRSFTNCTTLTSVTIPNSVTAIDEGAFSGCINLASVTIPNSVTSIGARAFIGCTSLASITIPNRVTSIGEKAFSNTAWLNNQTNDLVYAGKWALVYKGSKDTITNITLANDTIGIGSEAFSEYSNITSITIPNSVTSIGSSAFWGCTGLTSITIPNSVTSIGWGAFIGCTGLTSLTIPNSVTSIGSVAFGNCTGLTSLTIPNSVTSIEGNAFENCTGLTSVTIPNSVTSIGKEAFINCTSLASVTIPNSVTSIGGKGFFRLHQPCQHNHT

SEQ ID NO: 41995 - DNA, 366 bp, Unknown
  Obtained from environmental sample
  misc_feature (1)..(366): n is a, c, g, or t
gtgagtttgttcatggatagaaactgttccggtaagaacaaatcattcgcgcataataaagatggtccgggccgtaaaaaagcggttctgcgctacagggttacgggcgaaggacggaattatctttttgtggaagtacaattgctttcaggcagacatcatcagatacgctctcaatttgccgccgaagggcttcacataaagggcgacctcaaatacggggcgaaacgcagtgaaaaaagcggcggcatccgtcttcacgcaagagcgctttcattccccgatcctttgaacaggagcgaaataattcgcgtaacggctaatccgccggtgattgataatttgtgggagagttttactggataa

SEQ ID NO: 41996 - protein, 121 aa, Unknown
  Obtained from environmental sample
  misc_feature (1)..(121): Xaa is any amino acid
MSLFMDRNCSGKNKSFAHNKDGPGRKKAVLRYRVTGEGRNYLFVEVQLLSGRHHQIRSQFAAEGLHIKGDLKYGAKRSEKSGGIRLHARALSFPDPLNRSEIIRVTANPPVIDNLWESFTG

SEQ ID NO: 41997 - DNA, 339 bp, Unknown
  Obtained from environmental sample
  misc_feature (1)..(339): n is a, c, g, or t
ttgaaatccgcttcccaagtccgtatattgttccaacgctttgagccgtttcatcgaatcgtctttgaccgttctgaacgattttaccaaaaaatacgcaaacgcctgacggctgcttctgccgacgcgtccgcgaagttgatacaactgcgacagccccaatttatcgcaattttccacgataatcgtgttggcattcggtatgtctatgccgttttctataatagtcgtacaaaccaaaatatcgtattgtccggctataaatttttccataatcttgtcgattttttcgccttccatttgcccgtgcgcaacggcgatttttgcgtttggaactaa

SEQ ID NO: 41998 - protein, 112 aa, Unknown
  Obtained from environmental sample
  misc_feature (1)..(112): Xaa is any amino acid
MKSASQVRILFQRFEPFHRIVFDRSERFYQKIRKRLTAASADASAKLIQLRQPQFIAIFHDNRVGIRYVYAVFYNSRTNQNIVLSGYKFFHNLVDFFAFHLPVRNGDFCVWN

SEQ ID NO: 41999 - DNA, 711 bp, Unknown
  Obtained from environmental sample
  misc_feature (1)..(711): n is a, c, g, or t
ttgcaagaaatggcgctaaaaatggttaaactctacgcaaaacgcgagtttaacgagggtttggtttttgacacggataacaaatggcaaaaagagtttgaagatttgttcgagtttgagccgaccatagaccaaatcagcgcgattgaacaggtaaaaagggacttggaagataaaaaaccgatggacagattggtttgcggagacgtgggatttggaaaaaccgaagttgcgatgcgtgcggcgtttaaggcggtaatgaacggatttcagacggcggttttggctcctacgacgattttggcgtctcagcatgcgcaaacttttagaacgagaatggcacaattccccgtaaagatagaagaattgagccgccttatcgacgacgctaaatctaatgaaattaaacaaaaattaaaagacggtaaaatagacgtcttaatcggcacgcacaaaatattgtcaaaagacgtaattttcaagaatttgggtttgctgataatagacgaagagcagagattcggagtaaaacaaaaagacgtattcacaaatttcaggcactccataaacgttttgtctatgagcgcgacgcctatcccgcgaactttgcacatgtcaatggcgggaatacgcgacttgtcgcttataaacaccgcgccgcaaaaccgcttgtccattgaaacgcgggtagccgaatcacacgacgattaa

SEQ ID NO: 42000 - protein, 236 aa, Unknown
  Obtained from environmental sample
  DOMAIN (38)...(200): Type III restriction enzyme, res subunit
  misc_feature (1)..(236): Xaa is any amino acid
MQEMALKMVKLYAKREFNEGLVFDTDNKWQKEFEDLFEFEPTIDQISAIEQVKRDLEDKKPMDRLVCGDVGFGKTEVAMRAAFKAVMNGFQTAVLAPTTILASQHAQTFRTRMAQFPVKIEELSRLIDDAKSNEIKQKLKDGKIDVLIGTHKILSKDVIFKNLGLLIIDEEQRFGVKQKDVFTNFRHSINVLSMSATPIPRTLHMSMAGIRDLSLINTAPQNRLSIETRVAESHDD

SEQ ID NO: 42001 - DNA, 783 bp, Unknown
  Obtained from environmental sample
  misc_feature (1)..(783): n is a, c, g, or t
atgcagaatgacatactctttgagtctaaaaacagcgtatgcacgttcggtcacggcaagaagctggtgcgggcggtggacgacgtgtcgttcgatatcaaggacggcgagatcgtctcgctcgtgggcggttccggctgcggaaagagcgtccttgccaaaatgatgctgggcctgcatcaccccacctccggctcgttcacatacaagggcgtcccgatcaccgactacaacgtccactggcgcgaggtgcaagccgtcttccaagacccgttcagctgcttcaaccagttcttcacgatccgctcccagctcaaagcggcgttcggcatatataaggagaagccctccaacagcgagatggaagatagggtggatcaagccctacttgccgtcaacgtcaagccctccgagcttgaagggaagtatcctttcgagttatccggcggccagatgcagcgaatgctgttggccagaattttcgtccttaagccgaaagtcctgatagccgacgagccgacaagcatggtggacgcctgcgtacgcgccaatatcctcgattaccttatgaagctgaaagaagagctaagcatgacgatagtctttatcacgcacgacataggcctggcctactacgtgagcgaccgcctcttcatcatgcacaaaggaaagatagttgaacaaggcacaccggacgatgtaaccgtgcacccaaagagcgatcataccatccagctgctggaagatattcccgagatacataaagaatggattaagaggtaa

SEQ ID NO: 42002 - protein, 260 aa, Unknown
  Obtained from environmental sample
  DOMAIN (36)...(223): ABC transporter
  misc_feature (1)..(260): Xaa is any amino acid
MQNDILFESKNSVCTFGHGKKLVRAVDDVSFDIKDGEIVSLVGGSGCGKSVLAKMMLGLHHPTSGSFTYKGVPITDYNVHWREVQAVFQDPFSCFNQFFTIRSQLKAAFGIYKEKPSNSEMEDRVDQALLAVNVKPSELEGKYPFELSGGQMQRMLLARIFVLKPKVLIADEPTSMVDACVRANILDYLMKLKEELSMTIVFITHDIGLAYYVSDRLFIMHKGKIVEQGTPDDVTVHPKSDHTIQLLEDIPEIHKEWIKR

SEQ ID NO: 42003 - DNA, 546 bp, Unknown
  Obtained from environmental sample
  misc_feature (1)..(546): n is a, c, g, or t
atggatacgaataaggtgctgaactcccaccccatccagttaaccgccggcgagaggcagaggtcggttatcggcatatcgacgctcttaaatccgcagatggtgatagccgacgaaccgacctcggcgcttgacgtcacgacgcagaaggtcgtcataaagatgatattcgacctgcttgagaagggcatcttctcaacgatgatcttcatcacgcacgagttgccgctgttgcgccacgtggccaacaacatcgccatcatgtatgccggcgagatcgtcgaaaagggtacggcggagcaggtggtcttcgatccccgccacccgtacactaaagcgcttatgggcgctatgctcagcgccgagcccggccagaagcagcgcaagcccacggccatagagggcgcgccgcccaatctggccaaccccatagccgggtgccgcttcgccgagcgctgcccgcaggctaaacctgaatgcaagcataataaacaggagataagaatcgtgggcgagaggcaagtgaggtgcgattatgcagaatga

SEQ ID NO: 42004 - protein, 181 aa, Unknown
  Obtained from environmental sample
  DOMAIN (1)...(91): ABC transporter
  misc_feature (1)..(181): Xaa is any amino acid
MDTNKVLNSHPIQLTAGERQRSVIGISTLLNPQMVIADEPTSALDVTTQKVVIKMIFDLLEKGIFSTMIFITHELPLLRHVANNIAIMYAGEIVEKGTAEQVVFDPRHPYTKALMGAMLSAEPGQKQRKPTAIEGAPPNLANPIAGCRFAERCPQAKPECKHNKQEIRIVGERQVRCDYAE

SEQ ID NO: 42005 - DNA, 369 bp, Unknown
  Obtained from environmental sample
  misc_feature (1)..(369): n is a, c, g, or t
ttgggcgtgacagtagaacacgaaaacacgaagaacaggatagacattttgaggagtattgacgcatcggttcgttttatctctatggaaccgttgatcggggatgtcgggaaattggacttaacggaaattcactgggtaatagtcggcggtgaaagtggggtctgcgcaagaccgatgaatccaacatgggctacggctattcagaaacaatgtgccgagcagaatgtggactttttctttaagcaatggggaacatggggtgaagatggggtgaggcgaaacaaaaaggtgaatggtcgcaaactctctggcaaagaatggaagcagtcgcctattcataaagtagttgtccctacttttttgtaa

SEQ ID NO: 42006 - protein, 122 aa, Unknown
  Obtained from environmental sample
  DOMAIN (1)...(112): Phage protein Gp37/Gp68
  misc_feature (1)..(122): Xaa is any amino acid
MGVTVEHENTKNRIDILRSIDASVRFISMEPLIGDVGKLDLTEIHWVIVGGESGVCARPMNPTWATAIQKQCAEQNVDFFFKQWGTWGEDGVRRNKKVNGRKLSGKEWKQSPIHKVVVPTFL

SEQ ID NO: 42007 - DNA, 504 bp, Unknown
  Obtained from environmental sample
  misc_feature (1)..(504): n is a, c, g, or t
atgtgtacggagagcctaaaagcggccgtgcggggaaatcagcgagacgcgggatcgtatggaggccattgtcttccgcgaagccgtttgaaccaaggcaaaccggcattgggtatctgccgcggcatccaattcataaacgccgcgctgggcggaagcctataccaagatatccccacggaacttccaagcaagataacccattccatgaagccgccctacgacgcccccgcccactccgtccgtctgctccccgaaagcccgctaagcaaactaaccggaaaagaacgcctcgaggtaaacagttcccaccatcaggggataaagtggctcgccgagggtcttgaggctatggcatggtccgacgacggcctcgtcgaagccgtgtacatgccggatcgcccgtacgtatgggccgtgcagtggcatccggagatgtcgttgggggacgaggattcaaggaagatcttcgcgtcgtttgtggggacggtgggggcggggtga

SEQ ID NO: 42008 - protein, 167 aa, Unknown
  Obtained from environmental sample
  DOMAIN (2)...(163): Glutamine amidotransferase class-I
  misc_feature (1)..(167): Xaa is any amino acid
MCTESLKAAVRGNQRDAGSYGGHCLPRSRLNQGKPALGICRGIQFINAALGGSLYQDIPTELPSKITHSMKPPYDAPAHSVRLLPESPLSKLTGKERLEVNSSHHQGIKWLAEGLEAMAWSDDGLVEAVYMPDRPYVWAVQWHPEMSLGDEDSRKIFASFVGTVGAG

SEQ ID NO: 42009 - DNA, 927 bp, Unknown
  Obtained from environmental sample
  misc_feature (1)..(927): n is a, c, g, or t
atgaggattaagtttaaattaagtattgtggtgatcgcaatcatggctgtcgtggtagcaggaattacctcattgctgttgtggcaggcttctaaaaataccctacagttgagcctgcgaagtcaggagcatttggccaatggctgcgcagaattctggaagggccgggaggacggctatatacgggcgttaactacgctggcaaatataatggccgactttgaagatgtaaaaccggaggaacggcgtgacagatatgacgaaatgctgcaatcggctctggaagaggagcctgncatggttgtcctgtatacagtctggaaaccaaacgctgttgacggaatggacgctcaatatataggccgtaccggctccggccctacagggcagtacgctattacctacacaagagaaagcggcaaagtatcaagcaggactacaactgatataaacgcttcaatggcttattttaacggttccaacgccaaaaatgaccgggtagaacacccaataccccggacaatttttgggactatggacggcaacatggaattattaaggatttcaattgatatggataaatataccgaatgggaagattttttgaaagaagaatccactaatgatgaaaccaggtgggcgctggaagaattccttttcggccttacttacgaggaaattttgcaggttagaaacagattaaagcgctacggtgtgacggctgtaaactatgatgaagtacgcacttatctggactccaagccggtttattctgtggtaaatgatgatgatcctatggcaatttacgaattttttgttgaaaggcgcgatacctgtttgctgcgaaaaaaggtttccgctccggggcctttgcatacgcttgaagaaatttatttaaaatacaggattattcttgagtccaattaa

SEQ ID NO: 42010 - protein, 308 aa, Unknown
  Obtained from environmental sample
  SIGNAL (1)...(20)
  misc_feature (1)..(308): Xaa is any amino acid
MRIKFKLSIVVIAIMAVVVAGITSLLLWQASKNTLQLSLRSQEHLANGCAEFWKGREDGYIRALTTLANIMADFEDVKPEERRDRYDEMLQSALEEEPXMVVLYTVWKPNAVDGMDAQYIGRTGSGPTGQYAITYTRESGKVSSRTTTDINASMAYFNGSNAKNDRVEHPIPRTIFGTMDGNMELLRISIDMDKYTEWEDFLKEESTNDETRWALEEFLFGLTYEEILQVRNRLKRYGVTAVNYDEVRTYLDSKPVYSVVNDDDPMAIYEFFVERRDTCLLRKKVSAPGPLHTLEEIYLKYRIILESN

SEQ ID NO: 42011 - DNA, 525 bp, Unknown
  Obtained from environmental sample
  misc_feature (1)..(525): n is a, c, g, or t
atggaatccgacccccatgactcccttaaaaaactcgataccgcgtgttcttttggctgcaagaaaaacagccaaggcaacgtatcattttggaaaggatataaactgcatcttgatgtaagcgactggggttttcctcttaccgcttgcgtcaccgccgccaatgtccatgacagcaggcttgcaattccaatggaaaaaatgaccgaacaacgggttgccttttgttacagcctgatggatccggcctatgacgcgcagacaatagcggactttatccgcagccggggacgcgtgccgatcatcgatcccaacaagaggaaggacaaaaaccgcccgccgctcgatcctgcaaagcaggaacggtataaaattcgaacggcagtggaacgcgccaattcccacctaaaagacaatctgataccaaaagcgctttatgtgaaaggacatactaaagtctcttttgtgctctttgctgctgtcctgtgcctggcttccttgaagtatctgtcattcatatgctga

SEQ ID NO: 42012 - protein, 174 aa, Unknown
  Obtained from environmental sample
  DOMAIN (11)...(168): Transposase DDE domain
  misc_feature (1)..(174): Xaa is any amino acid
MESDPHDSLKKLDTACSFGCKKNSQGNVSFWKGYKLHLDVSDWGFPLTACVTAANVHDSRLAIPMEKMTEQRVAFCYSLMDPAYDAQTIADFIRSRGRVPIIDPNKRKDKNRPPLDPAKQERYKIRTAVERANSHLKDNLIPKALYVKGHTKVSFVLFAAVLCLASLKYLSFIC

SEQ ID NO: 42013 - DNA, 990 bp, Unknown
  Obtained from environmental sample
  misc_feature (1)..(990): n is a, c, g, or t
atggaagtagaagtagaaaaagccgggaagcgtacccggaaacatcccgaaaaagctcataaaaaacccaaatctcttaaagagtcggatccgcttgctttgtatttcaggcagatttcattatttcctcttttaacattacaggaagagcaaaatataggcgaaaaaattatcagcttaaggtcaaaaataaaaacacttgaggccgaaaagaaaaagaacaaggaagttgacaacagtgaagaaacagccgcgctggaacgcgctcttcttttctataaaaacaaaatgataaattccaatctgcgtcttgttgtgagtatcgccaaaaactaccagcaccgcgggctttctcttttggatttgattgacgaaggaaacatcgggcttatcgaggcggtagaacgctttgactatacaaggggctgccgtttttcaacttacggcacatggtggataaggcaggcgattatcaaaagcattgcggacaaagggcgcgttatacgtataccaattcatatgctcaacacaatcaaaaaatgttattacgtcgccaaacagcttacgcaggatttgggacgcgatcccaacgaagaggaactgtcagaatatttgggcgttccggtttcgaaagtaaaggaaattgtaaaactttcgcaggaaacgacaagccttgacacaattgtagacgacggaaacatgactcgtttggcggaacttataaaagacgaatcattaacagaaccttttgaaatggttttctccatgaccntgcaggataccatggcggatatactttcccagctttccgaacgcgaaatgaagatcattcagctccgttacgggcttgccggcgaagaccccctcactctggaagaaacggggaaactcctgggcataacccgcgaacgggtgcgccaaatccaggagaaagccacctataaactgcgtaatctgcgggaacttaacgagatcaaaaacggctcgtaa

SEQ ID NO: 42014 - protein, 329 aa, Unknown
  Obtained from environmental sample
  DOMAIN (29)...(65): Sigma-70 factor, region 1.2
  misc_feature (1)..(329): Xaa is any amino acid
MEVEVEKAGKRTRKHPEKAHKKPKSLKESDPLALYFRQISLFPLLTLQEEQNIGEKIISLRSKIKTLEAEKKKNKEVDNSEETAALERALLFYKNKMINSNLRLVVSIAKNYQHRGLSLLDLIDEGNIGLIEAVERFDYTRGCRFSTYGTWWIRQAIIKSIADKGRVIRIPIHMLNTIKKCYYVAKQLTQDLGRDPNEEELSEYLGVPVSKVKEIVKLSQETTSLDTIVDDGNMTRLAELIKDESLTEPFEMVFSMTXQDTMADILSQLSEREMKIIQLRYGLAGEDPLTLEETGKLLGITRERVRQIQEKATYKLRNLRELNEIKNGS

SEQ ID NO: 42015 - DNA, 834 bp, Unknown
  Obtained from environmental sample
  misc_feature (1)..(834): n is a, c, g, or t
gtgaactctctaaaaagaattatttgcttgtttgcatttgcagccgtcctagtctcgggaaggcttgcggcggaagagttgatccatgtggtggggaagggtgaaactgtttattccatttcccgcttttacaggattaccccggacgagcttatgaaaaccaacggtataagcgatccttccaaactacaaacgggtaaacggcttactataccttcaaacgctttttcagatattacgattacaacgaatcccccggctcagaaattggccaattatgttgtaataaagggagatacgcttttcagcattgcgaaaaagcatgatatcagccttcagaaactgcgggaaattaacagtttttctgataatcaggtaattaaagcgggcgatattgtaaaagttccggaaaagtccgttacaaataccgctcaaaccattcaacctgcccaaccatctaagccgccggcggcaaaccctgttcccgataaaaacgcaaatcccgctattccggagattcttgctctgcgctggcccgttaaagcaaaggaaatttcatatatgacaggccagatgggcgttatcgttgagggcgaaaaaaatgaagcggttaaaagtttgacgcagggcagggtgatttcagcaggcccgtggcggaaattcggcaaggtggcgattgtggaagtatcgggaggatatttttatatgtacggcggctgcgacaccctgtctgtaaatgtaggggacaaaatagcgccggggacagagcttggaaaattgggcataaatgccgtttccgaaaaagtcccagttgttttttatggtatttcgtaa

SEQ ID NO: 42016 - protein, 277 aa, Unknown
  Obtained from environmental sample
  SIGNAL (1)...(24)
  DOMAIN (189)...(276): Peptidase family M23
  misc_feature (1)..(277): Xaa is any amino acid
MNSLKRIICLFAFAAVLVSGRLAAEELIHVVGKGETVYSISRFYRITPDELMKTNGISDPSKLQTGKRLTIPSNAFSDITITTNPPAQKLANYVVIKGDTLFSIAKKHDISLQKLREINSFSDNQVIKAGDIVKVPEKSVTNTAQTIQPAQPSKPPAANPVPDKNANPAIPEILALRWPVKAKEISYMTGQMGVIVEGEKNEAVKSLTQGRVISAGPWRKFGKVAIVEVSGGYFYMYGGCDTLSVNVGDKIAPGTELGKLGINAVSEKVPVVFYGIS

SEQ ID NO: 42017 - DNA, 624 bp, Unknown
  Obtained from environmental sample
  misc_feature (1)..(624): n is a, c, g, or t
atgagaataatgagacagccttaccgttatgagaataataacacggtgtattggcttatcggctttaacgtacttatttttgccttaacaaatttccttggtttcagggagttggtctatattttgtcgatgattcctggaatggttctaaagggctgggtatggacctttgtcacctatatgtttgtccacggcggtctgacccatatcctgtttaatatgcttgccctttttattttcgggacacaggttgaaaggcagatgggcagcagggaattcctttcgttttattttgtcacaggcactcttgcgggcgttttttcattcgttgtttattattttacccattcgtatggggttgtactgctgggcgcgtccggcgcgatttttgcagtggagctcgcttacgcggtcttttttccggattcgataatctatctgtgggggataatccccttgcgcgctccggtaatggtgctgggcttcaccgcccttgaattattttcttccatatttggccttaaccagggcgtggcgcatcttacccaccttgccggtttcggctttgcctggctgtactttttgatacggttcgggattaatccctggaagagattattttaa

SEQ ID NO: 42018 - protein, 207 aa, Unknown
  Obtained from environmental sample
  DOMAIN (48)...(202): Rhomboid family
  misc_feature (1)..(207): Xaa is any amino acid
MRIMRQPYRYENNNTVYWLIGFNVLIFALTNFLGFRELVYILSMIPGMVLKGWVWTFVTYMFVHGGLTHILFNMLALFIFGTQVERQMGSREFLSFYFVTGTLAGVFSFVVYYFTHSYGVVLLGASGAIFAVELAYAVFFPDSIIYLWGIIPLRAPVMVLGFTALELFSSIFGLNQGVAHLTHLAGFGFAWLYFLIRFGINPWKRLF

SEQ ID NO: 42019 - DNA, 642 bp, Unknown
  Obtained from environmental sample
  misc_feature (1)..(642): n is a, c, g, or t
atgatacaaaaaaatgatctggaccgagccggattgctgcttgccagatgcagaaaggaaatagcgcttcgtattacaggtcagttggaaatgatagacgggcttcttgcttcacttattgcaggggggcatattttgctggaaggtgtacccggtctggcaaaaactctggcggtgaaaagccttgcggaaattaccggacttgaatttaaaagaattcaatttactccggaccttttacctgcggatttgacgggaacgatgatctgggaacaggcaaggggcagtttttctgtgaggaaagggccggtttttgcgaacattattcttgctgacgaaataaaccgcgctcctgcgaaagtacagtccgccctgcttgaggcaatggaagaaaaacaggttacaatcggggaaacaagcttccccttgcctgaccctttttttgttcttgcaaccgaaaatccgattgagcatgaaggtacgtatcttttgcctgaagcggaactcgaccgctttcttatgaaattacttgtggtttatccccagcctgtagaagaacttgaaatagtaaaaaacagtttaccgttatctgcaagttccacaaacaaggcaaagccgctttcgcctgttctttcgcggtga

SEQ ID NO: 42020 - protein, 213 aa, Unknown
  Obtained from environmental sample
  DOMAIN (44)...(180): ATPase family associated with various cellular activities (AAA)
  misc_feature (1)..(213): Xaa is any amino acid
MIQKNDLDRAGLLLARCRKEIALRITGQLEMIDGLLASLIAGGHILLEGVPGLAKTLAVKSLAEITGLEFKRIQFTPDLLPADLTGTMIWEQARGSFSVRKGPVFANIILADEINRAPAKVQSALLEAMEEKQVTIGETSFPLPDPFFVLATENPIEHEGTYLLPEAELDRFLMKLLVVYPQPVEELEIVKNSLPLSASSTNKAKPLSPVLSR

SEQ ID NO: 42021 - DNA, 516 bp, Unknown
  Obtained from environmental sample
  misc_feature (1)..(516): n is a, c, g, or t
atgtatcataaactattgaagcgaggaaatatgaaaaaagcggcgattgtaatgggaagcgacagcgatctgcctgtaattgagaaagcgtttaaaagactaaaggacttcggtattccgtttgaggcgcatgtaatgagcgcccacagaacgcctgagcgggcggcggattttgcaaaaaacgccaaaaaaaacggctttggggtaattatcgcggcggctggaatggcggcgcaccttggcggcgttcttgcggcgcataccacgctccccgttatcggtatcccgataaaatcgacattggacggtcttgacgccctcctagccacagtacagatgcctccggggatacctgtcgccacagtagccattgacggcgcggacaacgccgcgattttagccgcgcaaatactcgctacaggcgacgacgctcttgcggaaaaacttgccgcgatgaaagccgacatggaaaataaagtaatagaaaaagacaaacagcttcaggaaaaaatttaa

SEQ ID NO: 42022 - protein, 171 aa, Unknown
  Obtained from environmental sample
  DOMAIN (12)...(167): AIR carboxylase
  misc_feature (1)..(171): Xaa is any amino acid
MYHKLLKRGNMKKAAIVMGSDSDLPVIEKAFKRLKDFGIPFEAHVMSAHRTPERAADFAKNAKKNGFGVIIAAAGMAAHLGGVLAAHTTLPVIGIPIKSTLDGLDALLATVQMPPGIPVATVAIDGADNAAILAAQILATGDDALAEKLAAMKADMENKVIEKDKQLQEKI

SEQ ID NO: 42023 - DNA, 1044 bp, Unknown
  Obtained from environmental sample
  misc_feature (1)..(1044): n is a, c, g, or t
atgaaaaacagccatagcgaaagttataaagccgctggcgttgacgtaacggcagggtatcatgccgtagagttgatgaaaaagcacgttgaccgcacaaagacagaaggcatgatcgaaggcataggcggtttcggcggacttttcgcccttccaaaacagggaaactcggagccggtgcttgtatcgngaactgacggagtaggcactaaattaaaaatagcgatgctaatggacaagcatgatactgtcggcattgactgtgtggcaatgtgtgtaaacgacatnatctgcgcgggagcgaaaccgcttttttttctggattatatcgcgttaggcagaaatatccctgaaaaagttgagcagatagtcgccggagtcgcggaaggctgcgtacaggccggatgcgcccttgtaggcggagaaaccgccgaacatccgggaatgatggcggaagatgaatatgatcttgccggtttttccgtaggcattgcggaaagaaaaaaaataccggatataaattccgtaaaatcaggcgacgctgttataggaatagcatcatccggcgttcattcaaacggtttttcgcttacacggaaagttttcggaatagacaatgataaaagcgtacttgaaaagcgctttggcgagcttggcagaacattgggagaagaacttttaacgcctacaaaaatttatgttaagccgattcttgaactgcttgaaagagcaaacgtacgttctctgtgtcacataacaggaggaggtttctacgagaacattccgcgcgcattcggcgcaaatgtaggagccgttattcaaaaaagcgcggtagaagttccgcctgtttttaatcttatcgccgagtacggaaaaatcccgcagaaggatatgttcaatacctacaacatgggtatcggaatgtgcgtgattgttcctgcgcaggaaattgataatacactgggtattctgcgttcttcaggcgaaaacgccgctgtaataggagaaataaaaaacggcgtttcaggagtaattatagaatga

SEQ ID NO: 42024 - protein, 347 aa, Unknown
  Obtained from environmental sample
  DOMAIN (177)...(347): AIR synthase related protein, C-terminal domain
  misc_feature (1)..(347): Xaa is any amino acid
MKNSHSESYKAAGVDVTAGYHAVELMKKHVDRTKTEGMIEGIGGFGGLFALPKQGNSEPVLVSXTDGVGTKLKIAMLMDKHDTVGIDCVAMCVNDXICAGAKPLFFLDYIALGRNIPEKVEQIVAGVAEGCVQAGCALVGGETAEHPGMMAEDEYDLAGFSVGIAERKKIPDINSVKSGDAVIGIASSGVHSNGFSLTRKVFGIDNDKSVLEKRFGELGRTLGEELLTPTKIYVKPILELLERANVRSLCHITGGGFYENIPRAFGANVGAVIQKSAVEVPPVFNLIAEYGKIPQKDMFNTYNMGIGMCVIVPAQEIDNTLGILRSSGENAAVIGEIKNGVSGVIIE

SEQ ID NO: 42025 - DNA, 1416 bp, Unknown
  Obtained from environmental sample
  misc_feature (1)..(1416): n is a, c, g, or t
atgaaacttaatggtaaattactggtttttggggccttcttactgatggcgcggccgctttttgcgcagaatatttttcttgaaattaaccttaacagccagaggacgcgaaacatcacgcgctcaatgcgtcagaagccctctctggaattgttcagggtgattgagcaggccggcaacgacggcaagattggaggaattatcctcaatatctcggcgtaccaggaagacagggagaccctttgggaactgcggaacgccctggaaaaatttaaagcgaaagggaaaaaggtatgcgcctttatcagcggcgcggatcttgatctgtactgccttgcgaccataggcgataaaatcgttatggacgatcagggcgttctgatgctgacgggttacgtctgggggcgcggttatgtgaaacacagccttgaaaaactggggattggggcgcgggaactgcgttatctgaaattcaagtccgcggcggaaacattcacgcgggattcgatgtcggaagccgaccgcgcccaatacggcgaaatactggacgacatgatgcagcttgcccgcgacacggcgtgcgttgcccgctcgtggaatacaggtgaatttgacagaatcattaacaatgaatttatgttctccgcaaaaaacgcgctggcgcggggcctggttgacaggaccggcaggaaagaggccgtgcttgaggctgtcagggaaatttcagacggtaatgcggccggattatttttactgtacggggacgcggaatcaagtttaacagggagtaaattaccttacagaccaggcaatgccggcggtctgttttccaggcctcctgtaatagccgtgataaacgccaatggcgtaaccgatatggaacggggcatagcagcctggaccctggccaacacaatcagggaactgtcaaaaaagaggcgggtcaaggcgattgtactgcggattaactcgtccggcggaagcgccgaagccgccgactatgtagccgaagcgataaaagccgccaaagagcgggttccggtggtggtgtcaatgggcgctgtcgccgcttccggcggctactgggcaagtatgagcgccagccgcataatagccacgcctgtcacgattaccggttccatcggcgttatcgcaagctggttctacgacaacggcctgaacagcaagctgggcctgtccgtcgatgccatgcagaggggtgctcatgccgatatgatgaccggaatgatcctgccgcgccgggatcttaaacctgaagaggaggcacgttacagggagtacattcttgatctgtactctgattttaccaatagggtcgcggcgaaccggaatatggacattgagcgcgggaatcgctcgcgcagggcggggtctattcggggcttggcgcgttaa

SEQ ID NO: 42026 - protein, 471 aa, Unknown
  Obtained from environmental sample
  SIGNAL (1)...(22)
  DOMAIN (90)...(245): Peptidase family S49
  misc_feature (1)..(471): Xaa is any amino acid
MKLNGKLLVFGAFLLMARPLFAQNIFLEINLNSQRTRNITRSMRQKPSLELFRVIEQAGNDGKIGGIILNISAYQEDRETLWELRNALEKFKAKGKKVCAFISGADLDLYCLATIGDKIVMDDQGVLMLTGYVWGRGYVKHSLEKLGIGARELRYLKFKSAAETFTRDSMSEADRAQYGEILDDMMQLARDTACVARSWNTGEFDRIINNEFMFSAKNALARGLVDRTGRKEAVLEAVREISDGNAAGLFLLYGDAESSLTGSKLPYRPGNAGGLFSRPPVIAVINANGVTDMERGIAAWTLANTIRELSKKRRVKAIVLRINSSGGSAEAADYVAEAIKAAKERVPVVVSMGAVAASGGYWASMSASRIIATPVTITGSIGVIASWFYDNGLNSKLGLSVDAMQRGAHADMMTGMILPRRDLKPEEEARYREYILDLYSDFTNRVAANRNMDIERGNRSRRAGSIRGLAR

SEQ ID NO: 42027 - DNA, 825 bp, Unknown
  Obtained from environmental sample
  misc_feature (1)..(825): n is a, c, g, or t
gtgctaaagaaaggcccactggacaaagccgattccaaactgcgcccaggacacgtcttggtggccgttgacggcgttgacatcaagaaagaccaagatttcaatgctctgctaaaccgcaaggctggcaagcagaccctgctgacctttttgaaccccaccacaaaagagcgttgggaagagagcgtaaagccaataagcatggggcaggaatctggcctgctgtacgaccgctgggtagagagggagaggctggaaaccgagcggctttcaaatgggcggctgggctatgtccacgtgcggggcatgaatgacgcaagcatgagagtggtggtggaagaggcccttgggcgcgccaaagacaaagaagctctggtggttgacacaaggttcaatggcggcggcaacctgcacgaggctctttccgactttttgagcggccaaaagtacttcgacataatccccaggggccagtactacggctaccagcctggcaacaagtggataaagccatccatcgtgataatgaacgaaggcaattattccgatgcccacctattccccgtggcatacaaaatcaagggccttgggaaaacggtcggaatgcccgtgccaggcacagggacctttgtttggtgggagacccagattgaccccaccttggtttttggcatcccgcagggcggctggcgcacgccagatggcaagttttgcgaaaacaaccaactggagccagacatcaaggccgccaacgatcccaccgcgctatccaagggcagggacggccaattggaagtggccgtaaagacgcttattgaggattga

SEQ ID NO: 42028 - protein, 274 aa, Unknown
  Obtained from environmental sample
  DOMAIN (94)...(249): Peptidase family S41
  misc_feature (1)..(274): Xaa is any amino acid
MLKKGPLDKADSKLRPGHVLVAVDGVDIKKDQDFNALLNRKAGKQTLLTFLNPTTKERWEESVKPISMGQESGLLYDRWVERERLETERLSNGRLGYVHVRGMNDASMRVVVEEALGRAKDKEALVVDTRFNGGGNLHEALSDFLSGQKYFDIIPRGQYYGYQPGNKWIKPSIVIMNEGNYSDAHLFPVAYKIKGLGKTVGMPVPGTGTFVWWETQIDPTLVFGIPQGGWRTPDGKFCENNQLEPDIKAANDPTALSKGRDGQLEVAVKTLIED

SEQ ID NO: 42029 - DNA, 621 bp, Unknown
  Obtained from environmental sample
  misc_feature (1)..(621): n is a, c, g, or t
ttggcggaaaacgggacggggctttccacaaccgtagcgggagtttttagaagggactccagccaaacttatgtaattgtggtaatggaaccattgatcagcaaggggcagggatacttgaagcagggaaaaactctgtggttttatgatccggaaagccgctattttaacactacaagtaatgccgaccgttttcagaataccaatgccagaaattctgattttaccagatctaccctgtctgaagattataaagtgacagccggcgaagatgtaacattggggcgttttaaatgccggcttctgacccttgaagccgttactaaagatgtaacatatccaaaaatgaaagtatggatcagcgaagacggtctgttacgcaaaactgaagattacagcctttccggtcaaatgcttcgcacgtcggcaattcccgattattacatgattgacggacgttatgttcccaaacagattttatttgtagacgcgctgcagggggtcgttattaacggaaaattcataaatgagaaaactcaaatttcaatttccaggccttcttttagcaaattggcagattctattttttcaaaaacttttttagaaacggttaacaaatga

SEQ ID NO: 42030 - protein, 206 aa, Unknown
  Obtained from environmental sample
  misc_feature (1)..(206): Xaa is any amino acid
MAENGTGLSTTVAGVFRRDSSQTYVIVVMEPLISKGQGYLKQGKTLWFYDPESRYFNTTSNADRFQNTNARNSDFTRSTLSEDYKVTAGEDVTLGRFKCRLLTLEAVTKDVTYPKMKVWISEDGLLRKTEDYSLSGQMLRTSAIPDYYMIDGRYVPKQILFVDALQGVVINGKFINEKTQISISRPSFSKLADSIFSKTFLETVNK

SEQ ID NO: 42031 - DNA, 651 bp, Unknown
  Obtained from environmental sample
  misc_feature (1)..(651): n is a, c, g, or t
atggcgtcgcgttccgcggtaatgtcggcgatttccttttccagtttggcgaggcgttcttttgacgcgggatcttcctcgcgggaaagcgcctgtctttcaattgagaactgcagcagcttgcgttcaagtttgtccagttcagttgggcggctgtcgagttccattttaaggcggctcgccgcctcgtccacaaggtctatggccttgtccgggcataaagcggctggttatataacggctggaaagcgttgccgcggcgaccagagcctcgtctttaatccgcacgccgtggtgtatttcgtagcgttctttcagtccgcgcaggatcgcgatagtatcctcaaccgagggttccgccgtgtacacctgctggaagcggcgttcaagagcggcgtctttttcaatgtgcttgcggtactcgtcaagtgtggtggcgcctatgcagcgcagctcgccgcgagccagggccggcttgagcaggttggaagcgtctgtcgcgccttccgcggcgcccgccccgaccaaggtatgcagttcgtcaataaagaggattatcttcccttcggcggcttgtacctcgtgtatcagcgccttcaggcgttcctcaaattcgccgcggaattttgttcccgcgacaagcaggcctaa

SEQ ID NO: 42032 - protein, 216 aa, Unknown
  Obtained from environmental sample
  SIGNAL (1)...(17)
  misc_feature (1)..(216): Xaa is any amino acid
MASRSAVMSAISFSSLARRSFDAGSSSRESACLSIENCSSLRSSLSSSVGRLSSSILRRLAASSTRSMALSGHKAAGYITAGKRCRGDQSLVFNPHAVVYFVAFFQSAQDRDSILNRGFRRVHLLEAAFKSGVFFNVLAVLVKCGGAYAAQLAASQGRLEQVGSVCRAFRGARPDQGMQFVNKEDYLPFGGLYLVYQRLQAFLKFAAEFCSRDKQA

SEQ ID NO: 42033 - DNA, 798 bp, Unknown
  Obtained from environmental sample
  misc_feature (1)..(798): n is a, c, g, or t
ttggacgcgctcaggcaagtccgcggcaaccagcgcgtgaccgatcaaaaccccgaagggaaataccaggtgctggaacgatactgccgcgaccttaccgccctggcgaggcaggaaaaaatagaccctgtcatcggacgcgacgaggaaatacgccgctgtatgcaggtgctgtcacggcgcaccaaaaacaaccccatactgataggcgagcccggcgtgggcaaaaccgccatcgtggaggggcttgcgcgacgcatagtcgccggggacgtgcctgagggactgaaagacaagaaactactcgccctggatttaggcctgcttgtcgcgggaacaaaattccgcggcgaatttgaggaacgcctgaaggcgctgatacacgaggtacaagccgccgaagggaagataatcctctttattgacgaactgcataccttggtcggggcgggcgccgcggaaggcgcgacagacgcttccaacctgctcaagccggccctggctcgcggcgagctgcgctgcataggcgccaccacacttgacgagtaccgcaagcacattgaaaaagacgccgctcttgaacgccgcttccagcaggtgtacacggcggaaccctcggttgaggatactatcgcgatcctgcgcggactgaaagaacgctacgaaatacaccacggcgtgcggattaaagacgaggctctggtcgccgcggcaacgctttccagccgttatataaccagccgctttatgcccggacaaggccatagaccttgtggacgaggcggcgagccgccttaa

SEQ ID NO: 42034 - protein, 265 aa, Unknown
  Obtained from environmental sample
  DOMAIN (65)...(259): ATPase family associated with various cellular activities (AAA)
  misc_feature (1)..(265): Xaa is any amino acid
MDALRQVRGNQRVTDQNPEGKYQVLERYCRDLTALARQEKIDPVIGRDEEIRRCMQVLSRRTKNNPILIGEPGVGKTAIVEGLARRIVAGDVPEGLKDKKLLALDLGLLVAGTKFRGEFEERLKALIHEVQAAEGKIILFIDELHTLVGAGAAEGATDASNLLKPALARGELRCIGATTLDEYRKHIEKDAALERRFQQVYTAEPSVEDTIAILRGLKERYEIHHGVRIKDEALVAAATLSSRYITSRFMPGQGHRPCGRGGEPP

SEQ ID NO: 42035 - DNA, 561 bp, Unknown
  Obtained from environmental sample
  misc_feature (1)..(561): n is a, c, g, or t
gtgtacacctgctggaagcggcgttcaagagcggcgtctttttcaatgtgcttgcggtactcgtcaagtgtggtggcgcctatgcagcgcagctcgccgcgagccagggccggcttgagcaggttggaagcgtctgtcgcgccttccgcggcgcccgccccgaccaaggtatgcagttcgtcaataaagaggattatcttcccttcggcggcttgtacctcgtgtatcagcgccttcaggcgttcctcaaattcgccgcggaattttgttcccgcgacaagcaggcctaaatccagggcgagtagtttcttgtctttcagtccctcaggcacgtccccggcgactatgcgtcgcgcaagcccctccacgatggcggttttgcccacgccgggctcgcctatcagtatggggttgtttttggtgcgccgtgacagcacctgcatacagcggcgtatttcctcgtcgcgtccgatgacagggtctattttttcctgcctcgccagggcggtaaggtcgcggcagtatcgttccagcacctggtatttcccttcggggttttga

SEQ ID NO: 42036 - protein, 186 aa, Unknown
  Obtained from environmental sample
  SIGNAL (1)...(26)
  misc_feature (1)..(186): Xaa is any amino acid
MYTCWKRRSRAASFSMCLRYSSSVVAPMQRSSPRARAGLSRLEASVAPSAAPAPTKVCSSSIKRIIFPSAACTSCISAFRRSSNSPRNFVPATSRPKSRASSFLSFSPSGTSPATMRRASPSTMAVLPTPGSPISMGLFLVRRDSTCIQRRISSSRPMTGSIFSCLARAVRSRQYRSSTWYFPSGF

SEQ ID NO: 42037 - DNA, 372 bp, Unknown
  Obtained from environmental sample
  misc_feature (1)..(372): n is a, c, g, or t
atgagcgaaagatttgtaaatatagacagagaaacgccgatgctgtttcctgtggacatgagggattggctgcccgaggatcatttagtctattttataattgaagcgatagagcaaataggggtaacggggtttaaagtaaaccatcgcggctgcggaagcgagcaatatccgcccgatatgatgctggcgttattggtttacagttacgtaacagggcggttcggctcacggacgatagaagcggcgacatatacggacgtagcgctcagatatatctgcggaggtgaagcgcatccggatcatacggtaatctgcgcgtttcgcaaagataataaggaggtattgaagaaacattcaccaagatattag

SEQ ID NO: 42038 - protein, 123 aa, Unknown
  Obtained from environmental sample
  misc_feature (1)..(123): Xaa is any amino acid
MSERFVNIDRETPMLFPVDMRDWLPEDHLVYFIIEAIEQIGVTGFKVNHRGCGSEQYPPDMMLALLVYSYVTGRFGSRTIEAATYTDVALRYICGGEAHPDHTVICAFRKDNKEVLKKHSPRY

SEQ ID NO: 42039 - DNA, 489 bp, Unknown
  Obtained from environmental sample
  misc_feature (1)..(489): n is a, c, g, or t
ttgccggggcttacgctcaccgccgcaagcacggaaacttccagcccttcaaggtactcttcgagaattacgctttttccggcctctcccaggcttccttccttcatgaacgcggaaagggtttgctttgcttcggcgaaatcagccgcgacaaccactcccttgcctgccgcaaggccgtcggccttaactaccaagggcggcgggtttgtttccttcgctttgccaaaatgcttttcggcgtatttcagggcgtccgcatggcctgcaaaatttttgctgccgcntgtgcgtattttatacttgctcataaaggactttgagtacaccttgctggtttcaagccgcgcggctttttgccccggcccgacaatcgcaagtcccgcgctacgaaagcggtcaacgatgccttcagccagcggcgcttcgggccccactaccgttaggtctatgccttcttttttggcaaattccaaaagcaactcctga

SEQ ID NO: 42040 - protein, 162 aa, Unknown
  Obtained from environmental sample
  misc_feature (1)..(162): Xaa is any amino acid
MPGLTLTAASTETSSPSRYSSRITLFPASPRLPSFMNAERVCFASAKSAATTTPLPAARPSALTTKGGGFVSFALPKCFSAYFRASAWPAKFLLPXVRILYLLIKDFEYTLLVSSRAAFCPGPTIASPALRKRSTMPSASGASGPTTVRSMPSFLANSKSNS

SEQ ID NO: 42041 - DNA, 639 bp, Unknown
  Obtained from environmental sample
  misc_feature (1)..(639): n is a, c, g, or t
atgaaagtagtattagtcaacgggagcccaaacgcgaacggatgcatattcacgggacttagcattattaaagaacagttggcaaagcacggcgttgattccgagatatttcaggtagggaaaaaaccaatcataggatgtaccgattgcagaacatgcaaacagccagggaaaacaggaaaatgcgtttataatgatgatatggtaaataccgtaggtcaggctttcagagaagcggacggcattatactcggttctcctgtgcatttcgcttccgcttccggagcggcaacctcattttttgatcgtttgtttttcagccttgaacctgaagccaaaagattgaaatttggcgcatgtattgtcagttgcaggagagcaggttcaaccgccacattcgaccaattaaataaatactttaccatttcgcaaatgcccgttgtatcatcctgttattggaacggcatacatggatatacaccggaagacgtatacgccgataaagaaggcgtccgtacattgacaatattggcaaacaatatggcatatctcatcaaatgcgagaggcaaagcaatattgaactgccggaagagccgccaatggcaataacaaattttatccgcgtcgatgaccgttga

SEQ ID NO: 42042 - protein, 212 aa, Unknown
  Obtained from environmental sample
  DOMAIN (1)...(183): NADPH-dependent FMN reductase
  misc_feature (1)..(212): Xaa is any amino acid
MKVVLVNGSPNANGCIFTGLSIIKEQLAKHGVDSEIFQVGKKPIIGCTDCRTCKQPGKTGKCVYNDDMVNTVGQAFREADGIILGSPVHFASASGAATSFFDRLFFSLEPEAKRLKFGACIVSCRRAGSTATFDQLNKYFTISQMPVVSSCYWNGIHGYTPEDVYADKEGVRTLTILANNMAYLIKCERQSNIELPEEPPMAITNFIRVDDR

SEQ ID NO: 42043 - DNA, 876 bp, Unknown
  Obtained from environmental sample
  misc_feature (1)..(876): n is a, c, g, or t
atgaccgttgacagttatatccgggaaattgtaaaccatccggcgttcatgggtttcggcgaacgcctgatgccccgcgatgataattccgcctattacaatacccgaatttccgatgtcgcctcgcttatgccgtatcatcaaaacgtgaaccctgccgttgttgtgaaagcgctcaattacatgattaacgaagtgcgatacggcaaaactattttctacgatttttatacggaacagcaaaagaaggcggaccccgctaaaaaaaacaccggacttttctttttcaggggaaagcccggcgcgccttttgccattgtgtgtcccggcggcggttttgcttatgtcggatcgctccacgaaggtttccctctcgcgttggagataagtaaaaaagggtataacgcttttgtaatcagataccagataggcggggaacactatgcctgtgaggatttagcggcggcgattgcctacatctttaccaattcccgaacacttgaagtgaatacagaaaactactccctctggggcggctcgtccggagggcaaatggtcgtacagctttcatcttacggaaccgcgttttatggtgaaaaagattatcccaaaccggcagcggtggtcttattatatagcggaagttcggattttactgtatataatccgccgactttcgccgttttaggcgaaagagacaatatcacgaatccgatagttatggagcagcgcattagagccatgaaagccaaaggcattgacgttaaatttcacctgtacccaaatgtcgggcacggtttcggtcttggcaccggcactagtgcggaaggctggcttaacaacgccgtgcgtttttgggaaaagtatttatattaa

SEQ ID NO: 42044 - protein, 291 aa, Unknown
  Obtained from environmental sample
  DOMAIN (121)...(282): Prolyl oligopeptidase family
  misc_feature (1)..(291): Xaa is any amino acid
MTVDSYIREIVNHPAFMGFGERLMPRDDNSAYYNTRISDVASLMPYHQNVNPAVVVKALNYMINEVRYGKTIFYDFYTEQQKKADPAKKNTGLFFFRGKPGAPFAIVCPGGGFAYVGSLHEGFPLALEISKKGYNAFVIRYQIGGEHYACEDLAAAIAYIFTNSRTLEVNTENYSLWGGSSGGQMVVQLSSYGTAFYGEKDYPKPAAVVLLYSGSSDFTVYNPPTFAVLGERDNITNPIVMEQRIRAMKAKGIDVKFHLYPNVGHGFGLGTGTSAEGWLNNAVRFWEKYLY

SEQ ID NO: 42045 - DNA, 1293 bp, Unknown
  Obtained from environmental sample
  misc_feature (1)..(1293): n is a, c, g, or t
atgctcggtattcataaagccgggggaactctggacgcaatgaagggaagcgccatgtcttcgatattgatcccgctggttgttttttttatcagcatttccgccctggcactcacccttaaaaagaacaccggcgcactttacacatcggttgtcgcgcagcttgaaaatttgtcctcggaacagaaagacctgacaaagcggatttccatttgttccgtggacgaactgggctctatcgcggggatggtgaacgatttttgcgatcatctgaacgaaggaataagaaacattaaaaatgaagcgaatattttacacggcataggcaatgaccttgcgtctaacatgaataccaccgccgcggcggtgaacgaaattaccgccaatgttcagagcatcaaggtgcggattcaaaatcagagcaacagcgtaagcgaaacccacgccaccatggaacagcttgttatcaatatcaatagactcaacgaccatgtcgaaaaccaaagcggcgacatatcccaggtctcgacttctatagaagaaatggtcgccaacataaactccgttaccggaacccttgtcaataacgccgctaatgtaaaaactttacaggacgcttcggaagtaggccgagcgggattgcgggaagtagccaccgacattcaggaaatcgcgcgcgagtccgaagggcttttggaaatcaactctgtcatggctaacatcgccagccagaccaacctgctttcgatgaacgcggcaatagaggcggctcatgccggggaaaacaggcagggctttgccgttgtcgccgatgaaatccgcaaacttgcggaaagttccagcgagcagtccaagaccatcggtgttgtgcttaaaaagattgcggaatcaatcacaaagattaccaaatcaaccgaagtcgtgcttaccagatttgaggcgattgactcaagcgtaaagactgtatcacagcaggaagaaaacatccgcaacgcgatggaagagcagggcgaaggaagcaagcaaatcctcggcggcataggcaatttgaacgatattaccacacaggtaaccagcagttccgaagaaatgcttaacggcagccaggaagttgtaaaggaaagccacaaccttgaaagggtaacgcaggagattacgggcggcatgaacgagatggcgtcaggagcggatcagattaacgtagctgtacacaatgtcaacgaaatgaccgttaagaaccgcgaagctatcgatgacctgttaatggaagtatcgcgcttcaagatagattaa

SEQ ID NO: 42046 - protein, 430 aa, Unknown
  Obtained from environmental sample
  DOMAIN (166)...(423): Methyl-accepting chemotaxis protein (MCP) signaling domain
  misc_feature (1)..(430): Xaa is any amino acid
MLGIHKAGGTLDAMKGSAMSSILIPLVVFFISISALALTLKKNTGALYTSVVAQLENLSSEQKDLTKRISICSVDELGSIAGMVNDFCDHLNEGIRNIKNEANILHGIGNDLASNMNTTAAAVNEITANVQSIKVRIQNQSNSVSETHATMEQLVININRLNDHVENQSGDISQVSTSIEEMVANINSVTGTLVNNAANVKTLQDASEVGRAGLREVATDIQEIARESEGLLEINSVMANIASQTNLLSMNAAIEAAHAGENRQGFAVVADEIRKLAESSSEQSKTIGVVLKKIAESITKITKSTEVVLTRFEAIDSSVKTVSQQEENIRNAMEEQGEGSKQILGGIGNLNDITTQVTSSSEEMLNGSQEVVKESHNLERVTQEITGGMNEMASGADQINVAVHNVNEMTVKNREAIDDLLMEVSRFKID

SEQ ID NO: 42047 - DNA, 1032 bp, Unknown
  Obtained from environmental sample
  misc_feature (1)..(1032): n is a, c, g, or t
atgcatgtaacgaatgacaaagagcaaaaaacaaaaaaaacgatttcacgctatatgcaaatattgtttgtagctatcgctttcgggctgatggttttcgcgagctattggtttgtcagcgaccttgagcgcaaacatttgcagaataacgtaaaaaacgcaatttcacaaacagaagccaatattatcgctgatttgaaagagcccgaaactatccttgcgggtttttccgaaaccatccgcggttttattttacgcggagataacgaaaaaagagttcaggaatatatattttttattaacaattatatgcaggaaaacgaaaaaaaccggcttttgggcgtaatgggtttttacggttattttgacgttttcggaaaaagatacttaactgagtctttaaactgggttcccccggccggttatgacctggaaagccgcccctggtatatcgcggcggttgaggctaacggcgacataggagtaaccgcgccgtacagaaatttaagagtgggagatctttccgttatcacattttcccgccgcatttttgacaatgaaggcaatgcgcttggaattatatgccttgatattaaaattgacagagtcagtcagcacgccattaaaacgcagtttgccgaaaacgggtacggttttctgttaagcgacagcagggatataatcgctcatcctgaaccttccgtgatagggacgaatttccgcaatgtaagaagcacaatcgcgtcttatgaagaagaattggtggagaacggctatgttaacgaggtaatagcgaccgactaccggggtcttaaatccatcgtctttttggaaagactcgaaaacggctggtacatgggagttgtaacgcccagggacaaatattatcaaagcacaagaagcatagctttgttccttactgtgatgggcgctttattgtcaacggggcttatcgcgatattgctggtaatgttcaatgagttaaacagggaaaacgaaaaatcgctggcaataacactcggccgattctga

SEQ ID NO: 42048 - protein, 343 aa, Unknown
  Obtained from environmental sample
  DOMAIN (162)...(243): Cache domain
  misc_feature (1)..(343): Xaa is any amino acid
MHVTNDKEQKTKKTISRYMQILFVAIAFGLMVFASYWFVSDLERKHLQNNVKNAISQTEANIIADLKEPETILAGFSETIRGFILRGDNEKRVQEYIFFINNYMQENEKNRLLGVMGFYGYFDVFGKRYLTESLNWVPPAGYDLESRPWYIAAVEANGDIGVTAPYRNLRVGDLSVITFSRRIFDNEGNALGIICLDIKIDRVSQHAIKTQFAENGYGFLLSDSRDIIAHPEPSVIGTNFRNVRSTIASYEEELVENGYVNEVIATDYRGLKSIVFLERLENGWYMGVVTPRDKYYQSTRSIALFLTVMGALLSTGLIAILLVMFNELNRENEKSLAITLGRF

SEQ ID NO: 42049 - DNA, 840 bp, Unknown
  Obtained from environmental sample
  misc_feature (1)..(840): n is a, c, g, or t
gtggcggttttgcgtaacgggcagttaatcggcgtaaaagacgtatcccagaccgatgaatttgaaatagcgaagatgatgatgggcgacgaaaaattgccgccgtcaatttacacaaacggcggcgggaaaaaagacaaggtaatcgaattcgataatgttaccgttaaaaggcgcggacagaaacgcccgttactcgataaagtttcgttttcggttaattcaaatgaaatactggggtttgccggtgtcggcggcaacggacttggagtaatcgaagctgttctcggcggctttttacaccccgccgaaggcaaaattctgcacagaggaaaagatatttccaaacttaacatacgcaaattgcgtaatcaggggcttagttttgtacccgccgaccgtataaaagtaggaagcgcacagtccgccgcaatcgaagaaaatatgataatcaatatgagaaataaatatttttcttttaactataaaaatattacaaagaaaaatgaaatcagcgaagaaataaatacatggctgaaaaaatacaatattgaaactcccgacttaaaacaaaaagccggcactttatcgggcggcaatttacaaaaattaattcttgccagggaattaaatcaatttaaggattatgccgttttctcggaacctacatgggggcttgatatcgcttccgccggatttataaagggggaaattgacgccctgcggaaaaaaggagcggcgattattttaatttctaccaatttggacgaaattatagagcttgcggacagaataatttgtatgtacaggggaaaaatagccggcgaatttttgttatga

SEQ ID NO: 42050 - protein, 279 aa, Unknown
  Obtained from environmental sample
  DOMAIN (76)...(271): ABC transporter
  misc_feature (1)..(279): Xaa is any amino acid
MAVLRNGQLIGVKDVSQTDEFEIAKMMMGDEKLPPSIYTNGGGKKDKVIEFDNVTVKRRGQKRPLLDKVSFSVNSNEILGFAGVGGNGLGVIEAVLGGFLHPAEGKILHRGKDISKLNIRKLRNQGLSFVPADRIKVGSAQSAAIEENMIINMRNKYFSFNYKNITKKNEISEEINTWLKKYNIETPDLKQKAGTLSGGNLQKLILARELNQFKDYAVFSEPTWGLDIASAGFIKGEIDALRKKGAAIILISTNLDEIIELADRIICMYRGKIAGEFLL

SEQ ID NO: 42051 - DNA, 1452 bp, Unknown
  Obtained from environmental sample
  misc_feature (1)..(1452): n is a, c, g, or t
atggcggaagtaaagaatttatggatcgcaacaggcaaagaacctgtttacatgcttcccaaaatgataaacaggcacggacttatcgccggggctaccggaaccggcaaaaccgtgtcaataaaagttttggcggaagcgttcagcgacataggcgtcccggtttttttggcggatatcaaaggggatgtttcgggactctgcaaggcgggcgaacccaacaaacacgttgaagaacgcatacagagcatgaacataagcgatttcgcgtacaagggttatcccgtacgattttttgacgtgtacggtaaaaacggaattccggtgcgtacgacaatatccgatatggggcctcttcttctttcgcgtatccttgatctgaatgatacgcagaacggcattttacagataatattcaagatcgccgatgacaacggactgttgctgatcgacttaaaggatctgcgggcaatgatgcagtttgtatgcgacaacgcgaaggaattgtctgcgacttacggcaatatcccgacgcaaagtgtgggcactattcagcgaaatcttttaacgctggcctcaagcggaggggatatctttttcggagaacccgctcttgatatgaacgattggattggctgcgaagaatccgggcgcggctttatcaatattctggattgcgtgaagctttttcaaagcccgcagctttattcgactttcctcctgtggatgctttcggctctctacgagatgatgccggaggtcggagaccttgagaagccaaaaatggtattcttttttgacgaggctcacattctgtttaacgacgcgccgaaggctcttctgcagaagatcgaacaggtagtacgtcttatccgctccaaaggcgtgggcatttattttattacgcagtcgccgtccgatattccggacaccgttttatcgcagttgggcaataaaatccagcacgcgctgcgggcatatacacctaaggatcaaaaggcggtaaaagccgcggcggcctcattcaggtccaaccccgatttttccagcgaacaggttttgggcgagctttccaccggcgaagcgcttatatccctgcttgacgaaaaaggcgcgccgcagatcgtgcagcgcgcgtttatgctgccgcccaggagttttataggccccgccgaagcggatcgcataagcggccttatcaaaaactgcgcgctgtacccaaaatacaaagacgcgattgaccgcgaatcagcgtatgaggtattgcagaagcagaaacagcagcccgccgccgcgccgcagccagcccagccgaccagcgcgccgagcgcgaaaaaaacaagcaatccggcaaaccaggctatgtcaaacgcgatgaaacaggtcggcagagaagcgggaaaagctctggtgcggggcttgttggaaacaaaacaagaagtggtaatgtga

SEQ ID NO: 42052 - protein, 483 aa, Unknown
  Obtained from environmental sample
  DOMAIN (4)...(479): Bacterial protein of unknown function (DUF853)
  misc_feature (1)..(483): Xaa is any amino acid
MAEVKNLWIATGKEPVYMLPKMINRHGLIAGATGTGKTVSIKVLAEAFSDIGVPVFLADIKGDVSGLCKAGEPNKHVEERIQSMNISDFAYKGYPVRFFDVYGKNGIPVRTTISDMGPLLLSRILDLNDTQNGILQIIFKIADDNGLLLIDLKDLRAMMQFVCDNAKELSATYGNIPTQSVGTIQRNLLTLASSGGDIFFGEPALDMNDWIGCEESGRGFINILDCVKLFQSPQLYSTFLLWMLSALYEMMPEVGDLEKPKMVFFFDEAHILFNDAPKALLQKIEQVVRLIRSKGVGIYFITQSPSDIPDTVLSQLGNKIQHALRAYTPKDQKAVKAAAASFRSNPDFSSEQVLGELSTGEALISLLDEKGAPQIVQRAFMLPPRSFIGPAEADRISGLIKNCALYPKYKDAIDRESAYEVLQKQKQQPAAAPQPAQPTSAPSAKKTSNPANQAMSNAMKQVGREAGKALVRGLLETKQEVVM

SEQ ID NO: 42053 - DNA, 678 bp, Unknown
  Obtained from environmental sample
  misc_feature (1)..(678): n is a, c, g, or t
gtgatggagggccgtattagcggcatctgcttgttaggcgacattcccgttaccgtaatttcgcaggtaagggcgaaagatattgaaactttgcagaaaatcaacttttccatgcctcatcctgaagggtacagaaaatctatgcgcctcgctaagcaggcggaaaaatttaaacgccccattatttgttttattgacactcccggagctttctgcggcgtaggcgcggaagagcggggacagggtgaagctatcgcccgcagtcttcatgattttatgatgcttaaaacgccggttatttccgtagttctgggcgaaggcggatcaggcggagcgctcgctctgggcgtttgcgatcaacttgccatgcttgagaacgctctttattcggtaatttcgccgaaagggttcgcctcaattttatggaaagacggttcaagggaaagggaagccgcagaactgctgaaaatcacggcggaagacctgaaacgttttggaatctgcgatcaaattattgcggagccggacggcggagcgtcgaaggatatcgagtttacggcgaaaaatattaaagcgttccttgtagagactgtaaataagttgattaaggaagattttaagagtttgcccgaaaaaaggtatcagaaattccgtaagattggagtgttcaaagagtaa

SEQ ID NO: 42054 - protein, 225 aa, Unknown
  Obtained from environmental sample
  misc_feature (1)..(225): Xaa is any amino acid
MMEGRISGICLLGDIPVTVISQVRAKDIETLQKINFSMPHPEGYRKSMRLAKQAEKFKRPIICFIDTPGAFCGVGAEERGQGEAIARSLHDFMMLKTPVISVVLGEGGSGGALALGVCDQLAMLENALYSVISPKGFASILWKDGSREREAAELLKITAEDLKRFGICDQIIAEPDGGASKDIEFTAKNIKAFLVETVNKLIKEDFKSLPEKRYQKFRKIGVFKE

SEQ ID NO: 42055 - DNA, 1119 bp, Unknown
  Obtained from environmental sample
  misc_feature (1)..(1119): n is a, c, g, or t
gtgctacaattccgcatggcattaaactgcggtattcttggattgcccaatgtgggaaaatctactatcttttcggcgttgtgctccgtccccgccgaggcggctaattatccgttcagcacggtcaaagcaaataccggaatcatcaacgtacccgattcgcgccttgataaattatccgctatttttgtgcctgaacggactatacccgcgaccgtcgaatttgtcgatattgcagggcttgtaaaaggcgcatccagaggagaagggcttggcaaccagttcctttcacatatacgcgacgcttccgtctacgcccatgttgtccgctgttttgaaaacgccgatgtaatccatgtaagcgacaagctcgatcccgcctcagacatcgaaacaatcgacattgagctggctcttgccgatatgcagacactcgccaaacggcgcgagcgcgcggaaaaaactttaaaaaatcaggccgaaaagaaaaacgccgaatttgtcatttcaatacttgataaaatagggcccgctctggaaaacgctcagcctatacgctcgctgggcttaaacgatgaggaaaaagccgcgatttacgactgtcattttatcactgccaagccccagctttatgtttgcaatgtcgatgaggccggcataaaatcgggtaacgccttgaccgaaattgtaaaaaaacgagcgcaaagcgaaggaaccgaagcggtctgcatctgcggaaaatttgaatcggacctttgcggcatagaaagccccgaagaaaaaaaagctttccttgaagatttaggactggaagaaacagggctttcaacattgattcacagcgcgtataaattacttgggttaagaacttttttcacgtctggaaaagacgagtgcagagcgtggacaatacgcgctggggataccgccccgaaggcggcgggagttattcacacggattttgaaaagggctttataaaagccgaagtatacacttgcgaagatatttttaattacggaacagaagccaaaattaaagaagcgggaaagtaccgtcttgaaggcagagaatatgtcgttcaggacggagacgtaatcttctttaaatttaacgtttga

SEQ ID NO: 42056 - protein, 372 aa, Unknown
  Obtained from environmental sample
  DOMAIN (8)...(173): GTPase of unknown function
  misc_feature (1)..(372): Xaa is any amino acid
MLQFRMALNCGILGLPNVGKSTIFSALCSVPAEAANYPFSTVKANTGIINVPDSRLDKLSAIFVPERTIPATVEFVDIAGLVKGASRGEGLGNQFLSHIRDASVYAHVVRCFENADVIHVSDKLDPASDIETIDIELALADMQTLAKRRERAEKTLKNQAEKKNAEFVISILDKIGPALENAQPIRSLGLNDEEKAAIYDCHFITAKPQLYVCNVDEAGIKSGNALTEIVKKRAQSEGTEAVCICGKFESDLCGIESPEEKKAFLEDLGLEETGLSTLIHSAYKLLGLRTFFTSGKDECRAWTIRAGDTAPKAAGVIHTDFEKGFIKAEVYTCEDIFNYGTEAKIKEAGKYRLEGREYVVQDGDVIFFKFNV

SEQ ID NO: 42057 - DNA, 525 bp, Unknown
  Obtained from environmental sample
  misc_feature (1)..(525): n is a, c, g, or t
gtgggtatggatattgatcacgcattcaataaaaaaggaaaatacgatattgtccataatcttgagatgaggccgaaaagccttgatgaaataagggagtttgtaaaggcggcaaaagtaccttttattgtcaagggagttttaagcgaacaggacgcgcataaatgtttggacgccggagtgcgcggtatcgtggtatcccatcatcacgggcatattgattatgccctgcctccgcttcgtattcttactgatatcgcgaggatcgtgagaaagcaaattcccgttttcgtggactgcggcattgagcggggaatggacgctttcaaagctttggcgctcggcgcggacgctgtttctcttggacgcgttattttgccgccgctgaaagcggaaggcgctgaaggagtacgaaaactgtttacggaaatgacggaagaactcgccggcgtaatggcggcgacaggcagccgggatatacagcacatcgatccttccctgatatggccctctgaacgaaagtaa

SEQ ID NO: 42058 - protein, 174 aa, Unknown
  Obtained from environmental sample
  DOMAIN (1)...(170): FMN-dependent dehydrogenase
  misc_feature (1)..(174): Xaa is any amino acid
MGMDIDHAFNKKGKYDIVHNLEMRPKSLDEIREFVKAAKVPFIVKGVLSEQDAHKCLDAGVRGIVVSHHHGHIDYALPPLRILTDIARIVRKQIPVFVDCGIERGMDAFKALALGADAVSLGRVILPPLKAEGAEGVRKLFTEMTEELAGVMAATGSRDIQHIDPSLIWPSERK

SEQ ID NO: 42059 - DNA, 636 bp, Unknown
  Obtained from environmental sample
  misc_feature (1)..(636): n is a, c, g, or t
ttggagagaattgtggattccctcataattctgcggccagatgctatattttttgcaggcgatttagccgacctcccaaaagataaattgcaagaaagaggttatgattctctgttcagccaaataagagcaccgctcggtttttatgtaaccacgggcaaccacgaatcctatatgaacccaagcgggaaaactattgaatggctgcaaagttttgacaacgtcacgctcctgatggatagcaccgtttgcaatgatttcttctgcgtgacggggcgtttagaccatcaatatgcagaccggcataacgggaaagtcagaactccgctctcggaaattatgccggagaacagctctgtcccgtggtttttgatagaccaccagccaaagggattggacgttaaggatatagatttaactagaaaacccgactttgcctttagcgggcacactcacgcagggcaattttttcccgtgactattatcataaagctattgtggccgttgaatcatggtttaggcgaactcagcggtattccgtggtatgtcacaagcggcataggtcaatgggggccgcccgtgcgcataggctcaaaagcggagctggttttatttttattcgaagcgaataactga

SEQ ID NO: 42060 - protein, 211 aa, Unknown
  Obtained from environmental sample
  misc_feature (1)..(211): Xaa is any amino acid
MERIVDSLIILRPDAIFFAGDLADLPKDKLQERGYDSLFSQIRAPLGFYVTTGNHESYMNPSGKTIEWLQSFDNVTLLMDSTVCNDFFCVTGRLDHQYADRHNGKVRTPLSEIMPENSSVPWFLIDHQPKGLDVKDIDLTRKPDFAFSGHTHAGQFFPVTIIIKLLWPLNHGLGELSGIPWYVTSGIGQWGPPVRIGSKAELVLFLFEANN

SEQ ID NO: 42061 - DNA, 807 bp, Unknown
  Obtained from environmental sample
  misc_feature (1)..(807): n is a, c, g, or t
gtgttcagtgaattatcaaatttcaaattattcgataccatagaagtccgcttttcggattttctagacatatttttaatatcctgcgttatatactgctttttttggctttttaaagggacacgcgccgttcagatgttctttggcttgctgctagtcgcggtagtctggtttttatcgatattttttgatttgcgcgggctttccaagctgataggcactttggctgctttgggagtggtggcaatagtaatcgtgttccaaccggaaattcgcggcatgttgacaaggatagggcaaatagcaaatgctttaagcctacaaaccatattcttcaaatccagcggactggaagagataaccgaacaaatagtggactccgttttggaactgcaaaaaaaaacgcacggtgcgttaattgtgttagaaaaaagggttggtttaaaatcttatatagattcaggcgaggttataaacggagaattttccaaaaaacttttatgcacgcttttttatcccggaacagcattgcacgatggagcggtggtaattttgcgcgataaaattttagcagcgggctgtgtactccccatgccaacaggagcagcagcagccgagcaatccggcggaatgcgccaccgagcagccaaagcattggcagcagaaacagacgccctcgtgatagtggtatccgaagaaacgggctacatatccatagcatatcgcggcagtttccgcacaaggcagagcaaaaaggaattggaagaagagataaaacgccactggaaagaactctatgaaaaatga

SEQ ID NO: 42062 - protein, 268 aa, Unknown
  Obtained from environmental sample
  DOMAIN (124)...(246): Domain of unknown function DUF147
  misc_feature (1)..(268): Xaa is any amino acid
MFSELSNFKLFDTIEVRFSDFLDIFLISCVIYCFFWLFKGTRAVQMFFGLLLVAVVWFLSIFFDLRGLSKLIGTLAALGVVAIVIVFQPEIRGMLTRIGQIANALSLQTIFFKSSGLEEITEQIVDSVLELQKKTHGALIVLEKRVGLKSYIDSGEVINGEFSKKLLCTLFYPGTALHDGAVVILRDKILAAGCVLPMPTGAAAAEQSGGMRHRAAKALAAETDALVIVVSEETGYISIAYRGSFRTRQSKKELEEEIKRHWKELYEK

SEQ ID NO: 42063 - DNA, 966 bp, Unknown
  Obtained from environmental sample
  misc_feature (1)..(966): n is a, c, g, or t
ttgcgggggagctttatgaacggcacatcctcaaaatatgcaaaggccgcatattcaacggttatgtttatcaccacgctcctagtcatttggggatggagatccgtcgcgacaaacaccgcaaaaatcgcgcaagcgaacaatattggaaccgtaaatacgtggaactgcggcgacagcggcgggaatgttaccgcgaccctgatagacgccaagacgctcattatccatggaatagggaaaatggctgattacaaatctgatataatatcagaaaaaacactgccttggcacaatatcaacaaagacagcattaccgatgtgcatattgagtacggtgtaacgtatatcggaaacaacgcttttaaggacttaataaatttgacatccgtcacaatcccaaacagtgtgaaaaagataggagataatgcctttgtcaattgttcttctatgacatcaataacaatcccaaacagcgtaagatatatcggtttgtcggcatttgccttttccggtttaacatctgtggtgatccccgatagtgtgaaatctatttacagcggtttgtttataggttgtgagaaaatgacatccgtaacgttccatagccgcctaggatctattcaagacttcgcgtttgacggttgtaccggcctaacatccatcacaattccaaatagtgtgtacgacattgaagcgtacgcgtttgatggttgcgttaatctgacatcaataatcatcaataaccctcgaccccccagtgtccattaccacctcggcgccgcatttggcagctttttcggagagacggacatggccacgtttaaggccaagcgaaaactctactttagcaaagcctgtctatacgtcccatcaaacagcatccccgcctaccgcgccgacatggggtggaacaattttaaatgcatcaaacccatcgagtccgcgtcgataggcggaaaatga

SEQ ID NO: 42064 - protein, 321 aa, Unknown
  Obtained from environmental sample
  misc_feature (1)..(321): Xaa is any amino acid
MRGSFMNGTSSKYAKAAYSTVMFITTLLVIWGWRSVATNTAKIAQANNIGTVNTWNCGDSGGNVTATLIDAKTLIIHGIGKMADYKSDIISEKTLPWHNINKDSITDVHIEYGVTYIGNNAFKDLINLTSVTIPNSVKKIGDNAFVNCSSMTSITIPNSVRYIGLSAFAFSGLTSVVIPDSVKSIYSGLFIGCEKMTSVTFHSRLGSIQDFAFDGCTGLTSITIPNSVYDIEAYAFDGCVNLTSIIINNPRPPSVHYHLGAAFGSFFGETDMATFKAKRKLYFSKACLYVPSNSIPAYRADMGWNNFKCIKPIESASIGGK

SEQ ID NO: 42065 - DNA, 639 bp, Unknown
  Obtained from environmental sample
  misc_feature (1)..(639): n is a, c, g, or t
atgaggaggggccggataatgaaagtagtcgcctttaacggaagcccgcactacgacggcgtaatcgccaacggaatctccataatccagcgagagctggaaaacgcggggatcgaggtcgaagtaatccacgtcggcagcaaacatatcagcggctgcatagactgccgccaatgctcagagacccgccgttgcattattaaggacgacgtcgtgaacgacgccctcgacaaattgcagtcggcggacggaataatcctcggaagccccgtctactacggcggcgtcgccggaacgttcaaatgcttcctcgaccgcctcttcttcgccggccttaaaatgcccttcaaagtcggcgcaaccgtcgtctccctaagacgaagcggcggcatatccgtcttccaccaactcaacaactacttcaacctcgccgaaatcataatcacccccggcatctattggaacatcatgcacggaaacagcgcccacgaaacgctggaagaccaagaaggccagcaaatcatggagatccaaggccgaaacatggcgtggctgatcaaaacgctcgacgccggaaagacgatgattaacctcccgccgccgatggacgagcggaagaggactaattttatacattga

SEQ ID NO: 42066 - protein, 212 aa, Unknown
  Obtained from environmental sample
  DOMAIN (7)...(184): NADPH-dependent FMN reductase
  misc_feature (1)..(212): Xaa is any amino acid
MRRGRIMKVVAFNGSPHYDGVIANGISIIQRELENAGIEVEVIHVGSKHISGCIDCRQCSETRRCIIKDDVVNDALDKLQSADGIILGSPVYYGGVAGTFKCFLDRLFFAGLKMPFKVGATVVSLRRSGGISVFHQLNNYFNLAEIIITPGIYWNIMHGNSAHETLEDQEGQQIMEIQGRNMAWLIKTLDAGKTMINLPPPMDERKRTNFIH

SEQ ID NO: 42067 - DNA, 549 bp, Unknown
  Obtained from environmental sample
  misc_feature (1)..(549): n is a, c, g, or t
gtggaattgctggacgaactacgcggcaaaccctactacataaccacgaagatggacggcacctccggcaccgtctactacatcgacggaaaaatcggctgttgcagccgcaacaaggagatcaaagacgaagaaaccgcgctctactggacgccgacctacagacacggcctcaaagaaaaattagccgcgtatggtaagaacatcgtgctgaccggagagatatgcggccccggcatacagaagaacaaactaaagttgcaacgcgttgaatggtacgtatttgacgcgatagacgtggattccggcaagtaccttccctacgacgatatgtgcaggctctgcaacgacttaggcattgccaccgtacccttggaagaacgtggagagagtttcgcatacacactagaaacgctattagaaaaagccaaaggcaaatacccaagcggacaagaaaaggaaggcattgtcgtcagagacgtgaaaagccctaaagcggtgtcatttaaggttttaaacaatgacgcgttgctcaaagaaaaggattaa

SEQ ID NO: 42068 - protein, 182 aa, Unknown
  Obtained from environmental sample
  DOMAIN (1)...(170): ATP dependent DNA ligase domain
  misc_feature (1)..(182): Xaa is any amino acid
MELLDELRGKPYYITTKMDGTSGTVYYIDGKIGCCSRNKEIKDEETALYWTPTYRHGLKEKLAAYGKNIVLTGEICGPGIQKNKLKLQRVEWYVFDAIDVDSGKYLPYDDMCRLCNDLGIATVPLEERGESFAYTLETLLEKAKGKYPSGQEKEGIVVRDVKSPKAVSFKVLNNDALLKEKD

SEQ ID NO: 42069 - DNA, 828 bp, Unknown
  Obtained from environmental sample
  misc_feature (1)..(828): n is a, c, g, or t
atgacaggcgcgctttattatgtggaatccgatcctatctttgtacagataacgattaccaataacagctctgcgccctaccgctttaaacttgccgatgaccgcgcgttttccgtcgattttgacatcagaacgatgtccaaccgtcctttacagcaggcggattcgttaatcaagaaacgaactgtaaacagccaggtttttttccgcgaagtggcgatagaaagcggcgagtctttttcgtttgtagaaaatatttgcgattatatcagttttgggcaaaccggctctttcagggtcaaggcgaaaatataccctgaattattccgttcagccggagcttcatcagttatcgagtcaaattatctcagtatgaccctgcgccccgctatcattaaaggaccggacggcgtcccgatagaaatggacgttgccacaggcgctgttcttgtaaaacaaaaactccctcccgatgaagtagtcgcctatatgattacagcgcgtcaggaatcacaatgggaaaaattctttctgtatcttgaccttgaggcaatgttaaggaaagacgctctgcaaggcagaaagtttaacgctgaaaatgaagaaggaagaaggcggatgcttaacacctacaagcagaatcttcaaagcgccgttattgacggagatattgtaactatccccaattcatttaacattatgaaaacccaatataacaacgataccgggtccgtggttgttcttcagcgttacagatacccgaattacaccgaattaagggatacacatattggcttgagaagaaagacaatttttggattattgtaa

SEQ ID NO: 42070 - protein, 275 aa, Unknown
  Obtained from environmental sample
  misc_feature (1)..(275): Xaa is any amino acid
MTGALYYVESDPIFVQITITNNSSAPYRFKLADDRAFSVDFDIRTMSNRPLQQADSLIKKRTVNSQVFFREVAIESGESFSFVENICDYISFGQTGSFRVKAKIYPELFRSAGASSVIESNYLSMTLRPAIIKGPDGVPIEMDVATGAVLVKQKLPPDEVVAYMITARQESQWEKFFLYLDLEAMLRKDALQGRKFNAENEEGRRRMLNTYKQNLQSAVIDGDIVTIPNSFNIMKTQYNNDTGSVVVLQRYRYPNYTELRDTHIGLRRKTIFGLL

SEQ ID NO: 42071 - DNA, 570 bp, Unknown
  Obtained from environmental sample
  misc_feature (1)..(570): n is a, c, g, or t
atggtcgcacgtttcaatcgtgtcagcctcaatatgaataaaaaaaagttagcgattgaaatttacaaaaaggcgcatttaacaggcgactttttattgcgctcaggacaaagatcaaatgaatattttgacaaatatttgtttgaagccgaccctaaattattagttgcaataataaagcaaatgaaaacgctcattcccaaaaatactgaactgcttgccggattggaaatgggcggcatacccttagtcaccgccctttcaatcgagacaggcatgccgagcgcatttgtgcgtaaagcggcgaaagaatacggaacttgtaaaatagcggaaggcggcgaaatttccggcaaaaaaatctgcgtaatagaagatgtggtaacaacaggcggacagataattaaaagcgtccaagaaataaggaacaggggcggaatagtagaaaacgtcctttgcgctattcaaagaaaccccgaagcgtccgaaatactggcaaaagaaggattaacccttaaacccgttttaacaatggaatatataaaagaagcggcgggaaaagcaaaataa

SEQ ID NO: 42072 - protein, 189 aa, Unknown
  Obtained from environmental sample
  DOMAIN (46)...(164): Phosphoribosyl transferase domain
  misc_feature (1)..(189): Xaa is any amino acid
MVARFNRVSLNMNKKKLAIEIYKKAHLTGDFLLRSGQRSNEYFDKYLFEADPKLLVAIIKQMKTLIPKNTELLAGLEMGGIPLVTALSIETGMPSAFVRKAAKEYGTCKIAEGGEISGKKICVIEDVVTTGGQIIKSVQEIRNRGGIVENVLCAIQRNPEASEILAKEGLTLKPVLTMEYIKEAAGKAK

SEQ ID NO: 42073 - DNA, 1620 bp, Unknown
  Obtained from environmental sample
  misc_feature (1)..(1620): n is a, c, g, or t
gtggcatacaccatcaccgacaagtcctacagggtcaggttcgtgaacgacaggctgctccgcctgaggaggctggagcgggaggaaatcctcggcgacctctgctacaacgccntgaacggcggcgcgccatgcaccgtctgcgtcgtcaggaaggcgatggaggacggcggggcccacagggtgctgaggaaggacgtcatgccggacggctcggtggtctatacggacgacttcgccgtgcccatcaacgtcggcggcgaggatttgatcctggaggcgctggttgaccgcaccaacgagatgctgctcaaggagaagaccaacgccgtgttcctggaagtcgtcaggagcctgatcaagctgctggagaagaaggacccctacacgtcccagcactgccgcgaggtcagcgccatcgcctcgaagctgacccgctacatgggccttggcaacagcgcggtttacaacgctatgctgggcggcctgctgcacgacctgggcaagctccacgtccccgacgcggtgctgaacaaaaacggtcgcctggagggctgggagctggactccatcaaggagcatcctgtgttcacttacctggtcctgcccgacctcgagtcattcaagaccattagggagatagccatatcgcaccacgagaagtgggacgggaccggctaccccaactcactccggggggacgaaatcccggtggaggccagggtggccgcggtggcggacacctacagcgcgatgacgtccgacaggccgtacaggaagggcatgggccacttggtcgccatggaagagatcaagaaaaacgcggggacccagttcgacccgggcatcgttgaaaagttcgtccagatggtggatgaatactccctagacagggacaccctgacggcccctgaggacaccacatccttcgtcggtatgatgcaaacgaacaggcacgtccagcggaggctaaaaaaagctgacacaacgaccggcgagcacgggcaggggcgcctcgccgacagtgacgtgcgcgggttcacagcgtccgcgtccttcgccgacgcaatcctgaacgccacgccggccaccttcacgatcgtggacgaatccctcaacatcatctatgcctccagcggcttcgcgctcgcccacggcaggtcggttgacgatctctgcacggagaagtgcttcgacgcgataggcggcaaggcggcctactgcttcgaggtgaaggacgggagcgtgcgctgcccagccgtgagggccttcgccacgggcaagcagcattacgcgctgatccgtgaggaaatccaaggcaatacgctgtaccgcggctcgtacgccgtgcccatgacgctggaggacattgagggcaagcccatcaagtgctgcctgctgatactcttcgacaggactgccgaaaaactggcgcagaacgagctggaggaggatctgaagcggatagccgacgcgctttacaacttcgtcacggaactggcccccgataccaccgacaacatagacggggtgtccgacgaggccgtcaacttcaacgactacctagagaaaatgcagggggagctggcggacatcctcgcccagcaggacgcggactaa

SEQ ID NO: 42074 - protein, 539 aa, Unknown
  Obtained from environmental sample
  DOMAIN (130)...(252): HD domain
  misc_feature (1)..(539): Xaa is any amino acid
MAYTITDKSYRVRFVNDRLLRLRRLEREEILGDLCYNAXNGGAPCTVCVVRKAMEDGGAHRVLRKDVMPDGSVVYTDDFAVPINVGGEDLILEALVDRTNEMLLKEKTNAVFLEVVRSLIKLLEKKDPYTSQHCREVSAIASKLTRYMGLGNSAVYNAMLGGLLHDLGKLHVPDAVLNKNGRLEGWELDSIKEHPVFTYLVLPDLESFKTIREIAISHHEKWDGTGYPNSLRGDEIPVEARVAAVADTYSAMTSDRPYRKGMGHLVAMEEIKKNAGTQFDPGIVEKFVQMVDEYSLDRDTLTAPEDTTSFVGMMQTNRHVQRRLKKADTTTGEHGQGRLADSDVRGFTASASFADAILNATPATFTIVDESLNIIYASSGFALAHGRSVDDLCTEKCFDAIGGKAAYCFEVKDGSVRCPAVRAFATGKQHYALIREEIQGNTLYRGSYAVPMTLEDIEGKPIKCCLLILFDRTAEKLAQNELEEDLKRIADALYNFVTELAPDTTDNIDGVSDEAVNFNDYLEKMQGELADILAQQDAD

SEQ ID NO: 42075 - DNA, 855 bp, Unknown
  Obtained from environmental sample
  misc_feature (1)..(855): n is a, c, g, or t
ttgccaaagattcaaacgcgggtaaatgacacggcggatacgccgaattccaccgctataacatatcccgccgcatttatcccaaacggcgcactttgcggcatttacgaaaaatccgccgcccatgtccgcgagttggaagggcttcccttgcgcgaaggcgtactgcagggaacttttcccgaaggcgggattgtcatttttgagggagatttgccttttattgtagatttacctcaggggcaaaagacggggttttttcttgatcaacgggataatcacctgcttacaggcaaatacgccgccatgcttcaaaaagagacaggggcggaactgcgtattcttgacgcctgttcgtacacaggcggctttggccttcacgcgctgagggcggcgggaaggcttaccatgcttgatgtatcgcaggcggcgcttgaaacggcgcgaaagaacgccgcgctgcacggagtcgcggatcgcgtaacgacagtcgaggcaaatgtttttgacgaactgcgtaatttagcgcggcgcaaagagcaatttgacatggtaatactcgatccgccggcgtttgcaaaatcacgcggctctcttgaagaagccctgcgcggctacaaggaaattaatctgcgcgcgataaaacttgtccgtcccggcggcgtctttataacctgctcatgcagccaggcggtagacgaaatcctctttaagcagatgatcgcctctgccgccgcagacgcgcagcgccgccttgtgcagattgatttcagttttcaggcgcaggatcacccggtacttgttggttatgatgagtcattgtatttaaagtgcggattttatcgggtactataa

SEQ ID NO: 42076 - protein, 284 aa, Unknown
  Obtained from environmental sample
  DOMAIN (90)...(254): Conserved hypothetical protein 95
  misc_feature (1)..(284): Xaa is any amino acid
MPKIQTRVNDTADTPNSTAITYPAAFIPNGALCGIYEKSAAHVRELEGLPLREGVLQGTFPEGGIVIFEGDLPFIVDLPQGQKTGFFLDQRDNHLLTGKYAAMLQKETGAELRILDACSYTGGFGLHALRAAGRLTMLDVSQAALETARKNAALHGVADRVTTVEANVFDELRNLARRKEQFDMVILDPPAFAKSRGSLEEALRGYKEINLRAIKLVRPGGVFITCSCSQAVDEILFKQMIASAAADAQRRLVQIDFSFQAQDHPVLVGYDESLYLKCGFYRVL

SEQ ID NO: 42077 - DNA, 720 bp, Unknown
  Obtained from environmental sample
  misc_feature (1)..(720): n is a, c, g, or t
atgaatatagcggcgcatcatcttaatttcaaagaacttaacaaacggataagaaccgccacggaagccgtctgcatagacggttgtttcgggcaaaggtttatcgcgagcggcatgaccggtaaaaatctgacgattaacggaacgccggggaacgcgttaggcgcttattttaacggcggaaccattatggtaaacggcaacgcgcaggatgccgtaggcgatacgatgaatgacggtaaaataatcattcacggcagcgcgggcgacgcgctcggttacgccatgaggggcggagaaatttatgtccgcgacaacgcgggatacagaaccggaattcacatgaaagaatacagggaaaaaaaaccggtaatcgtcattggcggaaaagccggcagttttctgggcgaatacctcgccggcggactcattgtggttcttggcataggctgcaatcatgaaatcccggtctggtattttacgggtacgggaatgcacggcggaaaaatctttatcagaaccgacaaggaactcacttcactcccggcgcaggtcattaaggaagtagccaccgcaaaagatttaaaggaaatcgcgccgtatatcggcgagtttgcgaagtattttgacatggacgcggaacaactgttgaaagacaggtactatgtgttaaagcctaacgcgaggaacccgtataaacagttatatacggcgaactag

SEQ ID NO: 42078 - protein, 239 aa, Unknown
  Obtained from environmental sample
  DOMAIN (1)...(209): GXGXG motif
  misc_feature (1)..(239): Xaa is any amino acid
MNIAAHHLNFKELNKRIRTATEAVCIDGCFGQRFIASGMTGKNLTINGTPGNALGAYFNGGTIMVNGNAQDAVGDTMNDGKIIIHGSAGDALGYAMRGGEIYVRDNAGYRTGIHMKEYREKKPVIVIGGKAGSFLGEYLAGGLIVVLGIGCNHEIPVWYFTGTGMHGGKIFIRTDKELTSLPAQVIKEVATAKDLKEIAPYIGEFAKYFDMDAEQLLKDRYYVLKPNARNPYKQLYTAN

SEQ ID NO: 42079 - DNA, 705 bp, Unknown
  Obtained from environmental sample
  misc_feature (1)..(705): n is a, c, g, or t
atgtgcggcatttttggttatgttggaagtaaagacgctgtttccattatagtcgatggattaaaaaaactggaataccggggctatgactcagccggtatcgcggtttacggcaagaacggccttggcgttgtaaagcaaaaagggcggctgaccgcgctggaggcgcgtcttgcggaacagccgcttgccggcctgccattggcgggaagcatgggaatcggccatacccgctgggctacgcacggggagccgtcggatataaattctcatcctcatgtggggagtgaaaacaaaatagccgttgttcataacggcattatagaaaattacaggcatttaaaggaacgccttgaacacaggggcgtgaatttcgcctcacagaccgacagcgaagtaatcgcgcagcttgccgaacattattataccggagatttgctggagacggtcatccacgtctcaaacgccctggaaggctcttacgcgttaggcgttatatgcgccgacgatcccgatatacttatcgccatcaaaaaagacaatccccttatcatcggcgtatcagaccacgggtgttttatcgcgtctgacgtaccagccgtgctgaaacatacgaacaaggtctactatcttgatgacaaggaaattgccgtactgcgtaataacagcgttcagttttttaatattgataaaagaacctgttga

SEQ ID NO: 42080 - protein, 234 aa, Unknown
  Obtained from environmental sample
  DOMAIN (2)...(198): Glutamine amidotransferases class-II
  misc_feature (1)..(234): Xaa is any amino acid
MCGIFGYVGSKDAVSIIVDGLKKLEYRGYDSAGIAVYGKNGLGVVKQKGRLTALEARLAEQPLAGLPLAGSMGIGHTRWATHGEPSDINSHPHVGSENKIAVVHNGIIENYRHLKERLEHRGVNFASQTDSEVIAQLAEHYYTGDLLETVIHVSNALEGSYALGVICADDPDILIAIKKDNPLIIGVSDHGCFIASDVPAVLKHTNKVYYLDDKEIAVLRNNSVQFFNIDKRTC

SEQ ID NO: 42081 - DNA, 321 bp, Unknown
  Obtained from environmental sample
  misc_feature (1)..(321): n is a, c, g, or t
atgttactgggacaaaaatttttcaatcagccaaccgtagacctggccagggcgcttttgggcaagtacctaattttgggagatctgcggggcaagattgtggaaaccgaagcttaccttttccacgacgaccccggctgccacgcaagcaggggccttactccccgcaatgcccccatgttcggcccagccggtcatatttacgtttactttatttatgggatgtactattgccttaacattgtcagtgggaaaaccnggcgaaggggaagcggtgttgatccgcgctcggaaccgtccagggaatctcggccgatctga

SEQ ID NO: 42082 - protein, 106 aa, Unknown
  Obtained from environmental sample
  DOMAIN (4)...(106): Methylpurine-DNA glycosylase (MPG)
  misc_feature (1)..(106): Xaa is any amino acid
MLLGQKFFNQPTVDLARALLGKYLILGDLRGKIVETEAYLFHDDPGCHASRGLTPRNAPMFGPAGHIYVYFIYGMYYCLNIVSGKTXRRGSGVDPRSEPSRESRPI

SEQ ID NO: 42083 - DNA, 1380 bp, Unknown
  Obtained from environmental sample
  misc_feature (1)..(1380): n is a, c, g, or t
atggacaacagcaacgactcaagcaattcaaatatagggcggcgcgatttcattaaactggtaggtgctggtgctgcccttgctgctttgagcggttgtggctcaaaggatggttctgcaaagcagggaaaagagcctactggagaaatgacctacagggttgacccaaaaaacggaaaccgtgtttctcttttaggctacggctgcatgagatacccgcgtttgcctaaatcgcaggatttagccacagaaaacaaccttgaccaagaggcaatcaatacgtccatagactatgccattgaaaatggggtgaattactttgatacctctccactttactgcaaaggcttttccgaaaaagccacgggcattgcactcagccgccacccacgcgataaatatttcatagccactaaaatgtccaaccgcaatcagcacagcagccgtgaagcatcacttgctatgtataaacgctcttttgaggatttaaaaacggattatatcgattattacctcgttcacaatgttggcacttttgaagcgttgaaagaacgctatatagataacggcattatggactttttgctaaaagaacgtgagtccgggcgaatacgcagccttggctggtcttttcacggagatggcgagttttttgattatatggcacttaaatacccttgggattttgtgatgattcagctcaattattttgactgggacatgaccgccgattcaaaacgtacaaatgtaagtgccaagcaccagtacgacctgctcacagaaaacaacattccaattgtgataatggagcctcttttgggcggtcgtttggcaaaaccgcattacaaagcgcgcgctgccatgactcaattaaatccagaagcaagcgcggcttcttgggcgtttcgctttgcgggaagtttcccaaatgtgattacagtactcagcggaatgacctttatggaacacttgcaagataatttgagtacctattctccgcttgtgccattaaacgaaagcgaaagggatatgttgctaaaagtttcgcaagttatgcttgaatacagaaacataaactgtacgcagtgtcagtattgcatgccctgcccctatggtcttgatattcccgaaataatcgcgcattacaacctctgtttaaacgaaggtaatttcccagacgacaagcaaagcgaagattacaaaagagcgcgccgcgctttcctcgttggattagaccgcaaaattgattctgtacgccaggcaagtagatgcacgagttgcagaaaatgcgttcccaattgcccgcagaatataaatattcctcaagagatgcaacgcatagatagatttatagaaaacttgaaaatggacattgtttag

SEQ ID NO: 42084 - protein, 459 aa, Unknown
  Obtained from environmental sample
  DOMAIN (56)...(350): Aldo/keto reductase family
  misc_feature (1)..(459): Xaa is any amino acid
MDNSNDSSNSNIGRRDFIKLVGAGAALAALSGCGSKDGSAKQGKEPTGEMTYRVDPKNGNRVSLLGYGCMRYPRLPKSQDLATENNLDQEAINTSIDYAIENGVNYFDTSPLYCKGFSEKATGIALSRHPRDKYFIATKMSNRNQHSSREASLAMYKRSFEDLKTDYIDYYLVHNVGTFEALKERYIDNGIMDFLLKERESGRIRSLGWSFHGDGEFFDYMALKYPWDFVMIQLNYFDWDMTADSKRTNVSAKHQYDLLTENNIPIVIMEPLLGGRLAKPHYKARAAMTQLNPEASAASWAFRFAGSFPNVITVLSGMTFMEHLQDNLSTYSPLVPLNESERDMLLKVSQVMLEYRNINCTQCQYCMPCPYGLDIPEIIAHYNLCLNEGNFPDDKQSEDYKRARRAFLVGLDRKIDSVRQASRCTSCRKCVPNCPQNINIPQEMQRIDRFIENLKMDIV

SEQ ID NO: 42085 - DNA, 414 bp, Unknown
  Obtained from environmental sample
  misc_feature (1)..(414): n is a, c, g, or t
ttgatgaaaacgcacgccgaagccggcgagcgtataatggacaaggtaatcgcgcgcaccggcgaattgcagttcctgcttaacgccaaactctttgccggctgccaccatgagcgctgggacggttccggctatcctcgcggactgaaaggcgtcaatatcccgctgcaaggccgcatcatggcagtagtcgattattacgacgccctgctctcagacaggccgtaccaaaggcgattctcggaagccgaagtaatagccggcatatccgccaacgccggcatactgttcgatcctctcattactcaggtttttgtggagataaaagacaaaataagcgaagccagacagaactatgttaattgcgatttgccgataagcgaaactcaagccgataacggcggcgccggctga

SEQ ID NO: 42086 - protein, 137 aa, Unknown
  Obtained from environmental sample
  misc_feature (1)..(137): Xaa is any amino acid
MMKTHAEAGERIMDKVIARTGELQFLLNAKLFAGCHHERWDGSGYPRGLKGVNIPLQGRIMAVVDYYDALLSDRPYQRRFSEAEVIAGISANAGILFDPLITQVFVEIKDKISEARQNYVNCDLPISETQADNGGAG

SEQ ID NO: 42087 - DNA, 459 bp, Unknown
  Obtained from environmental sample
  misc_feature (1)..(459): n is a, c, g, or t
ttgggcgacgtaatgaaagagagcgcgaaagcggcgctaagttatattcgcagcaaggcccccgaactgggtatcgatccggagttttacaagaaaaaagacgtgcacatccacttcccggagggcgccacgccgaaagacggacctagcgccggcgtcgccgtgaccgtagcgctaatatctacgctgacgaaccgcgccgtcaggggcgatatagctatgaccggcgagataacgctgcgcggcaaggtcttgcctatcggcgggctgcgcgagaaaacgatggcggcgctgcgcggcgggatttattccgttatcattccgcgcgacaacgagccggatcttgccgaaatcgatccgctggtaaaaagcgccataaactttatcgcggtggacaacgttgacgcggcgctaggagccgctatatcagttcagccggcgccgccgttatcggcttga

SEQ ID NO: 42088 - protein, 152 aa, Unknown
  Obtained from environmental sample
  DOMAIN (1)...(144): Lon protease (S16) C-terminal proteolytic domain
  misc_feature (1)..(152): Xaa is any amino acid
MGDVMKESAKAALSYIRSKAPELGIDPEFYKKKDVHIHFPEGATPKDGPSAGVAVTVALISTLTNRAVRGDIAMTGEITLRGKVLPIGGLREKTMAALRGGIYSVIIPRDNEPDLAEIDPLVKSAINFIAVDNVDAALGAAISVQPAPPLSA

SEQ ID NO: 42089 - DNA, 318 bp, Unknown
  Obtained from environmental sample
  misc_feature (1)..(318): n is a, c, g, or t
gtgtatcaaagcatagcgatacttatttcaggctttttctgcgggataggcggctcatttttaagtttgaaccttggcgcatttgttccgggaatgtccgccggaaagggctggattgcgcttgccgtaattttccttggtgggcgaaaacccttaggcgtcttagccgccgcttttcttttcagtctggccgaggtattttccaactactcgcaggggattttatcccttcccgttgattttttacttgcttttccgtatgttattacgttaatcgccatgattgttatatcggttttgccgcgccgtgacagttag

SEQ ID NO: 42090 - protein, 105 aa, Unknown
  Obtained from environmental sample
  SIGNAL (1)...(22)
  misc_feature (1)..(105): Xaa is any amino acid
MYQSIAILISGFFCGIGGSFLSLNLGAFVPGMSAGKGWIALAVIFLGGRKPLGVLAAAFLFSLAEVFSNYSQGILSLPVDFLLAFPYVITLIAMIVISVLPRRDS

SEQ ID NO: 42091 - DNA, 1497 bp, Unknown
  Obtained from environmental sample
  misc_feature (1)..(1497): n is a, c, g, or t
gtgcgttacctgcttgattacccctacggttgcctggagcagaagacagcgcggctccttccgcttgtcgcttttgccgatcgccttgagacctttgagcttgatagccctgtaaaaaatcccaaaaaggtgattgaagacgagctggcgctgctggcaaaaagccagttgtctgacggttccttcccctactggcccggcggcacgtttgggaaccggtatgtgacgctcagggttgcccacatagttcatctcgcaaggcaaaaaggctatgcagttcctgatgcgtttaatacccaaaccctgaccaaatacatgtcggaaaacgatttttcatcaatacttttcagggaagatcctttccttaaaggttactccctgtgggtacgcgcaatgtatggagcgcggattggtgcggagatttcggcgtttttaaagcgtggggatgagcttggcatttcaggctggggtctcgcgggcctagccgcaatggagcttggcttgagagaccttgctgtttccgcacgcgacagggtaaggcgctttatacgcccggggagtcgcaccctggatctgacagacacttatgagcgggcaggcaatatttggggctacgatgctgaccgttatgcgatagccacaatgctttaccangctttaaacccggctgacgacatgaccacaaggcttgtaaattcccttatagaacgccagcgccgtggaatatggactaacacccgctcttccttttgggcggttcttgctttcagcaaaattgccgatggcgaagaaaaggagcaaaccggtacgcttaactccaggctttcacttggtggaacaatgctccttgaagccgcattccgttcggctggaggagtaccagtttcccgcacctgggcttttggggaatccccccttgatacaacggcgaaggacacgcttttgccgcttaggatcgagcaggagggtagtgggcggctttactacaccgcaagcctcaagtacggaattcccgccgagcttgcctcggcaagggacgaagggctcagtgtctttacggaaaccttcgattcagcggggaaccctgttaccggaggcgtgcttgtcccgggtaagacctacaccagaaaggtaacggtttccagtcccagagatcgcacccatgttgcgcttagagcgcctattccgtccggggcggaaattgtagacgcggcttttgttaccagctccacggttccgccaaaagaggatgacgaggagcgggtgaaatggcgttattacgaggcaccgctggttcggtttatcatggacgatgaggccgttttccattgggactttttccccgccggaaagaaggaagttgagttccgctttcgggcggtgatgagcggggtatacccaaccccgccgacccaggcggaatgtatgtacgaggaagaaatctttggaaggggagccggcgagctgtaccgcataggaaacacaggcggccaatga

SEQ ID NO: 42092 - protein, 498 aa, Unknown
  Obtained from environmental sample
  misc_feature (1)..(498): Xaa is any amino acid
MRYLLDYPYGCLEQKTARLLPLVAFADRLETFELDSPVKNPKKVIEDELALLAKSQLSDGSFPYWPGGTFGNRYVTLRVAHIVHLARQKGYAVPDAFNTQTLTKYMSENDFSSILFREDPFLKGYSLWVRAMYGARIGAEISAFLKRGDELGISGWGLAGLAAMELGLRDLAVSARDRVRRFIRPGSRTLDLTDTYERAGNIWGYDADRYAIATMLYXALNPADDMTTRLVNSLIERQRRGIWTNTRSSFWAVLAFSKIADGEEKEQTGTLNSRLSLGGTMLLEAAFRSAGGVPVSRTWAFGESPLDTTAKDTLLPLRIEQEGSGRLYYTASLKYGIPAELASARDEGLSVFTETFDSAGNPVTGGVLVPGKTYTRKVTVSSPRDRTHVALRAPIPSGAEIVDAAFVTSSTVPPKEDDEERVKWRYYEAPLVRFIMDDEAVFHWDFFPAGKKEVEFRFRAVMSGVYPTPPTQAECMYEEEIFGRGAGELYRIGNTGGQ

SEQ ID NO: 42093 - DNA, 531 bp, Unknown
  Obtained from environmental sample
  misc_feature (1)..(531): n is a, c, g, or t
atggataatatttatacagagaaagtcagtacaaaaaaaatattcacaatagcaattcccctaattcttcagcagttaagtttacaaatgcaggtttgggttgatagggctatgttgggtcatgttgactcaaaatatttttccgctgttggaaatgcattagttccgttttgtgcgattgttgctataataaacgctatttgttgtggaacaactattctaattgcccaaaatataggggcaaaaaatatatcgcaaagtaaaaactatgcagaatgttcatttattggtaattcaatatttcctttaatggctttttcatttttcttttttgcttctggttttttgtttaagttaatgggagttcaatcgcctattcttgaatacagtacatcatatataaaaatattatcatttactttgttaattttgggaattgtatcaacttcggcttccgttatgcaaggtattggcataacaaaaatgattatggtttcgggtattatcagtaacatattaaatattacctga

SEQ ID NO: 42094 - protein, 176 aa, Unknown
  Obtained from environmental sample
  DOMAIN (20)...(176): MatE
  misc_feature (1)..(176): Xaa is any amino acid
MDNIYTEKVSTKKIFTIAIPLILQQLSLQMQVWVDRAMLGHVDSKYFSAVGNALVPFCAIVAIINAICCGTTILIAQNIGAKNISQSKNYAECSFIGNSIFPLMAFSFFFFASGFLFKLMGVQSPILEYSTSYIKILSFTLLILGIVSTSASVMQGIGITKMIMVSGIISNILNIT

SEQ ID NO: 42095 - DNA, 627 bp, Unknown
  Obtained from environmental sample
  misc_feature (1)..(627): n is a, c, g, or t
atggcgattatcgggtttgttgcgtttattttgatctattctgaaaaagacaaactgcttaatctgcaaaaaacggatgtatggatagggcttactacggtatcttcaatcgccattaagatgatgatcatctcggctgttttgttaataattctctcgataccggattatatgttccagcgctggcgtttcagggaacgtaaccggatgacaaggtacgaaataaaagaagaaatgaaaatgtacgaggcggatccgcaagtacagagcaggatacgcagtcgttttagggagttgttaaggcagaatatcggagtttctgttccaaaagcggatgtagtagtaacaaacccaacccaccttgccgtggccattcagtacgatcagcgttctatggcaggccctatggttgtcgctatgggcgccgatgaaatgtccgcaaggatcaggcagattgcgcgggaaaacgacgtgccgcttgtggaaaataaaccgcttgcgtgggcgctgtaccgcgaaacggatgttggggaaattatccctaccgcgtactggaatacggttgcggtaatattaagcaaggtttggtacttgaacgaagacagacgcaggaggattagcgcgtaa

SEQ ID NO: 42096 - protein, 208 aa, Unknown
  Obtained from environmental sample
  DOMAIN (1)...(196): FlhB HrpN YscU SpaS Family
  misc_feature (1)..(208): Xaa is any amino acid
MAIIGFVAFILIYSEKDKLLNLQKTDVWIGLTTVSSIAIKMMIISAVLLIILSIPDYMFQRWRFRERNRMTRYEIKEEMKMYEADPQVQSRIRSRFRELLRQNIGVSVPKADVVVTNPTHLAVAIQYDQRSMAGPMVVAMGADEMSARIRQIARENDVPLVENKPLAWALYRETDVGEIIPTAYWNTVAVILSKVWYLNEDRRRRISA

SEQ ID NO: 42097 - DNA, 510 bp, Unknown
  Obtained from environmental sample
  misc_feature (1)..(510): n is a, c, g, or t
atgcttgtctcgcccgtttcccgctattcaatagtaataggtaaaatattaggcagcggttttgccgcaataataagcatggcgggaacgcttgttgtctcacttgtgatgggcattactctgcctataagcaaactgctgttaattcttgccctgtcgcctcttatgtgtttatccggcggcgcgcttgcaatgatcatcatcggtctgattaaaaataaaagagcggcgaatcttgccgtaatgctcatagtcatgccgcagatgttcctgtccggcgcgattatcccgattaacaattcttcgggcgctcttttggtattaaaccgcgttatgcccatgacttactgtttagaccttgtccgcgctgttgtttacaggggcaatcccgagtatgatagtgtagtgatgtttaacccgttagtcaatttcgcggcgattctcgcgttaacaacgctctgccttgtgcttggaacattcctttttgcaaggagcgagaaagacaggtga

SEQ ID NO: 42098 - protein, 169 aa, Unknown
  Obtained from environmental sample
  SIGNAL (1)...(28)
  misc_feature (1)..(169): Xaa is any amino acid
MLVSPVSRYSIVIGKILGSGFAAIISMAGTLVVSLVMGITLPISKLLLILALSPLMCLSGGALAMIIIGLIKNKRAANLAVMLIVMPQMFLSGAIIPINNSSGALLVLNRVMPMTYCLDLVRAVVYRGNPEYDSVVMFNPLVNFAAILALTTLCLVLGTFLFARSEKDR

SEQ ID NO: 42099 - DNA, 342 bp, Unknown
  Obtained from environmental sample
  misc_feature (1)..(342): n is a, c, g, or t
atgagcgaaattgaattaatacggaaaaaatcgcggctgtttagggagttaaacaccatcgtaaccgtcatggcgcgtgagataacaatatttttcagatctccgggcaccgcgattattagccttgcgatgccgattgttttaatgggcatgatcggcggcaatttgatgcagaacatggcgggcggactcggtttccaattcgggcaatttatgctggtgggaatgttagtcaatatgcttttcatgataaccacaatgggtatgacttcccttatagacgatcacgacatagacttaatcaggaaatgcttgtctcgcccgtttcccgctattcaatag

SEQ ID NO: 42100 - protein, 113 aa, Unknown
  Obtained from environmental sample
  misc_feature (1)..(113): Xaa is any amino acid
MSEIELIRKKSRLFRELNTIVTVMAREITIFFRSPGTAIISLAMPIVLMGMIGGNLMQNMAGGLGFQFGQFMLVGMLVNMLFMITTMGMTSLIDDHDIDLIRKCLSRPFPAIQ

SEQ ID NO: 42101 - DNA, 942 bp, Unknown
  Obtained from environmental sample
  misc_feature (1)..(942): n is a, c, g, or t
atgagtgatcctgttatcaccgtgcggaacctgaccaagcggtacaagggcgcgcaaaaaccggcggtggacgacatcagtttttccgtcgggaagggcgagttcttcgcgttcctgggcgcaaacggcgcggggaagacgacaaccatctctatcctgacgacgacgctttccaaaacatcggggcaggtaaaaatcgccgggttcgatgttgaaaaagaggcgcggatggtgcgcgaaaaaatcgggattatttttcaacagccgagtcttgacccgcagttgacggcggagcagaatatccgcttccacgcctgcctgtacggaatgtgcgggtaccgtcccgctttcaacttaatgccgtcagcgtaccgcaagcgggtaatagagcttgccgaaattgtaggaatacaggacgcgctttttaagcctatcaaaaaactttcgggcggcatgcagcgcaaattggaaattatccgcagccttatccacacgccggatgtgctttttcttgacgagccgactcagggcctggatgcggtaagcagacgcgggctgtgggagtacattaacgaaacgcgaagccgttacgggacaactgttttccttacgactcattacattgatgaagccgaaaatgtggacacggtgtgccttatcaacaacggaaaaatcgcctcctgctgtccgccttcggaattgaaacggagcttgcttcggcatgagcttatccttgacgccgaagacagaacggcgctgacaaacgaactgtccgcgcttggtcttgagttcgcgctgaacgggcatgtcgttgttccttacaaagattcggcgcaggaaattatttcccgcataaaaacaaaactgaccgtgttaaaaatccacgaaccttcgctggaagacgcgtatattgaatttttaaccaaacaaaaggaaaattaa

SEQ ID NO: 42102 - protein, 313 aa, Unknown
  Obtained from environmental sample
  DOMAIN (33)...(223): ABC transporter
  misc_feature (1)..(313): Xaa is any amino acid
MSDPVITVRNLTKRYKGAQKPAVDDISFSVGKGEFFAFLGANGAGKTTTISILTTTLSKTSGQVKIAGFDVEKEARMVREKIGIIFQQPSLDPQLTAEQNIRFHACLYGMCGYRPAFNLMPSAYRKRVIELAEIVGIQDALFKPIKKLSGGMQRKLEIIRSLIHTPDVLFLDEPTQGLDAVSRRGLWEYINETRSRYGTTVFLTTHYIDEAENVDTVCLINNGKIASCCPPSELKRSLLRHELILDAEDRTALTNELSALGLEFALNGHVVVPYKDSAQEIISRIKTKLTVLKIHEPSLEDAYIEFLTKQKEN

SEQ ID NO: 42103 - DNA, 327 bp, Unknown
  Obtained from environmental sample
  misc_feature (1)..(327): n is a, c, g, or t
atgctggcggcggccgccgttttcggcgcggctgtaatgctgctgtggaacgctcttntgcctcaaattttcgctcttccgcagattggctatttgcaggcagtaggtctgctggttttaacgcggctgttgttcggcggcataggcggctggggacatggcggacgcagagagcatctgtttcaacacgggaacaaacttcgcgagaaatggatgaatatgagcgaggaagaacgcaaagaatttatcgaaaaagagaaagactttttcaaaagacgcgcttctcattttcaggattttttcggcgacagggaaaggccggaataa

SEQ ID NO: 42104 - protein, 108 aa, Unknown
  Obtained from environmental sample
  SIGNAL (1)...(25)
  misc_feature (1)..(108): Xaa is any amino acid
MLAAAAVFGAAVMLLWNALXPQIFALPQIGYLQAVGLLVLTRLLFGGIGGWGHGGRREHLFQHGNKLREKWMNMSEEERKEFIEKEKDFFKRRASHFQDFFGDRERPE

SEQ ID NO: 42105 - DNA, 615 bp, Unknown
  Obtained from environmental sample
  misc_feature (1)..(615): n is a, c, g, or t
atgagcgatttaatagaaaaaaaagacggctacaccggcgtacacacaaggcgcgtaagcgaatatgtttccatcttactgcgcgaattggcgcggcgcggtcatcaatttaccgaatccgatattcaaagaatagcggaatcttctcttttgcatgatatgggaaaaatcgcaataccggacagtattctttcaaagaacggaaaattagacgatgatgagttcggcgtaatgaaaagccacagcgctaagggtgcggattcgctggagaaatcaatgcagttcgcgaaggataacgactttttgaaaaacgcgttcataatggcaaagcatcatcatgagaaatggaacggcggcggttatcccgacggtaaaaaaggagacgagattcctcttcttgcgcgcgtaatcgccattgcggatgtttatgacgctttgcgttcacaacgttcgtataaaacgccgttcagtcatgagaaagcaaaagcaattatattggaagaaaacggacggcaatttgatcctgaactggttgatgtttttttggcggtggaacctgagtttgacgagttttgtaaaagtactcaagaggacattaatccagccgctaactaa

SEQ ID NO: 42106 - protein, 204 aa, Unknown
  Obtained from environmental sample
  DOMAIN (12)...(146): HD domain
  misc_feature (1)..(204): Xaa is any amino acid
MSDLIEKKDGYTGVHTRRVSEYVSILLRELARRGHQFTESDIQRIAESSLLHDMGKIAIPDSILSKNGKLDDDEFGVMKSHSAKGADSLEKSMQFAKDNDFLKNAFIMAKHHHEKWNGGGYPDGKKGDEIPLLARVIAIADVYDALRSQRSYKTPFSHEKAKAIILEENGRQFDPELVDVFLAVEPEFDEFCKSTQEDINPAAN

SEQ ID NO: 42107 - DNA, 759 bp, Unknown
  Obtained from environmental sample
  misc_feature (1)..(759): n is a, c, g, or t
ttggtacagtccgtggtggacgagataatgaaaaggatagaacaggacttgcgccgggccgtgacgggggccctgaacaagaaagcccatacacctataccgaacctgccgggcacggactggaaacgtaccataagccggaacctgaaaaactacgacaaaaaaacaaaccgcatcatcccggagaaattctattttttcgagcggacgcggaaaagcaaggaatggacggtcattctggacatcgaccaaagtgggtcaatggcagactcgatcatttattcctcggtcatgggttccattttcgcgagtatgccggccctggacacgaggatcgtggcctttgacactgaggtcgtggatttgaccgacttgtgcagaaacgatcctgtggacatgctcttcggagtgcagttgggcggggggacggacataaacaaatccgtgcaatactgcggccagtttatcagggagccgcaaaaaacaatgttcatattgatctccgatctctacgaaggcggggttgaggccgggctattgcgccagcttgaggagatgcgcgaatccggcgtcaaggcgctggtcttgctggcgctttcggacagcggcacgccccaatacgacgaagccctgggcaaaaaaatcgccgcgctgggcatccccagcttcgcctgctcgcccgacaagctgcctgagcttgtggagggngcgctcaaaggcttcaaccttatggaacttgcgcaaagggtgaagaagtag

SEQ ID NO: 42108 - protein, 252 aa, Unknown
  Obtained from environmental sample
  DOMAIN (2)...(234): VWA domain containing CoxE-like protein
  misc_feature (1)..(252): Xaa is any amino acid
MVQSVVDEIMKRIEQDLRRAVTGALNKKAHTPIPNLPGTDWKRTISRNLKNYDKKTNRIIPEKFYFFERTRKSKEWTVILDIDQSGSMADSIIYSSVMGSIFASMPALDTRIVAFDTEVVDLTDLCRNDPVDMLFGVQLGGGTDINKSVQYCGQFIREPQKTMFILISDLYEGGVEAGLLRQLEEMRESGVKALVLLALSDSGTPQYDEALGKKIAALGIPSFACSPDKLPELVEGALKGFNLMELAQRVKK

SEQ ID NO: 42109 - DNA, 570 bp, Unknown
  Obtained from environmental sample
  misc_feature (1)..(570): n is a, c, g, or t
gtgggtattacatacgctgaaaaaaaagaatatgacaaggccattgcggattataacgccgccttaaaaataaaacctgatattgatgaagtagtatatcccaatttggctaatgcttttttaggccgtggtaatgaaaattattataaaaaagaatataacaaggctattgatgattttagtgctatcttggaaatatatccaaattatgttgaagcatttaataaccgtggttatgtatataatgctaaaaaagagtatatgaaggccattatggatttcaacgccgcattggaaatcaaccccaataatgctaatgtaattaataacagaggtgaggcatatcgacaattaaaagagtatgacaaagctatggccgattttaacgcatcattggaaataaaccccaataatgccgaagctttttataatcgcggtaatacataccgaaatttaaaagaatatgacaaagcgattgcagacattgaggcggctttgcggataaatccgaaatatcccgatgcaaaaaaaacccttgaagcaattaagaaagaaaaaaggggtaaataa

SEQ ID NO: 42110 - protein, 189 aa, Unknown
  Obtained from environmental sample
  DOMAIN (37)...(70): Tetratricopeptide repeat
  misc_feature (1)..(189): Xaa is any amino acid
MGITYAEKKEYDKAIADYNAALKIKPDIDEVVYPNLANAFLGRGNENYYKKEYNKAIDDFSAILEIYPNYVEAFNNRGYVYNAKKEYMKAIMDFNAALEINPNNANVINNRGEAYRQLKEYDKAMADFNASLEINPNNAEAFYNRGNTYRNLKEYDKAIADIEAALRINPKYPDAKKTLEAIKKEKRGK

SEQ ID NO: 42111 - DNA, 354 bp, Unknown
  Obtained from environmental sample
  misc_feature (1)..(354): n is a, c, g, or t
atgaaaaaatcaatcctggcggtaatggtactataccttaccctgcacaccacccttaacgctcagaccgagccaaaaaccgcggaggaatattataaccgtggaaatatatatcatgagcaaggtgaatatgataaagccattgctgattttaacgccgccttaaaaatagacccgaaattatctgaagaaataaacatcgacttggttcatacttttttatttcgtgtgtattcatattttgaaaaacaacaatatgacaaaccaattacggatttcaattccgcttttaaaataaatcccaattttgctgacgctttttcctccgtggtgttgcatactctgaataaatag

SEQ ID NO: 42112 - protein, 117 aa, Unknown
  Obtained from environmental sample
  SIGNAL (1)...(21)
  DOMAIN (28)...(61): Tetratricopeptide repeat
  misc_feature (1)..(117): Xaa is any amino acid
MKKSILAVMVLYLTLHTTLNAQTEPKTAEEYYNRGNIYHEQGEYDKAIADFNAALKIDPKLSEEINIDLVHTFLFRVYSYFEKQQYDKPITDFNSAFKINPNFADAFSSVVLHTLNK

SEQ ID NO: 42113 - DNA, 1029 bp, Unknown
  Obtained from environmental sample
  misc_feature (1)..(1029): n is a, c, g, or t
atgggttttccaaaaaaagttttttgttcttttgtaatcgccgtgtttgttttctgcgcggcatcgggtctttttgcggcttcaggcgacggttcatcttcggatgccgatttcctttttaatgccgcgccgatctttccgcatatgctctttaccgaaacaattaacacttggaaaaagatggagaattccctgccctattgggttaactccgcagaagaagcggaatataaaaaacaattacaggattatcaaatttcctttttgctgaataacgatattcttgcgtactatggccacccgggttctcgcaacatgggaatattaggacgctattcaattgaagagctggacaggctgttgactaaacttgccgccgaatacgaggcggttaacggcgggcgaaaagtgcgaaaagctttttacctgatttacggtactgtttggccgaaaggcgaaatagggataataggggataaagttcttatgccgtatattgaatacggactgaaaaacgatgtgttggtttttatcgatcatcaaatcgggcgttatgacccgatagactcgcttaaaaaaatgctcccgtatttgcgttatccgaatgtgcatcttgcccttgaccccgaatggcggacaaacagtccgatggtgaatatcggcagtttaagagcgaaagaagtcaatcttgcacangcaataatggaagactacatgatagaaaataacattcccggtgagcgtatgcttgttattcatcaatttaactacggaatgattaaagatcgcgcacaggttaaaagcaattataacagggttagactggttcattgcgccgatggttttggttcacctgaagttaaacgagactcttacaattataatgcgcttgctactaatatgccgattaaggcttttaaattgttttacaattttggaatacccggcgtaggttatgactatcctttaatgtccccaaaagatgtgtataaacttaatcctcgaccttatttcattatgtatcaatag

SEQ ID NO: 42114 - protein, 342 aa, Unknown
  Obtained from environmental sample
  SIGNAL (1)...(26)
  misc_feature (1)..(342): Xaa is any amino acid
MGFPKKVFCSFVIAVFVFCAASGLFAASGDGSSSDADFLFNAAPIFPHMLFTETINTWKKMENSLPYWVNSAEEAEYKKQLQDYQISFLLNNDILAYYGHPGSRNMGILGRYSIEELDRLLTKLAAEYEAVNGGRKVRKAFYLIYGTVWPKGEIGIIGDKVLMPYIEYGLKNDVLVFIDHQIGRYDPIDSLKKMLPYLRYPNVHLALDPEWRTNSPMVNIGSLRAKEVNLAXAIMEDYMIENNIPGERMLVIHQFNYGMIKDRAQVKSNYNRVRLVHCADGFGSPEVKRDSYNYNALATNMPIKAFKLFYNFGIPGVGYDYPLMSPKDVYKLNPRPYFIMYQ

SEQ ID NO: 42115 - DNA, 825 bp, Unknown
  Obtained from environmental sample
  misc_feature (1)..(825): n is a, c, g, or t
ttgtcaaaaaaagtggtaaacgccattctttacggcagtgatgacgatattaaagtccgttatgtgaaccgagaaggaacgggacattttgaataccagtcaaaatttcccggcattctggaagagttaaaacggcgttatttggaaacacagtcgcagggcatcaaggactggcttgaaaaatttatgagtcagaaaccttgcgaagactgcggaggcaaacgtttaaaaccggaagtgttagccgtaaccgtcgccggaaaaaatatttgggaattgtcaaagttatcggtaactgattccttgcatttttttaaaacggtaaaatttaataagaatgaaaataaaatagcgtatcagatattaaaagaaataaacgcgcgtcttggctttatgcagaatgtaggtcttgattacctcagtcttgagcgcaaagcttccaccctctcaggcggtgaagcccagagaattaggcttgcgacgcaaataggctccagtcttgtgggcgtattgtacattttagacgaaccgtctatcgggcttcaccaaagagacaaccaacgcctgattgacacactgatgtacctgcgcgatcttggcaacacattgattgtcgttgaacatgacgaacaaacattacgcacggccgaccacattgtcgatttgggacctagcgctggcgttcacgggggatatgtcgtcgcccagggaagacctgaagaagtgatgaaagtaaaggaaagccttacgggccaatatttggctgggacgctgaagatcgacattcctaaagaacgccgtgcgggaaacggagncgtttcttaa

SEQ ID NO: 42116 - protein, 274 aa, Unknown
  Obtained from environmental sample
  DOMAIN (73)...(223): ABC transporter
  misc_feature (1)..(274): Xaa is any amino acid
MSKKVVNAILYGSDDDIKVRYVNREGTGHFEYQSKFPGILEELKRRYLETQSQGIKDWLEKFMSQKPCEDCGGKRLKPEVLAVTVAGKNIWELSKLSVTDSLHFFKTVKFNKNENKIAYQILKEINARLGFMQNVGLDYLSLERKASTLSGGEAQRIRLATQIGSSLVGVLYILDEPSIGLHQRDNQRLIDTLMYLRDLGNTLIVVEHDEQTLRTADHIVDLGPSAGVHGGYVVAQGRPEEVMKVKESLTGQYLAGTLKIDIPKERRAGNGXVS

SEQ ID NO: 42117 - DNA, 1032 bp, Unknown
  Obtained from environmental sample
  misc_feature (1)..(1032): n is a, c, g, or t
atggataaattaatcatcaagggggcgcgtgaacataatttaaaaaacattgaccttgaacttcctcgcgacaaattaatcgttatttcagggctctcaggctcgggcaaaagttcgcttgcgtttgacacgattttcgccgaaggacagcgccgctatgtggaaagcttgtccgcgtatgcaaggcagtttttggggcgtatggacaagcccgatctggactacattgaaggactctcccccgctatttccattgaacaaaaaaccacccaccgtaacccgcgttcaaccgtaggcaccgttaccgaaatttatgattattaccgccttctttacgccagaatcggcgtaccgcactgccccgtctgcggcaaggaaatccgcgaacagccggtagactctataatagaaacaattttgcaatttaaagaaggaacaaagattcaactgctctcccctgtcattcgcgggaaaaagggggaacatcaaaaaataatagaagacgcgcgaaaggcgggattcgcgagggcgagaatagacggagttcccgtaaatcttgacgaaagcatcaaattggacaaacaaaaaaaacactcaatcgaaattatcgttgacaggcttgtgattggaaaagacatacgctcacgtttggcggagtcggtggaaaccgccctgcaaacggctgaaggtttattaatcgtactgattaacgaggacggaaaaaattcagaacaggttttctcgcanaaaaattcctgtccagattgcggagtgtcaattcccgaattacagccgaggcttttttcgttttacaacccgttcggcgcgtgtccgggatgctccggacttgnggcaaaattggagtttgatcgtgatcttgttattcccgacctttcgctctccttaacgaaggcggcgttatcccatacaatcctgacagcgcgtggaacagaagccgttttcacagtcttgccaaacattacggattcagtcttgatacgtcttttaataaattgtcaaaaaaagtggtaa

SEQ ID NO: 42118 - protein, 343 aa, Unknown
  Obtained from environmental sample
  misc_feature (1)..(343): Xaa is any amino acid
MDKLIIKGAREHNLKNIDLELPRDKLIVISGLSGSGKSSLAFDTIFAEGQRRYVESLSAYARQFLGRMDKPDLDYIEGLSPAISIEQKTTHRNPRSTVGTVTEIYDYYRLLYARIGVPHCPVCGKEIREQPVDSIIETILQFKEGTKIQLLSPVIRGKKGEHQKIIEDARKAGFARARIDGVPVNLDESIKLDKQKKHSIEIIVDRLVIGKDIRSRLAESVETALQTAEGLLIVLINEDGKNSEQVFSXKNSCPDCGVSIPELQPRLFSFYNPFGACPGCSGLXAKLEFDRDLVIPDLSLSLTKAALSHTILTARGTEAVFTVLPNITDSVLIRLLINCQKKW

SEQ ID NO: 42119 - DNA, 375 bp, Unknown
  Obtained from environmental sample
  misc_feature (1)..(375): n is a, c, g, or t
atgggtaatgaacgaaaaaaaattatagcggtagacgataacattgaaaacctgaccgccctgaaaaataccctgaaagaaatatacgatgtatatccctgcccctccgcggcaaaaatgttcagtttgtttgaacatattcatccggatatgattcttctggacgttgaaatgccggaaatgaacgggtatgaagcgacggaaaagatgagaagcattgataagtaccgggaaatacccgttattttcctgacgagtatggaagatgaagaaagcaaaaagaaaggttttaatctgggcgctgttgattttatacataaaccatttgagaccgcgtcgctgcttcaacggctcgaaacgcatctatcgccataa

SEQ ID NO: 42120 - protein, 124 aa, Unknown
  Obtained from environmental sample
  DOMAIN (6)...(119): Response regulator receiver domain
  misc_feature (1)..(124): Xaa is any amino acid
MGNERKKIIAVDDNIENLTALKNTLKEIYDVYPCPSAAKMFSLFEHIHPDMILLDVEMPEMNGYEATEKMRSIDKYREIPVIFLTSMEDEESKKKGFNLGAVDFIHKPFETASLLQRLETHLSP

SEQ ID NO: 42121 - DNA, 1452 bp, Unknown
  Obtained from environmental sample
  misc_feature (1)..(1452): n is a, c, g, or t
atggccggtgatcgaagaaagaaaattgtcgtggtagacgataaccctgaggatctgaattccatcaagaataccctgaaagacatatacatggtatatccaagcccctccgcgcaggatatgttcgaattactggaacatatcaagccggaattaatcatgctggatgtggaaatgccgggtatgaacgggtttgaagccatacaaaagctgaaaaatgacgacaaattcagggaaatacccgttatcttcctgacgagtatggatgacacgcaaagtgaaatgaaaggcttacagcttggcgccgttgattatatccacaagccctttgaaaccccgctgctgctcctgcggataaaaacacaattgtccatggtggaacatcaactggaaattatggatctgcttgaattaaaaacacaagaggtcaaactgcgcgaaatggcggaacggtcggcgcaggacgcgtcccacgccaagaccaacttcctttcccgcatgagccatgaaatacgctctcccctaaacgccgtcataggaatgataaatatagcaaacgaagaaaaagatgtcgcgtcgttaaaagcgtatcttaaaaaagcgggcaccgcggcaaggcacgtattaagcgttatcaacgatattcttgatatgtccaaaattgaagcgcataaatttgagctttcttttagtgaatttaattttgaaaaaatgctgatggatattatcaatgtaacaaatgtccgcgccgaagaaaaaaatctgaattttgccgttatcttaaatacaaatgttccgtctttaatagtcagcgacgaattaaggttttcgcaggtcattatgaatttgcttaataacgcaatcaaattcacgcccgaaaacggcaaggttgtattgagagtagaaaagatagatgaaacaggcgatgaaattaccttacaaacagaaattgcagacagcggtatcgggatgacggaggaacagcaaaaacggctttttacttcttatgttcaggccgacagcagtatcacaaaaaatttcggcggtacagggcttggtcttgttatttccaaacaaatcgtggaactcatgcatggggaaatatggattgagtctaaacccaacaaaggttcaaaattcatatttacaacaaaagtacaaaagggagtcggcaagtcggaagtgcagttgtccacaaaaataaacagagacgaactgcgaatccttgcggtagatgactccgaagaaacaagaatgtatttttcccatgtcatggaagcattccatctgccgtgtgatgttgcgtgcagcgggaaagaagcgttggaaatgatggaaaagacggcggaaaagccttacaatttattttttgttgactggcaaatgcccgacatggatgggattgaactgacaaaaaaaattaaaaaaattaccggagataagtcgttgtaa

SEQ ID NO: 42122 - protein, 483 aa, Unknown
  Obtained from environmental sample
  DOMAIN (159)...(224): His Kinase A (phosphoacceptor) domain
  misc_feature (1)..(483): Xaa is any amino acid
MAGDRRKKIVVVDDNPEDLNSIKNTLKDIYMVYPSPSAQDMFELLEHIKPELIMLDVEMPGMNGFEAIQKLKNDDKFREIPVIFLTSMDDTQSEMKGLQLGAVDYIHKPFETPLLLLRIKTQLSMVEHQLEIMDLLELKTQEVKLREMAERSAQDASHAKTNFLSRMSHEIRSPLNAVIGMINIANEEKDVASLKAYLKKAGTAARHVLSVINDILDMSKIEAHKFELSFSEFNFEKMLMDIINVTNVRAEEKNLNFAVILNTNVPSLIVSDELRFSQVIMNLLNNAIKFTPENGKVVLRVEKIDETGDEITLQTEIADSGIGMTEEQQKRLFTSYVQADSSITKNFGGTGLGLVISKQIVELMHGEIWIESKPNKGSKFIFTTKVQKGVGKSEVQLSTKINRDELRILAVDDSEETRMYFSHVMEAFHLPCDVACSGKEALEMMEKTAEKPYNLFFVDWQMPDMDGIELTKKIKKITGDKSL

SEQ ID NO: 42123 - DNA, 507 bp, Unknown
  Obtained from environmental sample
  misc_feature (1)..(507): n is a, c, g, or t
atgacagaaaaactgacattaggcggcggcgatatttacgaaggcgaaacagctaacggcaagccgcacggcaaagggaaaataataaaaaatcccggcaagacaaacgaaacaacttatgaaggcgattttgttgacggacatttccacggaaagggaaaaatgaaattttcgaatggagaggtatacgaaggcgattttgtcaacggcagcgctcacggaaaggggaaactgacaagcagttacggctccgtctacgaaggcgattttgttgacggcaataaacacggcaaaggcacatacacaagcgatgacctcacctttgaaggcgagtttgtcaacggaatgcaatctaaaggaaaatgcacctacaaggacggcactgtaaaagaaggtaactggaaaggctttactttttacgggaaaaagaaaccgccaaaagacaaaccatatcaactaacgcccgaagaagaagcgatgagattacgctacgaaatttgcccgtaa

SEQ ID NO: 42124 - protein, 168 aa, Unknown
  Obtained from environmental sample
  DOMAIN (86)...(107): MORN repeat
  misc_feature (1)..(168): Xaa is any amino acid
MTEKLTLGGGDIYEGETANGKPHGKGKIIKNPGKTNETTYEGDFVDGHFHGKGKMKFSNGEVYEGDFVNGSAHGKGKLTSSYGSVYEGDFVDGNKHGKGTYTSDDLTFEGEFVNGMQSKGKCTYKDGTVKEGNWKGFTFYGKKKPPKDKPYQLTPEEEAMRLRYEICP

SEQ ID NO: 42125 - DNA, 405 bp, Unknown
  Obtained from environmental sample
  misc_feature (1)..(405): n is a, c, g, or t
atgggagacgtactatcacaagatgaaataaacgaaatgttaaaaaaagtagatgccgcgaatgccggaaaaaaggcggaagaaaccggcgcggaaaaccgacaggaaaagtttacacgcgaacactttcggggaatatcaataatatatgagaagttcgcgcggacggcgaataaaagcctttcacaaaaactcggcgtaacggtaaacatgacagtcgcttcaatagatcagcttacagtagatgatttttaccgttcaataccaatccccacaacattggcgcagataaacatggaaccgctggaaggcacagcgttatatgaaatagaccccgcaatcacattcgccgtaatcgacataaccggcggcagaaaagcccggaacaacaaaaacaaaccgtga

SEQ ID NO: 42126 - protein, 134 aa, Unknown
  Obtained from environmental sample
  DOMAIN (31)...(134): Flagellar motor switch protein FliM
  misc_feature (1)..(134): Xaa is any amino acid
MGDVLSQDEINEMLKKVDAANAGKKAEETGAENRQEKFTREHFRGISIIYEKFARTANKSLSQKLGVTVNMTVASIDQLTVDDFYRSIPIPTTLAQINMEPLEGTALYEIDPAITFAVIDITGGRKARNNKNKP

SEQ ID NO: 42127 - DNA, 753 bp, Unknown
  Obtained from environmental sample
  misc_feature (1)..(753): n is a, c, g, or t
atgaaaattgaaaaaatcaacctgctgcacctgcgaaatgatgcacatttccagttccacaccgagttccgcgacttagtagtgcaacacaaccccgaaaccctcaaaatcaaaccccagtttgacggctatctgcccctttacaacagggtggacgaagctctcaaaaagatagtaaaaagcgaatttaccgccaaaatccacgaagccgacaaggcgagagacgaaatctatcttggaatggcagaaaccgtcaccgccacgcttaggcacttcaacccaaatgttcggcaagctgcggaaaggctaaaaatcctctttgacacctacggcaatgtggcaaacaaacccctcaacgaggaaacatcggcaatctacaacattttgcaggaattaaagggcaaatacaccgccgatgtagcgagcgtgggcttaacccaatgggtagccgaactagaaacccgaaatcaaacatntgaagcattggtgaaagaacgctttgacgaaaccgcagctagaacaacggatatagttatgaagcaggcgagggcacagcttgacgaggtatataaagttatagtagagcgtatcaacgccctagccgtagtagagggcgtggcggcttacgaagcctttatcaaaacaatgaacgccgtaatagccaaatatgccgtaaagcatcaccaccaccgccaccacaataccaccacagaacaaacccaacaggatggaacacaaaatgacaaagtttaa

SEQ ID NO: 42128 - protein, 250 aa, Unknown
  Obtained from environmental sample
  misc_feature (1)..(250): Xaa is any amino acid
MKIEKINLLHLRNDAHFQFHTEFRDLVVQHNPETLKIKPQFDGYLPLYNRVDEALKKIVKSEFTAKIHEADKARDEIYLGMAETVTATLRHFNPNVRQAAERLKILFDTYGNVANKPLNEETSAIYNILQELKGKYTADVASVGLTQWVAELETRNQTXEALVKERFDETAARTTDIVMKQARAQLDEVYKVIVERINALAVVEGVAAYEAFIKTMNAVIAKYAVKHHHHRHHNTTTEQTQQDGTQNDKV

SEQ ID NO: 42129 - DNA, 549 bp, Unknown
  Obtained from environmental sample
  misc_feature (1)..(549): n is a, c, g, or t
ttgggcccccccccccccccccccntacaatatgccgccgcaataaccaacgcacacacgccgccgccctgcgcattcaacgcgcccccacgtgcgggcaatttcaaattaccgctaactccaaatttggcggtaaaagggtttcacaaccctgcgaaacctattccaaaggcaaatttgccctttctccatttggagaaacctacgccaaaagcagaacccacctttctccacttggagaaaccatattcccagccaaaaacacactttctccacttggagaaaccgcaatcccagccaaaaacacactttctccacttggagaaaccacaaacccagccaaaaacacactttctccacttggagaaaccgcaatcccaaccaaaaacacgctttctccacttggagaaaccgcaatcccagccaaattcaacctttctccacttggagaaaccgcaatcccagccaaattcaacctttctccacttggagaaaccgcaaaacttcatttttcaacccaaaacaacggaggttctctatgaaaattga

SEQ ID NO: 42130 - protein, 182 aa, Unknown
  Obtained from environmental sample
  misc_feature (1)..(182): Xaa is any amino acid
MGPPPPPPXQYAAAITNAHTPPPCAFNAPPRAGNFKLPLTPNLAVKGFHNPAKPIPKANLPFLHLEKPTPKAEPTFLHLEKPYSQPKTHFLHLEKPQSQPKTHFLHLEKPQTQPKTHFLHLEKPQSQPKTRFLHLEKPQSQPNSTFLHLEKPQSQPNSTFLHLEKPQNFIFQPKTTEVLYEN

SEQ ID NO: 42131 - DNA, 366 bp, Unknown
  Obtained from environmental sample
  misc_feature (1)..(366): n is a, c, g, or t
atgaagttttgcggtttctccaagtggagaaaggttgaatttggctgggattgcggtttctccaagtggagaaaggttgaatttggctgggattgcggtttctccaagtggagaaagcgtgtttttggttgggattgcggtttctccaagtggagaaagtgtgtttttggctgggtttgtggtttctccaagtggagaaagtgtgtttttggctgggattgcggtttctccaagtggagaaagtgtgtttttggctgggaatatggtttctccaagtggagaaaggtgggttctgcttttggcgtaggtttctccaaatggagaaagggcaaatttgcctttggaataggtttcgcagggttgtga

SEQ ID NO: 42132 - protein, 121 aa, Unknown
  Obtained from environmental sample
  misc_feature (1)..(121): Xaa is any amino acid
MKFCGFSKWRKVEFGWDCGFSKWRKVEFGWDCGFSKWRKRVFGWDCGFSKWRKCVFGWVCGFSKWRKCVFGWDCGFSKWRKCVFGWEYGFSKWRKVGSAFGVGFSKWRKGKFAFGIGFAGL

SEQ ID NO: 42133 - DNA, 687 bp, Unknown
  Obtained from environmental sample
  misc_feature (1)..(687): n is a, c, g, or t
atgttgagcgaagtagggataatgtgcaaagttaattgcgtaactctaaagggaatcaacgaccaacatatatacgaagtgacccaaacggcggcgaacctaggagcctttatgacaaacataatgccgcatcttccagtaaaaggttcggcgtttgaaggcttggaacgtgtgacaaacagggaaataatacttcttagggagcagtgcggagcaaacataaagcaaatgactcattgccgtcaatgccgttccgatgcagcaggaactcttgatagagatgtatctattgaattcagagaaaacactccagaaaaaccgcagcccgaaaaattcaggcgttttgcggtcgctacccaaacaggggcggttgtggatatgcactttgggcaggcaaacgagttttacatttacgaaagcgatgaaaaaaatgcgaggtttgtggaaaccagaaaagttatcaagtattgcaatggtcctcaatgcgaaaacaaagaggaaaggtggaattcggttatacacgctatttccgactgcgaagctgtgcttgcggtgagaattggtccaacgccagaaaaacgcttaaaagaaaacggcattgacgcgattacaacttatgaaagagtagaaacagccgttttgcaagcggcaaaagaaaaaaggaggaacactcatggtacagcctaa

SEQ ID NO: 42134 - protein, 228 aa, Unknown
  Obtained from environmental sample
  DOMAIN (121)...(218): Dinitrogenase iron-molybdenum cofactor
  misc_feature (1)..(228): Xaa is any amino acid
MLSEVGIMCKVNCVTLKGINDQHIYEVTQTAANLGAFMTNIMPHLPVKGSAFEGLERVTNREIILLREQCGANIKQMTHCRQCRSDAAGTLDRDVSIEFRENTPEKPQPEKFRRFAVATQTGAVVDMHFGQANEFYIYESDEKNARFVETRKVIKYCNGPQCENKEERWNSVIHAISDCEAVLAVRIGPTPEKRLKENGIDAITTYERVETAVLQAAKEKRRNTHGTA

SEQ ID NO: 42135 - DNA, 891 bp, Unknown
  Obtained from environmental sample
  misc_feature (1)..(891): n is a, c, g, or t
gtgtaccgtaacgtgcttgaacgcgagcgcgccggcggctatctgggcagtaccgtgcaggttattccccatgtcaccaccgaaataaaaagttttatttatgccggggcggaaaaaagccgcgccgatgttttgattaccgagatcggcggtacgacgggcgacattgaaagccagccctttttggaggctatccggcagatttcccttgaaaaaggccgcgaaaactgcctgtttatccatgtgacattgatcccgtatttaaaagcctcgggcgagcacaaatcaaagcccacgcagcactcggtcaaggaactgcgcgccattggtatttcacctaacattattatcgcgcgggcggacgaaccgataagcgacggcattacggataaaatatcgcttttttgcaacgtgaaacccgattgcgtcatagacaacattaccattccattcctttatgaagcgcctcttttgctgcatcaaaacggcctggacaaggtcgtctgccgcgaacttggcattgacgctcctgagcctgatctgaatgagtggagcgccatggttaaaaaaataggggagaaaaagcaggaagtcaatatctcgattgtcgggaaatatgttcaattacacgacgcgtatctttccattattgaaagcctgaatcacgcgggcattgaagccggagccggagtaaacatccaatggattgacagcgaagacgtaacaaacgaaagcgcgggcgatctgttacgcgaagcagacggcatgatcattcccggcggcttcggcgaaaggggcattgaggggaaaataaccgcctgccgttacgcgagggaacacgacgtaccgtatctggggaatttgtcttggcatgcagattgcggtgattga

SEQ ID NO: 42136 - protein, 296 aa, Unknown
  Obtained from environmental sample
  DOMAIN (1)...(184): CTP synthase N-terminus
  misc_feature (1)..(296): Xaa is any amino acid
MYRNVLERERAGGYLGSTVQVIPHVTTEIKSFIYAGAEKSRADVLITEIGGTTGDIESQPFLEAIRQISLEKGRENCLFIHVTLIPYLKASGEHKSKPTQHSVKELRAIGISPNIIIARADEPISDGITDKISLFCNVKPDCVIDNITIPFLYEAPLLLHQNGLDKVVCRELGIDAPEPDLNEWSAMVKKIGEKKQEVNISIVGKYVQLHDAYLSIIESLNHAGIEAGAGVNIQWIDSEDVTNESAGDLLREADGMIIPGGFGERGIEGKITACRYAREHDVPYLGNLSWHADCGD

SEQ ID NO: 42137 - DNA, 450 bp, Unknown
  Obtained from environmental sample
  misc_feature (1)..(450): n is a, c, g, or t
atgcagattgcggtgattgaattcagccgtaacgtctgcgggctggatcgcgcgaattcaagcgaagttgacgagacttcgccgcaccgcgtaatcgatcttatgcccggccaggccggtatgctgggctcaggcggcactatgcgcctgggcgcctatccctgtaaaatcacgcagggcacgctgatgcacagactgtatgacacggaagaaatcagcgagcggcaccgtcaccggtttgaattcaacaacaactaccgggaggctttgacaggcaaagggctggttatctcaggcacatcccctgacaacaaccttgtcgaagcggtcgaactgccggaccatcgtttcttcattggagttcaatttcatcctgagttcaagagccgccccaataaaccgcacccgctttttctggggctggtaaaggcggcgtttaatatagtttaa

SEQ ID NO: 42138 - protein, 149 aa, Unknown
  Obtained from environmental sample
  DOMAIN (3)...(126): Peptidase C26
  misc_feature (1)..(149): Xaa is any amino acid
MQIAVIEFSRNVCGLDRANSSEVDETSPHRVIDLMPGQAGMLGSGGTMRLGAYPCKITQGTLMHRLYDTEEISERHRHRFEFNNNYREALTGKGLVISGTSPDNNLVEAVELPDHRFFIGVQFHPEFKSRPNKPHPLFLGLVKAAFNIV

SEQ ID NO: 42139 - DNA, 630 bp, Unknown
  Obtained from environmental sample
  misc_feature (1)..(630): n is a, c, g, or t
ttgcttaaatcaatagcgcgtattattgattaccgagggtgtgtgttaataagcggcgaagacatttccgccgtctcgcgcaaagagctggcgaaaaaaatcgccttgctctcccagagcacgcaagtgttttttccctacacggtttatgagactgtatcaatgggacgttacgcgtattctcagggctttctgaaaaatctttccgacgaagacagaacggttatcgaaaatattttgaaaaaactggacatttgggaaaacaaagaccgcatgatcgacgaactaagcggcggagaattgcaaagggtttttcttgccagaactttagcgcaaagcccggagttgattctgcttgacgagccgagcaatcacctggacttaaaacaccaaattgaacttctcaagtacttaaaggagtgggtcaaagagaacaacaaaaccctaatcagcgtttttcatgatcttaatcttgctcgtcttttcggcgatacggcggttgttttgaataaaggaacattggccgcaagcgggaagattgacgaagttttgaccggtgaggttttgagtgaagtttacgggattgatattcgcgggtttatgagaggatcgctggagatgtggaaatag

SEQ ID NO: 42140 - protein, 209 aa, Unknown
  Obtained from environmental sample
  DOMAIN (2)...(172): ABC transporter
  misc_feature (1)..(209): Xaa is any amino acid
MLKSIARIIDYRGCVLISGEDISAVSRKELAKKIALLSQSTQVFFPYTVYETVSMGRYAYSQGFLKNLSDEDRTVIENILKKLDIWENKDRMIDELSGGELQRVFLARTLAQSPELILLDEPSNHLDLKHQIELLKYLKEWVKENNKTLISVFHDLNLARLFGDTAVVLNKGTLAASGKIDEVLTGEVLSEVYGIDIRGFMRGSLEMWK

SEQ ID NO: 42141 - DNA, 666 bp, Unknown
  Obtained from environmental sample
  misc_feature (1)..(666): n is a, c, g, or t
ttggccgagactctgccgttgacggctttgtctttgggcttgccgcagttttttttgtcgccngctttttcttcacgcatagaccgctcgatgtcgaataacacaataatcctgtgtgggatggttttttcgctttttttaagcgccatgcttaccatgcttagcgctgtcttttccgacgatctaaggcgtatcgctatatggcaaatgggcagttttgccatgcggggctggtcatcggtattacttttacttccgttttttatcgtcggaataatggggattttccttttcacgaaagagatggacattttaagttttggcgacgaacaggcaaagtcttcgggagtagaaacaggcgcggtacggaaaaaactgctcgctctctgcgccgttctgacaggcgcctcagtcgccatcagcggagttatcggttttgttgatttgatagcacctcacgcggcacgccgaatctgcggttcaagccacaggcgtttaattcccatgtcgtttattctcggcggctccttgcttgtattaactgatctgttggcaagaacagccgtctcgccgtcggaactaccggtgggtgcgattaccgcgttaatcggagcgccattttttgcatggatctactttaggcggaggtgcaaggcgcangtgtaa

SEQ ID NO: 42142 - protein, 221 aa, Unknown
  Obtained from environmental sample
  SIGNAL (1)...(24)
  DOMAIN (3)...(214): FecCD transport family
  misc_feature (1)..(221): Xaa is any amino acid
MAETLPLTALSLGLPQFFLSPAFSSRIDRSMSNNTIILCGMVFSLFLSAMLTMLSAVFSDDLRRIAIWQMGSFAMRGWSSVLLLLPFFIVGIMGIFLFTKEMDILSFGDEQAKSSGVETGAVRKKLLALCAVLTGASVAISGVIGFVDLIAPHAARRICGSSHRRLIPMSFILGGSLLVLTDLLARTAVSPSELPVGAITALIGAPFFAWIYFRRRCKAXV

SEQ ID NO: 42143 - DNA, 915 bp, Unknown
  Obtained from environmental sample
  misc_feature (1)..(915): n is a, c, g, or t
ttgaaaggctaccgcgacaaagtgtatctatccacaaagaaccccattgaagacgcagacggcgatcattggatggagcgtctggaaaaatcgcttaaaaaattggacacagactgcatcgacttttatcatttttggggtatttcgttaaaaagtttcgagtcatggcagggattaaaattcggtcctattgaagcggcgtataaagcgaaggaacaggggcttataaagcacatttcattttcgtaccacgatgcggcggaaaattataaaaagatagtagactcaggacattttgaaacaactcttgttcagtacaatatgctggatcgttccaacgaagaaaacatcgcctacgcaaaatcaaaaggattgggcgttgtagtaatgggacccgtcggcggcggacgtctcggcgctccaagcgaaaaaattcaaagcctgcttaaaaacaaatcgacaagtacggcggaaatggctctgcgttttgtgctttcaaatgaaaatatagacatggcactttccggcatgggcaatatggatatgttaaaggaaaattttgaagttgcctcgcgcacaggacatttaacggaagaagaactgcgtcaggtaaaatccatgatggaggaaaataaaaaccttgccaaactttactgcacaggctgtaattactgcaaaccctgtccgcagggcatcgacattccctacctttttgaaatcatgaaccgctaccgtgtttacgatttgaaagaacacgcaaagagcgcgtacaaagaagtaatcaacggctggagctggataaaaagcgcggatgcttcaaagtgcgcagcctgcggagcgtgcgaagaaaaatgcccgcaaaaactgctatttatcagcagttgcaggagacacatgaggcactggcgtaaataa

SEQ ID NO: 42144 - protein, 304 aa, Unknown
  Obtained from environmental sample
  DOMAIN (268)...(291): 4Fe-4S binding domain
  misc_feature (1)..(304): Xaa is any amino acid
MKGYRDKVYLSTKNPIEDADGDHWMERLEKSLKKLDTDCIDFYHFWGISLKSFESWQGLKFGPIEAAYKAKEQGLIKHISFSYHDAAENYKKIVDSGHFETTLVQYNMLDRSNEENIAYAKSKGLGVVVMGPVGGGRLGAPSEKIQSLLKNKSTSTAEMALRFVLSNENIDMALSGMGNMDMLKENFEVASRTGHLTEEELRQVKSMMEENKNLAKLYCTGCNYCKPCPQGIDIPYLFEIMNRYRVYDLKEHAKSAYKEVINGWSWIKSADASKCAACGACEEKCPQKLLFISSCRRHMRHWRK

SEQ ID NO: 42145 - DNA, 570 bp, Unknown
  Obtained from environmental sample
  misc_feature (1)..(570): n is a, c, g, or t
atggaaattattcagaaaaacgccaacacaatggaaaaccttaccaacgatctgttaattctcgccgatttggaaaacggatcgtctaacgtccgcgagcctgaggaactgatgattatgtctcttattgacgaggcggtgtcttccgttgaatcgcaggcaaaaagaaaacaaattgagatcaatgttgactgtcccgaagatttaagggcgaagcttttcggctcttttattatacaggcgttgatcaatcttatagacaacgcgattaaatattcccgggaaaaatccgggattttggttaaagcgtacagtgagaacggagaaatgttattggaagtgcgggataagggaataggaattccgcatgagtatcaggaacgcatttttgaaagattttaccgtgttgaccgcgcaagaagccgcgaagccggaggcacggggcttgggctttcaattgtccggcatatcgccctgcttcacaaaggaaaagccgaagtggaaagccatgcgggggaagggtctgttttcaggattaggataccggatcagataacaggtaacaggtaa

SEQ ID NO: 42146 - protein, 189 aa, Unknown
  Obtained from environmental sample
  DOMAIN (73)...(184): Histidine kinase-, DNA gyrase B-, and HSP90-like ATPase
  misc_feature (1)..(189): Xaa is any amino acid
MEIIQKNANTMENLTNDLLILADLENGSSNVREPEELMIMSLIDEAVSSVESQAKRKQIEINVDCPEDLRAKLFGSFIIQALINLIDNAIKYSREKSGILVKAYSENGEMLLEVRDKGIGIPHEYQERIFERFYRVDRARSREAGGTGLGLSIVRHIALLHKGKAEVESHAGEGSVFRIRIPDQITGNR

SEQ ID NO: 42147 - DNA, 726 bp, Unknown
  Obtained from environmental sample
  misc_feature (1)..(726): n is a, c, g, or t
ttgtgttacgcgacaagcaagaatccgctaaaagattttacttacggcggagtcattgtaagcaataccgacatgcactttgggaaaccgatgaatcacaacggcaataaccacggcggcataattgaaataaaaggaaaatattacgttttttatcacaggcacacaaacggaaaggatttttgccgtcaggcgtgcatggaaccgattaaaataaataaagacggaaaatttgaacaagttatgatgacttcctgcggaccgaacaacggacctcttgccgggtttggggaatatccggcttacatcgcgtgcaactttttttccgtaacggaaaatgataaacaagaatgggatcttatcccgaagggaaaatggccgcgccgcgactcccgcctgccttttgtctcgcaggacggaagagacggcgacgaagagacaggctttgtaacaaacataaacgacaattacggaatcggctttaaattttttgactgcaagggagtaaaaggcataaaagtaaaaacccgcggatacagccggggcttcttcgagataaaaacatcattagacggaaatccgcttggaaccatcgaaattacatcaagcaatatctggaaagaatttcaagcagatataataatcccggacggtattcatgctctttattttatctacaaaggaaccggaagcgcgacacttggatcctttactctctgtgaataa

SEQ ID NO: 42148 - protein, 241 aa, Unknown
  Obtained from environmental sample
  misc_feature (1)..(241): Xaa is any amino acid
MCYATSKNPLKDFTYGGVIVSNTDMHFGKPMNHNGNNHGGIIEIKGKYYVFYHRHTNGKDFCRQACMEPIKINKDGKFEQVMMTSCGPNNGPLAGFGEYPAYIACNFFSVTENDKQEWDLIPKGKWPRRDSRLPFVSQDGRDGDEETGFVTNINDNYGIGFKFFDCKGVKGIKVKTRGYSRGFFEIKTSLDGNPLGTIEITSSNIWKEFQADIIIPDGIHALYFIYKGTGSATLGSFTLCE

SEQ ID NO: 42149 - DNA, 1038 bp, Unknown
  Obtained from environmental sample
  misc_feature (1)..(1038): n is a, c, g, or t
atggaaacttcgatttcatgtattatttgtattgccgacatgaatatagttcccgctctggagcaggcgcttaccgaacttgctcttcccgaagtttttgttcagcgcgcaaaacaaacatttctgcaggataaacgcgattttcttggactgcgtcccattaccaaacttgatgaaagccgcgcgctgatttacagaatgtatgtccccgcggtgtatgaagagagcgttatgcgccgtattatcgatgcgactgatcttggaatgggcggacgcggcagtattttttcccagcacatcggcattttaagagggacgcctctttcttttgacatggaaaaacttaatactctttgcgaaaaaaaagaaaaactttatgttgaggaacacgcccttatagcttgtacagtttccagaggatcaggcgacgcgctggctcagacgatattggaacttggtatcggcgtaccagttgtttttttcggaacaggcgcggggttaagggacagattggggcttatgaggataaccattccgatagaaaaagaaatcatctggtttcttgtttcccgttccgacgcggacttagttgaaaaaagcataattccgcgcgccaatcttgacgttcccggcaacggctttttgtaccggtgttttgttcacgcgccgatagtaaacctgcggataagacacggagcgcgcgttcatgccgcgactatggaacaagtcattgccgcgttagacgaagtccgcggttcaaacgattggcgacgtcttggatcgcgtaagcgcgagcacaagagcggcgagggaaagtctgttaatacaaggggacttttctttatcggcgatgaagcggaaattgaattattccgtaaagaggcgatagaatgcggggcgcggggtgcgacttttaatcacgttgagatgcgctcgtacaaagttacgcaagaaaaagccatgcaatcaaaatctcgccaactttgcgacattatcaccacttcggaaaccgaagaaaaatacgcctttccgccataa

SEQ ID NO: 42150 - protein, 345 aa, Unknown
  Obtained from environmental sample
  misc_feature (1)..(345): Xaa is any amino acid
METSISCIICIADMNIVPALEQALTELALPEVFVQRAKQTFLQDKRDFLGLRPITKLDESRALIYRMYVPAVYEESVMRRIIDATDLGMGGRGSIFSQHIGILRGTPLSFDMEKLNTLCEKKEKLYVEEHALIACTVSRGSGDALAQTILELGIGVPVVFFGTGAGLRDRLGLMRITIPIEKEIIWFLVSRSDADLVEKSIIPRANLDVPGNGFLYRCFVHAPIVNLRIRHGARVHAATMEQVIAALDEVRGSNDWRRLGSRKREHKSGEGKSVNTRGLFFIGDEAEIELFRKEAIECGARGATFNHVEMRSYKVTQEKAMQSKSRQLCDIITTSETEEKYAFPP

SEQ ID NO: 42151 - DNA, 1062 bp, Unknown
  Obtained from environmental sample
  misc_feature (1)..(1062): n is a, c, g, or t
gtgcataagcccgtacctcgtacaataattatatatcttggagagacacggccattttgtaatgaggattatgggttacggcttattcttgaactggaaaaaaacggccataccatagcggcgctcttattgcgggagagcgatccaatcaatagttccccggccataggcgcgcgaaaaaaatttttcatcccggatgtcctgaccttacgcaagcctcagatagaagagatgcttggcaaagaagaaacagcaagagagctggacacatggcttgacggaataaaggatatggatgttgatctcgggattgtcttttatgggagctggcttcctcccaaacttttttccataccgcaatcaggctttataaactatcatcccgggccgcttccgtttctcaaggggatagaaccggatacattcattattcttgagggctggcgcagggcatggggtactgtacacagggtcagtccggaatttgacagcggcgacattattgctcagacaaaaactattcgtgtttcaaaatatgcaactccggttcagattttacatactctgactgatcttgggatcgcggcaatcatacaagccataaaaaatatatacaataatatatcaatacatcgcggctccccgcgatgtttcacgaagccgggatacatatcagacggtacatcccgcgccacaatcgcaagagccaggcgcgagagctttatccaatgggagaacgatactaacgaaatcatcaacagaaaattgcgggctttttgcggtcaggacatacacatacgcttaaaggcgctcattgacggcaaactccattttgtgcatgatctcgaaacatattgcaccggcaagaaatacatccgctcatttcaggcaggaactctgcttggctactacctctgtcatggaaagtattatcgcaaacctatcataaaaaccatcgacggagcggtcattcttcttgcggaagaagagaatgggcgggcggagagcgacatcccattcccgaaagagaacatactcgcccctcggccgaatctgacctag

SEQ ID NO: 42152 - protein, 353 aa, Unknown
  Obtained from environmental sample
  DOMAIN (27)...(201): Formyl transferase
  misc_feature (1)..(353): Xaa is any amino acid
MHKPVPRTIIIYLGETRPFCNEDYGLRLILELEKNGHTIAALLLRESDPINSSPAIGARKKFFIPDVLTLRKPQIEEMLGKEETARELDTWLDGIKDMDVDLGIVFYGSWLPPKLFSIPQSGFINYHPGPLPFLKGIEPDTFIILEGWRRAWGTVHRVSPEFDSGDIIAQTKTIRVSKYATPVQILHTLTDLGIAAIIQAIKNIYNNISIHRGSPRCFTKPGYISDGTSRATIARARRESFIQWENDTNEIINRKLRAFCGQDIHIRLKALIDGKLHFVHDLETYCTGKKYIRSFQAGTLLGYYLCHGKYYRKPIIKTIDGAVILLAEEENGRAESDIPFPKENILAPRPNLT

SEQ ID NO: 42153 - DNA, 924 bp, Unknown
  Obtained from environmental sample
  misc_feature (1)..(924): n is a, c, g, or t
atgggtatggaaaacgctgcaaacacggcgcgggggatgatttaccgtgaggcggtaatcaaaaaaatgaaccgcaaatccgcgaaaaagaatttgtttattaccgcgcccggcggttacggcaaaacgaccgcggcggagcaatggatctcttttgtccgtggggcagtggcgcggttaaggatgggaaacgaggataataatacaggcgtattttacaaaaaactgatctactcgctgttgaaactcgtcaagaaagaaaaatccgcgaagtccgccgaattcatgctggatacttttctggaaactctgaaacaaatgcctgttaaaaatacacggtgttacctgctcattgatgatctgcacataattaaaaacaatgacattttgaacagtctacccctcatcgcagggcgtctgccttcttatgtctgcctgtgtctggtcagccgatccatgcccccacagccattattggatacaggcctttttgaaacgctgacaaaagacgatctgctgttttcacaggaagaagtcgagtggcttggaacggaaaaaaaacgtgagctgacagcagggcaaatcaacgatttgctggaaacgaccggcggttgggcgatgtatctttcggctctgttgtcaggcgagcaaacatataaaatgccgcaaacactaattcaataccttgaaacgcgggtgtggaacttatgggacgatgaaacaaagaaactgctggttaaacttgccgtccctgttgagattacgcctgacttgtgcgaacggcttaccgcggaagcggacggtaaaagtattttggatcgtctggtcaaaaaggaaggggtatttttgacgctcatcggaaatggcgtttaccgctttcacgacatattccgcgatttctgcggagcgtctcggccgatctga

SEQ ID NO: 42154 - protein, 307 aa, Unknown
  Obtained from environmental sample
  misc_feature (1)..(307): Xaa is any amino acid
MGMENAANTARGMIYREAVIKKMNRKSAKKNLFITAPGGYGKTTAAEQWISFVRGAVARLRMGNEDNNTGVFYKKLIYSLLKLVKKEKSAKSAEFMLDTFLETLKQMPVKNTRCYLLIDDLHIIKNNDILNSLPLIAGRLPSYVCLCLVSRSMPPQPLLDTGLFETLTKDDLLFSQEEVEWLGTEKKRELTAGQINDLLETTGGWAMYLSALLSGEQTYKMPQTLIQYLETRVWNLWDDETKKLLVKLAVPVEITPDLCERLTAEADGKSILDRLVKKEGVFLTLIGNGVYRFHDIFRDFCGASRPI

SEQ ID NO: 42155 - DNA, 465 bp, Unknown
  Obtained from environmental sample
  misc_feature (1)..(465): n is a, c, g, or t
atggaaatactagaaggctgtttagacggacggggcttgaaaattgccattgcagtttctcgcttcaacgaagttgttacaaaaaatcttttagaaggagctgtttctgggctcaaaagaaccgccgttagcgaaggcgacatcaccattgcttgggcaccgggtgcgtatgagttgccgggcatagcggctcgctttgcggcaagcggcaaatttgatgctgttatagttttgagtgcagttattcgcggagcaactgcgcattttgaatatgtttcaagtgctgttaattctggcatcgcacacctcgcaagagaaggcaaaacaccggttatttttggcgtgctaacaacagacacagttgagcaagcaatggacagagcaggcttaaaatgcggcaacaaaggaacggatgccgccgctgccgcagtggaaatggcaaatttatataaaaggttgccttaa

SEQ ID NO: 42156 - protein, 154 aa, Unknown
  Obtained from environmental sample
  DOMAIN (10)...(153): 6,7-dimethyl-8-ribityllumazine synthase
  misc_feature (1)..(154): Xaa is any amino acid
MEILEGCLDGRGLKIAIAVSRFNEVVTKNLLEGAVSGLKRTAVSEGDITIAWAPGAYELPGIAARFAASGKFDAVIVLSAVIRGATAHFEYVSSAVNSGIAHLAREGKTPVIFGVLTTDTVEQAMDRAGLKCGNKGTDAAAAAVEMANLYKRLP

SEQ ID NO: 42157 - DNA, 744 bp, Unknown
  Obtained from environmental sample
  misc_feature (1)..(744): n is a, c, g, or t
atgatggccgagctcctgaaaggaaaattaatccgccagcttaatgaatctaatgcaaagattgagcgttttaataaagaactacagtccgaggttgacaggcaaaccgaaagcatccgcaacctacaaaaggcgattgtatattcgatgagcgatttgatagaaaaaaaagacggttacactggcgtacacaccaggcgtgtaagcgaatatgttgctattttattgcgtgaattggcgcgacgcggctatcaatttaccgaatcggaaattcaaagaatagcggaatcttccctgctgcacgatatgggaaaaatcgcaatacctgacagcattcttcttaaaaacggaagattgaccgatgatgagtttgatgtaatgaaaagccacagcacgacaggggcggattccttgcaaaagtcaatgcagtttgcaaaagacgatgactttttgaaaaacgcgtttgtaatggctaaacatcatcacgaaaagtggaacggcagcggctaccctgacggcaaaaaagaaaacgaaatacctcttcttgcgcgtgtaattgccattgccgatgtatatgacgcattgcgttcggaacgagcatataaatcgccgttcagccgcgagaaagcaaaatcaatcatattggaagagaatggaatccaatttgatcctgatctggttgatgtttttttagcggtagagccggagttagacgagttttgcgagtctgttaggaaagagtga

SEQ ID NO: 42158 - protein, 247 aa, Unknown
  Obtained from environmental sample
  DOMAIN (61)...(195): HD domain
  misc_feature (1)..(247): Xaa is any amino acid
MMAELLKGKLIRQLNESNAKIERFNKELQSEVDRQTESIRNLQKAIVYSMSDLIEKKDGYTGVHTRRVSEYVAILLRELARRGYQFTESEIQRIAESSLLHDMGKIAIPDSILLKNGRLTDDEFDVMKSHSTTGADSLQKSMQFAKDDDFLKNAFVMAKHHHEKWNGSGYPDGKKENEIPLLARVIAIADVYDALRSERAYKSPFSREKAKSIILEENGIQFDPDLVDVFLAVEPELDEFCESVRKE

SEQ ID NO: 42159 - DNA, 885 bp, Unknown
  Obtained from environmental sample
  misc_feature (1)..(885): n is a, c, g, or t
gtggcctgcgattatgtgatcaacatgtggctgaccgagatgggcgtaggcgaacgcccgaatagcgtgttatatgacgaacagttcaaaggtatgaacgccgaagctatatatgaccgtatcgttagcgatatgcgcacataccgtaaacttgccaccctgcgtggcgtcggcttgggtgatattatacccggtgaacgcagtcactctggggatattgatttggacgctttttatcgccggtcgctgtcacaggggctttattatcatcaggagcagggacgcgggtatttaccggagggcttgatcgaagaaatccgggcgctatcccacccgcccattccgtgggatgtggagcttgcccgttggtttgacgaacactttattcctgtcgaaaagatacgttcatatgcccgcccaaaccgccgtcagtcatccacacccgacattccgcgcccgaattgggtcatctcgcgtatggcgatggacggcagaacttttggtgttgtactggatacatccggatctatggagcgggcactgctggcaaccgcgttaggcgctatagccagttacagcgccgcacgggatgtgccggcggcgcgcgtggtgttctgtgacgccgaagcctatgacgcgggttacatgaaaccggaagacatcgccgaaaccgttaaggtaaaaggacgcggaggcacggtgcttcagcctggcattgatttattgaacaaatcggaagattttcctaaagaggcgccaattttgataataaccgacggttattgcgataaagtgattcttcacggcagagaacacgcatttctggttccacaaggcgcgaatcttccctttgaaccaaagggaaaagtattcaggttgaaataa

SEQ ID NO: 42160 - protein, 294 aa, Unknown
  Obtained from environmental sample
  misc_feature (1)..(294): Xaa is any amino acid
MACDYVINMWLTEMGVGERPNSVLYDEQFKGMNAEAIYDRIVSDMRTYRKLATLRGVGLGDIIPGERSHSGDIDLDAFYRRSLSQGLYYHQEQGRGYLPEGLIEEIRALSHPPIPWDVELARWFDEHFIPVEKIRSYARPNRRQSSTPDIPRPNWVISRMAMDGRTFGVVLDTSGSMERALLATALGAIASYSAARDVPAARVVFCDAEAYDAGYMKPEDIAETVKVKGRGGTVLQPGIDLLNKSEDFPKEAPILIITDGYCDKVILHGREHAFLVPQGANLPFEPKGKVFRLK

SEQ ID NO: 42161 - DNA, 525 bp, Unknown
  Obtained from environmental sample
  misc_feature (1)..(525): n is a, c, g, or t
atgaattattacgctatacaggtaaaaacaaaaggcgaagagaaatttataaaactgtttagttccctccacccggaagtgcgcctgcccatgcatttcccccggcggaaaatcgatatacggcggaggggggttgtccggcagtccacggtcgcggtctttcccggttatatatttatcgaggccgagagcgaggatatccttgcccatcaatgggctttccggcgcacggacgggttttaccgtttcctgaggtcaaaccaggacataagcccccttatgaacaaggatcttgaactggtactgcattttgtaaagagagcagggccgatcgccggcgtatccagggtgtattttaacgaaaattcccgcattgttgtcgtagaaggcccgttaattgggcttgagggaaggataataaaggtcgataaacgtaagaagagggcaaaagttaagttgaatctgtatgatgattcattcgcaatcgatcttgcctttgaagtgatcggggcgctggacagatag

SEQ ID NO: 42162 - protein, 174 aa, Unknown
  Obtained from environmental sample
  DOMAIN (1)...(96): Transcription termination factor nusG
  misc_feature (1)..(174): Xaa is any amino acid
MNYYAIQVKTKGEEKFIKLFSSLHPEVRLPMHFPRRKIDIRRRGVVRQSTVAVFPGYIFIEAESEDILAHQWAFRRTDGFYRFLRSNQDISPLMNKDLELVLHFVKRAGPIAGVSRVYFNENSRIVVVEGPLIGLEGRIIKVDKRKKRAKVKLNLYDDSFAIDLAFEVIGALDR

SEQ ID NO: 42163 - DNA, 537 bp, Unknown
  Obtained from environmental sample
  misc_feature (1)..(537): n is a, c, g, or t
atggaaaaaattatttttgtatcaaaactccgtgtttctccgtggttaataattttactgtttatcgcgggaattgcttccgcttacgctcaggaagggtcttccgtcatccttaagctgataccctcgcaggaatggattcccccggccgagttgcgtatcaatcctgaatatattattccaccgattgaaggccacccggcttcgctcgcggaaaaaagggaacccgcagactcgcccgcacccgccgaaatccctgttgtccggaattccctgttgttcaaggcgaaccttatcagcgatcttgaacgcggcaaatggtatgttcagattggggtttatgaaagggctgtgcatgtggaaaacgccgtcaagcgcgtaggaacggctggtcctgtggtaatacagaatgtcggtaccgataaggaccccatgttcagggtcctgctcggccccttcactcagagcgagagcaaaaccgtactgcggcgtttcaaggacaaaggctatgacgcgtttttaagaaacggaagctaa

SEQ ID NO: 42164 - protein, 178 aa, Unknown
  Obtained from environmental sample
  DOMAIN (103)...(176): Sporulation related domain
  misc_feature (1)..(178): Xaa is any amino acid
MEKIIFVSKLRVSPWLIILLFIAGIASAYAQEGSSVILKLIPSQEWIPPAELRINPEYIIPPIEGHPASLAEKREPADSPAPAEIPVVRNSLLFKANLISDLERGKWYVQIGVYERAVHVENAVKRVGTAGPVVIQNVGTDKDPMFRVLLGPFTQSESKTVLRRFKDKGYDAFLRNGS

SEQ ID NO: 42165 - DNA, 564 bp, Unknown
  Obtained from environmental sample
  misc_feature (1)..(564): n is a, c, g, or t
ttgggcatatttccaaaagcttggaaatacggcttgcatataggcattgtagaggtggtgctcggaggattgctgattatccccgcttggaaaacagacaagagtttgacggagaaaattctagaggttttaataaggcttggcattggcggcatgttcatctttgcgagcatttttaaaatagcagacccaaaactatttgcaagtttgattgcgcaataccagtttttgccgcataacctcgtgaatccgtgggctttggttttgccccaagttgaattttggtttgggcttgctttgatagtgacgccattcgtaaaagaatgtactttggtaattttggccttgtttgccagttttataatagcgcttgtgtgggcgctcgcccttgatttgggcataacttgcggctgttttcagttggaaggagcgcaatcaaaagcggaagcctggactgcccttgttcgcgatttgattttgctgtggccaacggcgtggcttttgacaagggaaaataaaatgatagcagacccaaagctatttgctaggctgattaagaaataa

SEQ ID NO: 42166 - protein, 187 aa, Unknown
  Obtained from environmental sample
  misc_feature (1)..(187): Xaa is any amino acid
MGIFPKAWKYGLHIGIVEVVLGGLLIIPAWKTDKSLTEKILEVLIRLGIGGMFIFASIFKIADPKLFASLIAQYQFLPHNLVNPWALVLPQVEFWFGLALIVTPFVKECTLVILALFASFIIALVWALALDLGITCGCFQLEGAQSKAEAWTALVRDLILLWPTAWLLTRENKMIADPKLFARLIKK

SEQ ID NO: 42167 - DNA, 669 bp, Unknown
  Obtained from environmental sample
  misc_feature (1)..(669): n is a, c, g, or t
ttgcttgacgagcctctttccgcccttgacgcgaaactgcgccagcacatgctcatagaacttgatcgtatccacgatgaaataggcataacgtttatttatgtaacgcatgatcaacaggaagcgctttccgtttctgatcgccttgccgttatgaacctcggcgatattttacaaataggcacaccgcatgaaatttacgaaagcccctctaaggattttgtcgcccgttttatcggagagaccaatctgtttgacggcgtaattacaagcgtggaaaaagtaaaaatcagcgagaacagcgatgaaatggaatatcttgctgaagtggaaattccggagttaggcaaaattaaagttaccgatattgacgaggtaaaagccggacagcgtgtaagttttaccataagacccgaaaaaatcgccattacaaaagaaatgcctactactaaacgtccctatataaatcatttacagggaatggtagacgagcctatttattccggttttcagacaaagttttatgttaatgtgcaggacaaaactcttatccgcgtaataaaacagcacgctaattattcagacgagggaccggatatccgctggaaggattccgtattcctttcatggagcgccgtagacggctacattgtcgaggttaaaagttga

SEQ ID NO: 42168 - protein, 222 aa, Unknown
  Obtained from environmental sample
  DOMAIN (134)...(218): TOBE domain
  misc_feature (1)..(222): Xaa is any amino acid
MLDEPLSALDAKLRQHMLIELDRIHDEIGITFIYVTHDQQEALSVSDRLAVMNLGDILQIGTPHEIYESPSKDFVARFIGETNLFDGVITSVEKVKISENSDEMEYLAEVEIPELGKIKVTDIDEVKAGQRVSFTIRPEKIAITKEMPTTKRPYINHLQGMVDEPIYSGFQTKFYVNVQDKTLIRVIKQHANYSDEGPDIRWKDSVFLSWSAVDGYIVEVKS

SEQ ID NO: 42169 - DNA, 891 bp, Unknown
  Obtained from environmental sample
  misc_feature (1)..(891): n is a, c, g, or t
ttgaacctaaaggcaaagaaaaattacggtccgctctattccgctccaatggctgtttggttcacgttatttttccttgcgccgatcatcatcattattatttacagtttcttaaaaaaagggctttacggcggagtagaaaataaattctcgcttgaagcgtatcactatctcggcgatcctgtatttttaagcattactcttcgtacaataataacttcattaatcgcgacagtaattactattttaatcgccctcccctgcggctacttcatggcaagaagcaaaaatcaaaccttgttgcttttgcttatcatcattcccttttggacaaattttcttatcagggtattcgcgtggatgaccattctgggaaataacggctttcttaacgaaatgctgtcccgcatcggaatagttaaggattatattcccttcctttacaaccaaaaagccgtaatccttgttttggtttacatgtatctgccctacgctattctgcccttattctcaactatcgataaatttgatttttctctgctggaagcggcgcgcgatctcggcgcgaaccagtttgtttcaattatgaagatactgattccgaacatcagaagcagaatttttacggcggtattgtttacgtttattcccatnttcggcgcttacgcggttcctcttttggtcggcggcatggattcctatatgcttgggaacgttatcgccgaccagctttcaaaatcgcgtaactggccgcgcgccgccgcgatttccatggtgcttacccttgttaccactcttggagtgctgataatgatgcacattcaaaaacgcgacgcttccagaattaccgaagcaaaaggctcagagggaaaactcgggagcgcggaatga

SEQ ID NO: 42170 - protein, 296 aa, Unknown
  Obtained from environmental sample
  DOMAIN (67)...(284): Binding-protein-dependent transport system inner membrane component
  misc_feature (1)..(296): Xaa is any amino acid
MNLKAKKNYGPLYSAPMAVWFTLFFLAPIIIIIIYSFLKKGLYGGVENKFSLEAYHYLGDPVFLSITLRTIITSLIATVITILIALPCGYFMARSKNQTLLLLLIIIPFWTNFLIRVFAWMTILGNNGFLNEMLSRIGIVKDYIPFLYNQKAVILVLVYMYLPYAILPLFSTIDKFDFSLLEAARDLGANQFVSIMKILIPNIRSRIFTAVLFTFIPXFGAYAVPLLVGGMDSYMLGNVIADQLSKSRNWPRAAAISMVLTLVTTLGVLIMMHIQKRDASRITEAKGSEGKLGSAE

SEQ ID NO: 42171 - DNA, 411 bp, Unknown
  Obtained from environmental sample
  misc_feature (1)..(411): n is a, c, g, or t
gtggcccttggcctgatactggatcggcccattagactgatatatgacacgccatcatgggaggcggcgatagaaggcgacactgtgcgtctaaagcaaatattggtcaacttggtcggcaattcaataaaattcaccgaagagggcgaagtagaaatcaagccgtacatcgaatcggaccatttcaaggtgatggtgagggacaccggcataggcatgagcgaagaagaaatggagaggctgttcaagcctttccagcaggtggatggaagcatcactaggcgctttggcggcacgggccttggcttggtgatttccaagcgcttgctggagctgatgaaaggcggcatatccgttgtgagttccaagggcgaggggaccacattcaccatcgaaataccactcgcttag

SEQ ID NO: 42172 - protein, 136 aa, Unknown
  Obtained from environmental sample
  DOMAIN (26)...(136): Histidine kinase-, DNA gyrase B-, and HSP90-like ATPase
  misc_feature (1)..(136): Xaa is any amino acid
MALGLILDRPIRLIYDTPSWEAAIEGDTVRLKQILVNLVGNSIKFTEEGEVEIKPYIESDHFKVMVRDTGIGMSEEEMERLFKPFQQVDGSITRRFGGTGLGLVISKRLLELMKGGISVVSSKGEGTTFTIEIPLA

SEQ ID NO: 42173 - DNA, 1251 bp, Unknown
  Obtained from environmental sample
  misc_feature (1)..(1251): n is a, c, g, or t
atggcgcttcttgaagcggatgtcaacctgcgcgtcgtgcgccgttttgtaaattccactatagaggaagcaaaaggcgagaaggtacttcgcgccgttgatcccggacagcaatttgtaaaaatagtccatgataaacttgtttcattcctcggagacgccgacccttcaagccgcgctttaaaactacgcggccccgatgtaatctccacaatacttatgctgggattgcaaggttcaggcaaaacaacaagttctgcaaaacttgccctgcgcctgaaaaaagaaggccgcaagccgatgcttgtagcctgcgatcttgtgcgtcccgcggcaatggaacagctcgctgccctcggcggtcagattggaattcccgtccacaaagaagacggcgccaaggacagcgtaaaagtttatcggaacgctcttgcctgggcaaatcaaaacatgatcgacacggtgatcattgataccacaggccgtctgcaaattgacgaaccgatgatgcaggagctttcccgccttaaagacgcgtccaaccccgacgaaatgcttcttgtcgctgactcaatgacaggacaagccgccgccgatatcgcaaaaaccttcgacgaaaaaataggccttacgggcgttgtgcttacaaagttcgattccgacacaagaggcggcgcggcgctctcgttaaagaccgttacgggcaaaccgttaaaatttacaggcacaggcgaaaaacccgaagactttgaacccttccatcctgacaggcttgcgggaaggattctcggcatgggcgatgttgtaagccctgtagaaaaagcgcaggaagtaattaatgaaaaggaagctcttgaactccggaataaaatggagaaagagaactttactctggaagactggctttcccagcttcgcgccgtaaaaaaaatgggctctcttcaaaaaatgcttgagatgattccgggaatgcagggacagatcaacgaggacgacattaacaaagaagaactgaaacatcaggaggcgattttaagctccatgacgcgcaaagagagagcgaaccatttgatcataggtccgccgcgcagaagcagaatcgcgcgaggctccggcacatcggtcgctgaagtggcgcgtctgcttaaaaagtttgaaaagatgcgcggcatgatgaaaaagatggcaaagggcgcgagaaccggcgcaatgaacggaatgatgggcggttttcctggatttccgcagtag

SEQ ID NO: 42174 - protein, 416 aa, Unknown
  Obtained from environmental sample
  DOMAIN (1)...(52): SRP54-type protein, helical bundle domain
  misc_feature (1)..(416): Xaa is any amino acid
MALLEADVNLRVVRRFVNSTIEEAKGEKVLRAVDPGQQFVKIVHDKLVSFLGDADPSSRALKLRGPDVISTILMLGLQGSGKTTSSAKLALRLKKEGRKPMLVACDLVRPAAMEQLAALGGQIGIPVHKEDGAKDSVKVYRNALAWANQNMIDTVIIDTTGRLQIDEPMMQELSRLKDASNPDEMLLVADSMTGQAAADIAKTFDEKIGLTGVVLTKFDSDTRGGAALSLKTVTGKPLKFTGTGEKPEDFEPFHPDRLAGRILGMGDVVSPVEKAQEVINEKEALELRNKMEKENFTLEDWLSQLRAVKKMGSLQKMLEMIPGMQGQINEDDINKEELKHQEAILSSMTRKERANHLIIGPPRRSRIARGSGTSVAEVARLLKKFEKMRGMMKKMAKGARTGAMNGMMGGFPGFPQ

SEQ ID NO: 42175 - DNA, 351 bp, Unknown
  Obtained from environmental sample
  misc_feature (1)..(351): n is a, c, g, or t
atgccgagaatccttcccgcaagcctgtcaggatggaagggttcaaagtcttcgggtttttcgcctgtgcctgtaaattttaacggtttgcccgtaacggtctttaacgagagcgccgcgccgcctcttgtgtcggaatcgaactttgtaagcacaacgcccgtaaggcctattttttcgtcgaaggtttttgcgatatcggcggcggcttgtcctgtcattgagtcagcgacaagaagcatttcgtcggggttggacgcgtctttaaggcgggaaagctcctgcatcatcggttcgtcaatttgcagacggcctgtggtatcaatgatcaccgtgtcgatcatgttttga

SEQ ID NO: 42176 - protein, 116 aa, Unknown
  Obtained from environmental sample
  misc_feature (1)..(116): Xaa is any amino acid
MPRILPASLSGWKGSKSSGFSPVPVNFNGLPVTVFNESAAPPLVSESNFVSTTPVRPIFSSKVFAISAAACPVIESATRSISSGLDASLRRESSCIIGSSICRRPVVSMITVSIMF

SEQ ID NO: 42177 - DNA, 408 bp, Unknown
  Obtained from environmental sample
  misc_feature (1)..(408): n is a, c, g, or t
gtgagggaacttgaaggaactaaaatcgatcaggtttatatcggctcttgcacaaacggcagaatcgaggatttacgcgccgccgcggctgtcctgcacggaaaaaaaatcgccgactctgtacgcgtgataatcgctcccgccaccacggacatttacgcgcaggcgcttaaagagggactgatacagattttccttgacagcggctgctgcgtaacaaacgccacttgcggcgcttgtcttggaatgtccaacggcgtgcttgccgaaagcgaagtttgcgcttctaccactaaccgcaatttttacggacgtatgggttcaggcggcatggttcaccttatgagtcccgcctcggcggcagaagcggctgtcgccggcgaaattaccgcagggggacagccgtga

SEQ ID NO: 42178 - protein, 135 aa, Unknown
  Obtained from environmental sample
  misc_feature (1)..(135): Xaa is any amino acid
MRELEGTKIDQVYIGSCTNGRIEDLRAAAAVLHGKKIADSVRVIIAPATTDIYAQALKEGLIQIFLDSGCCVTNATCGACLGMSNGVLAESEVCASTTNRNFYGRMGSGGMVHLMSPASAAEAAVAGEITAGGQP

SEQ ID NO: 42179 - DNA, 525 bp, Unknown
  Obtained from environmental sample
  misc_feature (1)..(525): n is a, c, g, or t
gtgaaaatatttggcggagaagttttatttcttgatcgaaacgatattaacaccgacgaaattatccctgcgaagtatttaactgaggacacaagaatagcgttaaagccccatcttctggaagacttaaaattaaagggatttgatccatcaaaagatattgccggaaaaggcgcggtacttgcgcgggcaaacttcggctgcggttcctcgcgggaacacgctccgtgggcgcttgaagtgaacggtatcaacatcgttatcgcggaaagttttgcccgtatcttccgtcagaatatgtacaactgcggcatgatcgcctgcgagctttccgccacagttctggacgaactgttcggggaatttgccaatgtcaaaacaacactaacggtggatactggcaagggcagtttaagcttcaaagccgccggaaaagaaaaaacagtttctttcgtccttaaaaattttgaaaaagcgcttgtggatgccggcggctgggtcgagtacgcggcagaacactactaa

SEQ ID NO: 42180 - protein, 174 aa, Unknown
  Obtained from environmental sample
  DOMAIN (1)...(113): Aconitase C-terminal domain
  misc_feature (1)..(174): Xaa is any amino acid
MKIFGGEVLFLDRNDINTDEIIPAKYLTEDTRIALKPHLLEDLKLKGFDPSKDIAGKGAVLARANFGCGSSREHAPWALEVNGINIVIAESFARIFRQNMYNCGMIACELSATVLDELFGEFANVKTTLTVDTGKGSLSFKAAGKEKTVSFVLKNFEKALVDAGGWVEYAAEHY

SEQ ID NO: 42181 - DNA, 603 bp, Unknown
  Obtained from environmental sample
  misc_feature (1)..(603): n is a, c, g, or t
atgagcgcggcaatgcttgaagtaaagaagttgcgcgccggatacagcgccggcgcaatcaaagattgcgatgatgttatacgcaatataaatttcagggtggaaaaaggggaatgtctctgcgtactggggccgaacggctgcggtaaaagcaccctgcttaaatcaatagccggaattcttgattaccatggttccgtcctggttgacggtaatgatatttccgccatcccacgcaaagagcttgcgcgaaaaatcgccctgcttggccagaatatgcaggtattttttccctacacggtatatgaaaccgtttcaatggggcgctatgcttattcgcgggggattctgaaaaatctttccgcgcaggacaaaacaattatcaatgatatcctcaaaaagttagacctctgggaaataaaagagcgcatgattgacgaactgagcggcggaactttacagcgtgtttttctggcaaaaacgatggcgcagactccccgcctgattctgctggacgagcccgcgaatcatcttgatctgaaacaccagatcgcgctgctggactatctaaaatcatgggttaaggaaaacaacacctgttaa

SEQ ID NO: 42182 - protein, 200 aa, Unknown
  Obtained from environmental sample
  DOMAIN (37)...(198): ABC transporter
  misc_feature (1)..(200): Xaa is any amino acid
MSAAMLEVKKLRAGYSAGAIKDCDDVIRNINFRVEKGECLCVLGPNGCGKSTLLKSIAGILDYHGSVLVDGNDISAIPRKELARKIALLGQNMQVFFPYTVYETVSMGRYAYSRGILKNLSAQDKTIINDILKKLDLWEIKERMIDELSGGTLQRVFLAKTMAQTPRLILLDEPANHLDLKHQIALLDYLKSWVKENNTC

SEQ ID NO: 42183 - DNA, 1719 bp, Unknown
  Obtained from environmental sample
  misc_feature (1)..(1719): n is a, c, g, or t
atgatggccgagttggtgattatcttggtttggtatgcaaaagatttaaataaaatgaaatattatcaactttttgacgaaaaacctcaatttgataccgcatataaatatttagaattaccttctggcgaaagacgtgcattaacagaaaaagaaaaagatgatatttctaacattcctaaaggaagcaagatttatcgttttgataatatacaatcacaaggagccccaaaagaggctacaccgctagaatttgagggaaaaatatacaaccctaatcctggtagtcattggaaagcgcaatatccagagggtatgtataatttgataaagaaaaaacgaataaccttatttggaacatcattggcatatgttaggtatattgatgacaatcccgtaaatccaaaaaataatgcgtggaccgatacaggatttgcgggttttgcaacagataaaaaatatgttgttgaaactaataaagaagtaatccaacgctgtctcctcatgaccaccgaccccggcgatctggtactcgacataacctgcggaagcggaactactgcctatgttgccgaacaatggggacgccgctgggtaacctgtgacacttcccgcattgccatcacccttgcaaaaaagcgtctaatgaccgcaaccttcgactactacaaactggcgtaccctgaacagggagtatcaagcggctttgtgtacaaaacagtcccgcacatcacgctcaagtcaatagcgaataacgaaccgccggaacagganacgctttacgaccagccggaaatcgaaaaaagaaaaatccgcatttcaggaccattttacgtggaagcccttcccgctccggtggtaaaaccacttgacgatgatactcaccccgctccgtttttccatgaaaacgccgctaaaaaacaatccgactggatgcaggaattaaaagcgtcaggcatattggggcggcagggagaaaaaattcaattctccagagtagaaccattggaaggaacaaaatttctccacgcggaagccgagacaaaagaaacagacagaaaaaaagccgtcatttattttgcgggcgaaacccgccctctcgatattcgcatggttacccaagcgctgaatgaggcggaaaccataaggccgaaacctgtttatatcgttttcgccgctttccaatttgatccaacggcggcaaaacatattgacgatactaaatggccaggggttacattgttaaaagtacaaatgaaccccgaccttatgaccgccgatttaaaaaagaaagtatcctcaagccaaagtttctggcttgtcggacagcccgatgtagagcttatccatatcgaaaaaggaaccgacaaaggcaagtataaaatcaaagtaaaaggctttgactattacgatataaaacaaggaatagtcgattcaggcggaaccgataaaatcgccatgtggatgcttgataccgattatgacggcatgtccatagaacccaaacaggtatttttcccaatggaagggaaaaacgaaggttgggacaaactggcaaaaaccttaaaagcggaaatcaaccctgaccttatagaaaaatacagaggtactgaatccctgccatttacaattaaagataatacccaaatagccgtcaaaatagttgatgataggggaattgaaagccttaaagtaatttcggtaggcgcaaatggctga

SEQ ID NO: 42184 - protein, 572 aa, Unknown
  Obtained from environmental sample
  DOMAIN (3)...(213): DNA methylase
  misc_feature (1)..(572): Xaa is any amino acid
MMAELVIILVWYAKDLNKMKYYQLFDEKPQFDTAYKYLELPSGERRALTEKEKDDISNIPKGSKIYRFDNIQSQGAPKEATPLEFEGKIYNPNPGSHWKAQYPEGMYNLIKKKRITLFGTSLAYVRYIDDNPVNPKNNAWTDTGFAGFATDKKYVVETNKEVIQRCLLMTTDPGDLVLDITCGSGTTAYVAEQWGRRWVTCDTSRIAITLAKKRLMTATFDYYKLAYPEQGVSSGFVYKTVPHITLKSIANNEPPEQXTLYDQPEIEKRKIRISGPFYVEALPAPVVKPLDDDTHPAPFFHENAAKKQSDWMQELKASGILGRQGEKIQFSRVEPLEGTKFLHAEAETKETDRKKAVIYFAGETRPLDIRMVTQALNEAETIRPKPVYIVFAAFQFDPTAAKHIDDTKWPGVTLLKVQMNPDLMTADLKKKVSSSQSFWLVGQPDVELIHIEKGTDKGKYKIKVKGFDYYDIKQGIVDSGGTDKIAMWMLDTDYDGMSIEPKQVFFPMEGKNEGWDKLAKTLKAEINPDLIEKYRGTESLPFTIKDNTQIAVKIVDDRGIESLKVISVGANG

SEQ ID NO: 42185 - DNA, 495 bp, Unknown
  Obtained from environmental sample
  misc_feature (1)..(495): n is a, c, g, or t
atgagacggcaaattctggaagcgaaggaaaaaggcgactcggtcgggggcattgtcgagtgcgcggcaatcggactgcccgtcgggttaggcgatccgatgttcgacggcattgagaaccgaatcgccgggattgtcttcggcataccgggcgtgaagggcgttgaattcggaagcggcttcgccgtcgccggacgcaggggctctgagaacaacgacagtttttacatggatggggaaaaagtaagaacgcgcacgaacaacgcaggcggcatattgggcgggataacaaacggcatgcccttgttgttccgcgcggcgttcaagcccacgccgtccattggaatggagcaggacagcgtcagtctgtcgaagacggaaaacgccgttttgcgggtgaaaggccgtcatgatccctgcatcgtaccccgcgccctgccctgcgtggaagccgcggcggccatcgcgttatacgacgcttttttggattgttaa

SEQ ID NO: 42186 - protein, 164 aa, Unknown
  Obtained from environmental sample
  DOMAIN (1)...(162): Chorismate synthase
  misc_feature (1)..(164): Xaa is any amino acid
MRRQILEAKEKGDSVGGIVECAAIGLPVGLGDPMFDGIENRIAGIVFGIPGVKGVEFGSGFAVAGRRGSENNDSFYMDGEKVRTRTNNAGGILGGITNGMPLLFRAAFKPTPSIGMEQDSVSLSKTENAVLRVKGRHDPCIVPRALPCVEAAAAIALYDAFLDC

SEQ ID NO: 42187 - DNA, 1146 bp, Unknown
  Obtained from environmental sample
  misc_feature (1)..(1146): n is a, c, g, or t
atggatttacaggattaccgggcgcagatagacaaggtcgacgatcagcttctgtcgctgtttaaggagaggatgggcatatccggccagatcgcccagttcaaaaaagaacacggacttcccgctctggacgccacgcgggagagggaaaagttagctgatatcggcgagaaggcgggcgatgacattcgttctctcgcgtatatcctgtacacgacgctgtttgaaataagccgcgcccatcaggtgaatatcataaacgccgaatctgatctcaacaaaattatatcggaggcggtggaacacaccgagcgtgtcttccctcagcacgcgcttgtcgcctgtcagggcgtggaaggcgcgtattcgcagatcgcctgtgacaggctgtttgccgatccgaatattttttatttcacgggctttgatggcgtgttttcggcaatccgcgacggactttgccaatacgggatattgcctctggaaaacagtacggccggttcggttaatctggtatacgaccttatgatgaaacacagttttaagatcgcgcgaagcgtgcggctgaaaatcgatcataacctgctcgcaaaggcgggcgttaaaaaagaaaacatccgcgaaattttttcgcatgaacaggcgattcaacaatgcgcggggtatttgaaagggcttggcaagaacgtgaaagttaccaccgtcaccaataccgctgaagccgcgaaaatggttgcggaatctgaccggaacgacgttgcggctctcgcctcccattcgtgctgtgatttgtacgccctgaaatgcgtggaaagctcagtgcaggacaggggcaataactatacgcgcttcatctgtatctcaaaaaacctcgaaatatatccgggagccgaccgtaccagcatcatgctgaccaccgcgcacaagcccggctcgctgtacaaggtgctcggcctgatatacgcccttggcgtgaatgtcgtaaagctggaaagccgaccgatccctgaccgcgatttcgagttcatgttttattttgatcttgaaacatcggtatattcaaaaaaattcggtcagcttatgtgcgagctggaaaatttgtgcgaggaattccactatctcggaagttacacagagattgtttga

SEQ ID NO: 42188 - protein, 381 aa, Unknown
  Obtained from environmental sample
  DOMAIN (7)...(85): Chorismate mutase type II
  misc_feature (1)..(381): Xaa is any amino acid
MDLQDYRAQIDKVDDQLLSLFKERMGISGQIAQFKKEHGLPALDATREREKLADIGEKAGDDIRSLAYILYTTLFEISRAHQVNIINAESDLNKIISEAVEHTERVFPQHALVACQGVEGAYSQIACDRLFADPNIFYFTGFDGVFSAIRDGLCQYGILPLENSTAGSVNLVYDLMMKHSFKIARSVRLKIDHNLLAKAGVKKENIREIFSHEQAIQQCAGYLKGLGKNVKVTTVTNTAEAAKMVAESDRNDVAALASHSCCDLYALKCVESSVQDRGNNYTRFICISKNLEIYPGADRTSIMLTTAHKPGSLYKVLGLIYALGVNVVKLESRPIPDRDFEFMFYFDLETSVYSKKFGQLMCELENLCEEFHYLGSYTEIV

SEQ ID NO: 42189 - DNA, 1242 bp, Unknown
  Obtained from environmental sample
  misc_feature (1)..(1242): n is a, c, g, or t
ttgccggttaatgattccataaagaaccgcaccctgacaaggctctatatttgctggacttatatacgctgtttaatgagtgtaacggatgacatcttcgattttgacacatacattgaaaaagcctgtaaatgcgtgaatgaggcggattctggcaagctcgacatttattatccgggggcgtggatcaactttgccggttcttcaaggaagggcagcccgcgagaatttatcgccgtcataacgcgtaatcaagcgcacatacaaaaaagttatatgaaggggttcatggccggagaattggaactggcgcgcggcgaattggaattctaccgtggcgatatttcttccgctgagcctcatattacccttgcggtgaagcaggctaaggcggaaaaacagtttggccttatgcacagggccttgttatacacccttcgtattgccgcttctgtgggaaattttatacttatggaacagaccatcaaagagacaaaagcccaactggacgaagttgaatatgtaaatcggttttttgattatgatatttccctttcatggtattactgtttccttggccagcctgaaaaagcggttgattggctaaaagaagatttcttgacttacagccacgccgcttccattgacaattttgcaaatcaaataatagcgcgtctttgctatgtggcaagaaacttttccccattactgtcgtacatcgaggaaatgaagcgtagggaatcatttttattcggacgggtggaaatgcttgcgatggaagcttgtatccattacaaaatgaaaaacaaagaaaaagcctttgaagtatttgaggaagcctacaaaaacgccgaacctaacggcattttaatgccctttattgaaatgggaaaagacatgcgcaccttggccgccgccttgttaaaagaatcgcgcaaagtcatccccgcctcgtggctggaagacataaaccataaatcggccacttacgccaaacgccgttcccatatcattgcgaaacacacgcaatcaggcggcggaacgggcggcattgttttgtccccaagggaggctgaaatactcaatgacatttcccacggcctatcacgcgccgaaatagccgtagcgcgggaactttccatcaataccataaaaatgattattaacaaaatccactataaactaggcgctgaaaatttggctgatttaatacggattgcggtagaaaagaaactaatttaa

SEQ ID NO: 42190 - protein, 413 aa, Unknown
  Obtained from environmental sample
  DOMAIN (350)...(407): Bacterial regulatory proteins, luxR family
  misc_feature (1)..(413): Xaa is any amino acid
MPVNDSIKNRTLTRLYICWTYIRCLMSVTDDIFDFDTYIEKACKCVNEADSGKLDIYYPGAWINFAGSSRKGSPREFIAVITRNQAHIQKSYMKGFMAGELELARGELEFYRGDISSAEPHITLAVKQAKAEKQFGLMHRALLYTLRIAASVGNFILMEQTIKETKAQLDEVEYVNRFFDYDISLSWYYCFLGQPEKAVDWLKEDFLTYSHAASIDNFANQIIARLCYVARNFSPLLSYIEEMKRRESFLFGRVEMLAMEACIHYKMKNKEKAFEVFEEAYKNAEPNGILMPFIEMGKDMRTLAAALLKESRKVIPASWLEDINHKSATYAKRRSHIIAKHTQSGGGTGGIVLSPREAEILNDISHGLSRAEIAVARELSINTIKMIINKIHYKLGAENLADLIRIAVEKKLI

SEQ ID NO: 42191 - DNA, 855 bp, Unknown
  Obtained from environmental sample
  misc_feature (1)..(855): n is a, c, g, or t
ttgatggccgagggacgttcgtcgtcagttgcggcggatgccttggaacctgacagttttgaaagtcctgttgtctatgaaatcggctctgacagtaacgcccctgttgtaaatcgcaccattcacagcggcgacgaagacttttttgcccttactcccgccggcgacggacagcttgtaatggaaacaacgggcagtaccgatacctacatggaattttacgaagccgggaatacgcaaagactgacatacaatgacgacggaggcagcggcagtaacgcaagaataagatacagcgtgcaggagggaaagacttatatcgccaaagtaaaaggctgcgactcaagcgatgtcggttcatacggattcagggcatggattaccgtacggacatccgtcggcagttttaatagtcctgttgcctatgaaatcggcgcaagtgaagacgctccgactgtaaacaatcttttggagagggatgacgaacacttttacctcctcattccggcgaacgacggacagcttataatggaaacaaccggcaacaccgacacctacatggaattttacgacggcgaatcacggcaaaagcttgcgcaggatgacgacggaggcaggggcgaaaacgcgcggattagatacaacgtagaggctgggaaacgttatgtcgctaaagtaaggggttatgacggagacagcggttcatacggttttcacgcatggcttattgccatagtcaggcttaatgcggatcaatacgaaccggataacgattcagcttccgccaaacaaatagaagtgggggcaacccaacaacataccttccataacgccaatgacgtggactggggttag

SEQ ID NO: 42192 - protein, 284 aa, Unknown
  Obtained from environmental sample
  DOMAIN (45)...(125): Bacterial pre-peptidase C-terminal domain
  misc_feature (1)..(284): Xaa is any amino acid
MMAEGRSSSVAADALEPDSFESPVVYEIGSDSNAPVVNRTIHSGDEDFFALTPAGDGQLVMETTGSTDTYMEFYEAGNTQRLTYNDDGGSGSNARIRYSVQEGKTYIAKVKGCDSSDVGSYGFRAWITVRTSVGSFNSPVAYEIGASEDAPTVNNLLERDDEHFYLLIPANDGQLIMETTGNTDTYMEFYDGESRQKLAQDDDGGRGENARIRYNVEAGKRYVAKVRGYDGDSGSYGFHAWLIAIVRLNADQYEPDNDSASAKQIEVGATQQHTFHNANDVDWG

SEQ ID NO: 42193 - DNA, 672 bp, Unknown
  Obtained from environmental sample
  misc_feature (1)..(672): n is a, c, g, or t
atgaatttttttccgcgggttaaaatatttttaatcatccttgggttctctttcgcgcccgcggtttcgcaagcctcaggcccgcgttacgcgctggtaataggcaacggcggctaccgccatgtggacagccttccgaacaccgtaaacgacgcgtccggcattgccaaaaaacttgcgggactgggctattcggttgaaatcctgttcgacagcgaccttgccggaatgagcagggcggtaagcgcgtggatacggcagctctccacggaccgggcgagcgaaggtttcttctggtacgccggccacggaatacaggcagcaggggaaaattatcttttgcccgttgatataaacgcggaagacgaggcgggcattgtctacggctcctatccgctgggacggcttctcctctcgctggaacagaccgcgcggaacaagctcaatgtggtggtgctggacgcgtgccgggacaaccctttcaaaaatcttcccggcggaagccgggggctttcccgtggttttactaccgttgaacacccgccccaggatatattcgtcatgttttccacttctccgggcacaacggccgcggacggcgacagcgggcggaacagcccctttgccgaggcttttctcaatacatggactccgacgagatcctcccggtaa

SEQ ID NO: 42194 - protein, 223 aa, Unknown
  Obtained from environmental sample
  SIGNAL (1)...(25)
  DOMAIN (29)...(223): Caspase domain
  misc_feature (1)..(223): Xaa is any amino acid
MNFFPRVKIFLIILGFSFAPAVSQASGPRYALVIGNGGYRHVDSLPNTVNDASGIAKKLAGLGYSVEILFDSDLAGMSRAVSAWIRQLSTDRASEGFFWYAGHGIQAAGENYLLPVDINAEDEAGIVYGSYPLGRLLLSLEQTARNKLNVVVLDACRDNPFKNLPGGSRGLSRGFTTVEHPPQDIFVMFSTSPGTTAADGDSGRNSPFAEAFLNTWTPTRSSR

SEQ ID NO: 42195 - DNA, 756 bp, Unknown
  Obtained from environmental sample
  misc_feature (1)..(756): n is a, c, g, or t
gtgagcgagctttactattctctctcttccggggcgcccgcgcgtgaactgccggcgggagtttccactacgacccctctttccgtcgcgccctcgggtgtgccgcccgggggaaatccgccttccgtcgcagtgccttctccggctatggcgcttatcccggcaggaagttttactatgggcagtcctgtaatagagcgtgatcgggatccgtttggggaaaccaggcaccgggttaatatgagcgctttttacattgcttcaaaagaattgagcgtcggcgagttccgccgcttcgtcgaagacacaggccatgtcaccactgccgaagccgacggcggggcgcaagcctacgatgaagcaaaaggcgaatgggttttccgcgccggggcaaactggcgtaatcccggtttcaggcagggggacgatcatcccgtggtttgcgtcagctggtttgacgcggtgaagtactgcaactggctttccgtcaaagaaggtcttaaaccggcgtataccattgccggccaaaccgtaaactgggacaatcgcgcgaatggttatcgcctgcccaccgacgctgaatgggagtacgcctgccgcgccggaacctcaacgcccttgtttacaggcgagagcatttccacaagccaggcaaactacaatggcagcatagcccacaactacggtaacacaggattgtttcgcaaagctaccgtaagcgccggctcatccccccaacgcgaggctccgcgataa

SEQ ID NO: 42196 - protein, 251 aa, Unknown
  Obtained from environmental sample
  DOMAIN (46)...(247): Domain of unknown function (DUF323)
  misc_feature (1)..(251): Xaa is any amino acid
MSELYYSLSSGAPARELPAGVSTTTPLSVAPSGVPPGGNPPSVAVPSPAMALIPAGSFTMGSPVIERDRDPFGETRHRVNMSAFYIASKELSVGEFRRFVEDTGHVTTAEADGGAQAYDEAKGEWVFRAGANWRNPGFRQGDDHPVVCVSWFDAVKYCNWLSVKEGLKPAYTIAGQTVNWDNRANGYRLPTDAEWEYACRAGTSTPLFTGESISTSQANYNGSIAHNYGNTGLFRKATVSAGSSPQREAPR

SEQ ID NO: 42197 - DNA, 798 bp, Unknown
  Obtained from environmental sample
  misc_feature (1)..(798): n is a, c, g, or t
ttggcttcggggttgacgtttgcgtcggcggttgtattaacggctgtcttaacatccgacgccttgacatctgtcttaacactcgccgtatcggcatcggcctggcttcggatcgacggcggtaacggtatcggcgcttgtattaattttgccggattaacatcggccttgatattcgcatttgcagtattggcttcagcctttacttccgtattaaccgttgtattaacatcatgcttgacattcgccgtattaaccgctgtgttaacatcgttatttacatccgccttggaatcggtattaaccgttgtgttcgtcgcgttaacgccggtatttacatcagccttaactttggccgtattgacatccgtcttggtttcggtctgtacatcggcattaactctcttatcagccgccgtatcgacatcagccttgacatttgccgtattgacatccgtcttgacatccgtcttgacttcggtgttgacatctgtattaactgtagtattgaccgttgtattaactgtcggattaacgtcagcctttacatttgccggattgacggttgtattaactgccggattaacttcagtctttacattcgccgtattgacggttgtattaactgtcggattaacgtcagcctttacattcgccgtattgacggtggtattaactgtcggattaacgtctgtattaacatcggcctcggcgttattcgtattaaccgttgtattaaccgccggattaacgtctgtcttgacgtttgccgtattgaccgttgtattaacatcgtga

SEQ ID NO: 42198 - protein, 265 aa, Unknown
  Obtained from environmental sample
  SIGNAL (1)...(23)
  misc_feature (1)..(265): Xaa is any amino acid
MASGLTFASAVVLTAVLTSDALTSVLTLAVSASAWLRIDGGNGIGACINFAGLTSALIFAFAVLASAFTSVLTVVLTSCLTFAVLTAVLTSLFTSALESVLTVVFVALTPVFTSALTLAVLTSVLVSVCTSALTLLSAAVSTSALTFAVLTSVLTSVLTSVLTSVLTVVLTVVLTVGLTSAFTFAGLTVVLTAGLTSVFTFAVLTVVLTVGLTSAFTFAVLTVVLTVGLTSVLTSASALFVLTVVLTAGLTSVLTFAVLTVVLTS

SEQ ID NO: 42199 - DNA, 1047 bp, Unknown
  Obtained from environmental sample
  misc_feature (1)..(1047): n is a, c, g, or t
atgaactccgtaatggacagggcgagcttgtatcttccgtttatcagggaagaaataaaaaagaggaacctgccgcctgaactggcgtatctgcctgtaattgaatccggttttatgattacggcaagaagcaaatccggcgcgatgggtctttggcaatttatgctgaacagcatttctccttttgacataaaggtaaacgaatttatcgacgaaaggcgcgattttcaaaaatcaacaaggggcgcgcttcaaaaacttgaagacaattacaaaacattcggaaattgggaacttgctcttgcggcttacaactgcgggctgggcgcgatgaacagggcggtaaaaaaaacaaaaattcaggattattgggaattaagccgtcggaaagaattaaggaatgaaactattgattatgtgccgaaattcctggcggcggcctatgttttatccaacccgcgccgtttcggaattgactgttggcaggaaacccatgaatggacatccatccccctcaaaaggcaggtttcgcttgatacgcttgccgccgaatccggcgcggacagggaattactgcggagattgaacgccgagcttctctacgggataaccccttcggacagaaatttccggcttaaaatccccgcgtcccatctggagcagataaacgctgttctggagagagaagaccttgcccttatccgctatcattaccatgtcgtgagccacggcgacactttatggtcaatgtccagacactacggcgcttcactcgatatgattgaacagcacaaccccggtatttcaaaccgttacttaaaaataggggagactgtcattattccggcgtttaaggatatagagccgccttcccgcccagcgtcaaatacccgttatgacggacaatatgtggttaaaaagggcgataccctctggtcccttgccaaaaagtacggtgttgacccccaggaactggctcaagccaataatatgacgcttaatcagattttacgcgaaggaataaccctaaaagtaccgatattataa

SEQ ID NO: 42200 - protein, 348 aa, Unknown
  Obtained from environmental sample
  DOMAIN (12)...(127): Transglycosylase SLT domain
  misc_feature (1)..(348): Xaa is any amino acid
MNSVMDRASLYLPFIREEIKKRNLPPELAYLPVIESGFMITARSKSGAMGLWQFMLNSISPFDIKVNEFIDERRDFQKSTRGALQKLEDNYKTFGNWELALAAYNCGLGAMNRAVKKTKIQDYWELSRRKELRNETIDYVPKFLAAAYVLSNPRRFGIDCWQETHEWTSIPLKRQVSLDTLAAESGADRELLRRLNAELLYGITPSDRNFRLKIPASHLEQINAVLEREDLALIRYHYHVVSHGDTLWSMSRHYGASLDMIEQHNPGISNRYLKIGETVIIPAFKDIEPPSRPASNTRYDGQYVVKKGDTLWSLAKKYGVDPQELAQANNMTLNQILREGITLKVPIL

SEQ ID NO: 42201 - DNA, 1095 bp, Unknown
  Obtained from environmental sample
  misc_feature (1)..(1095): n is a, c, g, or t
gtgacagcgccggctctcaaagtccttgacgcggcgggcggcaagacgggacatacattcaattacgtcgagctgttggctggcggacaggctattgataaaacaggggaaccgcttcccaaagaaacccttgaaaaggcgaaacagtgcgacgcccttcttttgggcgcggtcggaggccccaagtgggataaccttcccgggcatctgcggccggaaagggcgctgctggggcttcgcgcgggtcttgacgttttcgcgaaccttcgccccgcttgtctgctaccccaattacgatcagcctgccctgttaaagacgaagtccttatcgcaagcaacagtgagggaaaagccgcttttgatttattaatcgtaagggaattgacaggcggcctttacttcggcaaacgcggaagattggacgagccctcaaacggacatactcccggttcagcctttgatactgaaacatattcatggatggaaattgaaagggtgctgagagcgggctacgaagcggcgacggtacggcggaaaaaactctgcgtggtggacaaagccaacgtgcttgagtcgtcgcgtttctggcgcgaagtcgccgctgtagtttcaaaggactaccccgatatagaaacaagctacctctacgttgacaacgccgccatgcagttgatccgcgcacccgggcaattcgacgtaatagttacgtctaaccttttcggggacatactctccgacgaggcatccgtgctaacaggttcaatcggtatgctggcgtcggcaagtctcggcgcgcctgtacaaacaggaacaagacccggaatgtacgagcctattcacggctccgcacccgacatcgcgggcaaggacatcgccaatccgcttgcgacaatactttccgcggcgatgatgctccgctactccttcggtcttgaaaaagaagccctgtccattgaaaccgctgtcaacaatgtgctggatcagggacttagaacaggggacattgcaagcagaagccctgcaagcaataatgaaaaaattgtgggcactaaagcaatgggcgaagccgtactcaaagcgctggagaaattatga

SEQ ID NO: 42202 - protein, 364 aa, Unknown
  Obtained from environmental sample
  DOMAIN (1)...(357): Isocitrate/isopropylmalate dehydrogenase
  misc_feature (1)..(364): Xaa is any amino acid
MTAPALKVLDAAGGKTGHTFNYVELLAGGQAIDKTGEPLPKETLEKAKQCDALLLGAVGGPKWDNLPGHLRPERALLGLRAGLDVFANLRPACLLPQLRSACPVKDEVLIASNSEGKAAFDLLIVRELTGGLYFGKRGRLDEPSNGHTPGSAFDTETYSWMEIERVLRAGYEAATVRRKKLCVVDKANVLESSRFWREVAAVVSKDYPDIETSYLYVDNAAMQLIRAPGQFDVIVTSNLFGDILSDEASVLTGSIGMLASASLGAPVQTGTRPGMYEPIHGSAPDIAGKDIANPLATILSAAMMLRYSFGLEKEALSIETAVNNVLDQGLRTGDIASRSPASNNEKIVGTKAMGEAVLKALEKL

SEQ ID NO: 42203 - DNA, 357 bp, Unknown
  Obtained from environmental sample
  misc_feature (1)..(357): n is a, c, g, or t
atggatgaatgtctcgcgcgcgccgccgttgacttgagcggcagaccttttttacattttgacggacagcttgccggttcccctttaatttccactgacgaaggcgggaaagaatataaatttcagactgatataatcgaggatttttggcagggtttcgtaaattccgctggttgtaatctgcatttagagattattcgcggcagaagcgatcatcataagattgaggggctattcaaggccgccgcccgcgcccttcgcgccgcctgcgaaattgacgagagggctaaagactcaatcccctctaccaaaggttctttgcccggaattgatgcgcctggagtgcatgtatgttag

SEQ ID NO: 42204 - protein, 118 aa, Unknown
  Obtained from environmental sample
  DOMAIN (1)...(87): Imidazoleglycerol-phosphate dehydratase
  misc_feature (1)..(118): Xaa is any amino acid
MDECLARAAVDLSGRPFLHFDGQLAGSPLISTDEGGKEYKFQTDIIEDFWQGFVNSAGCNLHLEIIRGRSDHHKIEGLFKAAARALRAACEIDERAKDSIPSTKGSLPGIDAPGVHVC

SEQ ID NO: 42205 - DNA, 624 bp, Unknown
  Obtained from environmental sample
  misc_feature (1)..(624): n is a, c, g, or t
atgttaggtgtaattgactacggcgccggaaatcttggctccgttatgaacgcgcttaagcggctttctgttcctgcgcggtttgcggcaggaccgcaagatctttcactttcaacttcgccgtttgagaaaataatttttcccggagacggacatttcgcaaccgcgatgtcatcgctgactcaatcaggttacgcgcaggcgttatgcgaatggataaaggcggacaagccctttttaggaatctgtatcggcttacagttgttatttgaaacttccgaagaggctccgcctattgacggtaaagaagtgtgtgggctttccgtaatacccggaacggtacggcgttttcccgggcgcaaagttccgcagattggctggaatcagaccaaagcccggcaggagtcaaaaatctttcggggtttaaacgataacagttttttctattatattcattcatactatgccgatcccgcggatgatttagtatgcgccgcggaaacagagtattatatccgctactgctgcgccgtggaacgcggcgcgttagccgcagtgcagtttcaccctgaaaaatcaggcgcggcgggccttgcccttctgcgaaattgggtggagggatag

SEQ ID NO: 42206 - protein, 207 aa, Unknown
  Obtained from environmental sample
  DOMAIN (40)...(160): CobB/CobQ-like glutamine amidotransferase domain
  misc_feature (1)..(207): Xaa is any amino acid
MLGVIDYGAGNLGSVMNALKRLSVPARFAAGPQDLSLSTSPFEKIIFPGDGHFATAMSSLTQSGYAQALCEWIKADKPFLGICIGLQLLFETSEEAPPIDGKEVCGLSVIPGTVRRFPGRKVPQIGWNQTKARQESKIFRGLNDNSFFYYIHSYYADPADDLVCAAETEYYIRYCCAVERGALAAVQFHPEKSGAAGLALLRNWVEG

SEQ ID NO: 42207 - DNA, 507 bp, Unknown
  Obtained from environmental sample
  misc_feature (1)..(507): n is a, c, g, or t
ttgcccttctgcgaaattgggtggagggatagaatgcaggcaaaacgaataattccatgccttgatgttgacgacggaagggtagtaaagggaattaaattcaagggcattcaagacgcgggagacccaagagaactggcccgccgttacaacgacgaaggcgcggacgagcttacttttcttgacatcggcgcttcctacaaaagcagagcgacattactggacgtggtgcgtaaagtagccgccgaagtttttatccccctgtgcgtcggcggcggcatacgcgtaattgacgatatgcgcgacgcgatgaattcaggtgcggacaaagtttcggtatgtacttccgccctaagccgcccggaattgttacgcgaaatggcaaacgcctacggcagtcagtgtgtcgtgctttcgatagacgctaagcgcgttgaaagcaatggcgctttatgctggcacgcctattcccacggcggcagaaccgacacggggatgacgccatga

SEQ ID NO: 42208 - protein, 168 aa, Unknown
  Obtained from environmental sample
  DOMAIN (16)...(164): Histidine biosynthesis protein
  misc_feature (1)..(168): Xaa is any amino acid
MPFCEIGWRDRMQAKRIIPCLDVDDGRVVKGIKFKGIQDAGDPRELARRYNDEGADELTFLDIGASYKSRATLLDVVRKVAAEVFIPLCVGGGIRVIDDMRDAMNSGADKVSVCTSALSRPELLREMANAYGSQCVVLSIDAKRVESNGALCWHAYSHGGRTDTGMTP

SEQ ID NO: 42209 - DNA, 513 bp, Unknown
  Obtained from environmental sample
  misc_feature (1)..(513): n is a, c, g, or t
ttggcgatcagctatcttaaacgcaccgatcttggccaggtgaagcccgaagacctgctccctaccgctaccaaaagcgaaataccggactcagtcgaatcaaaacaacgcgtcaacgaaaaacagagcgccgggttcaggccttataatcccccggcggccgctacaggcggaggcccgcagacggagcaaaaaacaactcctccggggaccgcttcccccgggctgtccggccgtggggaaactacaaagggactggcgggaagcgccgaggcataccgccagaccgcaaaacccgcggaggacagagcgtcttccacgcagcccgcccagccgcccgttcaagtgcttgcccagccccatccggagcaaaatgaattatacaaaatcgctcaggcccgcataaaaggttacgaaggagacccatgcccgtcctgcggttctttcactttgatacgaaacggaacctgcatgaaatgccatacctgcggcggaacaacaggctgctcgtaa

SEQ ID NO: 42210 - protein, 170 aa, Unknown
  Obtained from environmental sample
  misc_feature (1)..(170): Xaa is any amino acid
MAISYLKRTDLGQVKPEDLLPTATKSEIPDSVESKQRVNEKQSAGFRPYNPPAAATGGGPQTEQKTTPPGTASPGLSGRGETTKGLAGSAEAYRQTAKPAEDRASSTQPAQPPVQVLAQPHPEQNELYKIAQARIKGYEGDPCPSCGSFTLIRNGTCMKCHTCGGTTGCS

SEQ ID NO: 42211 - DNA, 915 bp, Unknown
  Obtained from environmental sample
  misc_feature (1)..(915): n is a, c, g, or t
ttgagtaagagagtaggggagcctaccaaatttgattttgaacccgccgaccatgtaaaacttggacaggaccttgatgttatcgactttgattcgggaacaaaagtgtccggcacaaaattttactatcttaaaaacgaaggcgtatatcttgagcttggtcttatccgttacgcgcttgatattctgcaaaaaaaaggatttaccccatttattacccccgacattgcccgtgaagaaatacttgagggcatagggtttaatccgcggggagcggagtccaatgtatacactcttgaaggcgaggaaacctgtcttgtaggcactgcggaaattactcttggcggctattactccaacatgattttaccgaaagagaaacttccgctgcggatggctggtctttcccactgtttccgccgggaagcgggcgcggcgggacagttttccaaaggactctaccgtgttcatcaatttacaaaacttgaaatgtttgtttactgtctgcccgaagagtcggggctctttcatgaggaactgcgcttaatcgaagaagaaatttttaagggtcttaacatacctttccgcgtagtggatacctgtacaggcgacttaggcgcgcccgcctaccgcaaatgggacttggaagcgtggatgcccgggcgcaacggcggcgaatggggagaagtaacctctacctcaaactgcacggattatcaagcgcgccgtcttaacattcgttttaaagacgatgacggtaagaataaatatgtccacatgttgaacggaactgcaatcgctatttcccgcgcaatcatcgccgttctggaaaatttccagcaatcggacggcactgtgcgcctcccaaaagcgttagttccctactgcgggtttgatgtgataaagaagaaataa

SEQ ID NO: 42212 - protein, 304 aa, Unknown
  Obtained from environmental sample
  DOMAIN (51)...(222): tRNA synthetase class II core domain (G, H, P, S and T)
  misc_feature (1)..(304): Xaa is any amino acid
MSKRVGEPTKFDFEPADHVKLGQDLDVIDFDSGTKVSGTKFYYLKNEGVYLELGLIRYALDILQKKGFTPFITPDIAREEILEGIGFNPRGAESNVYTLEGEETCLVGTAEITLGGYYSNMILPKEKLPLRMAGLSHCFRREAGAAGQFSKGLYRVHQFTKLEMFVYCLPEESGLFHEELRLIEEEIFKGLNIPFRVVDTCTGDLGAPAYRKWDLEAWMPGRNGGEWGEVTSTSNCTDYQARRLNIRFKDDDGKNKYVHMLNGTAIAISRAIIAVLENFQQSDGTVRLPKALVPYCGFDVIKKK

SEQ ID NO: 42213 - DNA, 1275 bp, Unknown
  Obtained from environmental sample
  misc_feature (1)..(1275): n is a, c, g, or t
gtggtaggttccgcaatgaaaagcacaacgggaatttccggcaagttttttcacgcgctgggccgcaacggcataaatattgtagcgattgcgcaggggtcttccgagacaaatatctcggctgttatttcaaaacaggacgagggcaaggcgttaaacgcaatccatgacgcgttcttcttctctaacctgcgctgcgtaaatctgttcttaatcgggacgggcaacataggcggaaccctgctggatcaaatagaggaaaaccgcgaaaagctcgcaaacagggatttaattaaaattaatttaataggagccgccgcgtgggacaagatgatcttttctcccgacgggcttgacccggtaaaaaccagggaaatgctgaataaaaaaggcaaggttgcgggtacggaagaatacaaacttgattctttcatagaaaaaatgacgtcttttaaccttcccaattcatgtttttgcgattgcaccgcaagcgaggaaattgcggccgtatacgaaaaaatcatgcgactgtccattcctattgttacgccaaataaaaaagctaactccggttctatggattattaccgcagacttacttcgtattcaagggagagggggattccttatttatatgaaacgacagtcggcgcggggctgccggttatttccaccatacacgatctttttctttccggcgacaggattataagaatagaagctgtgccgtccgggacattaagttttatttttaacaatttcgacggcaaaaagcctttttccgcccttgtgcgcgaagctaaagcaaagggctacaccgagcctgacccgcgggacgatcttaacgcgatggacgcggcgcgcaaggccttaatactcgcgagggaaatagggttgccccttgaattttccgcggtaaaaatagagcctatacttcctccttcctgtcttaaagcgaaagacattgactctttcttcaaagagcttgaaaaatcggacggcgtctttgaaaaacgccgcgcggatgaggcggcaaaaggaaacgccctgcgttatgttgtcgtaatagaaaacgggaaggcaaaactctctttgcgcggcgagcccgagggaagccccttccgctcgcttgtggacagcgacaatattgtagttattaccacggaacgttattcaaaacttcctatggttattaaggggccgggagccggcgctcaggttaccgccggcggagttttcgcggacatagtgcgtacagcacgcgctatagtatag

SEQ ID NO: 42214 - protein, 424 aa, Unknown
  Obtained from environmental sample
  DOMAIN (1)...(65): ACT domain
  misc_feature (1)..(424): Xaa is any amino acid
MVGSAMKSTTGISGKFFHALGRNGINIVAIAQGSSETNISAVISKQDEGKALNAIHDAFFFSNLRCVNLFLIGTGNIGGTLLDQIEENREKLANRDLIKINLIGAAAWDKMIFSPDGLDPVKTREMLNKKGKVAGTEEYKLDSFIEKMTSFNLPNSCFCDCTASEEIAAVYEKIMRLSIPIVTPNKKANSGSMDYYRRLTSYSRERGIPYLYETTVGAGLPVISTIHDLFLSGDRIIRIEAVPSGTLSFIFNNFDGKKPFSALVREAKAKGYTEPDPRDDLNAMDAARKALILAREIGLPLEFSAVKIEPILPPSCLKAKDIDSFFKELEKSDGVFEKRRADEAAKGNALRYVVVIENGKAKLSLRGEPEGSPFRSLVDSDNIVVITTERYSKLPMVIKGPGAGAQVTAGGVFADIVRTARAIV

SEQ ID NO: 42215 - DNA, 1074 bp, Unknown
  Obtained from environmental sample
  misc_feature (1)..(1074): n is a, c, g, or t
atggcggttgccgaacaaattaaaaacgcgctcgcgggatcttcgatgatacgcaaaatgtttgaagaggggatccaattaaaaaaacagcacggagcggacaaggttttcgatttttcgcttggaaacccggatatagagccgccaaaggcctttcacgaagtttttttgaagctggcgcaggaagacgaaaaaggctctcacggatatatgcctaacgcgggctacccacatgttagggaagcgctggcgaagaaagtctgcaaagagcagaatgtaaacattgacggctctcatattgtcatgtcggtaggggccgcaggcgggcttaacactgttttcaagacaatttgcaaccccggcgacgagattatcgtaacgcagccttactttatggaataccgcgcatataccgccaaccacggggcaaaacttgtcgaagttgacgcgcttgccgatttcaatttggacattgccgcaataggagccgcgttaaacgaaaaaacagccgccgtccttgtaaattcgcccaacaatcctacggggaagatttattcggcgaaatcgcttgcatctcttgcttcccttcttactgaacacggaaaaaagaccggacgttatccttatcttgtttcggacgaaccctaccgtgaaattgcgtataacgttgatgttccgccgtttttatcctgttacagcgaatctattgtagttacctcttattcaaaaagcctgtcccttcccggcgagcgtatcggttttatcgcggtaaatccagatgcaagcggcaaggacgacctgttaaacgggcttatctacgcgacaaggatacttggctttgtaaacgcccccgccctgatgcaaagaataaccgcctcccttacggaggcgcgggtagacgtttcaatttacgcgcgaagacgggacgcttttatgaaagttttgaataacgcgggaattgaatattcaacgccgcagggggcgttctatcttttctgcaaggtcccaaagagcaaaacaggcagacaggagacggacgacaaggcgtttgtagaacacctaaaaaacatttga

SEQ ID NO: 42216 - protein, 357 aa, Unknown
  Obtained from environmental sample
  DOMAIN (77)...(318): Beta-eliminating lyase
  misc_feature (1)..(357): Xaa is any amino acid
MAVAEQIKNALAGSSMIRKMFEEGIQLKKQHGADKVFDFSLGNPDIEPPKAFHEVFLKLAQEDEKGSHGYMPNAGYPHVREALAKKVCKEQNVNIDGSHIVMSVGAAGGLNTVFKTICNPGDEIIVTQPYFMEYRAYTANHGAKLVEVDALADFNLDIAAIGAALNEKTAAVLVNSPNNPTGKIYSAKSLASLASLLTEHGKKTGRYPYLVSDEPYREIAYNVDVPPFLSCYSESIVVTSYSKSLSLPGERIGFIAVNPDASGKDDLLNGLIYATRILGFVNAPALMQRITASLTEARVDVSIYARRRDAFMKVLNNAGIEYSTPQGAFYLFCKVPKSKTGRQETDDKAFVEHLKNI

SEQ ID NO: 42217 - DNA, 465 bp, Unknown
  Obtained from environmental sample
  misc_feature (1)..(465): n is a, c, g, or t
gtgggagagtcccccaccggcgataagaaggccgagaaattcgaggatgatttcattgaagagttgtttgaggagctttcccgtttaggctacagggcggtaacctatatgccgccgaggaacacggcggagcagcttcacagggtgcggcggctttgcgccaaatatggttttatggaaatttccggcgttgacatcaacagttcgcgccagtcgtttaactgccccgaggttatgcgtgatgaattccgccacttgattgataccacctgggcattgatagcccatgagcgtctcgcttccatagataagcgtttcgggattttctctcgggagaatcccctgtccggggcaagcctctcccaacggcttgctgtgtatgccgaagctggaaaaaagcttgatctttttcatcccgatgaatccgccggggatattgttaatgaaatagggaggaaggaatag

SEQ ID NO: 42218 - protein, 154 aa, Unknown
  Obtained from environmental sample
  misc_feature (1)..(154): Xaa is any amino acid
MGESPTGDKKAEKFEDDFIEELFEELSRLGYRAVTYMPPRNTAEQLHRVRRLCAKYGFMEISGVDINSSRQSFNCPEVMRDEFRHLIDTTWALIAHERLASIDKRFGIFSRENPLSGASLSQRLAVYAEAGKKLDLFHPDESAGDIVNEIGRKE

SEQ ID NO: 42219 - DNA, 687 bp, Unknown
  Obtained from environmental sample
  misc_feature (1)..(687): n is a, c, g, or t
atgacagccctcgttttgcaggcgcgccttgattcaagccgccttagcgacaaggcgctgcttccccttggggacaggcccattgtcttccgcgtgatggaagcgctcgcttttcttccgtgcgaaaaacgaattctcgcctgcccggaagacagcgtttcggcttttgcccccctggcggaggaagccggctttgttctggttcccggcccgaaagaagacgtgcttgcgcgttactgccttgcgatacgcgagtccggcgcggacaggatcgtccgcgcaactgccgataacccctttgtctttgtcgatgccgccgccgccattagcagtgaagcggctgagttgggcgcggactacgccggttattccggcctgccctacggcgcgggggttgaatccgtcgcgtcggaggcgctcttgcgcgccgaaagggaagcgcagtcgcctgacgagcgggagcacgtctgcccctacctttacaggcatccggaaattttccgccttcacaggccgcttgcccccaggcgctggcagggtcaggagtacaggatcaccgtggacacaagggaagattacggccgcgccgtttcgctttacgggcgcctttcttccctgccgccgggcaagcggaaccttggtgaaaatattcttgcccaatgcaagcatttatgggagggcgaatga

SEQ ID NO: 42220 - protein, 228 aa, Unknown
  Obtained from environmental sample
  DOMAIN (3)...(212): Cytidylyltransferase
  misc_feature (1)..(228): Xaa is any amino acid
MTALVLQARLDSSRLSDKALLPLGDRPIVFRVMEALAFLPCEKRILACPEDSVSAFAPLAEEAGFVLVPGPKEDVLARYCLAIRESGADRIVRATADNPFVFVDAAAAISSEAAELGADYAGYSGLPYGAGVESVASEALLRAEREAQSPDEREHVCPYLYRHPEIFRLHRPLAPRRWQGQEYRITVDTREDYGRAVSLYGRLSSLPPGKRNLGENILAQCKHLWEGE

SEQ ID NO: 42221 - DNA, 1038 bp, Unknown
  Obtained from environmental sample
  misc_feature (1)..(1038): n is a, c, g, or t
atgcaagcatttatgggagggcgaatgaaaaacgcttcggttttgatagttccagcctgcgaaaggngccgcggcggcggtcatttgatccgatcgctcctgattctccaggcgctgcaggcaaatgagcgcgacgcgtttctctgggtaagcgattaccttaaagacgattttctgcataggtttcatgatttttttgattctctagacagtccctgcctgctttcccgcgaagaagatcttaaaagccggacttgggattttattgtctttgatcggtttagaacatcaaaaaaagaatttgaatttttttcgagctttgcgcccgttattggaattgacgagggaggccctttcagggatcattttgattttctaatagatcttttaccgtcattgaaagataaggcggtcaatcttttttcgcccgcgcttctttcattgcctcggaacaggcggccaagcgttggcggtgaaactgcgccagctaatccatttcgcatactcataagttttggcgcggaggattccgccggcttgggcattgcggcggcgcgaagcctcagcggttttttggcaaaaacgccaactgaaaggccgcttgaggttacgcttgtatccccgattccgccacataattcacaatgggagacagaagagctctttggaattacagtcttggggagaatcccctatctaagcgagcgcctggcggaatacgatctctttgttacgcatttcggcattggcgctttcgaagccgtctatgccaggcttcctgttgtccttgtttcccccggcccgtaccacgaaaagctcagccacaaggcgggtttcttttcacttgggattgggacaggagcagcaggctgtctagggaaatcagtctgcaattttggcgatacaagcaagccggacttacttaaaagcctggaacggaaaagcagggaaatcgcaaatcgttactgcctatgggaagatcaaaaaggaaccattgcttcttttttgtgcccggtttcccccacatttccccgctag

SEQ ID NO: 42222 - protein, 345 aa, Unknown
  Obtained from environmental sample
  misc_feature (1)..(345): Xaa is any amino acid
MQAFMGGRMKNASVLIVPACERXRGGGHLIRSLLILQALQANERDAFLWVSDYLKDDFLHRFHDFFDSLDSPCLLSREEDLKSRTWDFIVFDRFRTSKKEFEFFSSFAPVIGIDEGGPFRDHFDFLIDLLPSLKDKAVNLFSPALLSLPRNRRPSVGGETAPANPFRILISFGAEDSAGLGIAAARSLSGFLAKTPTERPLEVTLVSPIPPHNSQWETEELFGITVLGRIPYLSERLAEYDLFVTHFGIGAFEAVYARLPVVLVSPGPYHEKLSHKAGFFSLGIGTGAAGCLGKSVCNFGDTSKPDLLKSLERKSREIANRYCLWEDQKGTIASFLCPVSPTFPR

SEQ ID NO: 42223 - DNA, 1134 bp, Unknown
  Obtained from environmental sample
  misc_feature (1)..(1134): n is a, c, g, or t
atggggatcggcaggaagatcgacggtcttgaggcgctctccggcagaatcgagggccgcataaaggccaccgaggacagggcgggaatcatagacgaggtgcagagaaagatcgacggcctcggggcgatggtgaacgaggtggacgagcgtataaacggtcagttgcaacgcaaggcgatggtggagaagactgagaagcgcttagaccagctcaactacctgctcggcgacatcaacatgaaaatacagagcctgacaaaggaacagtcgaaggtggacgccgtcataacgcaactttcggccatatccgtgcagtccatggaggcgaagaacatggtcgcccgcttgacagaggagaaacaggcgctgtcgcaggaggaaaaccacatacgcgacgtccgtatcaagctacagaatctcgtctccgacgccgagaaggacgtggcgcggttcaagtccaacatcagcgatgtggacgccaccatggagcagaaccgcgagaagttcaacaagataatagacagcagcaacgcccagatagaggcggtcaagcagcaacagatagcgataagcacctccgcgtcggaactcgtccgcgtggagaaactgctcgagaacctcaagcaggagatggaccagatcaaccgccgcacgagcaaaatcgaggccatagacacgcggataaacagcgtggacacggtcgtctccgacatggaaattcgcatagagtccatagacaagggcagggaacttgtcaacacgacgcagaagaaaatagacggcttgaacgacatactgggtctggcctcttcgcgcatagacgacataaacgagcggtcgaaggacatcgacgacgtangccgcaaagtgggcgagatgtccgagatgatggaatcggtagagcgccgcataagggagctcgcacgcgagaagcagttgataaaagaagccgagaaccgcatatcgagcctcacaattctcgtggaggacgtaaaggcggcgatgaccaacctctccgcggagcaacagcgcatacaggaagcggtcgaaaaggcgtcggagctgcggttcttgctgggcgaggtggagtacaagctgaatctgttcaaacagcagaaagagcagatgtga

SEQ ID NO: 42224 - protein, 377 aa, Unknown
  Obtained from environmental sample
  misc_feature (1)..(377): Xaa is any amino acid
MGIGRKIDGLEALSGRIEGRIKATEDRAGIIDEVQRKIDGLGAMVNEVDERINGQLQRKAMVEKTEKRLDQLNYLLGDINMKIQSLTKEQSKVDAVITQLSAISVQSMEAKNMVARLTEEKQALSQEENHIRDVRIKLQNLVSDAEKDVARFKSNISDVDATMEQNREKFNKIIDSSNAQIEAVKQQQIAISTSASELVRVEKLLENLKQEMDQINRRTSKIEAIDTRINSVDTVVSDMEIRIESIDKGRELVNTTQKKIDGLNDILGLASSRIDDINERSKDIDDVXRKVGEMSEMMESVERRIRELAREKQLIKEAENRISSLTILVEDVKAAMTNLSAEQQRIQEAVEKASELRFLLGEVEYKLNLFKQQKEQM

SEQ ID NO: 42225 - DNA, 402 bp, Unknown
  Obtained from environmental sample
  misc_feature (1)..(402): n is a, c, g, or t
gtgttttacaggcatcttatagaggaaaggaacaaagtttctccccctataatattcaacaaggaaagtattatgaagcttactattatgaaagagcacatcattgaaggtttgcaaaaagctgccggcattatccctgcccgttcaggagcggcctacctgcgttccctctggctgaaagccgaaggagaaaaacttgcggtgttgtccacagacgcaaatattgaatttaccggaaaatacaccgcgtcggttatgcaggaaggcttgataggcgtacagggaagagcctttgtggatttggtgcgtcaattgcccggcggacagataaccctcaccctggatgaacaatccggcaatcttcttcttgagcaggtaaacggaaatacaagcttctgttaa

SEQ ID NO: 42226 - protein, 133 aa, Unknown
  Obtained from environmental sample
  DOMAIN (25)...(131): DNA polymerase III beta subunit, N-terminal domain
  misc_feature (1)..(133): Xaa is any amino acid
MFYRHLIEERNKVSPPIIFNKESIMKLTIMKEHIIEGLQKAAGIIPARSGAAYLRSLWLKAEGEKLAVLSTDANIEFTGKYTASVMQEGLIGVQGRAFVDLVRQLPGGQITLTLDEQSGNLLLEQVNGNTSFC

SEQ ID NO: 42227 - DNA, 1596 bp, Unknown
  Obtained from environmental sample
  misc_feature (1)..(1596): n is a, c, g, or t
gtgcgccgtgaacgcatgggccacatagagcttgccgccccggtttcccatatctggtattaccgctcggttcccagccgcatgggtctgctccttggtatgacaatgacggccctccgttccgtgctgtattatgaaaaatatgttgtcattgacaaggctgacacggaactggaaaaagggcagatgctctccgaggacgaatacaatgaggagatggaacgctatggcggcggcttcaccgcggccatgggggctgaggcgatccgtaccctgctggaaaacctcgatctggacaagctggccgcggaactccgggaaaagatgatagagaaaggcgccaagagcgacaagaaactcctcaagcgcatcgaaatcgtagagaatttccgcaattcccagaacaagcccgaatggatgatacttgacgtgatcccggtgataccaccggaactgcgccccatggttcagttggacggcgggcgttttgccaccagcgatctcaatgatctgtaccgccgcgtgatcaacaggaacaaccgcctgaaaaggctgcagaccctcaccgcccccgagatcattatacgcaacgaaaaacgcatgcttcaggaagcggtagacgcgctttttgacaattccaagaaaaagaaagttgttaagggttcttccaaccggccccttaaatcgatcagcgatatgctcaagggaaaacagggacgcttccgccagaaccttttgggcaagcgtgttgactattcgggccgttcggtcattactgtcgggccggatttgaagatgtggcagtgcgggctccctactaaaatggctattgagctgttcaagccctttataatgaaaaaacttgttgataaggacgtggtttataatattaagaaagccaagatgctgcttgaagccgagagcgtggaaattttcgcgatcctcgacgaagtggtaaaagaacatccggtgctgctgaaccgcgcgcccaccctgcaccgcctgggcatacaggcctttgaaccggtgctggtagaaggcaaggcgatcaaactgcatcccctggtctgtcacgcttttaacgccgattttgacggcgaccagatggcggtccatgtgcccctgacgcaggcggcccagatggagtgctggacccttatgctctccgcccgcaaccttcttaacccggcgaacggcaggactatagtgttcccctctcaggacatggtgctgggaattaacttccttacccgcgtcaaaccgaacggcaagcggcccgaatctttaaacccggagagtaagaatcatattccatattattcctccccggaggaagccctgatggcggtggagaataaattccttgattggggatcccttatccgtcttaagcctgtgaaattcccgatatgggacaagattgaccatgagatggaaatcccgaaagacggaatcattgaaaccaccgtcggaaggctggtgttcaacgaagaacagcccaaagagattcccttcattaattatgagatgaaagacaaggaactccgcgcccttatgagcatgtctcaagaaaaacggtccctcggccgattctga

SEQ ID NO: 42228 - protein, 531 aa, Unknown
  Obtained from environmental sample
  DOMAIN (392)...(529): RNA polymerase Rpb1, domain 3
  misc_feature (1)..(531): Xaa is any amino acid
MRRERMGHIELAAPVSHIWYYRSVPSRMGLLLGMTMTALRSVLYYEKYVVIDKADTELEKGQMLSEDEYNEEMERYGGGFTAAMGAEAIRTLLENLDLDKLAAELREKMIEKGAKSDKKLLKRIEIVENFRNSQNKPEWMILDVIPVIPPELRPMVQLDGGRFATSDLNDLYRRVINRNNRLKRLQTLTAPEIIIRNEKRMLQEAVDALFDNSKKKKVVKGSSNRPLKSISDMLKGKQGRFRQNLLGKRVDYSGRSVITVGPDLKMWQCGLPTKMAIELFKPFIMKKLVDKDVVYNIKKAKMLLEAESVEIFAILDEVVKEHPVLLNRAPTLHRLGIQAFEPVLVEGKAIKLHPLVCHAFNADFDGDQMAVHVPLTQAAQMECWTLMLSARNLLNPANGRTIVFPSQDMVLGINFLTRVKPNGKRPESLNPESKNHIPYYSSPEEALMAVENKFLDWGSLIRLKPVKFPIWDKIDHEMEIPKDGIIETTVGRLVFNEEQPKEIPFINYEMKDKELRALMSMSQEKRSLGRF

SEQ ID NO: 42229 - DNA, 666 bp, Unknown
  Obtained from environmental sample
  misc_feature (1)..(666): n is a, c, g, or t
atgacagattggccgagtatttgccttactccgcttggtgttccttcccgtatgaatatcgggcagcttcttgaaacagaacttggctgggccggttccactcttgacgaatggtattccgctcctgtttttcaatctccttcaacaagtcaaatagaagaaaaattgaaagaagcgggcctccccgttaccagcaaggcgactctcagggacgggaggacgggtgagccgtttgtaaatcaaattttctgcggaataatttactttctcaagctgcatcaccttgttgatgacaaaatgcatgcccgttccacaggtccgtactcgcttgttacccaacaaccgcttggcggaaaggcccaattcggcggacagaggttaggtgaaatggaagtctgggcgcttgaagcttacggagcggccaatacattgcaggaactattaacaattaagtcagacgacatgacaggccgttccaaaatttacgaagcaattgtaaagggcgaaccttctacgacagcgggtattcctgaatcgtttaacgtacttgttcaggaattgcgcggacttgctcttgatttatcaatttttgatgttaagggaaaacagatacctcttacggaaaaagatgaggaattaataaataaatcgggaagtaatttttaa

SEQ ID NO: 42230 - protein, 221 aa, Unknown
  Obtained from environmental sample
  DOMAIN (1)...(121): RNA polymerase Rpb2, domain 6
  misc_feature (1)..(221): Xaa is any amino acid
MTDWPSICLTPLGVPSRMNIGQLLETELGWAGSTLDEWYSAPVFQSPSTSQIEEKLKEAGLPVTSKATLRDGRTGEPFVNQIFCGIIYFLKLHHLVDDKMHARSTGPYSLVTQQPLGGKAQFGGQRLGEMEVWALEAYGAANTLQELLTIKSDDMTGRSKIYEAIVKGEPSTTAGIPESFNVLVQELRGLALDLSIFDVKGKQIPLTEKDEELINKSGSNF

SEQ ID NO: 42231 - DNA, 1302 bp, Unknown
  Obtained from environmental sample
  misc_feature (1)..(1302): n is a, c, g, or t
ttggaaaaaacttataccgcccttggcggcgcggacaaagacataggaaattcggaacttgaagaactctttttaacggctctgtctaaggctcaagccgacttaaactgctcgggaaaggtcgtcattctgcctccggacattactcgttatcattcacgagccggcttttttacggaaatagccgcaaagagccttgacgataaactgggcgctgttcttcccgctctcgggacgcatacgcctatgaacgataccgaaatttcgcgtatgttcggaactacgccgaaagagaagtttattgtacacgactggaggggcggcgttacggaacttggccggcttgaggaaacttttgttgaaaaagttaccgggggaaaagttaaatacgactggcctgttcaggtaaataaattacttaaaaaagacggcgatttttctcttgccctctccatagggcaggtagttccccatgaagttgccggcatgtccaaccacgctaaaaacatctttgtggggacgggcggaaaggaagctatcgacaagagtcattttgcaggagccgcttttggaatggaacggatcatgggcagggcggacactcccgtgcgcgccctgtttgacgaagggttacgccttttttcctctcttatgccgcctgttctttgggtactgacggtaatcggcgcgcgcaaggacggatctcttgccgtgcgcgggctttttatcggtttcgggcgcgaatgttttgaaaaagccgccgctttgtcgcgggatattaatgttaacctattaaatgaaccggttaacaaagtggtcgtgtaccttgaaccggaagaataccgtacaacatggcttggcaacaaggcaatttacagaacgcggatggcgatcgcggacggcggggagttattaatcctcgctcccgctcttgaacgtttcggcgaagacatggaagtggactctcttataaggaagcacggctaccgtccgggagaggaaataatcgccaaaacaaaaacggacgctgaactggcctgcaatttaagcgccgccgcccacctaatccacggttcaagcgaggggcgttttatcgtccgttactgcccgggcgaaaaactttcccgcagggaaatagaatccgcaggcttccaatggggcgatttaaaagagcagatgaaccgctacgatatcaataccctgtcctcaggccggaacaccgtatgcggagaacgaatcttctatgtccccaaccccgctctcggcctctggtcggaaaagagcaaatttacagagaaataa

SEQ ID NO: 42232 - protein, 433 aa, Unknown
  Obtained from environmental sample
  misc_feature (1)..(433): Xaa is any amino acid
MEKTYTALGGADKDIGNSELEELFLTALSKAQADLNCSGKVVILPPDITRYHSRAGFFTEIAAKSLDDKLGAVLPALGTHTPMNDTEISRMFGTTPKEKFIVHDWRGGVTELGRLEETFVEKVTGGKVKYDWPVQVNKLLKKDGDFSLALSIGQVVPHEVAGMSNHAKNIFVGTGGKEAIDKSHFAGAAFGMERIMGRADTPVRALFDEGLRLFSSLMPPVLWVLTVIGARKDGSLAVRGLFIGFGRECFEKAAALSRDINVNLLNEPVNKVVVYLEPEEYRTTWLGNKAIYRTRMAIADGGELLILAPALERFGEDMEVDSLIRKHGYRPGEEIIAKTKTDAELACNLSAAAHLIHGSSEGRFIVRYCPGEKLSRREIESAGFQWGDLKEQMNRYDINTLSSGRNTVCGERIFYVPNPALGLWSEKSKFTEK

SEQ ID NO: 42233 - DNA, 1107 bp, Unknown
  Obtained from environmental sample
  misc_feature (1)..(1107): n is a, c, g, or t
atggagacaaggatttctctcggcgctagacctaagcgcatagaacgagacaagaacggccgcattaaaaacaatctgccgccgcagctccacctgtcaatgccggtgatgttctcggcgatgagctacggttccataagttacaacgcccacgaaagcctggcccgcgccgccgaggagcttggcattttgtacaacacaggcgaaggcggcctgcatgaggatttttacaaatacggcaagaacacgatagtacaggtcgcgtcgggacgtttcggcgttcatccggaatacctgaactcgggcgcagctgttgagatcaaaatggggcagggtgcgaaaccaggcataggcgggcatcttcccggaacaaaaatcgtaggcgatatttcccgcaccagaatgatccccgaaggctctgacgcaatctcgcccgcgccgcaccatgacatctattctatagaagatttacgccagcttgtcttttccctgaaagaggcgacgaattatcaaaagcccgttattgtcaaaattgcggcggtgcataacgtcaccgccattgccagcggcatcgccagaagcggcgcggatattatagccattgacggcttccggggcgggacaggcgccgcgcccacccgcatacgcgaccatgtgggcatacccatagagctcgcccttgccggcgttgacaagcgcctgcgcgacgaaggtatacgcgacaatgtgtcgatcgttgtcggcggcagtatccgctccagcgcagatattgtcaaagccgtcgcccttggcgctgactgcgtgtatgtcgcctctgcggcgctgattgcgatgggctgccacctgtgcagaagctgccacgnncgcaaatgncactggggtattgccacgcaggttccggaactcgtcaagcgcctgaaccccgaccttggatacaagcggctcatcaatcttatgacagcgtggcagcacgaaataaaagagatgatgggcggcatgggcatcaactcgattgacggcctgaaaggtaaccgtctcatgcttcgcggcgtgggacttaacgagaaagagcttgagatcctcggcattaaacacgccggagagtaa

SEQ ID NO: 42234 - protein, 368 aa, Unknown
  Obtained from environmental sample
  DOMAIN (1)...(336): Conserved region in glutamate synthase
  misc_feature (1)..(368): Xaa is any amino acid
METRISLGARPKRIERDKNGRIKNNLPPQLHLSMPVMFSAMSYGSISYNAHESLARAAEELGILYNTGEGGLHEDFYKYGKNTIVQVASGRFGVHPEYLNSGAAVEIKMGQGAKPGIGGHLPGTKIVGDISRTRMIPEGSDAISPAPHHDIYSIEDLRQLVFSLKEATNYQKPVIVKIAAVHNVTAIASGIARSGADIIAIDGFRGGTGAAPTRIRDHVGIPIELALAGVDKRLRDEGIRDNVSIVVGGSIRSSADIVKAVALGADCVYVASAALIAMGCHLCRSCHXRKXHWGIATQVPELVKRLNPDLGYKRLINLMTAWQHEIKEMMGGMGINSIDGLKGNRLMLRGVGLNEKELEILGIKHAGE

SEQ ID NO: 42235 - DNA, 642 bp, Unknown
  Obtained from environmental sample
  misc_feature (1)..(642): n is a, c, g, or t
atgaaaaaactgatcagcgggaaagtaagggaagtatacgaaatttctgacgacaggctggtcattatcacgaccgacaggatctcagcgtttgatgtaattttgccgaaacccgtgctcaataaaggaaaggtactgaacgccgtttccctgttttggtttaatttcacaaaagacattattcccaatcatattatttcaagtgatttaaaggatatgccggaatttttccaaaagagcgagtttgagggacgcgctgttttggttaaaaaggttaaaatacttccgtttgaatttatcatcagggggtatatgtttgggaatatgtggtcggcctattcaaaaggcgaggaattctgcggccagaaaataaaaaccggatacaagctggctgaaaggctggacgccccgctgtttaccccttcgacaaaggcgcacgtcgggcatgacgagtatatcaccgttaaacatgtcgcggatactattggcgcggatctggcaaaaaaaattgaaaaagtctgctttgatatatataacacatgttataattacgcatacaaaaaaaacattattatcgccgacacgaaatttgaattcggccttgatgaaaaaataaccttatcctcgcggatgaagtattaa

SEQ ID NO: 42236 - protein, 213 aa, Unknown
  Obtained from environmental sample
  DOMAIN (1)...(213): SAICAR synthetase
  misc_feature (1)..(213): Xaa is any amino acid
MKKLISGKVREVYEISDDRLVIITTDRISAFDVILPKPVLNKGKVLNAVSLFWFNFTKDIIPNHIISSDLKDMPEFFQKSEFEGRAVLVKKVKILPFEFIIRGYMFGNMWSAYSKGEEFCGQKIKTGYKLAERLDAPLFTPSTKAHVGHDEYITVKHVADTIGADLAKKIEKVCFDIYNTCYNYAYKKNIIIADTKFEFGLDEKITLSSRMKY

SEQ ID NO: 42237 - DNA, 432 bp, Unknown
  Obtained from environmental sample
  misc_feature (1)..(432): n is a, c, g, or t
atgaaaagggtttatgtaaatgaaaaatggtgtttgggctgccatttatgcgaatattactgcgctttcgcgggaaccggggaaaacgatatggcgcgggccttaaagggcctgaagataaatccgaatatccgcatagaggaaaaagacgggatcagttttgccgtttcatgccggcactgcaaaacgccgttatgcgtcaagggatgtatcacaggcagcctgaccatcacggacggcgttattactattaacagaaatagatgcgttggctgctatacctgcattcttagctgtccttacggcgcggtgtgcccttcggatgacggcgccgtgcagaaatgcgagctgtgcgttaatacgaccgaaggaatcccggcctgcgtaaagggctgccccaacaacgcgattgtttttgaggaaagagggtag

SEQ ID NO: 42238 - protein, 143 aa, Unknown
  Obtained from environmental sample
  DOMAIN (82)...(105): 4Fe-4S binding domain
  misc_feature (1)..(143): Xaa is any amino acid
MKRVYVNEKWCLGCHLCEYYCAFAGTGENDMARALKGLKINPNIRIEEKDGISFAVSCRHCKTPLCVKGCITGSLTITDGVITINRNRCVGCYTCILSCPYGAVCPSDDGAVQKCELCVNTTEGIPACVKGCPNNAIVFEERG

SEQ ID NO: 42239 - DNA, 366 bp, Unknown
  Obtained from environmental sample
  misc_feature (1)..(366): n is a, c, g, or t
atgtttgaatttaaaaatctcaatatggacaatgtgcgtttatcttttgaaaaactcgccagcctcgggcttgaaatttccataagcgaactggatttgtcgcttatcgcttatgagcgcggcggcggaaaggacacggatatgtcccaagcggatgaaacagcgcaggcaaagtattacgcggaattgtttaaactgtacaaagaatattccagatatataaagcgtgtaaccatgtggggcatggacgacggtaccagttggatttccgccgggaatccctgcctctttgactggaaactaaacgccaaaaaagccttttacgctgtcagcgccccggagacttttcttgccgcgtcgccttga

SEQ ID NO: 42240 - protein, 121 aa, Unknown
  Obtained from environmental sample
  misc_feature (1)..(121): Xaa is any amino acid
MFEFKNLNMDNVRLSFEKLASLGLEISISELDLSLIAYERGGGKDTDMSQADETAQAKYYAELFKLYKEYSRYIKRVTMWGMDDGTSWISAGNPCLFDWKLNAKKAFYAVSAPETFLAASP

SEQ ID NO: 42241 - DNA, 432 bp, Unknown
  Obtained from environmental sample
  misc_feature (1)..(432): n is a, c, g, or t
atgaaaatattggcaggtttaaaggaaatagcgaaaaacgtaggcgtctcgatatccacggtttccaaagcgataaacaacgcgactgatatcagcggcgaaacgaggaagagaattttaaccgccgccgcagaagcgggatataaactcaatcttactcaaacattaacgaccaaccctcaatcgatcggaatcatctgtccggaaataaattcgaattattacgcccaaattctgagcaccctcgaaggaaatatagtcaaaagcggttattacgccacagtagcttttactaattttatatatgagaacgagcgaaaagcattaacggattttatagctcaaagcgtctcggggattatattgataaccgaaggacatgcgataggtaatgacctgatatcgctaaaaacagcattaaatgcccgttaa

SEQ ID NO: 42242 - protein, 143 aa, Unknown
  Obtained from environmental sample
  DOMAIN (5)...(30): Bacterial regulatory proteins, lacI family
  misc_feature (1)..(143): Xaa is any amino acid
MKILAGLKEIAKNVGVSISTVSKAINNATDISGETRKRILTAAAEAGYKLNLTQTLTTNPQSIGIICPEINSNYYAQILSTLEGNIVKSGYYATVAFTNFIYENERKALTDFIAQSVSGIILITEGHAIGNDLISLKTALNAR

SEQ ID NO: 42243 - DNA, 555 bp, Unknown
  Obtained from environmental sample
  misc_feature (1)..(555): n is a, c, g, or t
atgtgcaaaaaagtatcgggcggaaattgcgaagatgatactactcttgcgctgctctactgccgtgaagcgaagaaattaacattgctgacaggcccgccttccaatcgggcgatgaatcatacttacgcgttaaatnttatgaatatgccggggaaaaaagccatatgcggttctacaactacagatattgtggcggaagaattaggtttaaaagtagaaaccatatccatgggaaaatctttcggacagcttccggaatatcatattgaaggaattgatttagtttcggaaggcgcaataacgttaaaccaggttaataatattctggacgagccaatagaattattgtccgaagattccgtagcggaacgtctttgctttatgctgcacgaagcggacattgttaatttgatgataggaaacgcctcgaataccgcgcataatgatttaatctttaagcaaacaggcgttcatgtccgcaattccattattcaacagatagccgaaaaactgaacagcaaaggtaaactggttgttaaacggtactattga

SEQ ID NO: 42244 - protein, 184 aa, Unknown
  Obtained from environmental sample
  misc_feature (1)..(184): Xaa is any amino acid
MCKKVSGGNCEDDTTLALLYCREAKKLTLLTGPPSNRAMNHTYALNXMNMPGKKAICGSTTTDIVAEELGLKVETISMGKSFGQLPEYHIEGIDLVSEGAITLNQVNNILDEPIELLSEDSVAERLCFMLHEADIVNLMIGNASNTAHNDLIFKQTGVHVRNSIIQQIAEKLNSKGKLVVKRYY

SEQ ID NO: 42245 - DNA, 366 bp, Unknown
  Obtained from environmental sample
  misc_feature (1)..(366): n is a, c, g, or t
ttgcgctggcccgtgaacgctaaggaaatttcgtacatgaccggtcagatgggcgttatcgtagagggcgaaaataaagaagcggttaaaagcctgacacagggcaaggtaatttcagccggtccctggcggaaattcggcaaggtggcgattgtagaagtgtcgggaggatatttttatatgtacggcggttgcgacaccctgtcggtaaatgtcggggataaaatagcgccggggacagagcttggaaaattgggtataaacgccgtttccgaaaagtcccagttgttttttatggtatttcgaaatgatattccgattgatccggccaaagccccaagagccggcggcaattcaagaacataa

SEQ ID NO: 42246 - protein, 121 aa, Unknown
  Obtained from environmental sample
  DOMAIN (14)...(109): Peptidase family M23
  misc_feature (1)..(121): Xaa is any amino acid
MRWPVNAKEISYMTGQMGVIVEGENKEAVKSLTQGKVISAGPWRKFGKVAIVEVSGGYFYMYGGCDTLSVNVGDKIAPGTELGKLGINAVSEKSQLFFMVFRNDIPIDPAKAPRAGGNSRT

SEQ ID NO: 42247 - DNA, 987 bp, Unknown
  Obtained from environmental sample
  misc_feature (1)..(987): n is a, c, g, or t
atggaattagaagtagaaaaagccgggaaacgcgcccggaaacaccccgaaaaagcccataaaaagaccaagccttttaaggagtcggatccgcttgctttatatttcaagcagatttcaatgtttcctctcttaactttgcaggaagagcagaatataggcgaaaaaattatcagccttagaactaaaataaaaacgctggaaaacgaaaaaaagaaaaaggaaattgataacagcgaagaaacagccgcgcttgaacgcgcccttcttttctataaaaataaaatgataaattccaacctgcgccttgttgtaagtatcgcgaaaaattaccagcaccgcgggctttctcttcttgacttgattgacgaaggaaatataggtcttattgaggcggtagaacgctttgactacacaagaggctgccgcttctcaacttacggcacttggtggataagacaagcgataataaaaagcatcgcggacaaggggcgtgttatacgcataccgattcacatgcttaacacaattaaaaaatgctactatgtcgccaaacagctaacgcaggatttgggacgcgaccccaacgaacaggaattgtctgaatacctgggcgttccggtttccaaggttaaggaaatagtaaaactttcgcaggagaccacaagccttgacacaatcgtagacgacggaaatatgacccgccttgcggaacttataaaagacgacgtaagagccgaaccttttgaaatggttttttccatgaccttgcaggagacaatgagcgatatcctttcgcagttatctgaaagggaaatgaaaattatccagcttcgctacggcttaaccggagaaaatccccttacccttgaagaaacaggcaaatatctggggataacccgcgagcgcgtaaggcaaattcaggaaaaagccgtctggaaactccgcaccatgcgtgaactaaaagtgttaaaagaaaacgcctga

SEQ ID NO: 42248 - protein, 328 aa, Unknown
  Obtained from environmental sample
  DOMAIN (29)...(65): Sigma-70 factor, region 1.2
  misc_feature (1)..(328): Xaa is any amino acid
MELEVEKAGKRARKHPEKAHKKTKPFKESDPLALYFKQISMFPLLTLQEEQNIGEKIISLRTKIKTLENEKKKKEIDNSEETAALERALLFYKNKMINSNLRLVVSIAKNYQHRGLSLLDLIDEGNIGLIEAVERFDYTRGCRFSTYGTWWIRQAIIKSIADKGRVIRIPIHMLNTIKKCYYVAKQLTQDLGRDPNEQELSEYLGVPVSKVKEIVKLSQETTSLDTIVDDGNMTRLAELIKDDVRAEPFEMVFSMTLQETMSDILSQLSEREMKIIQLRYGLTGENPLTLEETGKYLGITRERVRQIQEKAVWKLRTMRELKVLKENA

SEQ ID NO: 42249 - DNA, 468 bp, Unknown
  Obtained from environmental sample
  misc_feature (1)..(468): n is a, c, g, or t
ttgttgattcccgcggcggcccctcttatcggctgtcttatgttcggcaactttatccgtgaaatcggcgtggtggacaggatttcaaagacagctcaaaacgagctgatgaatatagtgtcgatgttcctgtctttgggtgtcggcagccagatgactcccgagaagttccttaattccaaatcattgattatcgtagtaatgggtcttcttgcctttgcgatagcgaccgccacaggcgttcttgtagcgaaatttatgaacttgtttcttaaagaaaagatcaatccgcttatcggctccgccggtgtttccgctgttccaatggcggcccgtgtttcaaacaaggttggtcttgaatacgatcccggcaacttcctgttaatgcacgcaatgggcccgaatgtggcaggcgtaataggaacagcaatagccgccggagttatgatagcggtttacgcaagataa

SEQ ID NO: 42250 - protein, 155 aa, Unknown
  Obtained from environmental sample
  DOMAIN (1)...(154): Na+-transporting methylmalonyl-CoA/oxaloacetate decarboxylase, beta subunit
  misc_feature (1)..(155): Xaa is any amino acid
MLIPAAAPLIGCLMFGNFIREIGVVDRISKTAQNELMNIVSMFLSLGVGSQMTPEKFLNSKSLIIVVMGLLAFAIATATGVLVAKFMNLFLKEKINPLIGSAGVSAVPMAARVSNKVGLEYDPGNFLLMHAMGPNVAGVIGTAIAAGVMIAVYAR

SEQ ID NO: 42251 - DNA, 756 bp, Unknown
  Obtained from environmental sample
  misc_feature (1)..(756): n is a, c, g, or t
ttgccccaacgccacaagggcagccacagggagctgccccaacggtcgcgccaccacaagggcatccgcaaggggttgccccaacgccacaagggcatccacagggagctgccccaacgccgccgccacaggggcaaccgcaaggggttgccccaacgccacaagggcatccacagggagctgccccaacgccacaagggcaaccgcaaggggttgccccaacgccgcaagggcaaccgcaaggggttgccccaacggtcgcgccaccgccgccacctaaacccgcggcaccgcaagggcaaccgcaaggggttgcccctacggcaccgcatcccgcaccgccacctgctgctccggcgccggttccggctgcgcctaaacccgcggcaccgcaagggcaaccgcaaggggttgcccctacggcaccgcatcccgcaccgccaccgccgccacctgcgcctaaacccgcggcaccgcaagggcaaccgcaaggggttgcccctacggcaccgcatcccgtaccgccaccaccgccgcctgctgctccggcgccggttccggctgcgccgtaaccgacggggcaatcacataggattgcccctacaggcacaactggcgttgtgcctgcgccggaacaattacaataatggtaaaataatttcccaaatacggtttctgtccccgctccaggctggggcaattaatatgtcggctggggactcgccgctcactctttctatggctatatcaggttga

SEQ ID NO: 42252 - protein, 251 aa, Unknown
  Obtained from environmental sample
  misc_feature (1)..(251): Xaa is any amino acid
MPQRHKGSHRELPQRSRHHKGIRKGLPQRHKGIHRELPQRRRHRGNRKGLPQRHKGIHRELPQRHKGNRKGLPQRRKGNRKGLPQRSRHRRHLNPRHRKGNRKGLPLRHRIPHRHLLLRRRFRLRLNPRHRKGNRKGLPLRHRIPHRHRRHLRLNPRHRKGNRKGLPLRHRIPYRHHRRLLLRRRFRLRRNRRGNHIGLPLQAQLALCLRRNNYNNGKIISQIRFLSPLQAGAINMSAGDSPLTLSMAISG

SEQ ID NO: 42253 - DNA, 492 bp, Unknown
  Obtained from environmental sample
  misc_feature (1)..(492): n is a, c, g, or t
gtgggattgttagcggagttgaacggcataaaaccagtaatcgtggagataggtgtacaaaccgcaaacgaccaaacccttaaaaacataaacagaaaccacaccgcggaatgtgcccgcacagcggctctgctctgcaaaaattccaaactcctaacaactgctcatgtgataatcgggttgccgcacgaaagtgcggatgactttgcgaacacggcaaaacttgtaaaggaatgtggattctctgcggtaaaaattcatcctttgcacatagttaaaggaactcgctttgagcaagaatacaaagagggcaaaatagaactcatatccttatctgattattgcaaagccgcagcggaattcatccgcattgttcaacctgatatagccatagaaagagtgagcggcgagtccccagccgacatattaattgccccagcctggagcggggacagaaaccgtatttgggaaattattttaccattattgtaa

SEQ ID NO: 42254 - protein, 163 aa, Unknown
  Obtained from environmental sample
  misc_feature (1)..(163): Xaa is any amino acid
MGLLAELNGIKPVIVEIGVQTANDQTLKNINRNHTAECARTAALLCKNSKLLTTAHVIIGLPHESADDFANTAKLVKECGFSAVKIHPLHIVKGTRFEQEYKEGKIELISLSDYCKAAAEFIRIVQPDIAIERVSGESPADILIAPAWSGDRNRIWEIILPLL

SEQ ID NO: 42255 - DNA, 1074 bp, Unknown
  Obtained from environmental sample
  misc_feature (1)..(1074): n is a, c, g, or t
ttgtcaaaaggcgcgtttacggcacgcgatcttagcgacctcaataaatttataaaaaaatgttcttttgaacttttttatgctcccggagcggatttaccgttacgcgattttgacatacttatggcaaattaccgcaatcagtttgttgattccggcgaggaaaatgaaaaaacagaaactattacaaacgcggatatgtacagaactgtaattccacttttgttcgcgggagaagaaaaaaaaatagaagaggcctatatttttgacatccggcctgtttcagattcccgtccctattacacagggtttttgaaaatggacgaactgtcgatgtatctggatcaactgcgggatatttctgaagaatggggatacctgcttctctttgcgatgttgattcaggcgtgtatatttggtcttattgtaatactaatccccgttatcggcaaaagaaaaaccctgttcaaaaaaagaaggggaaccattggggtaattctttattatgccggacttgggcttgggtatatgctaatagaaatctaccttatccagcgtcttgcggtatttctttcaaacccgacttattcaacaagcatggtgattaccgtaatgttaatttcttccgctcttggaaacattacaagttcttttttaaaacgctacagggtttttgtcgttccggtagcgtgcgtttttattgcaggaggctttttgttttacatcttcggtttaaatgacttccttgcgatttatcagtcttcttccatgatgacgcggtttttggtatccgcgttaattatctccattccgtccttttttatgggcgtaccctaccccaacggcctggacagcctgcaggaaacaaagcccaatctcttaccctgggcatggggaatgaacggcggcctttccctggtaggcggatccctggcgcggctcctttcggtgtccagcggtttcccgctgctgttaagggttgggatcattgtttacgccgccgtaggatgcctcttcccgattaaccttgttatgacccgcgatgacggagctaaggcggcggataacgcttaa

SEQ ID NO: 42256 - protein, 357 aa, Unknown
  Obtained from environmental sample
  misc_feature (1)..(357): Xaa is any amino acid
MSKGAFTARDLSDLNKFIKKCSFELFYAPGADLPLRDFDILMANYRNQFVDSGEENEKTETITNADMYRTVIPLLFAGEEKKIEEAYIFDIRPVSDSRPYYTGFLKMDELSMYLDQLRDISEEWGYLLLFAMLIQACIFGLIVILIPVIGKRKTLFKKRRGTIGVILYYAGLGLGYMLIEIYLIQRLAVFLSNPTYSTSMVITVMLISSALGNITSSFLKRYRVFVVPVACVFIAGGFLFYIFGLNDFLAIYQSSSMMTRFLVSALIISIPSFFMGVPYPNGLDSLQETKPNLLPWAWGMNGGLSLVGGSLARLLSVSSGFPLLLRVGIIVYAAVGCLFPINLVMTRDDGAKAADNA

SEQ ID NO: 42257 - DNA, 942 bp, Unknown
  Obtained from environmental sample
  misc_feature (1)..(942): n is a, c, g, or t
atggacgacagcgccagacaggcaaggcgacaaacacgggaaactaccgcgcaaagaagcgggaaaaaggaccctttcgagcaagtaatggatagtcttgatcaactggcgagagaaagggccgaacgggagaaatccgagaccgcaaagaaaaaagccgagcaagaagcaagagaaaaaattgaacaagcacagcgggaagagaacgaaaggattgaacaagcgagacgggtagccgaggtgcaagcacgggaacgacgggaacgtgccgaaagagccgagcgagagagagaactctcggagagcagaggaaaccgcgatacgctcaacggagcggtgacggcggctgaaaatataagacattggtggaataccgatttcacgccgcaaggctctaaataccccataccggacggcaatggggccggacgcttctccgggacgggttccgccaaagacggattcgtcaagagtacagattatttgaaaaagatgaccggaaaaccggaggccgattataagacatacctaaccgtaagaaaggatcacgccaattcgccgaccttctattttaatatggcaagctggttctacgcctgcggcgacaaggagaccgcgatccgcgtactcacatccatcgccgatttggaactcgaaaacgccgctctctatagattactcggctacaggctgaaagagttcggcgagtacgcgctcgaaaaatttgtctgtcaaaaagtagtccaatggcgtcccatggaaccgcaaagccaccgcgactacgccaatgccctcgccgacaacggagaggcgcaagcggcgctcaacacgctctacggagcgctgtcaaaaacctattcgacatacaacagaggccgcagccgcgggatagaggagatcgtggtcacggagataaatcgactggtaaccaaaaacatctga

SEQ ID NO: 42258 - protein, 313 aa, Unknown
  Obtained from environmental sample
  misc_feature (1)..(313): Xaa is any amino acid
MDDSARQARRQTRETTAQRSGKKDPFEQVMDSLDQLARERAEREKSETAKKKAEQEAREKIEQAQREENERIEQARRVAEVQARERRERAERAERERELSESRGNRDTLNGAVTAAENIRHWWNTDFTPQGSKYPIPDGNGAGRFSGTGSAKDGFVKSTDYLKKMTGKPEADYKTYLTVRKDHANSPTFYFNMASWFYACGDKETAIRVLTSIADLELENAALYRLLGYRLKEFGEYALEKFVCQKVVQWRPMEPQSHRDYANALADNGEAQAALNTLYGALSKTYSTYNRGRSRGIEEIVVTEINRLVTKNI

SEQ ID NO: 42259 - DNA, 1176 bp, Unknown
  Obtained from environmental sample
  misc_feature (1)..(1176): n is a, c, g, or t
atgaaaaaatttaatttaattattattgccgtattattctttttattgatctcctgcgcggggtcggcaaaaaagaaaggcgaggaagccaaaaagacaaacgagactgcaaaacaaacaactgaagtggcgaagaaaacagaggaagtttccgccgataaaaaaaacgaggctgtagattcagcggctgccggtaaggaagaatcacctaacgcgcaaacagcgcaagccgggactgatgcacaaaaacccgcagatgaaaaatcttctttggaaactgactctgccgcgcaggaagttgcggcagtaacgccgcctgcgcaaacacagcctcagactccgcccgtgcagacgcctcagcaaccggcgcagacacctcagcagccacccgcacagacacaaccgcaacagccggaacgaacaccgccgcctgtgcagactcaaccgcaaacaccgccggcgcaagcgcaacagcagacgccgccacaaccgcccgcggaagaaaaaaaatccgataccgctgactccgcttcttccgacagcgatcaaataaaaaaagacctttcgccttccgtaacgggcggtccttccgctcccgccctgcgaattgaatctatacttcaaatgggaacaatgccgaatgataaagaaattgttttttcgcggattgtacgcgcgacagtggggcaaattgtagagattcctttccgaggaaacggatgggtttatctgggagagatcgcctcacagcggggaatagcttataattcacggcgtaatgattctgacggacagacttttatttttactctggaagaatcgggaacctatgttttaaaattttacagacaagattttataagagattatattttaaacgatcatgttcaggtaatagttggcgacgctcccacagcgggagccggttggtataatccgccggctgatcgcggcaaggtcgtagcccagcctcgctggccctctccgattgaagagacgcagataagaagcggtacaaaacctgtttccgaacctgttgtaactacgggaactacagagccggcaaaaacatcaacgcccgctccgagcgccgcaactcctgcaaatgccgcaccgcagcaaagaccggttacggaaacaaccgctccgcagaggactactcctctgccgatctga

SEQ ID NO: 42260 - protein, 391 aa, Unknown
  Obtained from environmental sample
  SIGNAL (1)...(23)
  misc_feature (1)..(391): Xaa is any amino acid
MKKFNLIIIAVLFFLLISCAGSAKKKGEEAKKTNETAKQTTEVAKKTEEVSADKKNEAVDSAAAGKEESPNAQTAQAGTDAQKPADEKSSLETDSAAQEVAAVTPPAQTQPQTPPVQTPQQPAQTPQQPPAQTQPQQPERTPPPVQTQPQTPPAQAQQQTPPQPPAEEKKSDTADSASSDSDQIKKDLSPSVTGGPSAPALRIESILQMGTMPNDKEIVFSRIVRATVGQIVEIPFRGNGWVYLGEIASQRGIAYNSRRNDSDGQTFIFTLEESGTYVLKFYRQDFIRDYILNDHVQVIVGDAPTAGAGWYNPPADRGKVVAQPRWPSPIEETQIRSGTKPVSEPVVTTGTTEPAKTSTPAPSAATPANAAPQQRPVTETTAPQRTTPLPI

SEQ ID NO: 42261 - DNA, 813 bp, Unknown
  Obtained from environmental sample
  misc_feature (1)..(813): n is a, c, g, or t
gtgggattaaagcccccttttggcaacgctacgctgaacgggatagaagaactcttgcaaaaggagaccaaaagaatgaggtctcaggaaaaggtatatcccaaaatcaatatggtcagatacgccgatgattttgtgataactgccaaaaccaaagaaattgcggagaaggtcatagggctggttcgtcaattcatggccgaacgtggtttgcaattatcggaagaaaagacggtaatcacgcatatctccgaagggattgattttctgggatggaacatcaaaaagtaccgaaacgggaaagcgctgacaaagccttcaaagaagtcgcaacagaaagtcttggagaaaataaggacgatcatacacagccatcgcggagcaaaacaggacgaccttatagccatgctaaaccccgtcataaggggatggacaggataccaccacacggtggtagcaaaaaggattttctcaaaaatggacaaagagttgtttcttctcctttggaaatgggcgaggaagaggcacggtaacaaaggccggcactggatttcccgccgctattggaaaaccgaagggaacaaacactgggtattcaaggacacgctcaccctgcttagattttgcgacaccaaggttaggcggcatataccgctcaaactggaaatgaacccctacatcgacactgaatatttccacaagaggagataccggctgttagtaaacagaacattgggagtgatactcccagagacgaaaaaccaaggccaaaccggcaaccatccgacagatgacggcttacttgaggcttga

SEQ ID NO: 42262 - protein, 270 aa, Unknown
  Obtained from environmental sample
  DOMAIN (111)...(189): Group II intron, maturase-specific domain
  misc_feature (1)..(270): Xaa is any amino acid
MGLKPPFGNATLNGIEELLQKETKRMRSQEKVYPKINMVRYADDFVITAKTKEIAEKVIGLVRQFMAERGLQLSEEKTVITHISEGIDFLGWNIKKYRNGKALTKPSKKSQQKVLEKIRTIIHSHRGAKQDDLIAMLNPVIRGWTGYHHTVVAKRIFSKMDKELFLLLWKWARKRHGNKGRHWISRRYWKTEGNKHWVFKDTLTLLRFCDTKVRRHIPLKLEMNPYIDTEYFHKRRYRLLVNRTLGVILPETKNQGQTGNHPTDDGLLEA

SEQ ID NO: 42263 - DNA, 654 bp, Unknown
  Obtained from environmental sample
  misc_feature (1)..(654): n is a, c, g, or t
atgttacgggcatcagtatgccttcccgcttctcgtcccagggctcaaaagacgacgcggcgaagtcttgcggcgaaccttcactgccgctacgagaccattcccatcgagggaatttacactacctaccttaccgccctggaaaaggtttttgaaaaccgtgccttcgatgtcactgaggaaaatttacaggcaaggatacgcggcacgctgctcatgtcttattcaaacaaattcaattccgtgttgctggccacaggcaacaaaagcgaagcctccatgggctactgtaccctttacggagacacctgcggtgcgcttgcacctatcgggaatcttttcaaaaccgatgtttacgcgctctgtaatcgaattaacgccagggccacagcagcaggaagcgctcttgtcattcctcaggcaatcatcgacaaaagcccgtcggcggagctgcgtccaggccaaaaagacgaggacagcctcccgccatacgatactcttgacgcaatcctaaggctgcacctttgcgaaaatctttcgcccgctgaaatcgtcgctaaaggctgggacagcgaactggtcaatcgcatcatcaataccacgacgcggatggagttcaagcgcattcagtgtccgccttcgctaccaatttag

SEQ ID NO: 42264 - protein, 217 aa, Unknown
  Obtained from environmental sample
  DOMAIN (3)...(211): NAD synthase
  misc_feature (1)..(217): Xaa is any amino acid
MLRASVCLPASRPRAQKTTRRSLAANLHCRYETIPIEGIYTTYLTALEKVFENRAFDVTEENLQARIRGTLLMSYSNKFNSVLLATGNKSEASMGYCTLYGDTCGALAPIGNLFKTDVYALCNRINARATAAGSALVIPQAIIDKSPSAELRPGQKDEDSLPPYDTLDAILRLHLCENLSPAEIVAKGWDSELVNRIINTTTRMEFKRIQCPPSLPI

SEQ ID NO: 42265 - DNA, 330 bp, Unknown
  Obtained from environmental sample
  misc_feature (1)..(330): n is a, c, g, or t
atgttagtttttcttatgactcaatccgaacttgataaacttgaagaaactctggttcagggaatcggggattttatgaaaaagaacggctttagccgctctcaccttggcctgtcaggcggcatagattctgctttggtcgcatacctcgcggtgcaggctgccggcgcggagaatgttacgggcatcagtatgccttcccgcttctcgtcccagggctcaaaagacgacgcggcgaagtcttgcggcgaaccttcactgccgctacgagaccattcccatcgagggaatttacactacctaccttaccgccctggaaaaggtttttga

SEQ ID NO: 42266 - protein, 109 aa, Unknown
  Obtained from environmental sample
  misc_feature (1)..(109): Xaa is any amino acid
MLVFLMTQSELDKLEETLVQGIGDFMKKNGFSRSHLGLSGGIDSALVAYLAVQAAGAENVTGISMPSRFSSQGSKDDAAKSCGEPSLPLRDHSHRGNLHYLPYRPGKGF

SEQ ID NO: 42267 - DNA, 1623 bp, Unknown
  Obtained from environmental sample
  misc_feature (1)..(1623): n is a, c, g, or t
atgccgccggatacagcaggccctcccaacttccgggagggttcggtgaaccgcgtcctcttcttttccgacggcacggaattttcttcccggctcaacctggcgggaggccagtccggggacgtgcgggtttccctcctctggaacaaccgcaacgaccttgacctgcacattttcactccccgaggtgaggaaatcttcttcgggcgcaagcaggactccacgggcgggatgctggatgttgacaggaatgtgaacggcgaaaccactaaaccggtggagaacgtcttttgggggccgggacgcgcgccgcagggccgctaccgggtagtcgtgcggaattaccattttcacgaaaaggacaggacgtccacccctttccaggtggaagtaaaaaacgggaagaactacagctattttgagggaaccgtttccaacaccggcaaatccagcgatgtggaagttacgggttttgaatacaagggcgcgcaggccatgaaacaggagaaagccctgatctaccagcttgcggaaagccacaggcaaatggggattaccaccaccacaatcggcgtgggcgtgggttttgatctggaactcatgcgaattttggcggaagagggaggcggcagttcccggtttatcagcgatcgggaagaaatgaaaaaactctttgacaccgagttcgaacggatggtagcgttagtcgccaccgatctggacatgagcttggaattcgcttccggtttcgagattcttgaaacctggggctaccagaaccggatcgcaggggaccgtattttctataaactgccgggtctgcatcttggagattatgagacaattctggtccgctaccggatgcatagcattccacagggcattccgcaaagcaatacgcaaggtcaggccggcagcggcgaaagggagcttgcgcgtttcaatgtaaacgccaaagacctcctgggcaggcccctgccgcctgtggagcggactgtgggaatcgtgctttccgaaaactcatctgacggcatttcctccggcatggtgcttcattcgggaaccatgctttatttcgccgaagctctcaaggagatcggcagcctttactacgcgggacaggacgaccttagcgccctgtcccagcttgagcgtgatgttgggagcagggaaccaagcaccagccagcgggagcgcatggacacgctaaaagaaaattttttgaagcgcctacaggccgcgctgaaaatcaccagggacagccgtcttgagctagagaacgcgaaattaaggctggacgaccaaaaggcattcactcacgaactggaaatcctggtcaactatgacaatattctgagcaaggaacttgttgactctggcggcaatccggcggggaattacattggactgagcaatttcggccaggcgcctgccggaacggaaagaaccggactcacagcaaacatggaagagctgcaaaaccggctttcggcgctttatagggaagtcggtctttccttcccctcaggcaaccttcggtggcggccattgcgccttttagtattcggggaacagacagcgaaacgccgctgcttgcctttatcaacgaagacgctctggtaa

SEQ ID NO: 42268 - protein, 540 aa, Unknown
  Obtained from environmental sample
  misc_feature (1)..(540): Xaa is any amino acid
MPPDTAGPPNFREGSVNRVLFFSDGTEFSSRLNLAGGQSGDVRVSLLWNNRNDLDLHIFTPRGEEIFFGRKQDSTGGMLDVDRNVNGETTKPVENVFWGPGRAPQGRYRVVVRNYHFHEKDRTSTPFQVEVKNGKNYSYFEGTVSNTGKSSDVEVTGFEYKGAQAMKQEKALIYQLAESHRQMGITTTTIGVGVGFDLELMRILAEEGGGSSRFISDREEMKKLFDTEFERMVALVATDLDMSLEFASGFEILETWGYQNRIAGDRIFYKLPGLHLGDYETILVRYRMHSIPQGIPQSNTQGQAGSGERELARFNVNAKDLLGRPLPPVERTVGIVLSENSSDGISSGMVLHSGTMLYFAEALKEIGSLYYAGQDDLSALSQLERDVGSREPSTSQRERMDTLKENFLKRLQAALKITRDSRLELENAKLRLDDQKAFTHELEILVNYDNILSKELVDSGGNPAGNYIGLSNFGQAPAGTERTGLTANMEELQNRLSALYREVGLSFPSGNLRWRPLRLLVFGEQTAKRRCLPLSTKTLW

SEQ ID NO: 42269 - DNA, 1401 bp, Unknown
  Obtained from environmental sample
  misc_feature (1)..(1401): n is a, c, g, or t
ttgttaattgttatttgttactggagttttactttgactgaaacaaaatcggccacagaccgtatcggcaaagaccctattggccgcttgctgcttaatttttccattccggcaataatcggaatgtttgtaaacgcggtttataatatcgttgaccgtatctacataggacagggcgtagacgcgctgggtatcgccggagtcggcctcgttatgccggtgatgatgattattcaagccgtctccatgctcgtaagcatcggcgcaaattcgctcttttccatacgtttgggccagggccgatccgatgaagttgaaaaaataatgggaaacgcgttcacacttctcttccttcttccggccatttgcataaccgtgtgctttgtttttatggaccctattctgcgcggcataatgaaggcggaaggcgaaatatataaatacgctgaaagttacctgcgcgttattctttacggcgctatattcgcggcgatgagccccggccttacccattttatccgttccgacggacaccctaagacttcaatgcttgttcagattgtaggcgcgcttaccaatatcatcctcgatccgattttcatttttatgtttaaaatgggcgttgcgggcgcggcatgggctacgattatatcgcagtttgtgtcgttcatttttgttatgggatatttttcatcaagatggacaaggctgcgcttccgcgtaaaaaacatgaagttaaacgctgaaataacgggtactattcttgccattggttttgccccgtttattatgcagtttgcgttcagccttgtcggtgttctgcagaatgccgtaattttaaaatacggcggcgacgaggcgtttaccgcaatgacaattacctttagcatgtttatcgttatcattatgccgctcatgggaataggtcagggcgcgcagccgattatcggttataattacggcgcgaaaaaatacgaccgcgtaaaaagatgctacaagctggcgcttctttcctgcaccgcaattcttttcgccggctttcttcttgcgcagttagcccccgggttttgcttttcgctgttcagcaaagataccggttctctgcgcgatcttggaatattgactatacggattattaccagtttggctcccattataggtctgcagatgatgagcgggcagctttttcaggcgatagggaaacctgttcaggccgctatcttaagcctttcccgtcaaattctcttttttattccgatggttttatttttgcccgttttgtttgagaagatcggccttcgtcccattttcggcgtttattggactttcccgttagccgatttttgttccgcgtttatttctggaatatttgtttacaggcagtttaaaaagtggggatag

SEQ ID NO: 42270 - protein, 466 aa, Unknown
  Obtained from environmental sample
  DOMAIN (260)...(423): MatE
  misc_feature (1)..(466): Xaa is any amino acid
MLIVICYWSFTLTETKSATDRIGKDPIGRLLLNFSIPAIIGMFVNAVYNIVDRIYIGQGVDALGIAGVGLVMPVMMIIQAVSMLVSIGANSLFSIRLGQGRSDEVEKIMGNAFTLLFLLPAICITVCFVFMDPILRGIMKAEGEIYKYAESYLRVILYGAIFAAMSPGLTHFIRSDGHPKTSMLVQIVGALTNIILDPIFIFMFKMGVAGAAWATIISQFVSFIFVMGYFSSRWTRLRFRVKNMKLNAEITGTILAIGFAPFIMQFAFSLVGVLQNAVILKYGGDEAFTAMTITFSMFIVIIMPLMGIGQGAQPIIGYNYGAKKYDRVKRCYKLALLSCTAILFAGFLLAQLAPGFCFSLFSKDTGSLRDLGILTIRIITSLAPIIGLQMMSGQLFQAIGKPVQAAILSLSRQILFFIPMVLFLPVLFEKIGLRPIFGVYWTFPLADFCSAFISGIFVYRQFKKWG

SEQ ID NO: 42271 - DNA, 417 bp, Unknown
  Obtained from environmental sample
  misc_feature (1)..(417): n is a, c, g, or t
gtgcttgccggagaaaaagccgccggagtttttgaggtaggggatcacaacagcacctttggcggcaaccccgtcgccgccgccgccggcatcgtggttctggaaacggtcaacaggccggaatttctcgccgaaatttcccgcaaaggcgaaaagatcatggctgcaatccggggctggaaacaccccgctatacaggaagtccggggccgcggcctgatgatcggcatcgacattgacaaagacgcctggcctgttctggaaaaagccatcgcccgcgcagatgaaaaaaactgcggcctgttaatcctttccgccgggcaaaaaaccctgcgcctgctccccccctacgtcatcagcgacagcgagatcgaagaggggctggaaatgctatacgaaataataaataacaggtaa

SEQ ID NO: 42272 - protein, 138 aa, Unknown
  Obtained from environmental sample
  misc_feature (1)..(138): Xaa is any amino acid
MLAGEKAAGVFEVGDHNSTFGGNPVAAAAGIVVLETVNRPEFLAEISRKGEKIMAAIRGWKHPAIQEVRGRGLMIGIDIDKDAWPVLEKAIARADEKNCGLLILSAGQKTLRLLPPYVISDSEIEEGLEMLYEIINNR

SEQ ID NO: 42273 - DNA, 924 bp, Unknown
  Obtained from environmental sample
  misc_feature (1)..(924): n is a, c, g, or t
atgacaacaagcaactttacgaggattggaataaacacagacaccggcaatttctcaggtgtgtatgacgggggcggatataccatcaccggcttgaccataaccggaaccagttttcagggagttttcggcgcaataagcggcacggtaaaaaacatgaacgttaccggcacgataacccaaaacggaaccggaaccaatgttagtaccggcggcattgtgggcttaaatatggcggacggcacgattgacaactgctcctttagcggaaccgtcagcggaacagggtgcgatcaagtcggcggcattgtcggacagaataacggcacggtgataaacagcagaagcgccgcaacaataagcggcagaacttccgtcggcggcattgccggagtgaataacggcacgattgaaaacagctacaacacgggaaacattaccggcacaaatcaagtcggcggtatcgccggagctaattccggcactggcagttttataaagataaggaacagttataacacgggcgatattaccgccactactacctctactgccaatgccggaggtattatcggagtgaaccaatcaagctcaacggtagaatactgctacaataccggcaatgttaccggatcaactgcagttggcggcatagcaggagcaaatcaaagcggaagcaccttgcaaaactgcgtatcgctcggcgcaagggtaaccggaaccggcagtaccaatcgtgtgattggtattgctaacggcaatatgaacgacaacaaagcccgtacagatatgaaaatcggcgcaagcggcgcagaggcgacagtatcacccgcaggagctaacacactanacggcggaaatatcagtatcacttccggtgcgtctctgtccgtcgttttcagcggatgggataccgcactttga

SEQ ID NO: 42274 - protein, 307 aa, Unknown
  Obtained from environmental sample
  DOMAIN (122)...(147): The GLUG motif
  misc_feature (1)..(307): Xaa is any amino acid
MTTSNFTRIGINTDTGNFSGVYDGGGYTITGLTITGTSFQGVFGAISGTVKNMNVTGTITQNGTGTNVSTGGIVGLNMADGTIDNCSFSGTVSGTGCDQVGGIVGQNNGTVINSRSAATISGRTSVGGIAGVNNGTIENSYNTGNITGTNQVGGIAGANSGTGSFIKIRNSYNTGDITATTTSTANAGGIIGVNQSSSTVEYCYNTGNVTGSTAVGGIAGANQSGSTLQNCVSLGARVTGTGSTNRVIGIANGNMNDNKARTDMKIGASGAEATVSPAGANTLXGGNISITSGASLSVVFSGWDTAL

SEQ ID NO: 42275 - DNA, 828 bp, Unknown
  Obtained from environmental sample
  misc_feature (1)..(828): n is a, c, g, or t
atgggataccgcactttgaatatcagcggtacttttgctataggcggcaatttggcaacgctcaaaacaaatacgcaaagccccgctcccacgcttccggcggagtacacggtactcggcacggcggctaatcccttcctcgttaccaacgaagccgatctccgcaaagtcggaacaggcactgacggctggacgctttcggcgcactacaaacagacacaggacatcgccatgacgacaagcaactttacgccgattggcaatgacgcaaacagattcaccggcacgtatgacggggacggaaaaaccattagcggattgaacataaccggcactggaaataatttaggtttattcggctttatccactcagccggcacggtgaaaaatgtgagcgcaagcggcacggtaacaaataccggaaccggaactgttatggagtatgtcggcggcattgtcggacagaataacggcacgattgaaaactgctcctttagcggaaccgttaccgcatcagcctgcgatatggtcggcggcattgtcggacagaataacggcacggtgataaacagcagaaacagcgcaacggtaagcggcaaaagtcaggtcggcggcattaccggaagaaatcaaggcacaatcgacaacagttacaacacgggagccgtcagcggaagccggtacatcgccggtatcgccggagttaataccaacgccggtatgtatataaagaactcctataacacgggcaatattaccgccaacgaagtaaccgaaagctccatggcaggaggcattgccgggcttaccaatcaggcgcaacgatag

SEQ ID NO: 42276 - protein, 275 aa, Unknown
  Obtained from environmental sample
  DOMAIN (199)...(224): The GLUG motif
  misc_feature (1)..(275): Xaa is any amino acid
MGYRTLNISGTFAIGGNLATLKTNTQSPAPTLPAEYTVLGTAANPFLVTNEADLRKVGTGTDGWTLSAHYKQTQDIAMTTSNFTPIGNDANRFTGTYDGDGKTISGLNITGTGNNLGLFGFIHSAGTVKNVSASGTVTNTGTGTVMEYVGGIVGQNNGTIENCSFSGTVTASACDMVGGIVGQNNGTVINSRNSATVSGKSQVGGITGRNQGTIDNSYNTGAVSGSRYIAGIAGVNTNAGMYIKNSYNTGNITANEVTESSMAGGIAGLTNQAQR

SEQ ID NO: 42277 - DNA, 1674 bp, Unknown
  Obtained from environmental sample
  misc_feature (1)..(1674): n is a, c, g, or t
atggcgagcgcacttgcgaacgctgcctggcaactgcctcagcgtaagatcacgacgctcgccgctttggggtacagctcctacggtaaccagatcggcctcgccacgggtatcgtctccgagacgtatcacaagggttacattgcaaagcgtatggagataggcgcggttgtcggcgccgttcccaaatcgcacgtctcgcggcgcgaacccgcgccgggcgacgtcgtggtgcttctcggcggcaggacggggcgcgacgggtgcggcggggctacggggtcgtccaaagagcataccgaggagtccatacagacctgcggcgcggaggtgcagaagggcaacgcccccaccgagcgcaagatacagcggctcttccgcgacccggaggtgggcaggatgatccgccgctgcaacgatttcggcgccggaggggtggcggtggccgtcggcgagttggccgcagggctcgacatctacttggacgcggttcccaaaaagtacgaagggcttgacgggacggagctcgccatttccgagtcgcaggagcggatggcggttgtgatcgcgccgtcggatttaaagacatttcaggctaaggcggagggtgaaaatttggagaccgccgcgatcgcgacggtgaccgatacccgccgtttgaagatgttctggcgcggtaaggccgtcgtcgatatcagccgcgacttcatcgatacaaacggcgtattacaagaggcggaggtctttgtcaagtctccgcgggcgctctacctgccggacatcctgtccatgacggtaaagtgccggaatgagtaccgcgatgtctccggagcgtttttcgagactatgacggacatcaacactgntagccaacgtggactgaaggagatgttcgacagttccataggtgccaacaccgtactcatgcctttcggcgggaggtaccagcggacgccggcggaggcgatggtcgcgaagttgccggtggcgagcggcgaaacggttaccgggaccgctatgagttacggatttgacccctacctatcctcgtggagcccctttcacggcgcggtttacgcggtgatccagtcggtggccaaaatagtggcggtgggcggcgaccaccgcaaggtacgcctcacgctgcaagagtattttgagaaattagggagcgataagactcgttggggcaagccctttgccgcgttgctcggcgcctactacgctcaagtcaaattaggcataccggctatcggcggcaaggatagtatgtcgggcacgttcaaggatctgcacgtcccgcccacgctggtatcgttcgctctcgcgccggtagacgttaccaaagtggtatcgccggagtttaagcggattgggagcgttgttgtattcgtatcgatatgggttgacgattttggaatgccggattttgatgtgatcgacatgtgctactccgcggtgcataaggggatagtcgacggtaagattctagcggcgcacacggtgggtcgcggcggaatttcggaggccgtcgccaagatgtgcttcggaaaccgcattggctttagggtcgacgagggcgtaaatccggcggaactctttaagccggactacgccggattagtcattgaattggataagagcgttgatacggataggaacgtttgggtatag

SEQ ID NO: 42278 - protein, 557 aa, Unknown
  Obtained from environmental sample
  DOMAIN (72)...(225): AIR synthase related protein, C-terminal domain
  misc_feature (1)..(557): Xaa is any amino acid
MASALANAAWQLPQRKITTLAALGYSSYGNQIGLATGIVSETYHKGYIAKRMEIGAVVGAVPKSHVSRREPAPGDVVVLLGGRTGRDGCGGATGSSKEHTEESIQTCGAEVQKGNAPTERKIQRLFRDPEVGRMIRRCNDFGAGGVAVAVGELAAGLDIYLDAVPKKYEGLDGTELAISESQERMAVVIAPSDLKTFQAKAEGENLETAAIATVTDTRRLKMFWRGKAVVDISRDFIDTNGVLQEAEVFVKSPRALYLPDILSMTVKCRNEYRDVSGAFFETMTDINTXSQRGLKEMFDSSIGANTVLMPFGGRYQRTPAEAMVAKLPVASGETVTGTAMSYGFDPYLSSWSPFHGAVYAVIQSVAKIVAVGGDHRKVRLTLQEYFEKLGSDKTRWGKPFAALLGAYYAQVKLGIPAIGGKDSMSGTFKDLHVPPTLVSFALAPVDVTKVVSPEFKRIGSVVVFVSIWVDDFGMPDFDVIDMCYSAVHKGIVDGKILAAHTVGRGGISEAVAKMCFGNRIGFRVDEGVNPAELFKPDYAGLVIELDKSVDTDRNVWV

SEQ ID NO: 42279 - DNA, 324 bp, Unknown
  Obtained from environmental sample
  misc_feature (1)..(324): n is a, c, g, or t
atgaccgatttaagagacttgcttaccaataatatcaaaaaaagacgtaaattattgggtatttcacaggctgttttagctgaaagggtaggaacttccactgattacatcgggcagattgaacaatgcaaaaaattcccttcatcagaaatgttgcaaaagatagccgaagccctggaaatggatagtcctgaattattttccacccaagtttttactgatgaagctattaaaattgtccaagacaaggttcaagcggatttagatgaagttagtatatccattaagaaaaagattaccgagattaaaatcattaaaggttga

SEQ ID NO: 42280 - protein, 107 aa, Unknown
  Obtained from environmental sample
  DOMAIN (12)...(66): Helix-turn-helix
  misc_feature (1)..(107): Xaa is any amino acid
MTDLRDLLTNNIKKRRKLLGISQAVLAERVGTSTDYIGQIEQCKKFPSSEMLQKIAEALEMDSPELFSTQVFTDEAIKIVQDKVQADLDEVSISIKKKITEIKIIKG

SEQ ID NO: 42281 - DNA, 723 bp, Unknown
  Obtained from environmental sample
  misc_feature (1)..(723): n is a, c, g, or t
ttgagcatgatttccagggcgtttgtaaccaaacctatagacataattgagatggacgctgttgtaaggaaatggctgtatgagaaaaaacgcggaagcgtaaatgtttccggcgtgccggattcggactttattgaagatgacggaaatgaaatggatatatatataccgggagtggacacgaaaaaagggctttccctgtacggcagagacgcggatatttatgtgcctcttctccgctcgtacgttgccaatactccggcgactttggaagtactgaaaaacgtctctgcggccactctgtcaaagtatgttatttccgtacacggattaaaaggaacgagcgcaggtattggcgcggaagagatacgggtgcaggctttggaactggaaaaattgtccagggctaacgaattacatgccgttcttgcgaagaacgacaagctcattgccgatacggaattaattgtcgccagcgtaaaagagtggctggataaacatgacattcgggatgaaaaaccgcgcaagaaagcgccggaaaaagaacttcttgcgcggctgagagaaagttgtgaaaattacgatatggacggaatagatgaaataatgaaagagttggaaagctttgattatgaggaagatgcggatttggttgcgtggatacgggaaaaggttgacatgtctaaaatgggcgacgtggcaaataggttgaaagatttataa

SEQ ID NO: 42282 - protein, 240 aa, Unknown
  Obtained from environmental sample
  DOMAIN (77)...(152): Hpt domain
  misc_feature (1)..(240): Xaa is any amino acid
MSMISRAFVTKPIDIIEMDAVVRKWLYEKKRGSVNVSGVPDSDFIEDDGNEMDIYIPGVDTKKGLSLYGRDADIYVPLLRSYVANTPATLEVLKNVSAATLSKYVISVHGLKGTSAGIGAEEIRVQALELEKLSRANELHAVLAKNDKLIADTELIVASVKEWLDKHDIRDEKPRKKAPEKELLARLRESCENYDMDGIDEIMKELESFDYEEDADLVAWIREKVDMSKMGDVANRLKDL

SEQ ID NO: 42283 - DNA, 468 bp, Unknown
  Obtained from environmental sample
  misc_feature (1)..(468): n is a, c, g, or t
ttgattctaatgcaatggttattaatggcgaatacccngttttttacttgtgctaaagaggtatatcagattgatacgtatgcgtttgattgtgaagcgcttttattagctggaaacaatgctgcaggaatatatgatgtcaaacactatgtaggaaagttcaacgcttatcagcgtacatatattattacgttgaaaaatagtgattacagctatatcccattcaaggtaatgcttgaacaaaaattagaacagatgcgtgaattgtcgaaaggtaccaatactaaatatttaacaatgactattctcgaatcatttgatttcatagtgcccccactcgaccttcaaaaccgcttcgccaccttagtcagtaccgccgacaaatcaaaatttgaactacgccgcaccctcgaagagctagatgcggcatacaaagccataattcgcgaaaaattgggggtaaactaa

SEQ ID NO: 42284 - protein, 155 aa, Unknown
  Obtained from environmental sample
  DOMAIN (4)...(128): Type I restriction modification DNA specificity domain
  misc_feature (1)..(155): Xaa is any amino acid
MILMQWLLMANTXFFTCAKEVYQIDTYAFDCEALLLAGNNAAGIYDVKHYVGKFNAYQRTYIITLKNSDYSYIPFKVMLEQKLEQMRELSKGTNTKYLTMTILESFDFIVPPLDLQNRFATLVSTADKSKFELRRTLEELDAAYKAIIREKLGVN

SEQ ID NO: 42285 - DNA, 873 bp, Unknown
  Obtained from environmental sample
  misc_feature (1)..(873): n is a, c, g, or t
gtgttggtgctgggcgacggtggggcggcgcggacggtgagggccgcgctggacgggcttggcgcgcgcgaaatcgtgacgatctcccgcaggggagagaaccactacggcaacatcgagcggcattatgacgcggatgtcatcgttaacaccacgcccgtaggcatgtatcccgataatggcaacagccccttgagcctcgccgggtttaagcaactaacgggcgtggctgatctgatctacaatcccacacggaccaaactcctgcttgaagccgaggggcttggcatctcccgcgtgaacggcctcgcgatgctggtggcacaggcggaggcggcatcccgcttgtttttggacgtcccatccaggccggaactggtgaataaaattcacgacgctattctcaaaaaaacacgaaacatcgcccttatcggcatgcccggctgcgggaaaagcactgtcggccgtatcctcgcccaaaagatggagcgtccctttacagatattgacgcgcagattgagacggcagccggaaaaaaaattccccgaattttctctgaagacggggaagaaatattcaggcggctggagacgcgcgtactcgccgaagaagcaaaaaaaagcggtgcggtactggcgacaggcgggggcgtggtgacacggcctgaaaatctcgatctactcaggcagaactgtgtaattgtgtatatgaaacgcgaactaaccgatctcattacagacggacggccgctttcgcagaacctggggatccaggccctcgccgaaaagcggctgccattatacgaggcgtggagtgattacgccgttcaggggaagcgaagcctgagcaaagcggcgaactcggccatctga

SEQ ID NO: 42286 - protein, 290 aa, Unknown
  Obtained from environmental sample
  DOMAIN (1)...(89): Shikimate / quinate 5-dehydrogenase
  misc_feature (1)..(290): Xaa is any amino acid
MLVLGDGGAARTVRAALDGLGAREIVTISRRGENHYGNIERHYDADVIVNTTPVGMYPDNGNSPLSLAGFKQLTGVADLIYNPTRTKLLLEAEGLGISRVNGLAMLVAQAEAASRLFLDVPSRPELVNKIHDAILKKTRNIALIGMPGCGKSTVGRILAQKMERPFTDIDAQIETAAGKKIPRIFSEDGEEIFRRLETRVLAEEAKKSGAVLATGGGVVTRPENLDLLRQNCVIVYMKRELTDLITDGRPLSQNLGIQALAEKRLPLYEAWSDYAVQGKRSLSKAANSAI

SEQ ID NO: 42287 - DNA, 381 bp, Unknown
  Obtained from environmental sample
  misc_feature (1)..(381): n is a, c, g, or t
atgaaaaaatcattcggtctccttggtgagaagcttggccacagcttctcgccgctgatccacagacagttaggggaatacgattattctctgtacgaagtctcccctgataatattgattctttcatgaaggaaaggcgtttcgacgggatcaatgtaaccatcccctacaaacagacggtaataccttactgcgcgacactttcggatgaggcgcaggtgattggcagcgtgaacacgatcgtaaaagacggcgtcggggcattgcacggacacaacacggatcatcatggatttcatatgatgctggaacatggcggaatcaacccgagcaaaaaaaagtgttggtgctgggcgacggtggggcggcgcggacggtga

SEQ ID NO: 42288 - protein, 126 aa, Unknown
  Obtained from environmental sample
  DOMAIN (7)...(81): Shikimate dehydrogenase substrate binding domain
  misc_feature (1)..(126): Xaa is any amino acid
MKKSFGLLGEKLGHSFSPLIHRQLGEYDYSLYEVSPDNIDSFMKERRFDGINVTIPYKQTVIPYCATLSDEAQVIGSVNTIVKDGVGALHGHNTDHHGFHMMLEHGGINPSKKKCWCWATVGRRGR

SEQ ID NO: 42289 - DNA, 417 bp, Unknown
  Obtained from environmental sample
  misc_feature (1)..(417): n is a, c, g, or t
atggtggcggaatcggaacgaaacgacatcgcggcgttgtcttcgcgcgcgtgttgcgatttgtacaacctgaaatgcgtggaaagctccgtgcaggacaggggcaataactatacgcggttcatctgtatctcaaaaaacctcgaaatatatccaggcgctgaccgtaccagcatcatgctgaccaccgcgcacaaacccggctcgctttacaaagtgctgggccagatattcacgcttggcgtgaatgtcgtaaagctcgaaagccgcccgattcccgacagggatttcgagttcatgttttatttcgatcttgaaacatcggtctattcaaaagaattcagccagctcatgtgcgagctggaaaatatatgcgaggaattccactatcttggcagttacaccgagatagtataa

SEQ ID NO: 42290 - protein, 138 aa, Unknown
  Obtained from environmental sample
  misc_feature (1)..(138): Xaa is any amino acid
MVAESERNDIAALSSRACCDLYNLKCVESSVQDRGNNYTRFICISKNLEIYPGADRTSIMLTTAHKPGSLYKVLGQIFTLGVNVVKLESRPIPDRDFEFMFYFDLETSVYSKEFSQLMCELENICEEFHYLGSYTEIV

SEQ ID NO: 42291 - DNA, 951 bp, Unknown
  Obtained from environmental sample
  misc_feature (1)..(951): n is a, c, g, or t
gtgcgggcttccttaaaagacggcatggaagccgcaaggccgcaaattgtcaatgacagttgtgcgccaaaaaaagccaaaggagtgaatatgataattaatcacaacctaagcgcaatgtttgccgacagatccctcaaagttacccaggtttcactggataagaatatggaaaagctgtcgagcggacttcgcatcaaccgtgccggtgatgatgcttcgggactcgctgtttctgagaagttgcgcgctcaaatccgcggcctgaatatggcggcattcaatgcccagaatggtatttcattcatccaaacaacggaaggctatctccaggaatccgaagatattatccagcgtctccgcgagttggcagtgcaggccgccaacggcatctataccgaagaggatcgtatgtacatccagatcgaagtctccgccctggtcgccgaggtagacagggttgcgtcgcacgcccagtttaacggtatgaatctgctgaccggacgcttcggacggcctataggtgaaaatctggttaccgcctctatgtggttccatatcggcgccaacatggaccaacggacacaggtgtttatcggcactatgacggcgcatggtcttggaatccgggacgttggcgataattcgtttatctcgctggctgacccggacgatgccaatcgcaccatttggacactcgacgtagcgcttaaaagaataaacaagcagcgcgccgatctcggcgcttaccagaaccgccttgaactcgcagtccgcggtattaacatcggcgctgaaaacctgcaagcggctgaatcccgcatcagagatgccgacatggcatttgagacagtcaattacaccaagaacatgatccttacccagtccggtactgccatgctggcccaggcaatccagaaaggccaaacggtacttcagcttctgcaatag

SEQ ID NO: 42292 - protein, 316 aa, Unknown
  Obtained from environmental sample
  DOMAIN (223)...(294): Bacterial flagellin C-terminus
  misc_feature (1)..(316): Xaa is any amino acid
MRASLKDGMEAARPQIVNDSCAPKKAKGVNMIINHNLSAMFADRSLKVTQVSLDKNMEKLSSGLRINRAGDDASGLAVSEKLRAQIRGLNMAAFNAQNGISFIQTTEGYLQESEDIIQRLRELAVQAANGIYTEEDRMYIQIEVSALVAEVDRVASHAQFNGMNLLTGRFGRPIGENLVTASMWFHIGANMDQRTQVFIGTMTAHGLGIRDVGDNSFISLADPDDANRTIWTLDVALKRINKQRADLGAYQNRLELAVRGINIGAENLQAAESRIRDADMAFETVNYTKNMILTQSGTAMLAQAIQKGQTVLQLLQ

SEQ ID NO: 42293 - DNA, 417 bp, Unknown
  Obtained from environmental sample
  misc_feature (1)..(417): n is a, c, g, or t
atggccggcgaagttgcgccgctgtattcctccagcgttgatgaaatcggcaaaccaagtggaggcgccaatggcggtgaagaacgcagcgcggacattgccatgcgcgtaagatccgctgttgagctccagcaactgcggtataaaggcatggggatacgccgtaacgcgatgattcccgccggaaaaatcgaaaatttttgcaacatggatcaacaggccagggacgcgtttcacaaggcccttgcccggcttgggctttcaggccgagcgtatcacggtattctacgggtagcgcggacaatagccgacctggacggtaaagaaacaatcggcatggaacatattttggaagcggtacaacaccgccgttatggagaagacccctatgaaattatcaccataggtaacaagtaa

SEQ ID NO: 42294 - protein, 138 aa, Unknown
  Obtained from environmental sample
  misc_feature (1)..(138): Xaa is any amino acid
MAGEVAPLYSSSVDEIGKPSGGANGGEERSADIAMRVRSAVELQQLRYKGMGIRRNAMIPAGKIENFCNMDQQARDAFHKALARLGLSGRAYHGILRVARTIADLDGKETIGMEHILEAVQHRRYGEDPYEIITIGNK

SEQ ID NO: 42295 - DNA, 501 bp, Unknown
  Obtained from environmental sample
  misc_feature (1)..(501): n is a, c, g, or t
ttgtggcgggaaaccccggtcaaatataccgctaaaccgcccataaaagaccgtgataaggcccctaagagcaaaaaaacagggaggccggaaaagtataataaacccttcgccgcagttcttttaagcctctgggagtttttcgactttcagtgcggcaagcttttagcccctctgctaaaggggatggaaggttttttggttcaagagtttaacctgagcgaagagataagagcgctgcttttgtctgtcagccctgcaaccatcgacagaaaactaaggaaacacaaagaacgtaaccatcttaagggcatacatacaaccaagcccggaacgctccttaaaagccagattccgatacgggtctgttttgaccgcgacgagaagcggcctggctttttcgagcttgccacggtcagccattgcggggcaaatgcaaaaggccaaactttgaccatcaccgatgtgacctcagggtggaccgaagatgcgcgcttttga

SEQ ID NO: 42296 - protein, 166 aa, Unknown
  Obtained from environmental sample
  misc_feature (1)..(166): Xaa is any amino acid
MWRETPVKYTAKPPIKDRDKAPKSKKTGRPEKYNKPFAAVLLSLWEFFDFQCGKLLAPLLKGMEGFLVQEFNLSEEIRALLLSVSPATIDRKLRKHKERNHLKGIHTTKPGTLLKSQIPIRVCFDRDEKRPGFFELATVSHCGANAKGQTLTITDVTSGWTEDARF

SEQ ID NO: 42297 - DNA, 987 bp, Unknown
  Obtained from environmental sample
  misc_feature (1)..(987): n is a, c, g, or t
ttgtcttcatgtctaaccccatttgttcctccacctccggtaggaaccattttagtttgggctagatttttacttttgaggcacacacccttttcggctagaaaaattatgagacaatgcgtccccttgaattgtcgctgggtgtatggtaagatttttccaatgagccaagaaactgtcaaaagaagaccccaaacttcaagcttaaaattgccctcggcaattttaagcagtgatttaggcaacaggcaacaatactcacccgataaccgatcgtgtcaactatctaacagcattactttactcatttttaggagggcaaaaggtatcattatgactaaaacaatgcagtatcgctctgtagctttattcaataaatcggaaaaggatttaatcatatacacaggtaataaagaaaataaaataagacatattgctttaataaaaaaaatatccagcataactatcatttgtgtgcttcttgcatttatagttatttcaattttcagtatacattccatgagaacaacaagcataaaacctgctgtcaacattggaataaataaacttaaaagcgacatgctttttttcgcaaaaagactatcaattgaatacggacaattaaaacttatagatgctgatctgataggaagggaaggggtttccctaaaaaataattataaactggtagacgatataagttctaattttaatattgcagcaaccgtttttgcgcgtaacggcgatgattaccgccggataagtaccagtattgcagacaacgccggaaaacgtacggttgatacctttcttgaaacagtcaatgttgcatatcagtgcatacaatccggcaacagttacacaggaaacgatgtcattctcggtaaaaattacattaccaaataccacccgattttcacggaaaacggaaatgaaattatcggcattttgtttatcggatttgatatgacggcaatcgaaaagtaa

SEQ ID NO: 42298 - protein, 328 aa, Unknown
  Obtained from environmental sample
  misc_feature (1)..(328): Xaa is any amino acid
MSSCLTPFVPPPPVGTILVWARFLLLRHTPFSARKIMRQCVPLNCRWVYGKIFPMSQETVKRRPQTSSLKLPSAILSSDLGNRQQYSPDNRSCQLSNSITLLIFRRAKGIIMTKTMQYRSVALFNKSEKDLIIYTGNKENKIRHIALIKKISSITIICVLLAFIVISIFSIHSMRTTSIKPAVNIGINKLKSDMLFFAKRLSIEYGQLKLIDADLIGREGVSLKNNYKLVDDISSNFNIAATVFARNGDDYRRISTSIADNAGKRTVDTFLETVNVAYQCIQSGNSYTGNDVILGKNYITKYHPIFTENGNEIIGILFIGFDMTAIEK

SEQ ID NO: 42299 - DNA, 342 bp, Unknown
  Obtained from environmental sample
  misc_feature (1)..(342): n is a, c, g, or t
atggcggaccaggggattggctgcttgcccgtactgaacgcctcccttttaaccggcattattaccgacaccgatatttttcacttttttattaacgcttacggggcacgccacaagggcatacggataacaatcaatttcaaggaaaaacgcggccagtttgcagcatttgccggtgcagttgcggaaaagggaggcaatatcgttgccgttgttacttccgagggcgatgatgtcgcccaccgccgcgcgaccatcaaaatcacagacatcagccgcaccgccgtagaggaagttgccgctactttggacggcgctgaaattgaagacatccgggaataa

SEQ ID NO: 42300 - protein, 113 aa, Unknown
  Obtained from environmental sample
  misc_feature (1)..(113): Xaa is any amino acid
MADQGIGCLPVLNASLLTGIITDTDIFHFFINAYGARHKGIRITINFKEKRGQFAAFAGAVAEKGGNIVAVVTSEGDDVAHRRATIKITDISRTAVEEVAATLDGAEIEDIRE

SEQ ID NO: 42301 - DNA, 339 bp, Unknown
  Obtained from environmental sample
  misc_feature (1)..(339): n is a, c, g, or t
atgaaagtatccaaaattatgacccggaatcccgtttttatccatcccgatctttcgctcagcgacgcgcgttcgttaatggacagggaaaaagtcggccacataccagtactcaataaaaataatgagcttgtgggccttatcacaaaagtcgatctgttgaaggcaggcccgtcgcccgcgaccagccttgacgtgtacgagatcagctatctgctttcaaaaatcaaggttgataaggtgatggaaaaaaatgtgatcatcgtccaggaaaacgaagttgtgaagaagcggcgaggatcatggcggaccaggggattggctgcttgcccgtactga

SEQ ID NO: 42302 - protein, 112 aa, Unknown
  Obtained from environmental sample
  DOMAIN (5)...(99): CBS domain pair
  misc_feature (1)..(112): Xaa is any amino acid
MKVSKIMTRNPVFIHPDLSLSDARSLMDREKVGHIPVLNKNNELVGLITKVDLLKAGPSPATSLDVYEISYLLSKIKVDKVMEKNVIIVQENEVVKKRRGSWRTRGLAACPY

SEQ ID NO: 42303 - DNA, 762 bp, Unknown
  Obtained from environmental sample
  misc_feature (1)..(762): n is a, c, g, or t
ttgggaatgaggctgtcagtgtctgcgacaatagctgagactttgttgaaagtcgaaaatcttgttgtcaattacggggccatacgcgccctgaagggcgtttcctttgaagtcgccaagggagaaataatcaccctcattggcgcgaacggcgccggaaaaagcacgacgcttaacgcgatttcaaatattataaaaaaagcttccggtactgtgatgtttgaccggcgggatataagctctgttccccctgacagcattgtcgcgtccggcctggtgcaggttcccgagggccggcgcatctttgccaatctcagcgtccgtgataatctggaaatgggcgcgtattcgaggcgctctgttaccgcggctgaaaaacaggccattaaaattgacatggaaaaagtgtttgacgtttttcccaggttaaaagagcgcatacgccaggtggcggggactctttcaggcggcgaacagcagatgctggctatgggccgcgccctgatggctaacccccgcctgctactccttgacgagccgtcaatgggccttgcccccatccttgttgatgaaatattctcggttgtcaaggggattaatgaaacagggacgaccgtgctgctcgttgagcagaacgcttacaaggctcttgcgcttgcgtcacgcgcatacatccttgagactggggagattgtcaaaagcggcatgaccgccgatttaatgaaggatgaggccgtaaaggctgcttatttaggaggatga

SEQ ID NO: 42304 - protein, 253 aa, Unknown
  Obtained from environmental sample
  DOMAIN (41)...(229): ABC transporter
  misc_feature (1)..(253): Xaa is any amino acid
MGMRLSVSATIAETLLKVENLVVNYGAIRALKGVSFEVAKGEIITLIGANGAGKSTTLNAISNIIKKASGTVMFDRRDISSVPPDSIVASGLVQVPEGRRIFANLSVRDNLEMGAYSRRSVTAAEKQAIKIDMEKVFDVFPRLKERIRQVAGTLSGGEQQMLAMGRALMANPRLLLLDEPSMGLAPILVDEIFSVVKGINETGTTVLLVEQNAYKALALASRAYILETGEIVKSGMTADLMKDEAVKAAYLGG

SEQ ID NO: 42305 - DNA, 519 bp, Unknown
  Obtained from environmental sample
  misc_feature (1)..(519): n is a, c, g, or t
ttgacaaccgagaatatttcatcaacaaggatgggggcaaggcccattgacggctcgtcaaggagtagcaggcgggggttagccatcagggcgcggcccatagccagcatctgctgttcgccgcctgaaagagtccccgccacctggcgtatgcgctcttttaacctgggaaaaacgtcaaacactttttccatgtcaattttaatggcctgtttttcagccgcggtaacagagcgcctcgaatacgcgcccatttccagattatcacggacgctgagattggcaaagatgcgccggccctcgggaacctgcaccaggccggacgcgacaatgctgtcagggggaacagagcttatatcccgccggtcaaacatcacagtaccggaagctttttttataatatttgaaatcgcgttaagcgtcgtgctttttccggcgccgttcgcgccaatgagggtgattatttctcccttggcgacttcaaaggaaacgcccttcagggcgcgtatggccccgtaa

SEQ ID NO: 42306 - protein, 172 aa, Unknown
  Obtained from environmental sample
  DOMAIN (18)...(56): Protein of unknown function (DUF1602)
  misc_feature (1)..(172): Xaa is any amino acid
MTTENISSTRMGARPIDGSSRSSRRGLAIRARPIASICCSPPERVPATWRMRSFNLGKTSNTFSMSILMACFSAAVTERLEYAPISRLSRTLRLAKMRRPSGTCTRPDATMLSGGTELISRRSNITVPEAFFIIFEIALSVVLFPAPFAPMRVIISPLATSKETPFRARMAP

SEQ ID NO: 42307 - DNA, 438 bp, Unknown
  Obtained from environmental sample
  misc_feature (1)..(438): n is a, c, g, or t
ttgtcagattggccgaggattgacgaggagcggatgcaggcccaggcgggtgaattactttctcttttcaagattgaaaaaaagaaggatgaactggcgcgtaatcttccctatggcgagcagcgcagactggagattgcccgcgccctggcttcaaacccatgcctccttctgctggatgaacccgccgccggaatgaacccacaggaaaccgaagatctaatgaagataattaaatttatcaggaatgaatttcacctgacgattcttttgatagaacacgatatgcggctggtaatgggaatatgcgagcggcttatagtgctggattatggacggacaatcgccgcgggctccccggaagaaattcgcaagaatccggcggtgataaaagcttaccttgggaatgaggctgtcagtgtctgcgacaatagctga

SEQ ID NO: 42308 - protein, 145 aa, Unknown
  Obtained from environmental sample
  DOMAIN (5)...(112): ABC transporter
  misc_feature (1)..(145): Xaa is any amino acid
MSDWPRIDEERMQAQAGELLSLFKIEKKKDELARNLPYGEQRRLEIARALASNPCLLLLDEPAAGMNPQETEDLMKIIKFIRNEFHLTILLIEHDMRLVMGICERLIVLDYGRTIAAGSPEEIRKNPAVIKAYLGNEAVSVCDNS

SEQ ID NO: 42309 - DNA, 816 bp, Unknown
  Obtained from environmental sample
  misc_feature (1)..(816): n is a, c, g, or t
atggtgggtgcgggagaagtgggcggcattttggacgtaatatgcagcgggctttcgggatacatcgaaaaaaccgtaaaactgtcggggaaagtaaaaagcgctatggcgtacccaggcgtggtgctcacaattgccgccatcgttgtgtacgttatcatggtcaaagtcattccagtcttttcagaagtgtatgaagaccttggcagcagcttgcctatttcgacgttgatatgcatcaaagcttcaaatatcctgctgcattatagctacatagtgtttgccgccattgtcgtgattgtttttctgtacaggcagtactacaaaaccgctacgggaaaattgaagattgattcgatgtacttaaagttcccgatatttggtgacatcattaggaaagtggccattgcgaggttttgccgcacgctagggactttggtcagctcaggagtgccaattttggaggggatggacatcacggctagaaccgctggaaatcaagtgatccaaaatgcggtgctgaagtgccgcgactctgttgaacaaggacacaccatcgcaggcccgctggccgaaacgaaagtgtttccgccaatggtcgtccagatggttggtgtcggcgaagccacgggtgcccttgacgcaatgctggcaaaagtggccgatttttatgacgatgaagttgacaatgccgtggcagccctgactgccctgatggagccgatgatgatagtcattcttgccgtgatcattggcttcattgtgatttcgatgtacatgcccatattcatgttgggcgaagtgatgggaggttga

SEQ ID NO: 42310 - protein, 271 aa, Unknown
  Obtained from environmental sample
  DOMAIN (139)...(261): Bacterial type II secretion system protein F domain
  misc_feature (1)..(271): Xaa is any amino acid
MVGAGEVGGILDVICSGLSGYIEKTVKLSGKVKSAMAYPGVVLTIAAIVVYVIMVKVIPVFSEVYEDLGSSLPISTLICIKASNILLHYSYIVFAAIVVIVFLYRQYYKTATGKLKIDSMYLKFPIFGDIIRKVAIARFCRTLGTLVSSGVPILEGMDITARTAGNQVIQNAVLKCRDSVEQGHTIAGPLAETKVFPPMVVQMVGVGEATGALDAMLAKVADFYDDEVDNAVAALTALMEPMMIVILAVIIGFIVISMYMPIFMLGEVMGG

SEQ ID NO: 42311 - DNA, 402 bp, Unknown
  Obtained from environmental sample
  misc_feature (1)..(402): n is a, c, g, or t
ttgggtcatttctcgcaaagggtccgcgtgaatacgcacgagtcggccgaaaactacctggagaccatcctcatcctgaaggacaaactgggtcgcgtccggtccaccgatgtcgtcagcgagcttggtttttcgagggccagcgtgagcgtggccatgagaaagctaagggacagcggccacatacaggtggacgccgatggctacattgccttcacgaaggtcggtcaagaaatcgccgaaaacatgtatgggcgccacaccgtgctttctggtttcctaatctcattgggcgtggatgaagacaccgcgctcaaagacgcctgtcgcatcgaacatgtgatcagccagcagtcctttgaaaaaatccgcgacgctttcgcgggggcagaaaaagcctaa

SEQ ID NO: 42312 - protein, 133 aa, Unknown
  Obtained from environmental sample
  DOMAIN (11)...(71): Iron dependent repressor, N-terminal DNA binding domain
  misc_feature (1)..(133): Xaa is any amino acid
MGHFSQRVRVNTHESAENYLETILILKDKLGRVRSTDVVSELGFSRASVSVAMRKLRDSGHIQVDADGYIAFTKVGQEIAENMYGRHTVLSGFLISLGVDEDTALKDACRIEHVISQQSFEKIRDAFAGAEKA

SEQ ID NO: 42313 - DNA, 1068 bp, Unknown
  Obtained from environmental sample
  misc_feature (1)..(1068): n is a, c, g, or t
gtgcctaacttgcgaaagttaaaacccgattacatcattcacggagacgactggaaaaacggtcctttgcaaaaagagcgcgacgaagttttagcagtaatgaaagaactgggcggcgaagttatcgagattccctataccgcggggattaattcatcttcaattaatgaggcgatacgttccattggaacaacgccggatattcgtttaaaaacgcttcgcagacttcttgagacaaaaaatattgtaagaattatggaagcgcattccggtttgtccggtttaataatagagaatcttgagatcgaaaaagaagacggcttgcacagttatgacggaatgtggtcgtcaagtttaaccgactctacaagtaaaggaaaacccgatattgaggcggttgatcttactacgcgtttacacgatttaacaaatattctggaatgtacgacaaaaccgataatttttgacggcgacacaggcggtcaacatcttgccttcacggtaaaaacccttgagcgaaacggaatatcagcggtcattatagaagacaaaaccggtctgaaaagaaattctcttttcggtaccgacgttaatcaggaattatgccccatccccgaattctgcgataaaatcaaagccggaaaacaggcgcaggtaacaaaagaatttatgatcatcgcgcggttggaaagtttaatcgctggtttccccgtctctcacgcaatggaaagagcgcgggcatttgtcgaagcgggcgctgacggcgttatgatacacagcaaggaaaaatcaggcgatgacattaaagaattttgttcgctcttccgcgccgaatatccccatgtgccgattgttcttgttcctacaacatataataaatttacagagaaggaacttgcctcttggggcgcgaatattattatctacgcaaaccacatgctccgttccgcatatccggcaatgatgaacacagcaaaaatgatcttacaaaacgaacgctctcttgaggcggattcggtttgtatgccaataaaagaaatacttgaattaattccgggcggcaaataa

SEQ ID NO: 42314 - protein, 355 aa, Unknown
  Obtained from environmental sample
  misc_feature (1)..(355): Xaa is any amino acid
MPNLRKLKPDYIIHGDDWKNGPLQKERDEVLAVMKELGGEVIEIPYTAGINSSSINEAIRSIGTTPDIRLKTLRRLLETKNIVRIMEAHSGLSGLIIENLEIEKEDGLHSYDGMWSSSLTDSTSKGKPDIEAVDLTTRLHDLTNILECTTKPIIFDGDTGGQHLAFTVKTLERNGISAVIIEDKTGLKRNSLFGTDVNQELCPIPEFCDKIKAGKQAQVTKEFMIIARLESLIAGFPVSHAMERARAFVEAGADGVMIHSKEKSGDDIKEFCSLFRAEYPHVPIVLVPTTYNKFTEKELASWGANIIIYANHMLRSAYPAMMNTAKMILQNERSLEADSVCMPIKEILELIPGGK

SEQ ID NO: 42315 - DNA, 717 bp, Unknown
  Obtained from environmental sample
  misc_feature (1)..(717): n is a, c, g, or t
gtgaaactgcttgtggaagacgaggcctttcccgccgtagccgcagcagcgctaaaaacagcccacaaaaatctcgcggatcacaaaacggacgaaaaagaaattcgccgcactcttaacacagttcatcaaatattactcgccgaaacagggcgctatcaggccgactgggatttttttgaacctgccggtgcattggatcccttaaagcggcatatttttccaggtatgcaggtttaccttgaagacatacgctcgccctttaatgtcggttccatgttcagagccgccgactcctttggcgtggagaagatctggctttcacccctatgcgcaagccctcagcacaaacgggcattgcgtaccgcgatgggctgcgtagatgttgttccctgggaatttctttctaatgatccattcgatcatgatcaattcgataattattccactttgccatttttccgggggcctttatttgcccttgaaaccgggggcactcccatcgcggatttctccttccccgcacaggggattttaatcgcgggttcagaagaactcggggtaagcccccatgcgctggcagcggcggatgcctcgcttggaagggtaagtattcccacctggggggtaaagggttcgctgaacgtatccggcgctttcgcgattgtaatgcacgcctgggcagagcaactggcaaaacaagagaggcaatcgtag

SEQ ID NO: 42316 - protein, 238 aa, Unknown
  Obtained from environmental sample
  DOMAIN (76)...(225): SpoU rRNA Methylase family
  misc_feature (1)..(238): Xaa is any amino acid
MKLLVEDEAFPAVAAAALKTAHKNLADHKTDEKEIRRTLNTVHQILLAETGRYQADWDFFEPAGALDPLKRHIFPGMQVYLEDIRSPFNVGSMFRAADSFGVEKIWLSPLCASPQHKRALRTAMGCVDVVPWEFLSNDPFDHDQFDNYSTLPFFRGPLFALETGGTPIADFSFPAQGILIAGSEELGVSPHALAAADASLGRVSIPTWGVKGSLNVSGAFAIVMHAWAEQLAKQERQS

SEQ ID NO: 42317 - DNA, 567 bp, Unknown
  Obtained from environmental sample
  misc_feature (1)..(567): n is a, c, g, or t
atgttactaggacaaaaatttttcaacaagccaaccgcagacctggccagggcgcttttgggcaagtacctggttttgggggatntgcggggcaagattgtggaaaccgaagcgtaccttttccataacgaccccggctgccacgcaagcaggggccttactccccgcaacgccccaatgttcggcccagctggcaatacttacgtttactttatttacgggatgtactattgccttaacattgtcagcgggaaaacaggcgaaggcgaagcggtgctgatccgcgccctggagccagtccagggaattgagataatgatgaaaaggcgaaacacaaacaaaatagaaaacctctgcaacgggccgggaaagctaacgcaagccttcggcatcaccaagaagcacaacaacctaagccttttaacaggggaattgcagatccataacagccgggaaaaaccggagattgggacgagcaagcggattggtttgtcggcaggcggggagcttgagctgcgattttttatcaaagggaacaggtttgtatcaaaggcgggtaagttatga

SEQ ID NO: 42318 - protein, 188 aa, Unknown
  Obtained from environmental sample
  DOMAIN (4)...(181): Methylpurine-DNA glycosylase (MPG)
  misc_feature (1)..(188): Xaa is any amino acid
MLLGQKFFNKPTADLARALLGKYLVLGDXRGKIVETEAYLFHNDPGCHASRGLTPRNAPMFGPAGNTYVYFIYGMYYCLNIVSGKTGEGEAVLIRALEPVQGIEIMMKRRNTNKIENLCNGPGKLTQAFGITKKHNNLSLLTGELQIHNSREKPEIGTSKRIGLSAGGELELRFFIKGNRFVSKAGKL

SEQ ID NO: 42319 - DNA, 663 bp, Unknown
  Obtained from environmental sample
  misc_feature (1)..(663): n is a, c, g, or t
gtgccaaacgtgatagccattgacgggccctccggcgtgggcaagtccaccgccgctaagctcgtggcggccaggctaggctggagttacatggacacaggtgccatgtatagggcggtcacgctcatgcttgaaaggaacggcgtgtcccttggggacgggggcactctgacgcgactcatggaatcaatggactacgagcagcgcggggatgcatattttttgaaccgcgaagacatcaccgccgccatcagaacccccgaaattaccaagctggtatcagaggtcagcgcggacaccagggtcagggaggcccttgtgttccagcagagaaaactgggccgtgcgggcgattgggtggtggacggccgcgacataggcaccgtggtttttcctgacgccaagtgcaaaatcttcttggtggccacgcccctggccaggacgcagaggcgctatttggagctacaggcaaaaggggtgcccgccacgcttgaagaagtcttgctggaccaagaaaggcgcgacaagtatgactccactcgtgcggccagcccgctccgcagggcggacgacgcgctggaactggactccagccaactgtcccttgacgaagtggtggagtggatattgcaggcgtacctacgcgtggagcaggcgaaatga

SEQ ID NO: 42320 - protein, 220 aa, Unknown
  Obtained from environmental sample
  DOMAIN (58)...(211): Cytidylate kinase
  misc_feature (1)..(220): Xaa is any amino acid
MPNVIAIDGPSGVGKSTAAKLVAARLGWSYMDTGAMYRAVTLMLERNGVSLGDGGTLTRLMESMDYEQRGDAYFLNREDITAAIRTPEITKLVSEVSADTRVREALVFQQRKLGRAGDWVVDGRDIGTVVFPDAKCKIFLVATPLARTQRRYLELQAKGVPATLEEVLLDQERRDKYDSTRAASPLRRADDALELDSSQLSLDEVVEWILQAYLRVEQAK

SEQ ID NO: 42321 - DNA, 711 bp, Unknown
  Obtained from environmental sample
  misc_feature (1)..(711): n is a, c, g, or t
gtgcgcgacttcgccaattccagaaatatctacatgaaggttctggaaatggaagataccaacccgtacgccataatcggcatggggcatcttcattatgattttaaggaatacaaagacgcgctttattattgggaaaggatgctgaaaataaacagtgaaaacgtggatatccgcgtccttacttccatcggcaactgccacagaaaattaaaaacattcagcgaaggaataccctattttgaaaccgctcttaaaagggaaaaaaataatttttacgcccttttcggccttgccgactgttacaggggcatgaaccagattgaaacgtcgttaaaatactggaacctgattcttgaacaggaccccagaaacaagatgatcttaacgcgcatgggagacgcgtaccgcaacctgaatgattatgaaaaagcaaaagattactatgaaaaggccttgaatattgagtttgacacttatgccgtaatgggccttgcgttaatcgcgaaagaacagggtaaatatgacgaagctattacctccttcaggcggctgatccagcaggactccagaaatttccgcctttacattgaactttccgactgttatctgaaatccggcgaccgccgcaaagctgtggaaattctggaagattttcaaagattgggaattaagaatcaaaaaatagctgaacttttggaaagcatgtaa

SEQ ID NO: 42322 - protein, 236 aa, Unknown
  Obtained from environmental sample
  DOMAIN (92)...(125): Tetratricopeptide repeat
  misc_feature (1)..(236): Xaa is any amino acid
MRDFANSRNIYMKVLEMEDTNPYAIIGMGHLHYDFKEYKDALYYWERMLKINSENVDIRVLTSIGNCHRKLKTFSEGIPYFETALKREKNNFYALFGLADCYRGMNQIETSLKYWNLILEQDPRNKMILTRMGDAYRNLNDYEKAKDYYEKALNIEFDTYAVMGLALIAKEQGKYDEAITSFRRLIQQDSRNFRLYIELSDCYLKSGDRRKAVEILEDFQRLGIKNQKIAELLESM

SEQ ID NO: 42323 - DNA, 1068 bp, Unknown
  Obtained from environmental sample
  misc_feature (1)..(1068): n is a, c, g, or t
atgaaaacaattccggcgagtcttgcgggctttcttccggcggaacttgaaaacattctccttccactgccccgaatgcgcgcctcccaaatatacaaatggataacccgcggcgttttggattttgatcaaatgaccgacctgcccgtctccttgcgcgatgatttaaaaagccgctttcggctctattcctgtactgtagacagccgtcatgaagataaatcatctgaaaaaattgttatcgctcttgaagacggcttaaaaattgagtctgttcttctaaaagacggaaaatcgcgctttaccgcctgcctttcgacccaagccggctgcccggcggggtgcgtattctgcaaaacaggcagtcttggcttttcccgcagcctgaccgcggccgaaatagcggaacaatttttgtttttgcgcatggcggtgacaggagaagcggaaaacaatagcggacatagtattgataacatcgtaatcatgggcatgggggaacccttattaaaccttgaagaactgcggaaagctattgccttttttacagatcctgccgggataaatttttccaaacgcagaataacaatttccacctgcggcatctgcgccggcctgtctgacatggcagataacggcccctacgtacggcttgctctctcgcttgtaaccgcggatgaagaactgcggcggcaactgatgcccattgccgccgcaaaccctcttgaaaaagtaaaacaagccctgagcgcgtttcaaaacaaaagcggcggccgcgtaactttggaattaccgctcctcggcggcatcaacacccgcgtcaaagacgccctatccatagcgcgtttcgcgaaaggaatggatacagtaataaacataatcccctggaaccccgccgccggccttgattttcaaggcaagcccttacgcgaaccggataaaaaagagacggaagactttgtaaaacaacttgaaaagcaaggattaaaagtgaccatgcgccatcgcaaaggcagaggcgttatgggcgcttgcgggcagttgggatcaatgagcaatgagcagtga

SEQ ID NO: 42324 - protein, 355 aa, Unknown
  Obtained from environmental sample
  DOMAIN (105)...(281): Radical SAM superfamily
  misc_feature (1)..(355): Xaa is any amino acid
MKTIPASLAGFLPAELENILLPLPRMRASQIYKWITRGVLDFDQMTDLPVSLRDDLKSRFRLYSCTVDSRHEDKSSEKIVIALEDGLKIESVLLKDGKSRFTACLSTQAGCPAGCVFCKTGSLGFSRSLTAAEIAEQFLFLRMAVTGEAENNSGHSIDNIVIMGMGEPLLNLEELRKAIAFFTDPAGINFSKRRITISTCGICAGLSDMADNGPYVRLALSLVTADEELRRQLMPIAAANPLEKVKQALSAFQNKSGGRVTLELPLLGGINTRVKDALSIARFAKGMDTVINIIPWNPAAGLDFQGKPLREPDKKETEDFVKQLEKQGLKVTMRHRKGRGVMGACGQLGSMSNEQ

SEQ ID NO: 42325 - DNA, 414 bp, Unknown
  Obtained from environmental sample
  misc_feature (1)..(414): n is a, c, g, or t
atgcctgaaatcatcgaaaagtttattaaaagtatcgaagaacttttacaagagaacaagatcaaagatatgcttgtaaacacggtttcatcatcatttggcggaataatcggcggacagaaaaacattgcggaaataattaacataagcgaagatgaaaaaaaagaactggacaattttttatttgacaaaataatgtccgccgcggacgcccatattgaaaacatactttccacgattaacattaaagcccttgtagcggaaaggatcgattcattggacatgctgaaggtggagcgtataatccttgacgtaatggcggatcaattcaaatggataaacatcttcggcggaatactgggctttttaatcggcgcgtttcaggctgtgttttcgtggggaattagtaattag

SEQ ID NO: 42326 - protein, 137 aa, Unknown
  Obtained from environmental sample
  misc_feature (1)..(137): Xaa is any amino acid
MPEIIEKFIKSIEELLQENKIKDMLVNTVSSSFGGIIGGQKNIAEIINISEDEKKELDNFLFDKIMSAADAHIENILSTINIKALVAERIDSLDMLKVERIILDVMADQFKWINIFGGILGFLIGAFQAVFSWGISN

SEQ ID NO: 42327 - DNA, 1038 bp, Unknown
  Obtained from environmental sample
  misc_feature (1)..(1038): n is a, c, g, or t
atgtccgggtacattccgctttcagaactaaaatttgattcgcgcgatccttccgcggttgtgtgttataaaaacgcaatgtacggcagcaccgaaacttccggcgtcgcatggaggcagcaaagcgccggcccggcatggacgccatttggcaacgccgaactatgggtaaatgaagacagctgcctggtagtcaagtctgattatatcaaggatccgtcgggtatttttgaaacagcggacctggtaaagatgcttccggacaagaggtttatattgatgggacgccttgattcggtggttaaaattgaaggaaagcgtatttccattcctgaagtcgaaaaccgcattacagagtcaggacttgtttcgggtgtatgtgtaatcgccctggaagatgtccgccagtaccttgccgccgcgctggtttttaacaacaaggggaaggaacgctttaacgggcttgagaagatcgacataaataaattctggagagagtaccttcttcaatattttgaaaacgtggttatccccaaaaaatggcgttatccggaaagcctgccccttgacgcgcaagggaagaaaaagaaagaagatattgagcttcttttctccggtgaaaaggaagctgcggataacgccattgttacaagcggcgcttttacaagcggcgctttaacgagcgaaggttttggcgcgctggacatggaaaaaattattgagaaaaccgaagattccgtcagcgtggaattttccattcccggtacaagcccgtattttgacggacattttccgggcttccccatcctcccggcggtagcccaggcggaattggttatccgtttcgcggcgcggtattttggaacgggcatcagtccctctgaaataaagcgttttaaatttaccaaattaatccggcctgacgcgcctcttctgctcacactgacaaaaaaagaaaaaacaatttcctttaatataagttctcctgaaaatgaaacagtttattcaacggggacagttattccggaggatacgtga

SEQ ID NO: 42328 - protein, 345 aa, Unknown
  Obtained from environmental sample
  DOMAIN (226)...(338): FabA-like domain
  misc_feature (1)..(345): Xaa is any amino acid
MSGYIPLSELKFDSRDPSAVVCYKNAMYGSTETSGVAWRQQSAGPAWTPFGNAELWVNEDSCLVVKSDYIKDPSGIFETADLVKMLPDKRFILMGRLDSVVKIEGKRISIPEVENRITESGLVSGVCVIALEDVRQYLAAALVFNNKGKERFNGLEKIDINKFWREYLLQYFENVVIPKKWRYPESLPLDAQGKKKKEDIELLFSGEKEAADNAIVTSGAFTSGALTSEGFGALDMEKIIEKTEDSVSVEFSIPGTSPYFDGHFPGFPILPAVAQAELVIRFAARYFGTGISPSEIKRFKFTKLIRPDAPLLLTLTKKEKTISFNISSPENETVYSTGTVIPEDT

SEQ ID NO: 42329 - DNA, 498 bp, Unknown
  Obtained from environmental sample
  misc_feature (1)..(498): n is a, c, g, or t
atgcccatgaaactaaaacttatttatccaaagtggaataaacttcccggacagactacatttaatcttcctccccacgggcctgtggtgttcgccgcttctctgcctgattatgttgacataaattttaccgatgaaaatgtccagaaccttgactttgatgaaagctgcgatcttgtagcagtctccatgatgttaagcacgcaggtaaagcggggctgggctatcgctgatgaataccgaaaacggggcaagcaggttatttttggcggtatttccactatgctgcacgccgaggaaaccatacagcacgcggactcggtatttttaggtgaagccgaaacccgtatggcacaggttatcaccgactggaaagagggccgcctgcaaaaggtgtacaattatatgtcacaacagccgccggttgaatcgatagacccggcccgcagggatctatatcagcgggaattgtcaaccacaagggctcggccgatctga

SEQ ID NO: 42330 - protein, 165 aa, Unknown
  Obtained from environmental sample
  misc_feature (1)..(165): Xaa is any amino acid
MPMKLKLIYPKWNKLPGQTTFNLPPHGPVVFAASLPDYVDINFTDENVQNLDFDESCDLVAVSMMLSTQVKRGWAIADEYRKRGKQVIFGGISTMLHAEETIQHADSVFLGEAETRMAQVITDWKEGRLQKVYNYMSQQPPVESIDPARRDLYQRELSTTRARPI

SEQ ID NO: 42331 - DNA, 1008 bp, Unknown
  Obtained from environmental sample
  misc_feature (1)..(1008): n is a, c, g, or t
gtgcttaaagaattgggcaaagctccctataaattccgccccaaagaagccatcgccataatgaacggaaccgccgtaatgaacgcggtcgccgcccttgctttttccgaagcggaatacctcgccgatctggcgtgtcgcataacagcgatgaattccatcgcccttaaaggcaacgcttatcattttcacaaacggctctttgagttaaagccccattcggggcaggctttggcggcggaaaaaattcgcgcgagcctgccggacgggatgcggggagcgcctgccgggtcctcgcgaattcaggatatgtattcgattcgctgcgccccccatgtaatcggtattttttacgatatgcgcgataccttgcgtaattttatcgagaccgagatgaacagcgccaatgataaccccctcattgatcctgaaacacaatccgtataccacggcgggcatttttacggcggccacatctgttttgcgatggactcgcttaaaaacatcgtcgccaatatcgcggatcttctggacaggcagctcgctttaatcgtggacactaaatttaaccggggccttccgccgaacctcaccggaacgcgcggggccgtcgcgtgcaatcacgggtttaaggccgtgcagatcgccgtttcttcctggactgccgaggcccttaaaaacacgatgcccatgagtgtattctcccgttctaccgaatgtcataaccaggacaaggtaagcatggggactatcgccgcccgcgattgcgtgcggatcaataaactgacttcccaggtaacagccgccctgctgttagccgcttttcaggctgtcgatctgcggttgaaaaaaggcgagttaaaaccctgcgacctgggggagacggaaaaaacctacaacgaaattggcgctttttttaaaccgcttgaagacgaccgtccgctggaaaacgatctgcgcaagaccttaaaattaatagaggagcggcattttagcctatgcccatga

SEQ ID NO: 42332 - protein, 335 aa, Unknown
  Obtained from environmental sample
  DOMAIN (1)...(311): Phenylalanine and histidine ammonia-lyase
  misc_feature (1)..(335): Xaa is any amino acid
MLKELGKAPYKFRPKEAIAIMNGTAVMNAVAALAFSEAEYLADLACRITAMNSIALKGNAYHFHKRLFELKPHSGQALAAEKIRASLPDGMRGAPAGSSRIQDMYSIRCAPHVIGIFYDMRDTLRNFIETEMNSANDNPLIDPETQSVYHGGHFYGGHICFAMDSLKNIVANIADLLDRQLALIVDTKFNRGLPPNLTGTRGAVACNHGFKAVQIAVSSWTAEALKNTMPMSVFSRSTECHNQDKVSMGTIAARDCVRINKLTSQVTAALLLAAFQAVDLRLKKGELKPCDLGETEKTYNEIGAFFKPLEDDRPLENDLRKTLKLIEERHFSLCP

SEQ ID NO: 42333 - DNA, 723 bp, Unknown
  Obtained from environmental sample
  misc_feature (1)..(723): n is a, c, g, or t
ttgaatatggaacaaactgagattaaagaaatagccggcagggctgcagttgatgcccttgttaaaagcggaatgaagctggggctgggaaccggttccacggcgattacggcggtaaggtacataggcgcgcttttacaggaagggagactctccggcattttggcggtttctacaagtttccaaacttcaatcgaatgtgaagaattgggcatccccctattcactttgaattcgagggagataaacgcaaagctcgatctctgtattgacggcgccgatgaagtggacactgaaaacaggctgataaaaggcggcggtggcgctttgttgcctgaaaaaatcgccgcctacgcttcggcttcttacgctatcgtggtcgatgaatcaaaaaccgttgaaaaccttggcgttaaatttcccgtgcccgtggaggtcgtcagcgaagcaagggtgagcgccgctctggcccttgaaagcttgggcgctgaggtaacacttaggcaggctctgcgcaaggccgggccggtcattaccgaccacggcaaccttcttttggacatacgcttcgcaaaagcacccgatccggttcttatggaaaaggaaatcaaccgtatccccggtgtggttgaaaacggtttcttcaccggccctcataacagacccctgcgcccaatcgtttttatcgcccacgctgacggtagtgtagagaagcgggtttag

SEQ ID NO: 42334 - protein, 240 aa, Unknown
  Obtained from environmental sample
  DOMAIN (54)...(236): Ribose 5-phosphate isomerase A (phosphoriboisomerase A)
  misc_feature (1)..(240): Xaa is any amino acid
MNMEQTEIKEIAGRAAVDALVKSGMKLGLGTGSTAITAVRYIGALLQEGRLSGILAVSTSFQTSIECEELGIPLFTLNSREINAKLDLCIDGADEVDTENRLIKGGGGALLPEKIAAYASASYAIVVDESKTVENLGVKFPVPVEVVSEARVSAALALESLGAEVTLRQALRKAGPVITDHGNLLLDIRFAKAPDPVLMEKEINRIPGVVENGFFTGPHNRPLRPIVFIAHADGSVEKRV

SEQ ID NO: 42335 - DNA, 1356 bp, Unknown
  Obtained from environmental sample
  misc_feature (1)..(1356): n is a, c, g, or t
atggcgggcgtgcccgtgatccttacggtaaggcgaaaccttgagggcggttactatgtgggcggggaaggttccaggatttccctattagcgaagggtctggcctacgccgctgccgatcaaagacggaattttgcctatgtagatcttgaggaagatctgaacgtaccgagccttgaagaagcagcccgtacctttgggactcgcattatccgatcctcgcacaacatggaaggggtggatgcggatctgaccggaaaaataatgaaactcagaagggtgggagacgagcttgttaaggtatcggtaacggctgactctttggcagatgtggtcaaggtatacaaggctgcaaaggaaacttccggcatagacaagatagttttatgcatgggggaatacggcattaacacaaggatattagccgagttcctgggttcccgcattagttacacatccctggcggttgactgcgtaaaatccgcggcgcctgggcagcttgagcctaaggtattggcggagctttaccgcttccgtgaaattaccaccaagacgaaaatcttcgcgatagcgggctttcctcttaaatttaccaaaagccccttgtttttcaatacagtgttcaggatggagcagaccgatgcggtttttatccccattatcgccgattccgttgaatctcttatcagcctggcagaggaaataggcatttcaggcctgtcaatttcagtcccgtataaagagaaaatacttccttatctgatcggcaggtcggaaaaggcgacttcaataggcgcttgcaacactctggtaaaagggcctgaaggctggatggggtacaatacggacgcccctggattttccgacagccttttggcttatatcggcaaaaaggatcttaagggcaaaaaagttaccattgtaggcgcgggggcggcggcgaaggcggcagcctatgaggtgagtcgattgaggggaaaagcccttatccttaaccgtactcccgctaaggcgcgcagtttggccgaaccctatcgttttgcctgggcggcctttgacagtcgcggcgctgttatgatggaaaaatattccgacattattattcaggcaagctcatccggaatggcgccgcacgaggatagcgacccgatagaattctataaatttacaggcaaagaagtcgtgatggactttatttatgaacccccaaagaccccttgcctgatgcgggccgaacgggcaggatgtaaaattctgaatggcagcgatttactgtataggcaggcccgctatcagtacgcatttttcatgaaccgggaatttcccccctcgcttgtttcccgcgtaaaattttag

SEQ ID NO: 42336 - protein, 451 aa, Unknown
  Obtained from environmental sample
  DOMAIN (1)...(175): Type I 3-dehydroquinase
  misc_feature (1)..(451): Xaa is any amino acid
MAGVPVILTVRRNLEGGYYVGGEGSRISLLAKGLAYAAADQRRNFAYVDLEEDLNVPSLEEAARTFGTRIIRSSHNMEGVDADLTGKIMKLRRVGDELVKVSVTADSLADVVKVYKAAKETSGIDKIVLCMGEYGINTRILAEFLGSRISYTSLAVDCVKSAAPGQLEPKVLAELYRFREITTKTKIFAIAGFPLKFTKSPLFFNTVFRMEQTDAVFIPIIADSVESLISLAEEIGISGLSISVPYKEKILPYLIGRSEKATSIGACNTLVKGPEGWMGYNTDAPGFSDSLLAYIGKKDLKGKKVTIVGAGAAAKAAAYEVSRLRGKALILNRTPAKARSLAEPYRFAWAAFDSRGAVMMEKYSDIIIQASSSGMAPHEDSDPIEFYKFTGKEVVMDFIYEPPKTPCLMRAERAGCKILNGSDLLYRQARYQYAFFMNREFPPSLVSRVKF

SEQ ID NO: 42337 - DNA, 1467 bp, Unknown
  Obtained from environmental sample
  misc_feature (1)..(1467): n is a, c, g, or t
atgacagaatggcacagcggcttttatgactgcgacactacaggggttgaaccggattttgccctggtaaaattcaagaagcttgcgggcggcggatacttcaagatcattaaccagtcggttcctcctgcgcttgcggccctgggctacagcgaggaagaaatagaagccatcaccgcctatgccaccgggcataaaaccttaaagggctgccctgccgtcaatgccgaaagcctggcggaaaaaggctttacctccgaagctatcggcctagcggaagaagcgctaaaaagcgccctcagcctggaagccgtatttaacccctggacgctgggcaaagattttatcgaaaagaaattaaaaatacctgatgcctctttttcgcagaacggcttcagccttttaaagcacctggggttttcattcgcagaaatcgaagaagcggagctatacgcctgcggaaccatgggccttgaaggtgcgccgggactcaagaaagagcattacagcgtttttgacaccgccaccccctcgggaaagcacggcaggcgttccatcccctggacagcccatgtggaaatgatggccgcctgccagcccttcatatcgggcgcgatttccaaaacaattaatatgcccaacgccgcgaactataaagacgtaaagggagcttatatgcttgcctggaaaagagcgctaaaggcagtcgccctttaccgcgatggttcaaaactgtcccagccgctttcttcaggtaatacctccggcactgacccgatagcggataccattctgagagtggaaaaatcccttgccgccggtattctacacgaagacaaaacagacagaaagaaaagcggggggaaaaccaggggcgtacggaagtccctgcctaataggagaagcggctatactcaaaagtctaaaatcgctggacattccattnttatacgcaccggcgaatacgatgacggcagcctcggagaaatttttcttgatatgcataaggaaggcgccgcgttccggagcctcttgaacagctttgccattgccgtttcgctcggcctgcaatacggcgtgcctctggaagaatacgttgacgcgtttaccttcagccgtttcgagcctaacggcattgtcaaaggccacgactatgtaaagatggctaccagtgtcattgattttattttccgtgatctggcgataagctatttaaagcgggtagagctaggccaggtaaagccggaggatctccttgccacagggacaaaaaccaaccgccgggcggaagacaggaatgaaaacccgatagcgccggaatcctggaatgatggggaagcgttcattcaggcaagaataaagggctacgaaggagacgcatgcccttcatgcggcagttttaccctgatacggaacggtacttgcatgaagtgcgacacctgcggcgaaacaacgggctgcagttga

SEQ ID NO: 42338 - protein, 488 aa, Unknown
  Obtained from environmental sample
  misc_feature (1)..(488): Xaa is any amino acid
MTEWHSGFYDCDTTGVEPDFALVKFKKLAGGGYFKIINQSVPPALAALGYSEEEIEAITAYATGHKTLKGCPAVNAESLAEKGFTSEAIGLAEEALKSALSLEAVFNPWTLGKDFIEKKLKIPDASFSQNGFSLLKHLGFSFAEIEEAELYACGTMGLEGAPGLKKEHYSVFDTATPSGKHGRRSIPWTAHVEMMAACQPFISGAISKTINMPNAANYKDVKGAYMLAWKRALKAVALYRDGSKLSQPLSSGNTSGTDPIADTILRVEKSLAAGILHEDKTDRKKSGGKTRGVRKSLPNRRSGYTQKSKIAGHSIXIRTGEYDDGSLGEIFLDMHKEGAAFRSLLNSFAIAVSLGLQYGVPLEEYVDAFTFSRFEPNGIVKGHDYVKMATSVIDFIFRDLAISYLKRVELGQVKPEDLLATGTKTNRRAEDRNENPIAPESWNDGEAFIQARIKGYEGDACPSCGSFTLIRNGTCMKCDTCGETTGCS

SEQ ID NO: 42339 - DNA, 909 bp, Unknown
  Obtained from environmental sample
  misc_feature (1)..(909): n is a, c, g, or t
atgcaaaaaatatacgttccgccaataaaaagtcaaggcataaaaacaaaactggtggagtggattaaagatggcgtttccaatatcaaatatgataggtggattgagccgtttatgggaactggcgtggtagcctttaatatccagccaaaaaacgtagttctatgcgataacaatttacacttgataaatttctataatgcagtcaaaagcaaaaaaataaccgccgaaaaagtccattcatttttgacaagcgaaggcaaaaagctattgcaaacagaaggagagtattattatgaagtgcgtgatagattcaacgattcgggcaatccgctggattttttattcctcaataggtcgtgctttaatggaatggtaaggttcaatagcaggggtaaattcaatgtgccgttttgcagaaagccaaacaggtttcagccagctttggtcacaaaaatttcaaaccaaatccgcaatatatcgcagattatagactatgggaattattcttttatatgccaagatttttccgagacaataaaaaatacaaatgaaagcgatattatctattgtgacccaccatacatagggcggcatactgattactatgattcttggtcggagagcaatgaattttttttgaataaacttttgctggagaaaggaacttttttcgtgctttctacttggctaaaaaatgactacagggaaaatccctatatccattccgtatggaaaaattgttttatctccactaaacagcatttttatcatattggggcaaaggaagaaaacagaaattctgtttatgaagctcttttggcaaattttcctttaaatacgaaagttaagacgaagaataaattgatagatgatttggatttgtttcatcaaaggaaaatgaggtaa

SEQ ID NO: 42340 - protein, 302 aa, Unknown
  Obtained from environmental sample
  DOMAIN (11)...(259): D12 class N6 adenine-specific DNA methyltransferase
  misc_feature (1)..(302): Xaa is any amino acid
MQKIYVPPIKSQGIKTKLVEWIKDGVSNIKYDRWIEPFMGTGVVAFNIQPKNVVLCDNNLHLINFYNAVKSKKITAEKVHSFLTSEGKKLLQTEGEYYYEVRDRFNDSGNPLDFLFLNRSCFNGMVRFNSRGKFNVPFCRKPNRFQPALVTKISNQIRNISQIIDYGNYSFICQDFSETIKNTNESDIIYCDPPYIGRHTDYYDSWSESNEFFLNKLLLEKGTFFVLSTWLKNDYRENPYIHSVWKNCFISTKQHFYHIGAKEENRNSVYEALLANFPLNTKVKTKNKLIDDLDLFHQRKMR

SEQ ID NO: 42341 - DNA, 834 bp, Unknown
  Obtained from environmental sample
  misc_feature (1)..(834): n is a, c, g, or t
ttgatggccganaaattgnaaaaatatatacaacaaaaaaagatgtttaaagaaaaactcaaagattttcttgagacaatagtctcttatgtaagtactaaaaacggtcaatggaatatcaaaggttttattgatatttacaaaaatatatatacaatatcttcggacacaaaaattgtatcgaaaatattggagattcacctttttcccaaaatactggaatttgcggaacaaaacaattataaaattgtgttggcggatcatcaaaattattaccctgatatttcttttatagataaagataacgatgccataaaatttgccgttgatttcaaaaccacttaccgaaatcctgacaataaggaactgtgtaacgggtttactctaggttctcatggtgaatactttataaatagatccagcagaaaaaatatacactttccgtatgatgagtatattgggcatttttgttttggaataatatacgatagaattaatagtgaaaaaattattgaaacaactacatataaaatacaacaattaatgtctataccatctgttgttgaaaattttgatttctttattgctgaaaaatggaagatcgccagtgataaaagcggaagcggaaatactgctaacatcggcagtataaacaacattgatgatattaagaatgaaaacggaatgttttcaaaactaggagaaaaatggtttgacgattactggatgaactacagaaaaataccattgaatagcggaaagagaattgccaatttagaagaatttgtgaaatatcgtggtggcaatgtttctaagatagtagccaagaggtaa

SEQ ID NO: 42342 - protein, 277 aa, Unknown
  Obtained from environmental sample
  misc_feature (1)..(277): Xaa is any amino acid
MMAXKLXKYIQQKKMFKEKLKDFLETIVSYVSTKNGQWNIKGFIDIYKNIYTISSDTKIVSKILEIHLFPKILEFAEQNNYKIVLADHQNYYPDISFIDKDNDAIKFAVDFKTTYRNPDNKELCNGFTLGSHGEYFINRSSRKNIHFPYDEYIGHFCFGIIYDRINSEKIIETTTYKIQQLMSIPSVVENFDFFIAEKWKIASDKSGSGNTANIGSINNIDDIKNENGMFSKLGEKWFDDYWMNYRKIPLNSGKRIANLEEFVKYRGGNVSKIVAKR

SEQ ID NO: 42343 - DNA, 729 bp, Unknown
  Obtained from environmental sample
  misc_feature (1)..(729): n is a, c, g, or t
gtgttccacattaatccaaaatataacgcaagcacttatgatcattttgtaatggaatatgatttaagcgcatttataggaaagaaaatcggcgttgaaatgtcttttgacgtttggataaataaaggagcaaggatcgcatggcaaatgcttgtttctcctgattatcctgtggtggcaggttatattgaaccaacttatttcctgcctgcaaatacatggaacactatatcgggaaatactatcgttactgttccccaaagcggtattttatatctttcgggaatgcaaattaacggtgcggaagcatattttgccaacgcatcgcttacgattaccgaaggcacaagcgcaccggatactgcggttaccttaaacagcgtaacagcggacggctccgcttccgctaagacaacacagttgacgcttacctttagtcaggcgattaccggtcttaacgccgccaacatcaatcttggaagcgaaatatcgggactgacaaaaggaactctcagcggttcgggaccgacctacacattgcctgttaccggatttacctccggcggaactttgagcgtatcggtaacaaagttgggttacaacataacaccgtcaaaaactgtaactatttacggcggtagcggaagcggcggtggtggcggcgatggagacggccgcacatttaacaactttgacggcttaaaagattggttaaacaacaaaaaataa

SEQ ID NO: 42344 - protein, 242 aa, Unknown
  Obtained from environmental sample
  misc_feature (1)..(242): Xaa is any amino acid
MFHINPKYNASTYDHFVMEYDLSAFIGKKIGVEMSFDVWINKGARIAWQMLVSPDYPVVAGYIEPTYFLPANTWNTISGNTIVTVPQSGILYLSGMQINGAEAYFANASLTITEGTSAPDTAVTLNSVTADGSASAKTTQLTLTFSQAITGLNAANINLGSEISGLTKGTLSGSGPTYTLPVTGFTSGGTLSVSVTKLGYNITPSKTVTIYGGSGSGGGGGDGDGRTFNNFDGLKDWLNNKK

SEQ ID NO: 42345 - DNA, 717 bp, Unknown
  Obtained from environmental sample
  misc_feature (1)..(717): n is a, c, g, or t
ttggattcggggcttcttgaggcgtaccgcccgaaaggcgccgaaaaaattttcaacgagcttgttctggacgttaattttcacgtaacgccgttcgattacagttacttcgccattgtttacgattcggaaactgttatcgcgccgtggtctcttgaaagtttgacatttccccaattcaaacagaaattgatcctgattgatccgcgcacttcctcgcccgggcttggcttctttgcgtgggtaaaagaagtttacggcaatgattggcaggattactggcggcggctccggccctcgatactgacagtcgccggcggatggagttcagcttacgggctttttacgcgtggagaggcgcctcttgttctatcttacaccacaagccccggataccatcttgagtacgaagatacggagcgctacaaagccgccatttttacggacggacacgcattgcagatagaagccgcagggcttttaaaaaacgcgaaaaataaagccaacgcgaaggcgtttatggattttatgataagcccggattttcaaaatatcattcctttgacaaactggatgtacccggtaattgatattccactgcccgcttctttcagaataaatcctaagagcgataagcctcttttgccccaagccgcgacagaggcagaacttaacgaatgggcggcgctgatgttaaacgccgataaaaacaaatga

SEQ ID NO: 42346 - protein, 238 aa, Unknown
  Obtained from environmental sample
  misc_feature (1)..(238): Xaa is any amino acid
MDSGLLEAYRPKGAEKIFNELVLDVNFHVTPFDYSYFAIVYDSETVIAPWSLESLTFPQFKQKLILIDPRTSSPGLGFFAWVKEVYGNDWQDYWRRLRPSILTVAGGWSSAYGLFTRGEAPLVLSYTTSPGYHLEYEDTERYKAAIFTDGHALQIEAAGLLKNAKNKANAKAFMDFMISPDFQNIIPLTNWMYPVIDIPLPASFRINPKSDKPLLPQAATEAELNEWAALMLNADKNK

SEQ ID NO: 42347 - DNA, 1074 bp, Unknown
  Obtained from environmental sample
  misc_feature (1)..(1074): n is a, c, g, or t
atgattaaagcatttttagatgagaattttttacttgaaagtgagacggcgcgtggtttgtataaggcggctaaggacgagcctgtttttgattaccattgccatcttattccgtctcagatagcggaaaataaaaagatgggcgatcttgctgacgcgtggctttcgggagatcactataaatggcggatgatgcgagctttgggtattgaagaaaaatatattactggtgacgcttcaggttacgagaaatacatggcttgggcgcgtactgtggaaaatttgattgggaaccctctttaccattggacgcatcttgaattacaacgttactttgacatttacgagccacttactgaaaaaagcgcacccgcaatttgggaaaaagcaaacgcccttcttcaaacgccgcaattatcagtaaaaggcatctttgaaaaaatgaaaatttacgctgtaggcacgacggacgatcccgttgattcgcttgaacaccaccgcgctattgctgaaggttccgcccctatcggaaaaatagggacaaaagtaattcccactttccgccccgataaagctcttgaaattaacgattcccattatgtcgagtatattctgtcattgtctgaaacaagcgggataaacattaaaactcccgatgacgttcttgccgctcttgaaaagcggttgaatcactttatttcaatgggctgccgcgcttctgatcacgggcttgaatatgttccatatattgaatcttcaataaaagatgttgaaaaaacttttaaaaaagtcatggcaggaaaagaagcgtcaatcgaagaggctgacgcttacaaaacattgatgctcgcatctttgggtaatatgtatgccaaaaaaaatattgtaatgcagcttcatctttcatgtattcgcaatgttaatacaaagcaattaatcaaattaggcataaatacgggttttgacgccgttcacgacagagcgttatgtgaaaatatctccgcccttctagatttaatgagtcttggcggcgaaaacgcaaacggtcttccaaaaacattctctattcattaa

SEQ ID NO: 42348 - protein, 357 aa, Unknown
  Obtained from environmental sample
  DOMAIN (2)...(357): Glucuronate isomerase
  misc_feature (1)..(357): Xaa is any amino acid
MIKAFLDENFLLESETARGLYKAAKDEPVFDYHCHLIPSQIAENKKMGDLADAWLSGDHYKWRMMRALGIEEKYITGDASGYEKYMAWARTVENLIGNPLYHWTHLELQRYFDIYEPLTEKSAPAIWEKANALLQTPQLSVKGIFEKMKIYAVGTTDDPVDSLEHHRAIAEGSAPIGKIGTKVIPTFRPDKALEINDSHYVEYILSLSETSGINIKTPDDVLAALEKRLNHFISMGCRASDHGLEYVPYIESSIKDVEKTFKKVMAGKEASIEEADAYKTLMLASLGNMYAKKNIVMQLHLSCIRNVNTKQLIKLGINTGFDAVHDRALCENISALLDLMSLGGENANGLPKTFSIH

SEQ ID NO: 42349 - DNA, 315 bp, Unknown
  Obtained from environmental sample
  misc_feature (1)..(315): n is a, c, g, or t
atgggcggttttcaagactcaagctgtaccggaaaaatgcaattgggttcggcgtggtggttctgcgatcacagggacggcatggaagagcaaatgcgcgtccttgccaacttaggaatgttacccgcctttgtagggatgctgacggacagccgaagcttcctctcctacccccgccacgaatacttccgcagaattatgtgcaacctaatcggcaagtgggtagagaatggggagtatccgaatgacatgattaaacttgaaaaaatagtacgcgatatttcatttggaaacgcaaaaaagtattttaaatga

SEQ ID NO: 42350 - protein, 104 aa, Unknown
  Obtained from environmental sample
  misc_feature (1)..(104): Xaa is any amino acid
MGGFQDSSCTGKMQLGSAWWFCDHRDGMEEQMRVLANLGMLPAFVGMLTDSRSFLSYPRHEYFRRIMCNLIGKWVENGEYPNDMIKLEKIVRDISFGNAKKYFK

SEQ ID NO: 42351 - DNA, 309 bp, Unknown
  Obtained from environmental sample
  misc_feature (1)..(309): n is a, c, g, or t
gtggccacaacgttacgcgaagttcattccaccaaccgccattcatggagcgcggtactgtggcttgacggtaaaacgtatcaggccccagccgctgaacttgacgtatacgaccgcgtaggcggcggcgacggctttgccgcaggcctcttctacggacttttatcaggcaaatcccccgaagactctttaagactaggctgggcgcacggcgcgttagtaaccaccacaccaggagacacttcgatgttcagtcttgatcaagttgaagcgttcgcgaagggcggctcggcgagaatacagagatag

SEQ ID NO: 42352 - protein, 102 aa, Unknown
  Obtained from environmental sample
  misc_feature (1)..(102): Xaa is any amino acid
MATTLREVHSTNRHSWSAVLWLDGKTYQAPAAELDVYDRVGGGDGFAAGLFYGLLSGKSPEDSLRLGWAHGALVTTTPGDTSMFSLDQVEAFAKGGSARIQR

SEQ ID NO: 42353 - DNA, 1497 bp, Unknown
  Obtained from environmental sample
  misc_feature (1)..(1497): n is a, c, g, or t
gtgcattttatgggcaacgaggttttgtcaactgcatttttacaggcgcaggttcgtttggacagcggaaaggtttttgactactatctatacgaagctaccagaaaagcgataatggattcttatagagaagacggctacctgtttgtgcagatggatgagacaaaaatttttgtgaacgattccattgtaaacttaagttatgccttgcgcgaaggcttgcccgcgcaaatacacagggttcatataaggggcaacacaaaaacaaaagacaaggttattcgcagggaggtaaaactctacccaggcgacacttacaggcaatccctcttagaacgtagcttcagagacatattgcaactgaattattttgacaatgtggtgccggatattcagcccgtggccgagcaggatgttgacttggttttctcggttgtggaacgcgaggctggcacggggcagtttggcgcgggagcagcgtatagccaagcggacggtttggtatttacgcttaacctctctatccccaactgctgcatgggagatgggcaagttgccagcatgaacgcagaatatggagtggataaaaaaggcatatctatgggttttgccgaaccctggctttttgatacccccactaaaattggagtgtctgcgaattacacttggtggagaggttactattggccagatgtaacgcgctacggaggcagtgtttatatagggcgcagactcacttggccagacgattatttttatgcgcaaacaggcatcacctggcagagaaatgagcaaggaccaaacgtaccaggtagccttattctctttacaggaaacgaagcctcgcttgactttgtaataattagagacgataagaatttgcctattttcccaaccgagggttctcgctatgtgctatctacttcatgggctattccgcgtttcttggctggagattttagttttgtgcaaacagatttaagcataaaatggtggttcccaatttattccgataaactagcccttggcatagtgaatgaatatggtgttataaccggaagttctctgcaataccgcactctttaccaaatgggcggagcccttggctacaagggtttgatgcgtggttatacttctggttctattggagcattcaggcttggtcgcagctatcagtattttggggcagaactaacatggcctattgcgccaaatcgtttttatttgctccctctgttctttgatgcaggaaatgtgtttggcgagcgttattccacaagcgaaaaagttagcaaagatattggttcaccgctacgcgaatgggatatttcttcgcttaaaagggacattggatttggtttccgcgttatagttccaatgcttggcattataggctttgattttgcgtggcctcttgacccaggcgaaattggcggttttgatgcaccaaacgtcggttcaatggaatttaactttattatagggcagggattttaa

SEQ ID NO: 42354 - protein, 498 aa, Unknown
  Obtained from environmental sample
  DOMAIN (181)...(498): Surface antigen
  misc_feature (1)..(498): Xaa is any amino acid
MHFMGNEVLSTAFLQAQVRLDSGKVFDYYLYEATRKAIMDSYREDGYLFVQMDETKIFVNDSIVNLSYALREGLPAQIHRVHIRGNTKTKDKVIRREVKLYPGDTYRQSLLERSFRDILQLNYFDNVVPDIQPVAEQDVDLVFSVVEREAGTGQFGAGAAYSQADGLVFTLNLSIPNCCMGDGQVASMNAEYGVDKKGISMGFAEPWLFDTPTKIGVSANYTWWRGYYWPDVTRYGGSVYIGRRLTWPDDYFYAQTGITWQRNEQGPNVPGSLILFTGNEASLDFVIIRDDKNLPIFPTEGSRYVLSTSWAIPRFLAGDFSFVQTDLSIKWWFPIYSDKLALGIVNEYGVITGSSLQYRTLYQMGGALGYKGLMRGYTSGSIGAFRLGRSYQYFGAELTWPIAPNRFYLLPLFFDAGNVFGERYSTSEKVSKDIGSPLREWDISSLKRDIGFGFRVIVPMLGIIGFDFAWPLDPGEIGGFDAPNVGSMEFNFIIGQGF

SEQ ID NO: 42355 - DNA, 978 bp, Unknown
  Obtained from environmental sample
  misc_feature (1)..(978): n is a, c, g, or t
ttgccgccatcatggaaaggatttaatctgctcaatatgttttattcaggcgggcgggaaacggatatgccttttaatgagaaagaattcaaaatgatgtctgactggggattcaactttgtaagaataccgattgactacaggattctgataaggggaaacgactggaataatatgaacgagtccgcgatgcggcgcctggacaaagccgttgaatacggaattaagtatgatatacatatatgccttaatttacacagagggcccggatatacggtggcttctccggcagaaactgcgaatctttggactcaggcaaagccccaggaggcttttgcgcgcatgtggggattttttgccgggcgttataaaaatgtcccgaatgagtaccttagctttaatttcctgaacgagcctgcgggcgttgatgaaaaaatctatgccgatgtaataaaaaaagccgccgacgcgatacgcgcgagtgatcctgaccgcgttttaatagcggacgggcttgattacggcgttattccgtcttctttaataaaggaactgggcatagcgcaagcgacaagaggttatgcgccgcattccatcacccattataaggctggctgggtagaaggatcggataaattaccccttcccacatggccggtcattgaaaacgcccatatacaagacagggaatggctgaaaaatacatatttggaaaagtgggatgaattggtaaaaagcggcggcggggcgatggtaggcgaatggggagcgcataacaggacgccccatgatgtcgttctacgctggatggaagacaatcttatgaattttaaagaggccggaatgggctgggcgctctggaatttaaccggttctttcggcgttctgaacagcggaagagacgacgtaaactatgaaaatttcaacagctacaaacttgacagaaagatgctggagcttctgcaaaaatacctttaa

SEQ ID NO: 42356 - protein, 325 aa, Unknown
  Obtained from environmental sample
  DOMAIN (8)...(297): Cellulase (glycosyl hydrolase family 5)
  misc_feature (1)..(325): Xaa is any amino acid
MPPSWKGFNLLNMFYSGGRETDMPFNEKEFKMMSDWGFNFVRIPIDYRILIRGNDWNNMNESAMRRLDKAVEYGIKYDIHICLNLHRGPGYTVASPAETANLWTQAKPQEAFARMWGFFAGRYKNVPNEYLSFNFLNEPAGVDEKIYADVIKKAADAIRASDPDRVLIADGLDYGVIPSSLIKELGIAQATRGYAPHSITHYKAGWVEGSDKLPLPTWPVIENAHIQDREWLKNTYLEKWDELVKSGGGAMVGEWGAHNRTPHDVVLRWMEDNLMNFKEAGMGWALWNLTGSFGVLNSGRDDVNYENFNSYKLDRKMLELLQKYL

SEQ ID NO: 42357 - DNA, 564 bp, Unknown
  Obtained from environmental sample
  misc_feature (1)..(564): n is a, c, g, or t
atgatacgaggcggagatattgtcaaaggaagctgtcttttgcagaaagggcagccgtttctggtagtagagcgtgaatttcacaaccccggaaagggaactgccgttgccaggataaaaatgaaaagcattaaagacgggtctgtcctgtctctgaccatccccacgcagcaggaaattgaggatgcccaggttgatataaaaggctgccagtaccagtactctgatcaggataactatcacttcatggacagcgaatcctatgagcagtacgaggtgcctatagctgataatccggataaaaaattctatcttaaagacggagattcttacgagcttactatctgggagggaaaggtaatcgacatcaaaataccttacaaggtcgtatttaccgtggcggaaagcgagaactacgttaaaggcgacacagtttccggggccaccaagcctgttgtaaccgaaaccggcctcacggtgcgcgtaccgctgtttatcaagcaaggcgagaagatccttgtcaatactgagaccaacgaatacgtggaacgcgtaaacagttag

SEQ ID NO: 42358 - protein, 187 aa, Unknown
  Obtained from environmental sample
  DOMAIN (3)...(60): Elongation factor P (EF-P) KOW-like domain
  misc_feature (1)..(187): Xaa is any amino acid
MIRGGDIVKGSCLLQKGQPFLVVEREFHNPGKGTAVARIKMKSIKDGSVLSLTIPTQQEIEDAQVDIKGCQYQYSDQDNYHFMDSESYEQYEVPIADNPDKKFYLKDGDSYELTIWEGKVIDIKIPYKVVFTVAESENYVKGDTVSGATKPVVTETGLTVRVPLFIKQGEKILVNTETNEYVERVNS

SEQ ID NO: 42359 - DNA, 510 bp, Unknown
  Obtained from environmental sample
  misc_feature (1)..(510): n is a, c, g, or t
ttgcttaactcgccggaaactaattctaaagagctgaagctttacatcgtaaacaagagggtcgatgaaatcctgggtaccctttaccgtcagaccatgtttgccgaattcgaaaagcgcacccatgagctggaagaaagcggcgtcccgttgacggtcaatgtgtttagggaggaataccgaaagctgcttgaaaaatactttggaagcgaaatggttttggaaaaagaaagcgatctggagggcttaaggattcctcacttttacaatgctttttacgtgtacaagtactcaaccggcatttccgcctcccttgccctcgccgagcgcgtcctttcaggcggcgaaaaagagcgggcggattacttcggctttttgaagtcggggggctcgcgtttccccattgaatcgctaaaggccgccggggtggatatgtcttccccagcgccggtggaagcggcctgcaaagtttttagccgcctggtcggagaactggaaggactgctttag

SEQ ID NO: 42360 - protein, 169 aa, Unknown
  Obtained from environmental sample
  misc_feature (1)..(169): Xaa is any amino acid
MLNSPETNSKELKLYIVNKRVDEILGTLYRQTMFAEFEKRTHELEESGVPLTVNVFREEYRKLLEKYFGSEMVLEKESDLEGLRIPHFYNAFYVYKYSTGISASLALAERVLSGGEKERADYFGFLKSGGSRFPIESLKAAGVDMSSPAPVEAACKVFSRLVGELEGLL

SEQ ID NO: 42361 - DNA, 726 bp, Unknown
  Obtained from environmental sample
  misc_feature (1)..(726): n is a, c, g, or t
gtgcgggcggtggcgaagaaaaagcgtagtaccgtggcggcggcgtccgccgcaactgcggcggtggtcgcggacgtacccaagcgtcgtccgcggcgcgttctcattctgtcaatagcgtttctctgcgccctctgtttgattcagttttggggtatcattttcggcggaaggaatttctgggaggacgtcgtggaactgcagttcccatgccgcgtcttcgctaaactggcgttctttaagggcgagttccctcactggaatcctttcactttcggcggaatgcccttcttcgcctccggcgtggagatgctgtacccgttccatttgctcctatcgctaatgccggtgggcaacgcggcgctttggtacttgacgcagacggtgatagtgctgcacgtgctgatagcaggaatctgcatgcgcgcctacttgcgttttcgcggacgttcgaacgtcgcgtcgctttttggcgcggtatcctttatgctgggcgggtatatcgttacgcacgttatccacgcgcctatcttctatatagcggcatggttgccgcttatgttgttaatcatggaaaagggcatacgcgatgttaagccgcattacatggtgatgggcgggttgattttgggggcggtcatgtgtgtgggacacgtgcaggttatgttctacgcggtcgtctttttactgacatacgcgttgtttctctcttgtcaatgcggttga

SEQ ID NO: 42362 - protein, 241 aa, Unknown
  Obtained from environmental sample
  SIGNAL (1)...(24)
  misc_feature (1)..(241): Xaa is any amino acid
MRAVAKKKRSTVAAASAATAAVVADVPKRRPRRVLILSIAFLCALCLIQFWGIIFGGRNFWEDVVELQFPCRVFAKLAFFKGEFPHWNPFTFGGMPFFASGVEMLYPFHLLLSLMPVGNAALWYLTQTVIVLHVLIAGICMRAYLRFRGRSNVASLFGAVSFMLGGYIVTHVIHAPIFYIAAWLPLMLLIMEKGIRDVKPHYMVMGGLILGAVMCVGHVQVMFYAVVFLLTYALFLSCQCG

SEQ ID NO: 42363 - DNA, 480 bp, Unknown
  Obtained from environmental sample
  misc_feature (1)..(480): n is a, c, g, or t
ttgatgttggaacaagaacagaagcaagacttgccgcaacagcgccacgccagccgtgagttggcgctgcgtacgctttacgcccacgaggtggacaccggcgggtcttgggagtctatgcttgagagtatcgcggagaatgatcagcttggggctaaggtgataaagtatgcccgaacattggtggacgccgcggtgaagaatcgcgagcccatagatgctataatcgcgagaaaggcggtcaactgggagttgcgcagaatggcggcggttgacaggaatgtgctgcggatggccacggccgagctaatgtacgttcgggagcaggtgccgtttaaggttgtgatcgacgaggcggtggagcttgccaagacctacggtaccgatgattcgggcaaatttgtgaacggtattttagactccatacgcagggagttgtatcggaaagagggtgcgggcggtggcgaagaaaaagcgtag

SEQ ID NO: 42364 - protein, 159 aa, Unknown
  Obtained from environmental sample
  DOMAIN (16)...(146): NusB family
  misc_feature (1)..(159): Xaa is any amino acid
MMLEQEQKQDLPQQRHASRELALRTLYAHEVDTGGSWESMLESIAENDQLGAKVIKYARTLVDAAVKNREPIDAIIARKAVNWELRRMAAVDRNVLRMATAELMYVREQVPFKVVIDEAVELAKTYGTDDSGKFVNGILDSIRRELYRKEGAGGGEEKA

SEQ ID NO: 42365 - DNA, 465 bp, Unknown
  Obtained from environmental sample
  misc_feature (1)..(465): n is a, c, g, or t
atgccaatcgtagtgcagggagtgtttaacggagcgggtagaaatttcggcatagtggccgcccgcttcaacgattttatcgtcggcaagttgcttgagggcgcgtacgattgtttggagcgccacggggtatcgcttgacgatgtgacggtctgctgggtgccggggtcgtttgagataccggcggcggtgcagaggatggcgcgttcaaaaaaatacgacgccgtaatcgcgctcggcgccgttattcgcggaagcacgccgcacttcgactatgtggcgtcggaggtgtctaagggggtcgccaaagtaagcttggacgaaaaggtgccgataatattcggtgttcttacgacggacactatagagcaggctgtggaacgagccggtacgaaagccggtaataaaggttgggacgccgctttggcggcgttggagatggcggatttgtttacgaagatttga

SEQ ID NO: 42366 - protein, 154 aa, Unknown
  Obtained from environmental sample
  DOMAIN (11)...(154): 6,7-dimethyl-8-ribityllumazine synthase
  misc_feature (1)..(154): Xaa is any amino acid
MPIVVQGVFNGAGRNFGIVAARFNDFIVGKLLEGAYDCLERHGVSLDDVTVCWVPGSFEIPAAVQRMARSKKYDAVIALGAVIRGSTPHFDYVASEVSKGVAKVSLDEKVPIIFGVLTTDTIEQAVERAGTKAGNKGWDAALAALEMADLFTKI

SEQ ID NO: 42367 - DNA, 459 bp, Unknown
  Obtained from environmental sample
  misc_feature (1)..(459): n is a, c, g, or t
atggaatacccaaaaaagtttttaggctcggacatcgaaatagcccaatcagtgtttcccgaatacgccctgcatattgacgaggtggcaaaaagagcggaaattcctgaaaaatatatcgaacattacggaaaatacaaggcaaaagtaaactacagccttcttaacgataataaagataaaaaagacggaaaattgatccttgtaacagctattaatcccactcccgcaggggaaggcaaaacaaccacgacggtgggacttgcggacggtctgacattaaccggaaaaaaaacgatagcggctcttagagaaccttctcttggtcccgtattcggcgttaagggcggagcggctggcggcggctgggcgcangttattcctatggaagatattaatttacattttacaggcgattttccgctatcggagcggcgaacaatctgcttgccgctatga

SEQ ID NO: 42368 - protein, 152 aa, Unknown
  Obtained from environmental sample
  misc_feature (1)..(152): Xaa is any amino acid
MEYPKKFLGSDIEIAQSVFPEYALHIDEVAKRAEIPEKYIEHYGKYKAKVNYSLLNDNKDKKDGKLILVTAINPTPAGEGKTTTTVGLADGLTLTGKKTIAALREPSLGPVFGVKGGAAGGGWAXVIPMEDINLHFTGDFPLSERRTICLPL

SEQ ID NO: 42369 - DNA, 1185 bp, Unknown
  Obtained from environmental sample
  misc_feature (1)..(1185): n is a, c, g, or t
atgaacgaccgacagcttcgttttgtgcttgacggtttgggaggaaggtcaaacggcttcccccgtgaggacggtttcgacattaccgtcgcttctgaaataatggctatcctttgcctagcttccgatattgacgatcttaaaaaccgtctcgggcggattatcataggctacacttacggaaaagtttccgatggaagcgaacagcctgtaacagcggctcagcttaaagcccagggagcgatggcggctcttcttaaagacgcccttaaacccaatctagcgcaaacgcttgaggggaatccagcattaattcacggcggacctttcgccaacatcgcacacggctgcaattcaatcatggcgacccgcctagcgcttaagtgcgccgactatgttgtaacggaagcgggtttcggcgctgacctgggcgcggaaaaatttctggacatcaaatgccgttttgcagggttcaagccttcggcggttatcattgtagcgacaatccgcgcgctaaaatcccacgggggagcgggcaagactgagcttgataaagaaaatttagaccttcttgaaaaagggcttccgaatcttttacagcatgtcgaagatatcacacaggtttacaaactccccgccattgtcgccatcaacgctattccgaaagacacaaaggcagagttggagttagtgaaaaataagtgtaaagcgttaggcgtaaacgccgccatttccgaagtttgggcaaaggggagtgaaggtggagtcaagcttgccgaagaagtagtgcgcctttgcgaacaacctaacaattttgagtttgcctatgacgttaatctttccattaatgaaaagattgagacaatagcaaaaaatatttaccatgccgatagcgtggtcattttgcataacgcccagaaacagataaatcaaattgaaaaaatgggtcttgataaagtcccaatctgcatggcaaaaacccaatacagcttttccgatgacgccactcttcttggcgcccccaggggatggcgcttaacagtaagggatgtaaaaatatccgccggcgcgggctttatagtggccctaacaggcgaaataatgacaatgccggggttgcctcctgttccttctgccgaaaagattgatattgacagcaatggaaaaatttctgggcttttctga

SEQ ID NO: 42370 - protein, 394 aa, Unknown
  Obtained from environmental sample
  DOMAIN (1)...(394): Formate--tetrahydrofolate ligase
  misc_feature (1)..(394): Xaa is any amino acid
MNDRQLRFVLDGLGGRSNGFPREDGFDITVASEIMAILCLASDIDDLKNRLGRIIIGYTYGKVSDGSEQPVTAAQLKAQGAMAALLKDALKPNLAQTLEGNPALIHGGPFANIAHGCNSIMATRLALKCADYVVTEAGFGADLGAEKFLDIKCRFAGFKPSAVIIVATIRALKSHGGAGKTELDKENLDLLEKGLPNLLQHVEDITQVYKLPAIVAINAIPKDTKAELELVKNKCKALGVNAAISEVWAKGSEGGVKLAEEVVRLCEQPNNFEFAYDVNLSINEKIETIAKNIYHADSVVILHNAQKQINQIEKMGLDKVPICMAKTQYSFSDDATLLGAPRGWRLTVRDVKISAGAGFIVALTGEIMTMPGLPPVPSAEKIDIDSNGKISGLF

SEQ ID NO: 42371 - DNA, 903 bp, Unknown
  Obtained from environmental sample
  misc_feature (1)..(903): n is a, c, g, or t
atgcggggagtgacagacatcaaacctaaacccccgttcattacatcggaattgcagaagtccgcggcaaaccggcttggttatacgtcacggaaaaccatgcaggtggcccagcagctttacgaaggggtgaatatgggctccacgcgcatcggccttatcagctacatgaggacggattcggtgcgtgtgtcggaaaccgcccttacggaactgcgggaatggctcggcaagaaccaccccaatgagctgcccgaaaaaccgctggagtatacttccgggaagaaagcccaggacgcgcacgaggcgatacgcccgacctatgtcagctatactccggattcggtcgccgagtacctgaacagggaccaactcaggctgtacacgataatctgggaacgctttgtttcaagccagatgaccagcgccaaaacccgcaccgtcagcgtcgagataaaggccgtttcggccaaagccgcctccggcggtggcgacgaagggcttttcagggtttccgggacaaaacttgttgaaaaaggtttttacaaagtcatcaaactgctctcgtcgaaagaagagaagggaaatccctatcctccgcttaaagccggggacaaggtcgccattgataaattccatcccgagcagcatttcacgcagggcccgccccgttataccgaggcttccattattgacattctgcgtgagaaggaaatcggcaggccctcgacttacgcccccattatttccgtgctgctggaccgctattatgttacgcgatcaaacaaacagcttgtccccactctgcttggaagaaaatatgcgagatgctggttgagtattttcccggttatgttgacgttgattttacggcttctatggaatcaaagctggacaaggtag

SEQ ID NO: 42372 - protein, 300 aa, Unknown
  Obtained from environmental sample
  DOMAIN (2)...(296): DNA topoisomerase
  misc_feature (1)..(300): Xaa is any amino acid
MRGVTDIKPKPPFITSELQKSAANRLGYTSRKTMQVAQQLYEGVNMGSTRIGLISYMRTDSVRVSETALTELREWLGKNHPNELPEKPLEYTSGKKAQDAHEAIRPTYVSYTPDSVAEYLNRDQLRLYTIIWERFVSSQMTSAKTRTVSVEIKAVSAKAASGGGDEGLFRVSGTKLVEKGFYKVIKLLSSKEEKGNPYPPLKAGDKVAIDKFHPEQHFTQGPPRYTEASIIDILREKEIGRPSTYAPIISVLLDRYYVTRSNKQLVPTLLGRKYARCWLSIFPVMLTLILRLLWNQSWTR

SEQ ID NO: 42373 - DNA, 564 bp, Unknown
  Obtained from environmental sample
  misc_feature (1)..(564): n is a, c, g, or t
atgctggttgagtattttcccggttatgttgacgttgattttacggcttctatggaatcaaagctggacaaggtagaggaaagccagttgaaatggcccgatatgcttaaggagttttgggggcctttcaaagcccgcgttgacgaagtcggtaaaaccctggagtccttcaaaggttctctggacgagccgactgattatgtatgcgaaaaatgcggcaaacccattgtaaaaaaacttggacgcaacggttttttcctcgcctgtaccggctttcccgaatgccgcaatacaaggtcggttcctcttgctatatgccccaaatgcggcggcgatgtcgtcgcgcgcaagacaaagggcaggggaaaggaattttacggctgcgctaggtaccctgaatgtgattttgtcagccactacaagccgataagccagaactgccccaaatgcggcaagttcatggtggaaaaatacgacaagaaaaacggcagccataaggcgtgcataaatcctgaatgtgattatttacacagcgcggatgacgcagatgaggcaccgcaataa

SEQ ID NO: 42374 - protein, 187 aa, Unknown
  Obtained from environmental sample
  DOMAIN (144)...(182): Topoisomerase DNA binding C4 zinc finger
  misc_feature (1)..(187): Xaa is any amino acid
MLVEYFPGYVDVDFTASMESKLDKVEESQLKWPDMLKEFWGPFKARVDEVGKTLESFKGSLDEPTDYVCEKCGKPIVKKLGRNGFFLACTGFPECRNTRSVPLAICPKCGGDVVARKTKGRGKEFYGCARYPECDFVSHYKPISQNCPKCGKFMVEKYDKKNGSHKACINPECDYLHSADDADEAPQ

SEQ ID NO: 42375 - DNA, 954 bp, Unknown
  Obtained from environmental sample
  misc_feature (1)..(954): n is a, c, g, or t
gtgacagaaggggcggcagtgattacggattatctttcttatcttgaggcggtgcgggggctttccgagcggacgcttgaggcttatggggatgatctgcgcatgtttgccaattactgcgataatcatggcatcgatcctgaaaaggccagttcgcacgaggtgcggggttttattgccgatttgagttttgaacgggcctccgcggcgagcgtgaaccgcaggctttcttctgtccgggggttttaccgctggctgaccaaatttcgcgggcgtgttgataatccctgcgacggcggaccgggtgggttgctccgcaatgtaaaaacgccgcagaccttgccttctgtcttgtgggaagacgagatggcggattttgcggatctgcccgacgagaagaaaatgctgtggccggccagggacaaagctttgattttaactatgtattccgcggggatgcgtatttcagaattggtttcgttaaccatgaaaaatacgaccggtaacatggagggggcgagaataacaggtaagggcggcaaagagcgtatggtgttcttttccgaagaggctcggattgcgatccgtgaatatataggggaacgggacgcaaggatcaggatggcggggttaaaggcggctgatttgaacggggccttgtttataagcgggaaggggaggcccatttcgacagcgggagtgcgctggattataggccagtacgcgaaggtatcggggcttgggaagaacatacacccccactgtttccgccacagttttgccacccatctcgtgaacgcgggatgtgacgtgcgcgtcgtgcaggaaatgctcggccacgcaaagcttgctaccacgcagcgttactcccatgtcagcattgagagattgaagaaggtgtacgctaaggcgcatccccatgcgaagaaagagggagtagggagtagggagtag

SEQ ID NO: 42376 - protein, 317 aa, Unknown
  Obtained from environmental sample
  DOMAIN (8)...(91): Phage integrase, N-terminal SAM-like domain
  misc_feature (1)..(317): Xaa is any amino acid
MTEGAAVITDYLSYLEAVRGLSERTLEAYGDDLRMFANYCDNHGIDPEKASSHEVRGFIADLSFERASAASVNRRLSSVRGFYRWLTKFRGRVDNPCDGGPGGLLRNVKTPQTLPSVLWEDEMADFADLPDEKKMLWPARDKALILTMYSAGMRISELVSLTMKNTTGNMEGARITGKGGKERMVFFSEEARIAIREYIGERDARIRMAGLKAADLNGALFISGKGRPISTAGVRWIIGQYAKVSGLGKNIHPHCFRHSFATHLVNAGCDVRVVQEMLGHAKLATTQRYSHVSIERLKKVYAKAHPHAKKEGVGSRE

SEQ ID NO: 42377 - DNA, 477 bp, Unknown
  Obtained from environmental sample
  misc_feature (1)..(477): n is a, c, g, or t
ttgcttttaaacgatttggaaatctgggataaataccgtaaattgcgtagcttaacaagtcataattatgatgaattcaatatggaatccataatagcgataatacctgtattcattgaagaaattgattatgagcttgcaaagctcaaggaaaaatcaagccaacaaactgtttttctgcatattgatgaaaaacatttgaatataatcatatcaataatcaagagtgttacaggacttgataattgtccggtatatctttatggttcaagaatacagggaaaatctgtaaaatattctgatgttgatattgccattgattataatggggattttttgccggataacattaaagtaaatatatcatcgttactggaaaattcactgcttccatatacggttgatataatagacatcaatgcggtttcacctgtcttcaaggctaaaattgaaaaagattttgttaggttggtataa

SEQ ID NO: 42378 - protein, 158 aa, Unknown
  Obtained from environmental sample
  DOMAIN (63)...(157): Nucleotidyltransferase domain
  misc_feature (1)..(158): Xaa is any amino acid
MLLNDLEIWDKYRKLRSLTSHNYDEFNMESIIAIIPVFIEEIDYELAKLKEKSSQQTVFLHIDEKHLNIIISIIKSVTGLDNCPVYLYGSRIQGKSVKYSDVDIAIDYNGDFLPDNIKVNISSLLENSLLPYTVDIIDINAVSPVFKAKIEKDFVRLV

SEQ ID NO: 42379 - DNA, 354 bp, Unknown
  Obtained from environmental sample
  misc_feature (1)..(354): n is a, c, g, or t
atgtataacaaaaataaaacaactttagtcgcatttccgggagggaaaacgggcgcgtttaccataccaagcaatgttaccagcattggggatagtgctttttacggctgcagccttaccagccttaccataccaagcagtgttaccaaaattgatcaaacggctgtttacttctgccccaaccttaccagcgtaaccttcgccggcactataccgtcaagcggttttaacggactcgctttcgattatgattccaacttacgtgctaagttttatgaaactgataaaactaacggaacgccgggaacgtatacaagaccggacggtaaaagccgaacatggacgaagcagtag

SEQ ID NO: 42380 - protein, 117 aa, Unknown
  Obtained from environmental sample
  misc_feature (1)..(117): Xaa is any amino acid
MYNKNKTTLVAFPGGKTGAFTIPSNVTSIGDSAFYGCSLTSLTIPSSVTKIDQTAVYFCPNLTSVTFAGTIPSSGFNGLAFDYDSNLRAKFYETDKTNGTPGTYTRPDGKSRTWTKQ

SEQ ID NO: 42381 - DNA, 777 bp, Unknown
  Obtained from environmental sample
  misc_feature (1)..(777): n is a, c, g, or t
atggaagcaatgaaattcaaaaaacccttggtaaacaccattctattaataacaggaatatttatctttctatattttataatagtctctattacttggcgaagatttgatatttttaactttttggtaagcatagccggagttttaattataattatttcttttaaggttaatttaattgttggtatatttaaaaaaacaccgaaaataatccgctatttaataataacgatattagcgggctttgttttatcattcataatagttctgtcgttaattttatttaatatgcgcagtaagccgaaagaaagcgcggattatgttattgttcttggctgtcaggttgccggagaatacgcttctttgcctttattaagcagaggttataccgctataagatatttgaataaataccccgatacaaaagttgtattaagcggagggcaaggacccggggaaaatattcccgaagcagaatctttaagaaggttattgcttgaaaataagatagacaaggaaagaatatttttggaagataaatcaaaaaacacaatggaaaattttgttttttccgatgatctgtataatttatctggcaagaaaataattatagttacatctgattatcatatgttcagggcgttatcaatagcgaagaaactaaaatattccgacatatcaggattgccaagcagaagccaaagaaaaattttacctgcgtttattattcgggaatatgtaactgtaatgtattataaaatatccggaaaaatttaa

SEQ ID NO: 42382 - protein, 258 aa, Unknown
  Obtained from environmental sample
  DOMAIN (104)...(249): DUF218 domain
  misc_feature (1)..(258): Xaa is any amino acid
MEAMKFKKPLVNTILLITGIFIFLYFIIVSITWRRFDIFNFLVSIAGVLIIIISFKVNLIVGIFKKTPKIIRYLIITILAGFVLSFIIVLSLILFNMRSKPKESADYVIVLGCQVAGEYASLPLLSRGYTAIRYLNKYPDTKVVLSGGQGPGENIPEAESLRRLLLENKIDKERIFLEDKSKNTMENFVFSDDLYNLSGKKIIIVTSDYHMFRALSIAKKLKYSDISGLPSRSQRKILPAFIIREYVTVMYYKISGKI

SEQ ID NO: 42383 - DNA, 774 bp, Unknown
  Obtained from environmental sample
  misc_feature (1)..(774): n is a, c, g, or t
atgcggtttcggccatgtatcgacattcacgggggcagggtcaagcagatcgtcggggggacgctgtcctttaagatcatcaatatgacgcctgtgaccaattttgagacggaccaatcgcccgcccacttcgcgttaatgtatgaaagggaaaatctacgcggcgggcatgtcataatgttgggtcccggtaacgaggaggccgcaatggaggcgctctccgcttggccggacggtatgcacgtgggcggcgggataactcctgcaaacgctgagcggttcttggacgccggtgcgtcgcacgttatcgttacctcttatgttttttgcgatgggatgatacggtgggagcggttggacgaactattgaaaaccgtccccaaagagcaattagtcttggacctaagttgtcgggtattggacggcgattatgtgatcgttacggatagatggcagaagttgacacaggaaaaattgtccgaagagttattaatgcgtttatcaacatattgtgatgaattcttagtccacgctgtggacgttgaggggctgaagcagggtgttgatcaaacattgatacaattattggccgacgcctcccccatccccaccgtatacgccgggggtgtgcgtgacttaggcgacatggacgccatagagcgattgggcggcggaagaatagacgcaaccgtcgggagcagtttggacatattcggcggaccgcttaggtttgcggatgtggttaagtggcataaagatagaaatacggattag

SEQ ID NO: 42384 - protein, 257 aa, Unknown
  Obtained from environmental sample
  DOMAIN (2)...(243): Histidine biosynthesis protein
  misc_feature (1)..(257): Xaa is any amino acid
MRFRPCIDIHGGRVKQIVGGTLSFKIINMTPVTNFETDQSPAHFALMYERENLRGGHVIMLGPGNEEAAMEALSAWPDGMHVGGGITPANAERFLDAGASHVIVTSYVFCDGMIRWERLDELLKTVPKEQLVLDLSCRVLDGDYVIVTDRWQKLTQEKLSEELLMRLSTYCDEFLVHAVDVEGLKQGVDQTLIQLLADASPIPTVYAGGVRDLGDMDAIERLGGGRIDATVGSSLDIFGGPLRFADVVKWHKDRNTD

SEQ ID NO: 42385 - DNA, 735 bp, Unknown
  Obtained from environmental sample
  misc_feature (1)..(735): n is a, c, g, or t
ttggatgatggaaagttaaatagaatttctccgatatttattttaccggaatttcaaaataaagggatagctcaaagtgtatttaaaataattgaagaaatgtataaaccacaaaatggttggatattggatacaatattacaagaaaaaggtaactgctatctatatgaaaaaatgggatatgtaaaaactggaaaagttgaaaaaattaacgaaaaaattgatattatacattataaaaaaagtaataaaataatattacaatcattaaagacacaacttttaatttcattttcaatgctagaaaatataattgaaacttgtcccaatgaattatggaataaaaaagtttccggttatgttttttggcaacaattggttcatgcttttgccggaacacatggttggttaagagaagataaattggaaattatgcccccgttttcaatttttaacggtaaaaaaatatattcagaatttgaaaatgaacctgaaataatgttaacaaaagcagatgttatacaattgtataaagaaacaaaagaaactattgaaaaatggtttaacggaaaagacgatgattggctaaaaatgccttttgcggtatttaaaataaacaattttgaaaatatagcaggtcaaataaggcatataatgtatcatgtcggacattgtgaagcaatattcagagaaaatggaataaagccgaatgagtatttagattattttggttag

SEQ ID NO: 42386 - protein, 244 aa, Unknown
  Obtained from environmental sample
  misc_feature (1)..(244): Xaa is any amino acid
MDDGKLNRISPIFILPEFQNKGIAQSVFKIIEEMYKPQNGWILDTILQEKGNCYLYEKMGYVKTGKVEKINEKIDIIHYKKSNKIILQSLKTQLLISFSMLENIIETCPNELWNKKVSGYVFWQQLVHAFAGTHGWLREDKLEIMPPFSIFNGKKIYSEFENEPEIMLTKADVIQLYKETKETIEKWFNGKDDDWLKMPFAVFKINNFENIAGQIRHIMYHVGHCEAIFRENGIKPNEYLDYFG

SEQ ID NO: 42387 - DNA, 495 bp, Unknown
  Obtained from environmental sample
  misc_feature (1)..(495): n is a, c, g, or t
ttggaaaactttcttttccatccgcagatacccacagaagaacacgccggagaagttaccgagtatatagtttcgcagtatttttggggaatttttgactcagtatatattgtgtatacccatatgtacaacatggtaaaactacagccggtagaacaacagataatccctcttgtaaaagaaaaaattcaaaatgaaatttatgtaatcggcggagaaaagagagtagacttaaagtttgaatttctgccgtctgtaggggcggtttttgacgcgcttgttcctcagtatataaagggcgtgatttacggggcgatggtggaagcgtacgccagcgaacaaagcgcccgcatgagggcaatggacgaggcttccaagagcgccgaagatatgctcgcttccttgcggataagttacaaccgtgctcgtcaggcgggcattacgcaggaaattgccgagataacgggcggttctacagctatggctgatcactaa

SEQ ID NO: 42388 - protein, 164 aa, Unknown
  Obtained from environmental sample
  DOMAIN (1)...(161): ATP synthase
  misc_feature (1)..(164): Xaa is any amino acid
MENFLFHPQIPTEEHAGEVTEYIVSQYFWGIFDSVYIVYTHMYNMVKLQPVEQQIIPLVKEKIQNEIYVIGGEKRVDLKFEFLPSVGAVFDALVPQYIKGVIYGAMVEAYASEQSARMRAMDEASKSAEDMLASLRISYNRARQAGITQEIAEITGGSTAMADH

SEQ ID NO: 42389 - DNA, 912 bp, Unknown
  Obtained from environmental sample
  misc_feature (1)..(912): n is a, c, g, or t
gtggttatgaaaacaagtaccgccgctttgaactttgccgctgttatggcacaggcaagccgcgtttataaaccatttgatgcaaaattctcagcgaaagccattgccgctgcagaaaaagcatttgaatgggcaacaaaaaatccgtctattctattcaagcaaccagatggcatgaacacagggcaatacgcccctagtgatgaaacagtccaagacgaaaaattatgggcagcagcagaactctacataagcacaaagaaaaaatcttatgcagatttaattgatatcgttccctttgacggtgccgcaccttggtggggcaatgtgaactttttggctgtgtacagaatttccgatgtcaaaaatggatttaaaaaagatttgagcaaaaaagctcaagacactcttatagcggctgcaaatatgctcaaggatatagcagaaaattccgcttatggaatacccgtaaacaaatggaattttgtttggggttcaaattccgctgttgcaaataatggcattttgcttttgcacgcatattatttaacaaaaaataaaagctatttagatgccgctcaaagagctttggattatcttttgggagcaaaccccattgacataagttatgtgactggatacggcaacagaacgccaatgtctccgcaccacagaccatccgaaggagatggcatcacagagccggtaccaggtatgttggttggcgggccgcacgagggtggacaagatgttaaaccaaatgggcgttgcgaaaactatgtgcaaaaaggcaaacccgctctctcctatttggatcacgactgcagctatgcaaccaatgaagttgcaataaactggaacagccccttagtttacctttccggtgcattgcactttttgaacgcaaaatga

SEQ ID NO: 42390 - protein, 303 aa, Unknown
  Obtained from environmental sample
  SIGNAL (1)...(19)
  DOMAIN (1)...(297): Glycosyl hydrolase family 9
  misc_feature (1)..(303): Xaa is any amino acid
MVMKTSTAALNFAAVMAQASRVYKPFDAKFSAKAIAAAEKAFEWATKNPSILFKQPDGMNTGQYAPSDETVQDEKLWAAAELYISTKKKSYADLIDIVPFDGAAPWWGNVNFLAVYRISDVKNGFKKDLSKKAQDTLIAAANMLKDIAENSAYGIPVNKWNFVWGSNSAVANNGILLLHAYYLTKNKSYLDAAQRALDYLLGANPIDISYVTGYGNRTPMSPHHRPSEGDGITEPVPGMLVGGPHEGGQDVKPNGRCENYVQKGKPALSYLDHDCSYATNEVAINWNSPLVYLSGALHFLNAK

SEQ ID NO: 42391 - DNA, 786 bp, Unknown
  Obtained from environmental sample
  misc_feature (1)..(786): n is a, c, g, or t
atggccctggagatcaacgctgttttggagggcctctttcccggatctccgggcgtactcttaaataaggccctgatactggaagacagggcggcggcattggaaaaaaaaggccgtgaggcagacagagaaaatgccgaggctctgcaagcttacgaaacagccctttcaatggaaccagtcctgcctgacactttatttaacgcgggttttttctttcttcaccggaatagctttgcaagggccagggattgttttttgctttatatagcggagggggaaaaatcagacattcccgaagacaaaaaaaagcaggcggaaaaaataatcaaggacttgggtaattttgatgacaacagttttcaggaagcctacgattgcgtcaacaagggaaaagacgaggacgcattaaaaaaaattcgcgctctaatcgaaaagtatccaaaggtttggaacggttggttcctcttgggctggacactgcggaaactaaagcgttacggcgacggccttgagtcccttaaaaaagcggaggagctgggcggaactaacagcgacgttaaaaatgaaatggccatttgccttatggaacttggcgacctaaagggcgcgagaaaagagctggaaaaagccctgtacgatgaacctgaaaacatcaagataatttccaacctgggtgtgctggccttgaaggcaggtaaacgtgaggaagcggatgcttttttcagaacggtactggaactggagcctgaggacgcgctggcgaggcggtatctggaacattaa

SEQ ID NO: 42392 - protein, 261 aa, Unknown
  Obtained from environmental sample
  DOMAIN (219)...(252): Tetratricopeptide repeat
  misc_feature (1)..(261): Xaa is any amino acid
MALEINAVLEGLFPGSPGVLLNKALILEDRAAALEKKGREADRENAEALQAYETALSMEPVLPDTLFNAGFFFLHRNSFARARDCFLLYIAEGEKSDIPEDKKKQAEKIIKDLGNFDDNSFQEAYDCVNKGKDEDALKKIRALIEKYPKVWNGWFLLGWTLRKLKRYGDGLESLKKAEELGGTNSDVKNEMAICLMELGDLKGARKELEKALYDEPENIKIISNLGVLALKAGKREEADAFFRTVLELEPEDALARRYLEH

SEQ ID NO: 42393 - DNA, 333 bp, Unknown
  Obtained from environmental sample
  misc_feature (1)..(333): n is a, c, g, or t
atgtttatagaaaaggtcagagaatatggaaaggaaggctatagccttgatgaagcctttaataaagctgcgacatattgccgggatcatgatatattgagggaatttctggaaaaaaacgctttggaggttatggctatgtacttgacggcggaatggaacttggatgacgcaaagcaagtctggtttgaagagggcatggaaaaaggcagagaagaaggcagggaagagacagcccgaaacgctctggcgcaaggcttatccatagaaattatccaaaanataaccggccttgatatgggagccatagaaaaattaaggggaaacctgtag

SEQ ID NO: 42394 - protein, 110 aa, Unknown
  Obtained from environmental sample
  misc_feature (1)..(110): Xaa is any amino acid
MFIEKVREYGKEGYSLDEAFNKAATYCRDHDILREFLEKNALEVMAMYLTAEWNLDDAKQVWFEEGMEKGREEGREETARNALAQGLSIEIIQXITGLDMGAIEKLRGNL

SEQ ID NO: 42395 - DNA, 1203 bp, Unknown
  Obtained from environmental sample
  misc_feature (1)..(1203): n is a, c, g, or t
atgcttaagacttcaatgcaaaaacttgaaaagctagggcgcatggaatggctgcgcgagtcttgcgaaaccctgctcataaattcaaagaaaaacaagagcgaattttcagaaaacgatgcaaaagagaattggcgaataaaaggctcaaactctttcaaacctttggaactccaactgctgagggctgcttggaattggcgcaatgaaatcgctaaaaaaagagatgttgctccttacagagttttgaacccctatctaatgcttgatattgttaaagccatagcgaaaaacaaaggaaaaataaacgagcataacctgccgaaaataccgcgaaatttgaaaggtacattgctccaatcctttataaaagaattgagtgaagcggcagcagcccctgccgaagaattcccagggcaagtgcctcgcaaagctgctccccgcacaaacataaacgaagatttgcgggaaagacttagggaattgaggaacgaaaaagccgtgcagctcaaaatagactccggtcttttggcaaagcaaagccagctcaatgtgcttgcagatgccttatgcggcacttgggaagagaaattcagagtagccgagtttatgaattggcaaaaggaaatttggcaatctcttatacacaaagctgttttgccaaaaacgccagccgaactcaggaactgggcaaaagagaggctctcggctatgagcgaagaaagccgggcagaagaatcagaaaaattgcttgccgagcttgccagccatccggtacttgaaaacggtcatatagctgcattttatccggcaatgtctgagcctcaaatagttcctttcttaaaaaaactggcaaaagaaggtaggctgcttttgccaagggtacaagataaacagaaaatggaatttgtttttatacaaaatttagagagtgaactgcacaaaggggcttttggaataatggaaccaaaaccagacttgccagcttatgaaaatccaccagcagcattccttgttccgggtcttgtttttggaaaagacggcaccagaattggccacggatctggttattacgatctatatttatcctcattcaagggaattcctcgcctaggcattgcatattccgctcaaattagaaacgctttgccgcaaaacgcaatggatatgagaatggacgaggtgttatgggtgagggggtaa

SEQ ID NO: 42396 - protein, 400 aa, Unknown
  Obtained from environmental sample
  DOMAIN (54)...(136): HRDC domain
  misc_feature (1)..(400): Xaa is any amino acid
MLKTSMQKLEKLGRMEWLRESCETLLINSKKNKSEFSENDAKENWRIKGSNSFKPLELQLLRAAWNWRNEIAKKRDVAPYRVLNPYLMLDIVKAIAKNKGKINEHNLPKIPRNLKGTLLQSFIKELSEAAAAPAEEFPGQVPRKAAPRTNINEDLRERLRELRNEKAVQLKIDSGLLAKQSQLNVLADALCGTWEEKFRVAEFMNWQKEIWQSLIHKAVLPKTPAELRNWAKERLSAMSEESRAEESEKLLAELASHPVLENGHIAAFYPAMSEPQIVPFLKKLAKEGRLLLPRVQDKQKMEFVFIQNLESELHKGAFGIMEPKPDLPAYENPPAAFLVPGLVFGKDGTRIGHGSGYYDLYLSSFKGIPRLGIAYSAQIRNALPQNAMDMRMDEVLWVRG

SEQ ID NO: 42397 - DNA, 723 bp, Unknown
  Obtained from environmental sample
  misc_feature (1)..(723): n is a, c, g, or t
atggatttttggatgggctggtttagggcaaatatacgcggctttttcttttacctatctttagtcgtaggtttgttcacctttgtcccgccttggttcttttattgcgttatattcagaaaacaaaaactatttgctaacgtgggcaaaccttttttcaaaatcatattccccatatttggtgttaaagtgaaggtggaaggttcattgccggagaaaagccaagcctgttttatgctttgcaaccaccagagttttatagatgttccagttatattgtataaaatttttcctgttgcatttttagcaaagaagagcctgtttagaatcccctactttgggcagatgctggcttataccaacagcattcccattgtgcgcggagaccacaatgcaaattcggatttgcaggacaaaattaaacgcaggatttcgcagaattttccgctcttggcttttccagaaggaactcgctcaaaaaacggcgagcttttgccgttcaaaaacggaatttttcgcataataaaaaaatccggtgttcccgtgtttcccgtcactattataggtgcacataaaattttgccaaaaaaaggcattgccctttaccccggagaaataaaaattatcccgcatagaattataacggcagaagagatagaaaaactgacctacgaagaattgagagatacggttagagaagagataaaatcatccctgctttag

SEQ ID NO: 42398 - protein, 240 aa, Unknown
  Obtained from environmental sample
  DOMAIN (63)...(188): Acyltransferase
  misc_feature (1)..(240): Xaa is any amino acid
MDFWMGWFRANIRGFFFYLSLVVGLFTFVPPWFFYCVIFRKQKLFANVGKPFFKIIFPIFGVKVKVEGSLPEKSQACFMLCNHQSFIDVPVILYKIFPVAFLAKKSLFRIPYFGQMLAYTNSIPIVRGDHNANSDLQDKIKRRISQNFPLLAFPEGTRSKNGELLPFKNGIFRIIKKSGVPVFPVTIIGAHKILPKKGIALYPGEIKIIPHRIITAEEIEKLTYEELRDTVREEIKSSLL

SEQ ID NO: 42399 - DNA, 705 bp, Unknown
  Obtained from environmental sample
  misc_feature (1)..(705): n is a, c, g, or t
ttgcgaacagttcatatttatcagcactgcttctgcatatcaaaaaccgctgacagccgtgcctataacagaaagcaccccgtgaaaaatccctattggctttactcacgcaacaaaatagcttgcgaagaaatttttttcaatgaatatagggaaaaagatttccctataaccgttgttcgcccctcgcacacctacgataccattatacccgccgctatgggcagttccggctggacaaattccgcgagaatgttgaacaataaacccgttatactgcacggagacggcacaacgctctggaccttgacccacgcagaggactttgcaaaagcatttaccgcgttgctcggcaacagcgcagctatagggcacgcgtttcacataacaagcgatgaatggctaacttggcggcaaatttcagaaggcgttgcaaaggcactcaacgcgcctaaacccaaattcgtctgcgttccgagcgagaaaatcgcgaaaaaaaatcccgatttgggtgcagggcttttaggtgataaaacttggtgcgcaatttttgacaactcaaaaatcaaaaaattcgccccgggctggcaagccgaaatccctttcaaagaaggaataaagcgaacaatcgactggtttatggaaaacccggagagaagaaaaataaacactgaattggatggatttttggatgggctggtttag

SEQ ID NO: 42400 - protein, 234 aa, Unknown
  Obtained from environmental sample
  misc_feature (1)..(234): Xaa is any amino acid
MRTVHIYQHCFCISKTADSRAYNRKHPVKNPYWLYSRNKIACEEIFFNEYREKDFPITVVRPSHTYDTIIPAAMGSSGWTNSARMLNNKPVILHGDGTTLWTLTHAEDFAKAFTALLGNSAAIGHAFHITSDEWLTWRQISEGVAKALNAPKPKFVCVPSEKIAKKNPDLGAGLLGDKTWCAIFDNSKIKKFAPGWQAEIPFKEGIKRTIDWFMENPERRKINTELDGFLDGLV

SEQ ID NO: 42401 - DNA, 432 bp, Unknown
  Obtained from environmental sample
  misc_feature (1)..(432): n is a, c, g, or t
atgcttagaataaatatagaaaataagagagcttcgcccataagctcgcggttttatttctacgttaatcacatgaaaattctttttataggcgggaatgggaacataagctggaattgcacggtgcaagccctgaaaaaaggttacgaggtttgggctttgaacagagatagcggttccgttatgcggcgcgaactgccaaaggaagttcacaagctaaaggcggatatagggaacccaagttccgtgcgagatgtaataaaaggtttgaaatttgatgttatcgccaattttatatgttttacgccagagcaggcaaaacgagatttagagctttatagcgggctttgcgaacagttcatatttatcagcactgcttctgcatatcaaaaaccgctgacagccgtgcctataacagaaagcaccccgtga

SEQ ID NO: 42402 - protein, 143 aa, Unknown
  Obtained from environmental sample
  misc_feature (1)..(143): Xaa is any amino acid
MLRINIENKRASPISSRFYFYVNHMKILFIGGNGNISWNCTVQALKKGYEVWALNRDSGSVMRRELPKEVHKLKADIGNPSSVRDVIKGLKFDVIANFICFTPEQAKRDLELYSGLCEQFIFISTASAYQKPLTAVPITESTP

SEQ ID NO: 42403 - DNA, 462 bp, Unknown
  Obtained from environmental sample
  misc_feature (1)..(462): n is a, c, g, or t
atgaccgcaccgtctgtattaactttatcagtatctttatcagtatcaaacgtatctataataatgatgttaggattaacagtatcacctgtatcaacagcatccgtatccgaggtattcgtaccgacggattcatccgtattaacaacagtatcggtattaacggtatcggtactaatgacatcagaaatagccttatcatccgtatcaacaatatcagtattaacgatattcgtacctacagcgtcttccgtatcgaccgtatctatactaataacatcagcgctgacaataccgtcagtatcaacaatatccgccttgattatgttcgtgctaacggtagtatcatcagtattaacgatatttgtactgaccgtatcgttaccgatgacattcgtactaaccgtatcggtattaataacattagccttagcggcgacatccgccggagcgtacaactga

SEQ ID NO: 42404 - protein, 153 aa, Unknown
  Obtained from environmental sample
  misc_feature (1)..(153): Xaa is any amino acid
MTAPSVLTLSVSLSVSNVSIIMMLGLTVSPVSTASVSEVFVPTDSSVLTTVSVLTVSVLMTSEIALSSVSTISVLTIFVPTASSVSTVSILITSALTIPSVSTISALIMFVLTVVSSVLTIFVLTVSLPMTFVLTVSVLITLALAATSAGAYN

SEQ ID NO: 42405 - DNA, 486 bp, Unknown
  Obtained from environmental sample
  misc_feature (1)..(486): n is a, c, g, or t
atgtttcttaaacggctcatcattctcggcttcaaatcttttgcagaccgcacagatatagaatttaacgacggcattaccgcccttttagggccgaacggctgcggaaaatccaatgtagttgacgcgatcaaatgggtcttgggcgaacacgctataaaatcacttcgcgcggaaaagatggaagacgttatctttggaggcactgaagccagaaaacccctcaatgtggcggaagttacccttgccatcgcgaatgagacgggtcttctgcccatggatatgccggaaatcgaaattaaacggcgtttgtaccgttcaggggaaagcgaatacttcatcaatggggcgcaggtgcgtcttaaagacatacgcgaactttttttgggatacgggcgtaggcaaaaccgcctattcggtaatggagcagggaaggatagaccaaatactctcttccaagcccgaggacaggcgctatctttttga

SEQ ID NO: 42406 - protein, 161 aa, Unknown
  Obtained from environmental sample
  DOMAIN (2)...(160): RecF/RecN/SMC N terminal domain
  misc_feature (1)..(161): Xaa is any amino acid
MFLKRLIILGFKSFADRTDIEFNDGITALLGPNGCGKSNVVDAIKWVLGEHAIKSLRAEKMEDVIFGGTEARKPLNVAEVTLAIANETGLLPMDMPEIEIKRRLYRSGESEYFINGAQVRLKDIRELFLGYGRRQNRLFGNGAGKDRPNTLFQARGQALSF

SEQ ID NO: 42407 - DNA, 378 bp, Unknown
  Obtained from environmental sample
  misc_feature (1)..(378): n is a, c, g, or t
atgtctttaagacgcacctgcgccccattgatgaagtattcgctttcccctgaacggtacaaacgccgtttaatttcgatttccggcatatccatgggcagaagacccgtctcattcgcgatggcaagggtaacttccgccacattgaggggttttctggcttcagtgcctccaaagataacgtcttccatcttttccgcgcgaagtgattttatagcgtgttcgcccaagacccatttgatcgcgtcaactacattggattttccgcagccgttcggccctaaaagggcggtaatgccgtcgttaaattctatatctgtgcggtctgcaaaagatttgaagccgagaatgatgagccgtttaagaaacataaattaa

SEQ ID NO: 42408 - protein, 125 aa, Unknown
  Obtained from environmental sample
  misc_feature (1)..(125): Xaa is any amino acid
MSLRRTCAPLMKYSLSPERYKRRLISISGISMGRRPVSFAMARVTSATLRGFLASVPPKITSSIFSARSDFIACSPKTHLIASTTLDFPQPFGPKRAVMPSLNSISVRSAKDLKPRMMSRLRNIN

SEQ ID NO: 42409 - DNA, 522 bp, Unknown
  Obtained from environmental sample
  misc_feature (1)..(522): n is a, c, g, or t
gtgaaaaagagactttgggacattcgtacaaaccgcgttttatgctttcatttggttaagaattttaaaaatgtttcaggccttgtggacgacgtatatatcggtggaatgttacacgacatgggtaaaatagttttttccaacgtacatcccgatctattaaacaaaattaaagggttctgcggcgaaaaaagccttcccatatccgcctttgaagatctttccgcgggcatgaaccacgcggaacttggagccctaatcgcagaaaagtggaatttccccgacaagttagtagctgcaattcggtatcatcacgatcctgacgctgcaccttttgattgtaaaaatatggttgataccgtgtaccttgccaatatgttctgtgagtatgaaaataaaaatatcagctatgatcagttagaacaaggtccgctggataactacggattaaaacaccaaaaacaatttgactcgctgttgcaaaggctttcagcgggattcaccaaagaaggacaattttaa

SEQ ID NO: 42410 - protein, 173 aa, Unknown
  Obtained from environmental sample
  misc_feature (1)..(173): Xaa is any amino acid
MKKRLWDIRTNRVLCFHLVKNFKNVSGLVDDVYIGGMLHDMGKIVFSNVHPDLLNKIKGFCGEKSLPISAFEDLSAGMNHAELGALIAEKWNFPDKLVAAIRYHHDPDAAPFDCKNMVDTVYLANMFCEYENKNISYDQLEQGPLDNYGLKHQKQFDSLLQRLSAGFTKEGQF

SEQ ID NO: 42411 - DNA, 402 bp, Unknown
  Obtained from environmental sample
  misc_feature (1)..(402): n is a, c, g, or t
ttgcgccttgaggccgcaatgccgctttatggccacgaaatggatgaaaacgttaatcccttcgaggcgggcctttcttttgccgtaaaaatggaaaagaccgattttataggaaaagccgcccttgaacccttctcgcttaaggaaaacctgaaaaggctccgcacgggccttagggtaacaggcaagggcataataagggaacaatgccctatttatatccaggacagcagtatcggcataaccacttccggaacctttggccctcatcttaagcaggcaatagcaatggccatgcttaaaacggaatttacatcccccggtataaaagtccaagcagatgtcaggggaaagatgatagaggcggaaacttgcgctcttccgttctataaaaaatcgtga

SEQ ID NO: 42412 - protein, 133 aa, Unknown
  Obtained from environmental sample
  DOMAIN (1)...(132): Glycine cleavage T-protein (aminomethyl transferase)
  misc_feature (1)..(133): Xaa is any amino acid
MRLEAAMPLYGHEMDENVNPFEAGLSFAVKMEKTDFIGKAALEPFSLKENLKRLRTGLRVTGKGIIREQCPIYIQDSSIGITTSGTFGPHLKQAIAMAMLKTEFTSPGIKVQADVRGKMIEAETCALPFYKKS

SEQ ID NO: 42413 - DNA, 372 bp, Unknown
  Obtained from environmental sample
  misc_feature (1)..(372): n is a, c, g, or t
atgaattttccagccaatctaaagtacactaaaacccacgagtgggcaaaggatttgggaaatggcctttatgaaataggccttaccgattttgcgcaaaaagaattgggggacatcgtttacgttaaccttccgcaaaccggagatgaactaaaagcgggaaaagcttttggggatgtcgaatccgttaaagcggtatcggatattaatagccccataaacggaacagtaaaggaaataaacgaagcaatcgcgtcagcgcctggttccattaataaatcgccgtacgaagcctggctcatacgcagcgaaggctctgttggggaaggtcttctttcagcaagtgattacgaagcgtcgctatccaaataa

SEQ ID NO: 42414 - protein, 123 aa, Unknown
  Obtained from environmental sample
  DOMAIN (7)...(123): Glycine cleavage H-protein
  misc_feature (1)..(123): Xaa is any amino acid
MNFPANLKYTKTHEWAKDLGNGLYEIGLTDFAQKELGDIVYVNLPQTGDELKAGKAFGDVESVKAVSDINSPINGTVKEINEAIASAPGSINKSPYEAWLIRSEGSVGEGLLSASDYEASLSK

SEQ ID NO: 42415 - DNA, 1323 bp, Unknown
  Obtained from environmental sample
  misc_feature (1)..(1323): n is a, c, g, or t
atgggttcctatctggcgctcaccgacaaagacaggcaggagatgcttgccgttttggggataaaagatgtcgatgagcttttttcccaagtaccggaaagggtcaagttaaaagagttaaagatcccgtccggactttctgaactggaaataagccgaaaattatcctgtctggcggcggagaacaagacctttcctgtggtttttcgcggtgccggagcttacaaacactacatccctgccgcggtaaaacgcataacctccaacgaaacattcatcaccgcctatacgccataccaggcggaaataagccagggtatactccagtcgatttttgaataccaaagcatgatctgcgaacttaccggaatgaatgtctcaaacgcgtcgatttatgacggagccagcgcggcggcggaagcggtcaacatgtgcagggatagaaagaagcaaagcatcttcgtttcatcctgcgcgcacccccaggtaattcaaactattcgtacctactgcatgggttacggaatacccgtaaccgtcgttcccaaagattccgacggcaaaaccgacaggaatgccttaaaaaatctgctttcggcttccaatgaaaccgccgccggattttacattcaaagccccaatttttacgggcttatcgaagacatccccgctttcgccgaaattacccattcggccggagcgacgcttgttgccggtgttaatcccatttcccttggactgcttgaaagcccgggcaagcttggcgcggatatagcggtcggcgaaggtcagccgctcgggatgccactggcctacggaggtccttacctcggcttcatggcctgcaaaactcctntgatgcgaaaactacccgggcgcattatcggcgaaaccaccgataccaggggcgagagggcttttgtgttaaccctgcaggcacgagaacagcacatacgcagggaaaaggcgtccagcaacgtctgctcaaacgaggcgcactgcgcccttactgcggcggtgtacatggccgtaatgggcgaagaaggttttgcggaagccgcccgccagtgccacgctaaagcgttttacgccgcaggccaaatttccggaatacccggtttctccatggtttataaaggggacttctttcacgagtttgtcacaaactgccccgatacgggaaaaaccctggaattgctggaaagccatggaattctcggcggttaccccctttccaaaaatgagctgctctggtgttttaccgaattgaacaccaaagatgagatcgacaatcttgcgaaaattttaagggagggaaaataa

SEQ ID NO: 42416 - protein, 440 aa, Unknown
  Obtained from environmental sample
  DOMAIN (2)...(436): Glycine cleavage system P-protein
  misc_feature (1)..(440): Xaa is any amino acid
MGSYLALTDKDRQEMLAVLGIKDVDELFSQVPERVKLKELKIPSGLSELEISRKLSCLAAENKTFPVVFRGAGAYKHYIPAAVKRITSNETFITAYTPYQAEISQGILQSIFEYQSMICELTGMNVSNASIYDGASAAAEAVNMCRDRKKQSIFVSSCAHPQVIQTIRTYCMGYGIPVTVVPKDSDGKTDRNALKNLLSASNETAAGFYIQSPNFYGLIEDIPAFAEITHSAGATLVAGVNPISLGLLESPGKLGADIAVGEGQPLGMPLAYGGPYLGFMACKTPXMRKLPGRIIGETTDTRGERAFVLTLQAREQHIRREKASSNVCSNEAHCALTAAVYMAVMGEEGFAEAARQCHAKAFYAAGQISGIPGFSMVYKGDFFHEFVTNCPDTGKTLELLESHGILGGYPLSKNELLWCFTELNTKDEIDNLAKILREGK

SEQ ID NO: 42417 - DNA, 1116 bp, Unknown
  Obtained from environmental sample
  misc_feature (1)..(1116): n is a, c, g, or t
gtgaattattatcaaacgcgtctggaaaaaatttgggattggatggccaaggaaggcattgctttggtcatgtttgaggacgccgagggcaggcgtgacgcgaacatccgctggcttaccgggcagcctggcgacgccctgctttttctttctcttgaccgcaaaagtctgctcgtaccctgggacattattcttgccaaggcgtatgccaaggcggacgctgttgtcccctataatgaatttgaccggacgcccaaaaaagcgattaaaggggcggttgaacgcctgaatatccccgccggttcaaaaattgaaatacccccggttaccccttatccggcctttcttgactttgtagccgagttacaggattttgatattatctgccggaacagaagcaccatggatcacgcaatggatctgcggaccatcaaagatgcggatgagattgcgattatccgtaaagcggcaatccttacaaataaaattatcgatcttttggaaaaaaaggtgagatccggaagaatcaaaaccgaagctgacgccgttatgctgattgagcttgagtccagaaagatgggttgcgatggcgcggcttttgagattcttgccgcagggcagggcaggagttttggcatacacgcattccccgcatggacagacgccccttttggcgggaaaggtctgtccatcctggactttggcgtacggtattgcggctacaacaccgatgttactttgacctttgtgagggatccaagcccgcagcagctaaaaatggtaaacctggtagagaaagcatacaaggctgcggtcgattcaatctccgccgggaacgatacaatggccactgccattcgtgttgatgagtttttggctaaatcaagaaaacgcttggtacacggattggggcacggcatcgggctggatgtgcatgagtacccatttctcagaagccgccatgaaataacatgggatttgcagccgggaatgatctttacgatagagccgggtctgtacgacccggtgcatggcggctgccgcctggaaaatgatgtccttatcaacgaagatacttttgagattcttaccaagtcgcggataatctggctgtag

SEQ ID NO: 42418 - protein, 371 aa, Unknown
  Obtained from environmental sample
  DOMAIN (151)...(365): metallopeptidase family M24
  misc_feature (1)..(371): Xaa is any amino acid
MNYYQTRLEKIWDWMAKEGIALVMFEDAEGRRDANIRWLTGQPGDALLFLSLDRKSLLVPWDIILAKAYAKADAVVPYNEFDRTPKKAIKGAVERLNIPAGSKIEIPPVTPYPAFLDFVAELQDFDIICRNRSTMDHAMDLRTIKDADEIAIIRKAAILTNKIIDLLEKKVRSGRIKTEADAVMLIELESRKMGCDGAAFEILAAGQGRSFGIHAFPAWTDAPFGGKGLSILDFGVRYCGYNTDVTLTFVRDPSPQQLKMVNLVEKAYKAAVDSISAGNDTMATAIRVDEFLAKSRKRLVHGLGHGIGLDVHEYPFLRSRHEITWDLQPGMIFTIEPGLYDPVHGGCRLENDVLINEDTFEILTKSRIIWL

SEQ ID NO: 42419 - DNA, 687 bp, Unknown
  Obtained from environmental sample
  misc_feature (1)..(687): n is a, c, g, or t
atggttaataaactatgcgactggttgattcgtgaatttcattacggaaatgaacaaaactttgatgaagcggtgatcgaggctgttgttacccatgtatatattgcatggatacacccatttctcgacggcaatggaagaacagcccgccttctggaattttatctgttgctgcgggccggtgttcccagcatcgcttcgcacatcttgtcgaaccattacaacaatacccgtaccgaatattaccggcagcttcaaaacgcttcagagacaggaaatttaagcgcgttcattcaatatgcccttgaaggattccgcgatggtctggaaaatacaataaaaattattcacagggatcaagtcgaactaacctggaataattatgtccacgatgtaattgaaaaaatggaagatgaggggaaaacccaaaaaatatgccggcgcttaaagcaacttgcatattatatcccgtctgaccggttttatagcatggatgaaatcaaaattattaatccaaaaatcgctaaagaatacatgaaattaaattggataacgctgcgccgtgatttggatatgttggtcgaaaaagaactgctaattattgataaaaataaattttgtgccaattacaaactgcttaacagcttctattccgaggcaagtgtacaaataatacggcattactaa

SEQ ID NO: 42420 - protein, 228 aa, Unknown
  Obtained from environmental sample
  misc_feature (1)..(228): Xaa is any amino acid
MVNKLCDWLIREFHYGNEQNFDEAVIEAVVTHVYIAWIHPFLDGNGRTARLLEFYLLLRAGVPSIASHILSNHYNNTRTEYYRQLQNASETGNLSAFIQYALEGFRDGLENTIKIIHRDQVELTWNNYVHDVIEKMEDEGKTQKICRRLKQLAYYIPSDRFYSMDEIKIINPKIAKEYMKLNWITLRRDLDMLVEKELLIIDKNKFCANYKLLNSFYSEASVQIIRHY

SEQ ID NO: 42421 - DNA, 576 bp, Unknown
  Obtained from environmental sample
  misc_feature (1)..(576): n is a, c, g, or t
atgggcgtatgcgaaggcgaacgggttgaacccgcagacgttcgtgaactggaccaaaacaaaagcggaagagaagccgtgtttcgtggaggtaccggcgccggtaatagtgggcaggcagggcgagccggagatactgatcgaaaaaggggaagtgaagatccacatacccctaatttccggcagcagggaattgcggtcggtgatagaatggctggggcgcgcgatatgacattcgacatcagcaaagcgcggatatttatccgccccggttacacggatttgaggaaggcgataaacgggctgtcgataatagtagagcagcagatggcgggggaacctttcagcgggaacgtatacctgttttgcaaccgagggcgcaggcttttgaaggcggtatggtgggacaggaacgggttttggctggcgcagaagcggctggagcaggagaagttcccgtggtcggaaacggaagaagaagcaagggaattaagcgcggaagaactgtcaatgcttttggctgggatagattttttcaaggcgcacaaggctctttattacaaaaaagtttcataa

SEQ ID NO: 42422 - protein, 191 aa, Unknown
  Obtained from environmental sample
  DOMAIN (82)...(190): IS66 Orf2 like protein
  misc_feature (1)..(191): Xaa is any amino acid
MGVCEGERVEPADVRELDQNKSGREAVFRGGTGAGNSGQAGRAGDTDRKRGSEDPHTPNFRQQGIAVGDRMAGARDMTFDISKARIFIRPGYTDLRKAINGLSIIVEQQMAGEPFSGNVYLFCNRGRRLLKAVWWDRNGFWLAQKRLEQEKFPWSETEEEARELSAEELSMLLAGIDFFKAHKALYYKKVS

SEQ ID NO: 42423 - DNA, 1194 bp, Unknown
  Obtained from environmental sample
  misc_feature (1)..(1194): n is a, c, g, or t
ttgacccgaatcggagaagaaatcagcgaaaaactggttatagaacctccgcggatttatgtggatcaaataatacgtcccaagtatgcctgccgccaatgtgaagggacggaagacgaaggcaaaccaaccgtccgcatagcgcctgtagaacctgcgattattcccaagagcatagcaagcgccagtttgttagcaaaaatattcacgcaaaagtttgaaatgtatctgccgtatttcaggcaggaaaaacaatttgaacagataggggtaaaaataagccggcaagacatgagtaactggcaacagcaggtatatacctttgtaaaactgttattcgatatactgaaagcggtgataaaaagcgggcctgtgatgcggatggatgagtccccggtacaggtaatgggagagaaagggcggaaagacacgcagacgagctatatgtggcttgccctgggcgggccgcctgacaaaacagtggcatggtacgaataccatccgacccacgccgcgtataacgcgagggaatttctgcaagggtattcaggttatttacaaacggatggctatgatgcgtatgacaatgaggtaaaaaatatgcccggtattattcatgtagggtgcctagctcacgttaggcgtcatttctttgagacggagaagataagcgggcagggaaaaaacggccggggaagctttggaatattacggaaactgtacgatattgaaagaacattaaggaatcaaaaagacaagcacaagctgacggatgaggaattcaggataaaccggaaaaaacaggctgaaccggtattgaatgatttcaagatatggcttttgaaccatgcagacaaagtgccgccgtcgctgcttctgggaaaggcgatagcctacagccttgggcagtgggacaagctggtcaggtatctggaaagcccgtatcttacgcctgacaacaacgcttgtgaaaacgcgatacggccttttgtcctcggaagaaggtcgtggttattctgtcagtgtcctgacggggcggagagctcctgcggtatgtacacgcttatagagacggccaaacggaacggccttattccgtttaagtatttgacggttctttttgaaagggcgccgctggcttcttcccctcaagactgggaaaaacttctgccctggaatatttttaaatcttaa

SEQ ID NO: 42424 - protein, 397 aa, Unknown
  Obtained from environmental sample
  DOMAIN (1)...(204): Transposase IS66 family
  misc_feature (1)..(397): Xaa is any amino acid
MTRIGEEISEKLVIEPPRIYVDQIIRPKYACRQCEGTEDEGKPTVRIAPVEPAIIPKSIASASLLAKIFTQKFEMYLPYFRQEKQFEQIGVKISRQDMSNWQQQVYTFVKLLFDILKAVIKSGPVMRMDESPVQVMGEKGRKDTQTSYMWLALGGPPDKTVAWYEYHPTHAAYNAREFLQGYSGYLQTDGYDAYDNEVKNMPGIIHVGCLAHVRRHFFETEKISGQGKNGRGSFGILRKLYDIERTLRNQKDKHKLTDEEFRINRKKQAEPVLNDFKIWLLNHADKVPPSLLLGKAIAYSLGQWDKLVRYLESPYLTPDNNACENAIRPFVLGRRSWLFCQCPDGAESSCGMYTLIETAKRNGLIPFKYLTVLFERAPLASSPQDWEKLLPWNIFKS

SEQ ID NO: 42425 - DNA, 1488 bp, Unknown
  Obtained from environmental sample
  misc_feature (1)..(1488): n is a, c, g, or t
gtgtggaacacgggatatattgataataatacggtagccaatttctacaacccctttatgagagtagatacgaatggtaatcgcctgttgagttatggttattatccaagttcaggtaacggcaggttgagggtaaacagaaatggtaatattattgtaactgcaaccgcaaatactaacaggatgacaaataccactatcgctaccagttccagcggctcttggtatgcggcaggttctgatatcaccgctggggattttcctttcaagtttgcacggagtgatgccgccggtacaggttatacgggagaaactaatattgttgcggccatccgaccaaacagtaaccgttttaaaattccacgcattgccgttcattccactaacggtacgagtgccagaacagacaataatggcgacagaattttaatgagctattatgatgactccagcacggataagaatatcaacataatatacggtaatgttggagctactgccgtttctaatattccaggaacaccgggagtagtagcaaccaaagatacgacatataaaagcggtatgtacacggcggttggcttccttagcaacggcttgccgcttattacatggtatgacagtattaatgaaaatttaattttctcctatggcagcggtacgccatcaagtactttatacaattcgactatttcacgtgtaacaactgaaactaataatagtactcattatgtgtatacacttaacaatcatggactaaataatggcgacattgttcttgccggtaataataataatcctacaactaaatactatgtccatgtttttaatgataatacattcagcctaagtactacaataaatggtacgggtgtccaagttaatggtacaaataatatttatattactactcatattaccgcaccaaccgctactgctcgcaataatactaccgcaaacaacacatggcagtggacattccctaccggacacggtcttacaaataatcgtcaagtttatatcgtatataacgatggagcggtaagtgccgtacagtatgcgagaacaggttcagatacaaattcatggaaatttgcatctgctaataattctaataccgctaatcaattctatggaggagttaacgctgataacgcctatcctattccaaatttactctttgtatatttaaataattcaggtagacaagctaattataccaataccatgacatatacaaatacatggcagggtaacgccgtaatagttgacaccggtaaaggcgcgcacgttgacatggccgtagacgcaaacgacaatgtccacctcgcgtattatgatgtgaataacggcgggctttattacgcccttatcccgccgtccggagatggagcggctagaagaccaaacacaaccggtataactcctgtaaaagtagatacattcctttccgcccggaaacaaaattatgatcaacataaggagtga

SEQ ID NO: 42426 - protein, 495 aa, Unknown
  Obtained from environmental sample
  misc_feature (1)..(495): Xaa is any amino acid
MWNTGYIDNNTVANFYNPFMRVDTNGNRLLSYGYYPSSGNGRLRVNRNGNIIVTATANTNRMTNTTIATSSSGSWYAAGSDITAGDFPFKFARSDAAGTGYTGETNIVAAIRPNSNRFKIPRIAVHSTNGTSARTDNNGDRILMSYYDDSSTDKNINIIYGNVGATAVSNIPGTPGVVATKDTTYKSGMYTAVGFLSNGLPLITWYDSINENLIFSYGSGTPSSTLYNSTISRVTTETNNSTHYVYTLNNHGLNNGDIVLAGNNNNPTTKYYVHVFNDNTFSLSTTINGTGVQVNGTNNIYITTHITAPTATARNNTTANNTWQWTFPTGHGLTNNRQVYIVYNDGAVSAVQYARTGSDTNSWKFASANNSNTANQFYGGVNADNAYPIPNLLFVYLNNSGRQANYTNTMTYTNTWQGNAVIVDTGKGAHVDMAVDANDNVHLAYYDVNNGGLYYALIPPSGDGAARRPNTTGITPVKVDTFLSARKQNYDQHKE

SEQ ID NO: 42427 - DNA, 1755 bp, Unknown
  Obtained from environmental sample
  misc_feature (1)..(1755): n is a, c, g, or t
atgatcgcgagacctattgacggcgattttgacgaagcgattaaggaagaagggttgctctgttttgagggagtgttcgaaaccccgattgtgcagcactgtcatattgaaacagtaacatcatgggcgtatatggaaaacggcaggatcgtcattgtttcttcaactcagattccccatatcctcagacggatcacggggcaggcgcttggtatcccctggggcaaggtgcggatcataaaaccgtatattggcggcggctttggcaacaagcaggacagcctttttgagccgttgaacgcgtttatgtgtaccaaagtcggcgggcggctcgtgaaacttgagctttcccgggaggaagtgtttgccgccaccagggtgcggcacagcgaaaaaatataccttaaaagctgggtgcgtcccaacggcaggattgtggcgcgttcctatacggctttttccaatcagggggcttacggttcccacggtcatggaatcgccgccaagggaagcaacgtgttccgccagctttacaacgatgaaaaggcccgcaaggttgatatttacacggtttacacgaataccgccgcggcgggagcaatgcggggctacgggacgccccaggcggtgttcgccatagagtcccacatcgaagacatcgcaaaaagccttaaacttgatccgctggaattccgttttctcaatgtgatgcctgttggttttgttgataattttagcaaaaatgtcaaccgctttgatactttccgccagtgcgcagaggcaggcaaaaaacggatcaaatgggacgagaaacgcgaacgttacgcaaaacaaagcggcccggtcaggcgcggcatcgggatgtccctgttctggtataacaccgccgtctggcccatttcaatagaaatttcatcctgccgcatggtgatgaatcaggacggcagcgtgcagatacagcttggcgaaaccgaaatagggcagggagcggacacggccttctcccagatggccgcccagaccctggggataccctggcagatggttcatatcatcagcacgcaagacacggacattacgccttttggattaggctcttacggctcacggcaaacctacgttggaggcgcgggcgtgcataaggctgctcttctgttaaaggaaaaaattctgaaggctgcgtccctgtacacaaaattacccgccgccgagcttgatattgttaacggcgaaattgttaatacctcgcttaacggtaagacgatttgcagccttggggaacttgccgttgaaaccctgtaccacactgaacattccgagcatttgaccgccgaggccaccgctcaggttaagagcaatgcctttagcctgggctgcgcctttgccgaggtggaagtcgatatcccattctgcaaaatcaagctgttggaaatggttaattgccatgactgcggcactctgatcaacccgaaaaccgccgaagcgcaggttcacggcggcatgagcatggctattggctatggattgtacgagaagatgttatacgattccaaaacgggaaagctccttaacggcaacttgcttgattacaaactgccgacgattatggaccacccgaggcttgaagctgaattcatcgaagaccacgagccaaccagtccttacgggactaaggcccttggcgagccgcccgaccgtgccggggagcttcggctattcgtaatgccgtgcttcacgccacgggcatggcaataa

SEQ ID NO: 42428 - protein, 584 aa, Unknown
  Obtained from environmental sample
  DOMAIN (1)...(539): Aldehyde oxidase and xanthine dehydrogenase, molybdopterin binding domain
  misc_feature (1)..(584): Xaa is any amino acid
MIARPIDGDFDEAIKEEGLLCFEGVFETPIVQHCHIETVTSWAYMENGRIVIVSSTQIPHILRRITGQALGIPWGKVRIIKPYIGGGFGNKQDSLFEPLNAFMCTKVGGRLVKLELSREEVFAATRVRHSEKIYLKSWVRPNGRIVARSYTAFSNQGAYGSHGHGIAAKGSNVFRQLYNDEKARKVDIYTVYTNTAAAGAMRGYGTPQAVFAIESHIEDIAKSLKLDPLEFRFLNVMPVGFVDNFSKNVNRFDTFRQCAEAGKKRIKWDEKRERYAKQSGPVRRGIGMSLFWYNTAVWPISIEISSCRMVMNQDGSVQIQLGETEIGQGADTAFSQMAAQTLGIPWQMVHIISTQDTDITPFGLGSYGSRQTYVGGAGVHKAALLLKEKILKAASLYTKLPAAELDIVNGEIVNTSLNGKTICSLGELAVETLYHTEHSEHLTAEATAQVKSNAFSLGCAFAEVEVDIPFCKIKLLEMVNCHDCGTLINPKTAEAQVHGGMSMAIGYGLYEKMLYDSKTGKLLNGNLLDYKLPTIMDHPRLEAEFIEDHEPTSPYGTKALGEPPDRAGELRLFVMPCFTPRAWQ

SEQ ID NO: 42429 - DNA, 876 bp, Unknown
  Obtained from environmental sample
  misc_feature (1)..(876): n is a, c, g, or t
ttgatcagattcggccgagaattccttttagctacgaaagattattacaatgaaatagaagaagataaggtttctgtaattattgagaactataaaaaactcgccctggactgtcttgttgtgctgggcgggaacggaaccaacacgacggggtaccggctcgcggggcaaggactcaatgtgcttgggcttcccaaaaccatagacaacgacattgaaggcactgaccggacttttggctttgactccgcccttgccatagccacagacgccattgaccgccttcatacgacggcacaaagccatagcagggtcatggtgatcgagcttatgggtcataaggccggatggctcgccctctatgcgggtgttgccggcggcggggatgttatactaattccggaaataccttatgacatcaaaagcatcgggcggcacctgcaagagcgcgtaaggagcggcaaaactttttccattgttgtagcagcggaaggggccctttcggtggaagaaaaaaaaatggataaactggacagaaagagataccgggctgaaacggctagtccttctattgcgtaccgtatagccagggagatacaggctgagacaggcatggaaacaaaagccactgttctgggttatgtacaaaggggcgggatgccggcggctactgaccgcattcttgctacaagtctcggtaccgccgcggcggagcttcttgcacgcggcgaatacggccgcatgattgccctaaagggcgacgaaatttgctcagtagaccttagcgttccggcgggaaaagtaaaaactattccgcagtcgcactacatgatagacaccgctttgtcggtagggacttgtcttgngaatccttaa

SEQ ID NO: 42430 - protein, 291 aa, Unknown
  Obtained from environmental sample
  DOMAIN (1)...(242): Phosphofructokinase
  misc_feature (1)..(291): Xaa is any amino acid
MIRFGREFLLATKDYYNEIEEDKVSVIIENYKKLALDCLVVLGGNGTNTTGYRLAGQGLNVLGLPKTIDNDIEGTDRTFGFDSALAIATDAIDRLHTTAQSHSRVMVIELMGHKAGWLALYAGVAGGGDVILIPEIPYDIKSIGRHLQERVRSGKTFSIVVAAEGALSVEEKKMDKLDRKRYRAETASPSIAYRIAREIQAETGMETKATVLGYVQRGGMPAATDRILATSLGTAAAELLARGEYGRMIALKGDEICSVDLSVPAGKVKTIPQSHYMIDTALSVGTCLXNP

SEQ ID NO: 42431 - DNA, 885 bp, Unknown
  Obtained from environmental sample
  misc_feature (1)..(885): n is a, c, g, or t
gtgctcaaaggctcccctactgcttatagattgtgcaacggaatagcggatggtttagatggcgttgctattgataaatacaacgattgctatcaaattcaattttttaaaccagaatcttcagaatttgaaacagaaataatagaatttttaaaaaaatcgtttaaacctaaattcatcgcggtaaaatacagatttacagaccatagccggattaaagcggtgtttggggataattccaaaaccgttgttgaggaatatggctgcaaattttccgttgatttgctggacactttgaacccaggtctttttttggatatgcgcgaagcgcggcattgttttgcgcaactgtgcaaaggaaaggaaatgctgaacctctttgcctatacatgctctttcagcgttcacgcccggaaaaacggagcggtgaaaactgtgaatgttgacatcagcaaaaaaaatctgagcaaaggcagagagaattatctcttaaatgaactggagattaaacagggggaatttttctgcggcagtgctgaagaatatgtgaactggtgcatgaaaaaaggcaaaaaattcggagccattgcaattgacccgcccagctttgcgaaaaatgggaaaaattttttctcggtggagaaagatttggaaaatttagccgcaaaagcggtgagcattttggaagataacggcgttatattgttagcgacaaattacagcgaatggaacggcgaaactctgctcaaaacggtgaaaaacgcttatgccaaaaacggaagaaaattcaaattgttgcaaaaaggaacgcaaggcgaagatttccccggtacgggcaaaagcaaggaaagttctatggtttatctgatagctagagcactttga

SEQ ID NO: 42432 - protein, 294 aa, Unknown
  Obtained from environmental sample
  misc_feature (1)..(294): Xaa is any amino acid
MLKGSPTAYRLCNGIADGLDGVAIDKYNDCYQIQFFKPESSEFETEIIEFLKKSFKPKFIAVKYRFTDHSRIKAVFGDNSKTVVEEYGCKFSVDLLDTLNPGLFLDMREARHCFAQLCKGKEMLNLFAYTCSFSVHARKNGAVKTVNVDISKKNLSKGRENYLLNELEIKQGEFFCGSAEEYVNWCMKKGKKFGAIAIDPPSFAKNGKNFFSVEKDLENLAAKAVSILEDNGVILLATNYSEWNGETLLKTVKNAYAKNGRKFKLLQKGTQGEDFPGTGKSKESSMVYLIARAL

SEQ ID NO: 42433 - DNA, 759 bp, Unknown
  Obtained from environmental sample
  misc_feature (1)..(759): n is a, c, g, or t
ttgcgtatgcgcgaagtcgatctgaaaaacatgatcagcaggaatttttccagcccgattggagcgttttcaatagagaccgttgatacccttccggcgcccgccgcggacgatgttcccgatttgcgggacgcgctgaatgcagccatgaaaaaccgtccggagatacggcaggcggaagccaatatgatcacgcaggaactcgccgttaaattcagcaaagacgcgctcaggccgtcgctgctgattttcgccaatttcaacagttccgcccttcacggcaatcggacgatgaaggatgttcagggaaatcccgtaacgcttccgggcggttttgaacaggcgttccggcaggttcgcagttggcgctatcctgaatacgcggtgggttttaatttctcaatcagcatcagaaaccgcgccgccgaggccgattatcaccgcacgaaaatggaaaggcggcagacggaaaccgcgctggagcgcactaaaaactccatcgaactggaagtgcgcagggcgctgataggtcttgtgcagtccaaagcgcgggttgaggcagccggacaatccgcaaggttgagcgcactgacgcttgaagcggaagaagggcgtcttaacgaggggatggctattccatacgacgtaatccgccgcaggcgcgacctgctttccgcgcagtttgccgacatacaggcaagagccgattacgccaaagcattggtggaaatgcgccgcgccacgggaaaagacgactga

SEQ ID NO: 42434 - protein, 252 aa, Unknown
  Obtained from environmental sample
  DOMAIN (42)...(249): Outer membrane efflux protein
  misc_feature (1)..(252): Xaa is any amino acid
MRMREVDLKNMISRNFSSPIGAFSIETVDTLPAPAADDVPDLRDALNAAMKNRPEIRQAEANMITQELAVKFSKDALRPSLLIFANFNSSALHGNRTMKDVQGNPVTLPGGFEQAFRQVRSWRYPEYAVGFNFSISIRNRAAEADYHRTKMERRQTETALERTKNSIELEVRRALIGLVQSKARVEAAGQSARLSALTLEAEEGRLNEGMAIPYDVIRRRRDLLSAQFADIQARADYAKALVEMRRATGKDD

SEQ ID NO: 42435 - DNA, 675 bp, Unknown
  Obtained from environmental sample
  misc_feature (1)..(675): n is a, c, g, or t
atgagaggggcatccaccctttgggtccccggcacggatcacgcgggaattgccacccagaatgtggttgagcgcaagctaaaagaagaaaaaaagacaagccgccgcgaattgggcagggaaaaattccttgaagaaacatggaaggtaaaaaacgagcaccacgcgacaatttccaaacaacttgagaaaataggcgcgagcgttgactggaaacgcgagcgttttacgatggacgaaggcctttccaaagcggtgcgggaagtttttgtcactctttacgaaagaaatcttttatacaagggaaactaccttgtaaactggtgcgcctcctgcggcaccgcccttgccgacgacgaagttgattataaagataccaagggctatatgtaccatatccgttattatttttcggacgacaaggaaaaatatatagagatagccacaacgcgccctgagacgctgttaggcgacacagccgtggccgttcatcccgaagacgagcgctacagcgctctgaaaggcaagacgctccgcctgcccttaaccgaaagggtcataccgctgatttttgacgcttatgttgagcgcggcttcgggacgggagcgttaaaagtaacgcccgcgcatgatccgaacgactgggagctttcaagaggcacaaccttgccgtga

SEQ ID NO: 42436 - protein, 224 aa, Unknown
  Obtained from environmental sample
  DOMAIN (1)...(223): tRNA synthetases class I (I, L, M and V)
  misc_feature (1)..(224): Xaa is any amino acid
MRGASTLWVPGTDHAGIATQNVVERKLKEEKKTSRRELGREKFLEETWKVKNEHHATISKQLEKIGASVDWKRERFTMDEGLSKAVREVFVTLYERNLLYKGNYLVNWCASCGTALADDEVDYKDTKGYMYHIRYYFSDDKEKYIEIATTRPETLLGDTAVAVHPEDERYSALKGKTLRLPLTERVIPLIFDAYVERGFGTGALKVTPAHDPNDWELSRGTTLP

SEQ ID NO: 42437 - DNA, 348 bp, Unknown
  Obtained from environmental sample
  misc_feature (1)..(348): n is a, c, g, or t
atgcaagccgctgtacgctactgccttgaccgtggtatactgaggtcgttcatggagaaacattcgcgggaggtgctgcgtatgcggatcaccgaatggaatacagaggaagcaaaagttgtgtggtacgaagaaggtgtggaagacggaatagaaaaagggttagaacgtggccgcgcggaaggcaaggcggatggattggcggaaggtcaaaaagaaggattagagcggggtcgggcagaaggccgcgctcaagcccgcgaaaccgcccgaaaactcaaagccatgggcttatccgcaaaacaaatagccgaggcgaccgggctttctccggatgaactggaatag

SEQ ID NO: 42438 - protein, 115 aa, Unknown
  Obtained from environmental sample
  misc_feature (1)..(115): Xaa is any amino acid
MQAAVRYCLDRGILRSFMEKHSREVLRMRITEWNTEEAKVVWYEEGVEDGIEKGLERGRAEGKADGLAEGQKEGLERGRAEGRAQARETARKLKAMGLSAKQIAEATGLSPDELE

SEQ ID NO: 42439 - DNA, 327 bp, Unknown
  Obtained from environmental sample
  misc_feature (1)..(327): n is a, c, g, or t
ttggataaaaacacgcttgacaacaatatccgcgtaattaagcgcgtagctcaaatactcaacaagttcaggaattacaaggtaaaggttgaaggccacgcgaatccgaccacggcccccggccccgcgcgcgaacaggaagaaccgtcattgatggatctaagtgaaaggcgcgccggctttgttctcgagcagcttgtcattaacggcgtcgccagaaacaggcttacatttacaggcgcgggcggctccatgccggttgttccttttgaggaccgctcaggctggtggaaaaacaggcgggtggattttatcctgattaggtag

SEQ ID NO: 42440 - protein, 108 aa, Unknown
  Obtained from environmental sample
  DOMAIN (2)...(100): OmpA family
  misc_feature (1)..(108): Xaa is any amino acid
MDKNTLDNNIRVIKRVAQILNKFRNYKVKVEGHANPTTAPGPAREQEEPSLMDLSERRAGFVLEQLVINGVARNRLTFTGAGGSMPVVPFEDRSGWWKNRRVDFILIR

SEQ ID NO: 42441 - DNA, 711 bp, Unknown
  Obtained from environmental sample
  misc_feature (1)..(711): n is a, c, g, or t
atgagaaaatggttttatgccatacatttggttctgaacggcaaaaaagggatttcgggctgccaattacagagagaattgggtgtcacatataaaacggcttggcgaatgcttacgctaatccgtgaagcgatgggaaataacgatatggcaaacagttttcagtgcttcgtggaaatcgacgaaacgtatatcggcggaaaaccgagaaaggaaaatgccggcataattccgacggtaaaagcgaaacggggacgcggtacagataaaacgcctgttatcggagttaaggaaagaggcacaaacagggtatatgctcaagtcgctttgcccaatgaaaagggacagaaattatcgggcaaacaattactggcgattttggacaaagtatgcaaagatgggactactgtcgccagtgatgatttcagcggttattttattctcgatcataaaacggataaaaacttcgtacacgttaccgtaaatcattctatgggacaattcagcgccgganacggaatacacacaaacaatatcgaaaatttttggagcttaattaagcgtcaatgggttggcacgcatcatcattacagtgtaaaatatatgcagggatatattgacgaaatgtgtttcaagcaaaatcacaaagaaggcggttttgatacgttattgngacagtgcattanggaagcnggcatatttctgatataa

SEQ ID NO: 42442 - protein, 236 aa, Unknown
  Obtained from environmental sample
  misc_feature (1)..(236): Xaa is any amino acid
MRKWFYAIHLVLNGKKGISGCQLQRELGVTYKTAWRMLTLIREAMGNNDMANSFQCFVEIDETYIGGKPRKENAGIIPTVKAKRGRGTDKTPVIGVKERGTNRVYAQVALPNEKGQKLSGKQLLAILDKVCKDGTTVASDDFSGYFILDHKTDKNFVHVTVNHSMGQFSAGXGIHTNNIENFWSLIKRQWVGTHHHYSVKYMQGYIDEMCFKQNHKEGGFDTLLXQCIXEAGIFLI

SEQ ID NO: 42443 - DNA, 771 bp, Unknown
  Obtained from environmental sample
  misc_feature (1)..(771): n is a, c, g, or t
ttgacaacccagcgcaaagaaagcgaccttgtgaaaattttgagcggcgtttttgagggcaaaacaaccggaacgcccatatccatgattgttgaaaactcagaccaccatagcgaagactacgagcatataaaagactggtacagacccggccacgcggacgaggtttacgattccaaatacggattcagggattaccgtggcggtggcagaagttccgcaagggaaaccataggcagggtagccgcaggttccatagccagaaaaattttaaacgaaaaatgcaaaacagaatttaacgcatggctggacttagatgagaaagagatagaagcagctcgcaaaaacggagatagcattggcggcgttgtaaatttgaacattaaaaatccaccaaagaatttgggagaaccgatttttgaccgcacagaggcacttttggcgatggctatgatgagcattccagcgacaaggggatttgagataggcaagggttttgaagcggcaaaaatgactggcagcgagcacaataaattcgcggacggcacttatggcggcataacgagcggcgaagatattttttgcaggatagcctttaaaccaaccccatctattttgcagttgcaaaaagcgaaaaacaaaaacggcgaagtcggtgaaatttcagtaaaaggcaggcacgacccttgcgttgccctgcgcgcaccggtgatagtggaaagcatggcggcattggtgttgatggatttgtggatgcaattatatgtctga

SEQ ID NO: 42444 - protein, 256 aa, Unknown
  Obtained from environmental sample
  DOMAIN (1)...(255): Chorismate synthase
  misc_feature (1)..(256): Xaa is any amino acid
MTTQRKESDLVKILSGVFEGKTTGTPISMIVENSDHHSEDYEHIKDWYRPGHADEVYDSKYGFRDYRGGGRSSARETIGRVAAGSIARKILNEKCKTEFNAWLDLDEKEIEAARKNGDSIGGVVNLNIKNPPKNLGEPIFDRTEALLAMAMMSIPATRGFEIGKGFEAAKMTGSEHNKFADGTYGGITSGEDIFCRIAFKPTPSILQLQKAKNKNGEVGEISVKGRHDPCVALRAPVIVESMAALVLMDLWMQLYV

SEQ ID NO: 42445 - DNA, 354 bp, Unknown
  Obtained from environmental sample
  misc_feature (1)..(354): n is a, c, g, or t
gtgccgtccgcgaatttattgtgctcgctgccagtcatttttgccgcttcaaaacccttgcctatctcaaatccccttgtcgctggaatgctcatcatagccatcgccaaaagtgcctctgtgcggtcaaaaatcggttctcccaaattctttggtggatttttaatgttcaaatttacaacgccgccaatgctatctccgtttttgcgagctgcttctatctctttctcatctaagtccagccatgcgttaaattctgttttgcatttttcgtttaaaatttttctggctatggaacctgcggctaccctgcctatggtttcccttgcggaacttctgccaccgccacggtaa

SEQ ID NO: 42446 - protein, 117 aa, Unknown
  Obtained from environmental sample
  SIGNAL (1)...(28)
  misc_feature (1)..(117): Xaa is any amino acid
MPSANLLCSLPVIFAASKPLPISNPLVAGMLIIAIAKSASVRSKIGSPKFFGGFLMFKFTTPPMLSPFLRAASISFSSKSSHALNSVLHFSFKIFLAMEPAATLPMVSLAELLPPPR

SEQ ID NO: 42447 - DNA, 555 bp, Unknown
  Obtained from environmental sample
  misc_feature (1)..(555): n is a, c, g, or t
ttgggcgattttttagaccaagcgcaggtttccggtgcgctccggcacgcaaacgagcaactcgcaaaaatcaaatcaccttttgaaattgtggaagttgccagcggctatcgctttcgcacaaagaacgtatactatccttatatccgcaaacttttcccggatagcaaccctcgcaaactctcccttgccgcactggaaacactttccataatagcctacaaacaacccataacaaaagcgggcatagaggctattcgcggcgttatgtgcgatgctcctctgcacaacctcttggacaaaaaattcataacgcttgggcaacgcgcagacaccgttggcaacccatacacatatataaccacagaggaatttttaaaatactttggcataaaccgaattccagacgatttgcctcgcttaacggaatttagcgatattctgaacagcgattttttaattccgcaatatcccatacaaaaacagatgcccgaacagattcctctgcaagaatccaccaaacaattggaaataccgcttgaagcaggggaatag

SEQ ID NO: 42448 - protein, 184 aa, Unknown
  Obtained from environmental sample
  DOMAIN (2)...(141): Putative transcriptional regulators (Ypuh-like)
  misc_feature (1)..(184): Xaa is any amino acid
MGDFLDQAQVSGALRHANEQLAKIKSPFEIVEVASGYRFRTKNVYYPYIRKLFPDSNPRKLSLAALETLSIIAYKQPITKAGIEAIRGVMCDAPLHNLLDKKFITLGQRADTVGNPYTYITTEEFLKYFGINRIPDDLPRLTEFSDILNSDFLIPQYPIQKQMPEQIPLQESTKQLEIPLEAGE

SEQ ID NO: 42449 - DNA, 1260 bp, Unknown
  Obtained from environmental sample
  misc_feature (1)..(1260): n is a, c, g, or t
atggagccagtctacgaaatgattaccatcaccatagtgataagcgctgtggtattggctctggtagtcgcggcagcgctgttcatgtcacgatccgtcagtaagccaatcatcagggtggccgatacgcttaaggatatttccgaaggcgaaggcgacctgacgcggagcattaccgttacttccaatgacgaaatcggcagcctcgccctgtacttcaacaagactttggagaaaatcagaaacctcatcgtaactattaaaaaagaagcggcaagcctccacgacgtgggcaatgatcttgccagcaacatgaccgaaaccgccgcagcggtcaatcaaatcacagccaacatccggagtattaaacagagggtaataaaccagagcgcaagcgtcaccgaaacccatgcaaccatggagcaggttgtcgcgaacatcaacaagctgaatggccatgtagaaaatcagagcggcaatatttcaaaggcttcgtcagcgatagaggagatggtagccaacatcaattcggttactgaaaccctggtcaaaaactccgccaatgtaaataccctgaaggaagcgtccgaagtgggcagaaccggattgcaggaagtagcggacgacattcaggaaatcgcccgcgagtccgagggtctattgcaaataaactcggtaatggaaaatatttccagccagacaaatcttctttcgatgaacgccgcgattgaagccgcccatgccggagaagcggggaagggtttcgccgtagtcgccggagaaatacgcaaattggcggaaagcgccgcccaacagtcaaaaaccatttctgaagtacttaaaaaaataaaaagctcgattgacaccattacaggctctacaaacacggcgcttgataattttaaggttgttgacgagcaggtacgcgccgtttcagagcaggaaaccaatatttacaccgcaatggaagaacagggacgcggaagcaagcagatacatgaagccataagcaagctgaaagatttaactcaaatggttaaaagcggctcgacggagatgctggacggcagtaaagaagtcatcatggaaagtagaaatcttgaaaaagcgactgtggaaatttctaccggtatgaatgaaattgtaaacggtgcggaaaagataaattcctcggtaaaccaggtggaagctataagcaaaacaaataaagactgtattgacaccttgttcagcgaagtttcaaaattcaaggtagattga

SEQ ID NO: 42450 - protein, 419 aa, Unknown
  Obtained from environmental sample
  SIGNAL (1)...(25)
  DOMAIN (141)...(377): Methyl-accepting chemotaxis protein (MCP) signaling domain
  misc_feature (1)..(419): Xaa is any amino acid
MEPVYEMITITIVISAVVLALVVAAALFMSRSVSKPIIRVADTLKDISEGEGDLTRSITVTSNDEIGSLALYFNKTLEKIRNLIVTIKKEAASLHDVGNDLASNMTETAAAVNQITANIRSIKQRVINQSASVTETHATMEQVVANINKLNGHVENQSGNISKASSAIEEMVANINSVTETLVKNSANVNTLKEASEVGRTGLQEVADDIQEIARESEGLLQINSVMENISSQTNLLSMNAAIEAAHAGEAGKGFAVVAGEIRKLAESAAQQSKTISEVLKKIKSSIDTITGSTNTALDNFKVVDEQVRAVSEQETNIYTAMEEQGRGSKQIHEAISKLKDLTQMVKSGSTEMLDGSKEVIMESRNLEKATVEISTGMNEIVNGAEKINSSVNQVEAISKTNKDCIDTLFSEVSKFKVD

SEQ ID NO: 42451 - DNA, 936 bp, Unknown
  Obtained from environmental sample
  misc_feature (1)..(936): n is a, c, g, or t
atgttttgccccgagtacacgctctctggccccaagcaggaccgctacgagcagatggaggctacgctcgcgaacaccgggcagatattcgggctcgcctcggacgacgacgggcagttctacaagttgattcgcttgatcatgtcgtcgtcgccgcttgtcggtagctttaccgatgagaacgataccgtacattcgctttacgcttgctccgacgtcgatcttatcggtcaagcgagggatctgatgaatacccgcaccgtacttatagccgacggccaccatcgttacgagacggcgctacggttctaccgcgagaggggcgacgaggctttctcgcacgtgatgatgaccattgtgtcgatggccgatccgggtctcatcatccgcccgttccaccgtttggtcaggaagaccgatcagggcaggagcgtaggcaatatgttggatgagttggctaagtattttgacgtgaagcgcataggcaaggcctccgcggacggggtgtacaaggcgttgtcgtctcagggcgacgccgagatggtctattgggattgcgccgccggggatatttacgatctgcggttgaacggcggcggtgagaaattcttggccggggttatgccggagcagtcaaacaattggaagcatcttgatgtttccaagataaattgcataatcataaacggcatactgtctctgccgctagacggtcaggttttgcacgacatagtgcactacgcgaacgacgccgcgttgggcgcggagaagctgactgaggccgccgcgggctactactacggcggtttcttcatcaggccggtttccataggcgtggtgagcgatacggtaaaaggcggggagcggatgccgcagaagtcgaccaacttttaccccaaactgtactccggtcttgtgcttaacaagatgaaatga

SEQ ID NO: 42452 - protein, 311 aa, Unknown
  Obtained from environmental sample
  DOMAIN (1)...(310): Protein of unknown function (DUF1015)
  misc_feature (1)..(311): Xaa is any amino acid
MFCPEYTLSGPKQDRYEQMEATLANTGQIFGLASDDDGQFYKLIRLIMSSSPLVGSFTDENDTVHSLYACSDVDLIGQARDLMNTRTVLIADGHHRYETALRFYRERGDEAFSHVMMTIVSMADPGLIIRPFHRLVRKTDQGRSVGNMLDELAKYFDVKRIGKASADGVYKALSSQGDAEMVYWDCAAGDIYDLRLNGGGEKFLAGVMPEQSNNWKHLDVSKINCIIINGILSLPLDGQVLHDIVHYANDAALGAEKLTEAAAGYYYGGFFIRPVSIGVVSDTVKGGERMPQKSTNFYPKLYSGLVLNKMK

SEQ ID NO: 42453 - DNA, 1071 bp, Unknown
  Obtained from environmental sample
  misc_feature (1)..(1071): n is a, c, g, or t
atgaagatattaaagtacgttatcggcctattgcttgcggccataggcctgtatatcttcttccgcggttcaggcgacggcggagagtccgtctatcaggcgcttgcaggggagatttcccgctccaatccgaccgccgccgccgtctgcgccgcgcttgctctctttgcgatgtggctaagggcgttgcgtttgcggatgattctgcccgacactttgccggcgcctccgcttggggtcgccgcctccgctatcgatatcgccgtcggccgcaacgcgccccacaagggcgggctattttccgtcacgatggtcatggcgatgcttaacaacgtcctgcccatacgcgccggagaggccgcacgggtcgccatcctctggaagcgcaacggatttcccatcatggtctgcgtcggctcgctccttgtggaacacgcgcttgatatcgccgtctacctatcgttcctcttcatcccgcccatagcgtcgccggcgctcttggataagctgcgcgggctccaccccgcgatgattgccgcgatatggctttccgccgtcgcgttcgcctctctgctcggattgttttccctatacgcgttgctgccgaggatatttcgcggcgcggcctctcgcgtcggaaagtacctgccgcccaaggtaagatcggcggcgcggaaattcggcgcggagatagagtctaacttagactggacgtctaagataggcaaaatagcgtacgtggcggcgctgacatacgcgaccgcgatgtgctactccacaatgctctttatccttgtatccgacgttacgccgctcggttacgtgaacagcctattcgctcaggctttcgcggccttcggcgccgccatcccgctggcccccggaagcgtggggacgctgcacgccgtgctgttgcagggaatgatgataaccggctgccccgcgccgaaagcgagggcggtcatagtagtctaccacgcggtgcagtacgtggcgattacggcggttgggctgctgtgtatgttgatgttgaagcttaaggacaagacggcggttctgagaatcaaataa

SEQ ID NO: 42454 - protein, 356 aa, Unknown
  Obtained from environmental sample
  SIGNAL (1)...(24)
  DOMAIN (106)...(350): Uncharacterised protein family (UPF0104)
  misc_feature (1)..(356): Xaa is any amino acid
MKILKYVIGLLLAAIGLYIFFRGSGDGGESVYQALAGEISRSNPTAAAVCAALALFAMWLRALRLRMILPDTLPAPPLGVAASAIDIAVGRNAPHKGGLFSVTMVMAMLNNVLPIRAGEAARVAILWKRNGFPIMVCVGSLLVEHALDIAVYLSFLFIPPIASPALLDKLRGLHPAMIAAIWLSAVAFASLLGLFSLYALLPRIFRGAASRVGKYLPPKVRSAARKFGAEIESNLDWTSKIGKIAYVAALTYATAMCYSTMLFILVSDVTPLGYVNSLFAQAFAAFGAAIPLAPGSVGTLHAVLLQGMMITGCPAPKARAVIVVYHAVQYVAITAVGLLCMLMLKLKDKTAVLRIK

SEQ ID NO: 42455 - DNA, 459 bp, Unknown
  Obtained from environmental sample
  misc_feature (1)..(459): n is a, c, g, or t
atgaaaataacgtttttgggcaccggcacgtcgcacggggtgccgccgatagactgcatgatgaccggttacgcgcggtgtcccaagggcgtgtgcctcaagtcgcggaccgacccgcgccacagccggacgcggacgtcggtgctattggaaaaggacggaaagacgctgatagccgacgtctccgccgacttccgccagcaggcgctgcgcgagggcatccgcaggatagacgccgtggcgctctcccacggccacatagatcacttcggcggcctccccgacatccgctcctacaccgacgcggccgacgagcccatagaggtatacggctcgaacgaaacgctggacacggtaagacaggccttcccgtacatgttcgaggcaagaaccggaaggggcaaaggcgtaccccgccttaagatgattacgttatcggatacgctcgtgccgatctga

SEQ ID NO: 42456 - protein, 152 aa, Unknown
  Obtained from environmental sample
  misc_feature (1)..(152): Xaa is any amino acid
MKITFLGTGTSHGVPPIDCMMTGYARCPKGVCLKSRTDPRHSRTRTSVLLEKDGKTLIADVSADFRQQALREGIRRIDAVALSHGHIDHFGGLPDIRSYTDAADEPIEVYGSNETLDTVRQAFPYMFEARTGRGKGVPRLKMITLSDTLVPI

SEQ ID NO: 42457 - DNA, 1548 bp, Unknown
  Obtained from environmental sample
  misc_feature (1)..(1548): n is a, c, g, or t
ttgaatggaaatgagaaatcgacgtttcttttactgacatcacatatatntgcggttgattattgttcaaaattatcggaaaatatacattataaattatggattgcaatacaaactgaatttaaaaaaaacgatgaaaaaaacttaaaaaataatcatagcgcattgctggtttttacaaaatacaaaggcagtctacaacatacaaaaacaagaatagcatacacctattgccctgtatgttcaaagacaacaaaggattatggagggaaaaaacatttatatcatgaatttggaactttactttctgatgtttggagaaacattattttaaaagaaggtgaatatcctgaacaaataattgacatattgaaagatttatttgggttggaagaatataaattccttaatgtatatgaccagagagaaaattataaatctttgtctaaatcgtatatttataaatcatttcccaaaaaaataaataccctcgataataatgagctattacataatggggattgtattcaatatcttaaatctattccggacaatagtatagatttttgttttgctgatcccccatataatttaatgaaaaaatataataattttgatgatgggattgatattaaaaattattttgaatggtgtgatacatggttatgcgaattagggagaataataaaaccaaattgtactgttgcgattttaaatatcccacaatggtgtattagacattttaaatttctttcgactattcttgattatcaagattggattgtatgggaagggcttagtttgccggtccgtatgataatgcctgcgcattattctattatttgtttttcaaagggaaaaccgagagatttatccttaatgccaagaaataccgctttagaagataaatatacaaaaacatttttaaataattattgtttacgtccaaattgtataaacgagagaaaaaaattaaatatgaacgataccgaatatattactaatttatggtggaatattcatagattaaaacacaattcaaatcgagtagatcacccctgtcaattgccccctctctttatgttaagattgatttctttatttacgagtgaaaatgaaatagttcttgatccgtttaacggcgtcggtactacaacattatctgcaaaaatattaaatagaaaatatattggtatagaattatcagaatattatcataatattgcaatttcaagacatcaagaattagcaaatggtatcgacccttttagaaaagtaattaataatattcctaattcaaaaaatagtagagtagaaagattgaaaaaacaagagtacaaagttgataaaaagacattgcaactcgaagttaagagaataaaaaatgagattggaaaaattcctgatagaaaagatgttattatatacgcaaaataccctatagaatattatgataactatttcgttgattggngtgaggttactgctgcggcaagaaacacagggatgacagaatacaaaaaaaattataaacatgaacttttttaa

SEQ ID NO: 42458 - protein, 515 aa, Unknown
  Obtained from environmental sample
  DOMAIN (187)...(411): DNA methylase
  misc_feature (1)..(515): Xaa is any amino acid
MNGNEKSTFLLLTSHIXAVDYCSKLSENIHYKLWIAIQTEFKKNDEKNLKNNHSALLVFTKYKGSLQHTKTRIAYTYCPVCSKTTKDYGGKKHLYHEFGTLLSDVWRNIILKEGEYPEQIIDILKDLFGLEEYKFLNVYDQRENYKSLSKSYIYKSFPKKINTLDNNELLHNGDCIQYLKSIPDNSIDFCFADPPYNLMKKYNNFDDGIDIKNYFEWCDTWLCELGRIIKPNCTVAILNIPQWCIRHFKFLSTILDYQDWIVWEGLSLPVRMIMPAHYSIICFSKGKPRDLSLMPRNTALEDKYTKTFLNNYCLRPNCINERKKLNMNDTEYITNLWWNIHRLKHNSNRVDHPCQLPPLFMLRLISLFTSENEIVLDPFNGVGTTTLSAKILNRKYIGIELSEYYHNIAISRHQELANGIDPFRKVINNIPNSKNSRVERLKKQEYKVDKKTLQLEVKRIKNEIGKIPDRKDVIIYAKYPIEYYDNYFVDWXEVTAAARNTGMTEYKKNYKHELF

SEQ ID NO: 42459 - DNA, 642 bp, Unknown
  Obtained from environmental sample
  misc_feature (1)..(642): n is a, c, g, or t
ttgaaagttgatggcataggcttatctaataatgaaagactattaccaattatggaagatataattaatctaattttgtttggaaaccaatctattaacggaaccttgccaactgagattatggaaaaatgtataattggcggattaataggtaaagatgaagaactagaacgttttgttaaacagcggtatatttgggttagtagaattacaggcggcgcaacttcaaattcacttggtaatctggctcaaacttatgttataaattatttaaaagcaagtttagtcaattggacttttaataaaaaaacaattccaaatattagtcaaaatgataataggacgcttatgtcatttgatactgttgcaaaatcacccaataacaaatattgcgctattgaggtaagttttcaagtaactacaaatagtgtaatagaaagaaaggcaggtcaagcgcaatcaagacaaaatattttacatgagaatgatcacaaaattgcatatattattgatggagcaggtaattttgaaagggcgtctgctcttcgtacaatttgccaatatagtgattgtactgtttctttcaaagatgaagagttgaataagttaattttgtttttaaaagattttgatggagaataa

SEQ ID NO: 42460 - protein, 213 aa, Unknown
  Obtained from environmental sample
  misc_feature (1)..(213): Xaa is any amino acid
MKVDGIGLSNNERLLPIMEDIINLILFGNQSINGTLPTEIMEKCIIGGLIGKDEELERFVKQRYIWVSRITGGATSNSLGNLAQTYVINYLKASLVNWTFNKKTIPNISQNDNRTLMSFDTVAKSPNNKYCAIEVSFQVTTNSVIERKAGQAQSRQNILHENDHKIAYIIDGAGNFERASALRTICQYSDCTVSFKDEELNKLILFLKDFDGE

SEQ ID NO: 42461 - DNA, 960 bp, Unknown
  Obtained from environmental sample
  misc_feature (1)..(960): n is a, c, g, or t
atgaaaggggaacaatatctgcactggatgaaaaaaataggggcggtgccgattaaaagaatagcccttaatgtaataactcatgctgtttttctggggattgttttctttagcggtaattatctcggcgttgatccttccataaaaacacctttgtttctcgcggctttatcatttggcatgctggtagggacatttgtgtatgttgcaggcgacgggcttgtttccggcacgctgcttgcccacaattttaccgtatatcctcctaattatcatgaaaaaaggcaggaagcaaaagcgtggattatcccgattgcggcaattctggtaaccctcgtttttacctgttccgttaccctgctcggcattcaccgcgccggaaacccgctgtcttcaatattaataccgctgattattttttttctctgtacttccgcccttgccgtcacccttaaaagaaatacgggcgcgatctactcatctgtagttgcccaacttgagaatctttcatcagaacagaaagatctcacaaagcgaatttcaatctgttctgttgacgaactgggcaacattgcaggaatggtaaacgcttttagcgaacatctgggcggcggtatccgcgatataaaagacggacaagaaaaactttccgtagtgggaaatcggttggaagaaaacgcctcaactatggcggcttccattgtccagatctctacggcagttaaacaggtgttagcaaaaactcaagggcagatggaaagcgctaatacatcatctcgcgcagtacagcaaatttccgagcaaattaaatcgctggaggaatctatttttacacaaacatccagcataacggaagcttccgccgctgttgaggaaatggtgggcaatatatcctccataaggctcgataacggaaaaaatggcttctcaattcaagaccgttggagaagcctccgatga

SEQ ID NO: 42462 - protein, 319 aa, Unknown
  Obtained from environmental sample
  misc_feature (1)..(319): Xaa is any amino acid
MKGEQYLHWMKKIGAVPIKRIALNVITHAVFLGIVFFSGNYLGVDPSIKTPLFLAALSFGMLVGTFVYVAGDGLVSGTLLAHNFTVYPPNYHEKRQEAKAWIIPIAAILVTLVFTCSVTLLGIHRAGNPLSSILIPLIIFFLCTSALAVTLKRNTGAIYSSVVAQLENLSSEQKDLTKRISICSVDELGNIAGMVNAFSEHLGGGIRDIKDGQEKLSVVGNRLEENASTMAASIVQISTAVKQVLAKTQGQMESANTSSRAVQQISEQIKSLEESIFTQTSSITEASAAVEEMVGNISSIRLDNGKNGFSIQDRWRSLR

SEQ ID NO: 42463 - DNA, 735 bp, Unknown
  Obtained from environmental sample
  misc_feature (1)..(735): n is a, c, g, or t
ttgatgagcgcggtcatgatgctgctcgctcttgcggtgctggcgcttttcgttcgcgagccaaaacaggcgtacataaacgagtcggaaggggaaagcaaaaaagccgatattaagcagcttggtaaagatgagaagaaaagcctgcttttgattcttttcggcgtgtttttctggtttaccggctacaacgccgtggaaacattctttaccttgtacgcaaccaacaccctgggtatggacgccggcggcgcgtcgatgacgctctcgattttctcgctcacctttcttgctttcgcggttccggctggctacattgccgtaaaaaccgggcgacgcaaggcaatcctgataggcctgtccggccttttcattctgtttctgccgatggtatttctcgccaatgcctgggttgcgcgtgcctgcctttttttgggagggtttttctgggcgatggttaacatcaattcgcttccgatggttgtgcagctttcaggcgaagaaaaagtgggcacttttgtggggtattactacttcttttctttcagctcgcagatcgtttccccgattttattcggcgttatccgcgacctggtcggccattacagggtgttattcctgtacgcctgtatcgcctttgtgcttgccgccttcagccttttatttgtgcgccacggcgaagacaagccggttcaggtaagcgcctcgcaggttcttgacgggcttgaggattag

SEQ ID NO: 42464 - protein, 244 aa, Unknown
  Obtained from environmental sample
  SIGNAL (1)...(18)
  misc_feature (1)..(244): Xaa is any amino acid
MMSAVMMLLALAVLALFVREPKQAYINESEGESKKADIKQLGKDEKKSLLLILFGVFFWFTGYNAVETFFTLYATNTLGMDAGGASMTLSIFSLTFLAFAVPAGYIAVKTGRRKAILIGLSGLFILFLPMVFLANAWVARACLFLGGFFWAMVNINSLPMVVQLSGEEKVGTFVGYYYFFSFSSQIVSPILFGVIRDLVGHYRVLFLYACIAFVLAAFSLLFVRHGEDKPVQVSASQVLDGLED

SEQ ID NO: 42465 - DNA, 867 bp, Unknown
  Obtained from environmental sample
  misc_feature (1)..(867): n is a, c, g, or t
gtgactttaaaaaacaacgccatggacgacccaagccatatttttaacgttggcgaatattatgtaaagcataaccagtataatcaggctttttacgcgtatcaaaaatatgttaaatgctgtccaaacggcgagaataaagatgctgccattgagcgcatgaagaaaatcgccccttatgttaaagaccttcaacagccgccgaaaccgggagatatgaatcgttcttttaaaaaggaccagattgttttctgcgagggcgagccgggagacgaactttttatcattcaaaagggctctgtcaagataattaagatcaccgataacaatgaaattttgcttgccgttttaaaaacaggggatattttcggggagatggcgctccttgaatcaaagcccagagccgccggagcggtcgcttatgaagactgccagcttatggcagtaaacagggcaaacttccagcagatgattcaaacccagccccagcttatagcacgtcttacaaccctgttgtcggaaagaatatggctcatttataaacaactggcaaatacccaaataaacgatccattgggcagaatgtttgatatgctccagattcagcttgataaaaaaagagtggatgtcggcagtacgacaaattattcgtttgacttcggtttaaaagagcttggcaatatggtagggctgtctcagggagacgcctcaatatacggcaaaaaattgatggaaaaccatactttccagatagtaaatgaaaagttagttattaaagatttaggcgaaattccaaggcaaatatcatattaccgcaaaatgcagcagttagaaaaagcccgcatggaaaagaaacctatcgcataa

SEQ ID NO: 42466 - protein, 288 aa, Unknown
  Obtained from environmental sample
  DOMAIN (74)...(163): Cyclic nucleotide-binding domain
  misc_feature (1)..(288): Xaa is any amino acid
MTLKNNAMDDPSHIFNVGEYYVKHNQYNQAFYAYQKYVKCCPNGENKDAAIERMKKIAPYVKDLQQPPKPGDMNRSFKKDQIVFCEGEPGDELFIIQKGSVKIIKITDNNEILLAVLKTGDIFGEMALLESKPRAAGAVAYEDCQLMAVNRANFQQMIQTQPQLIARLTTLLSERIWLIYKQLANTQINDPLGRMFDMLQIQLDKKRVDVGSTTNYSFDFGLKELGNMVGLSQGDASIYGKKLMENHTFQIVNEKLVIKDLGEIPRQISYYRKMQQLEKARMEKKPIA

SEQ ID NO: 42467 - DNA, 654 bp, Unknown
  Obtained from environmental sample
  misc_feature (1)..(654): n is a, c, g, or t
gtgaaagtaaacgccggaaccgctttaaggcttggcaggttatttttagaaattatcgtagctccggattatgatgaaaacgcgcttgatattttaaaaaagaaaaaaaatctgcgaattataaaactgaaaaacgccccaaaagaaaaacatgaatatatagcggttgacggcggcgttgtagttcaacagagcgaccgcatactgcttgaaaaatgggaagtagttacaaaagctgtcccgaatgaaagtgatattaaagatatgatttttggtatgagggcggtatcatttgtaaaatcaaacgcgattttaattgttaaagatcaagccgcgaccggtataggttgcggacaggtaaaccgcatctggtccgcaaagcagtctcttgaaagaagcgccgccattttaaaggctgagtctgaagaaacggcggataccggcggaactccttggaaagacagtcttcccgcgagagttctagcctcagacgcatatttcccatttgcggatgttgtagaagctgctgcgcaggccgggataaaagctataatacagcccggcggctccataaacgacaaactttcaatagaggcatgtgataagcacgggatagcgatggtctttacgggtattcgtcactttaagcattaa

SEQ ID NO: 42468 - protein, 217 aa, Unknown
  Obtained from environmental sample
  DOMAIN (1)...(139): AICARFT/IMPCHase bienzyme
  misc_feature (1)..(217): Xaa is any amino acid
MKVNAGTALRLGRLFLEIIVAPDYDENALDILKKKKNLRIIKLKNAPKEKHEYIAVDGGVVVQQSDRILLEKWEVVTKAVPNESDIKDMIFGMRAVSFVKSNAILIVKDQAATGIGCGQVNRIWSAKQSLERSAAILKAESEETADTGGTPWKDSLPARVLASDAYFPFADVVEAAAQAGIKAIIQPGGSINDKLSIEACDKHGIAMVFTGIRHFKH

SEQ ID NO: 42469 - DNA, 1815 bp, Unknown
  Obtained from environmental sample
  misc_feature (1)..(1815): n is a, c, g, or t
atgaccatagtaatcgttgaagacaattatatccacgaaaccgacgggatggcgatatcaacccaccggttccgtaatgagctgataaagcggggccataccgtaaggattgtagcaatcggcgttgaaggcccggatatgtacggagtcaaggaacactatgttcccatcgcgtctgaggtagccagaaaacataatcagcattttgccaagttcgacaagaaggttgtggcaaaggcctttgaaggcgccgatgtagtgcatctgcttttcccctggcagatggagcgccgctgtctatcgctggcaaaaaagatgggtattccggtaagcggcgccttccatttacagccggagaatgtcacctataacatgaaaataaaacttctgcngttcgcgaacacttttttttatttccttttcaggacatggctctacggaaaaattgaaaatatacattgcccgtcccagtttaccgcgcgggagctgtcgcgccataaatataccgcgcggtttcatgttttttccaacggcatatcggacaggtttgtgcccccttccgccccggttcccaaagaaccggacacgatccgcattcttatgataggcaggattgcggaagaaaaacggcaggacatacttattaaggcggtgcggcactccaaatacaaagataaaatacaactccattttatcggtcgggggcccatgtacggccgttaccaccgctacgggttaaagctccccaggccgccgatctttgaaccggaatttattccacaggaaagaatgccggaacagatatataaagcggacctttatgtgcacgcgtcggaagtggaaatagaaggcatcgcctgtatagaagccatttcctgcggcaaagtgccgatcatcgcggactcaaaaacttcggcggccccccaattcgcgctggatgaacggagtcttttcaggaagggaaaatacctggacctgcgggacaagattgactactggattgagcatcccgaagagcgggaacggatgggcgcggaatatgccaaaatgagggagaaatacaacattaaatattcagtgtcaaaactggaaaagatgtttaaggacagtatcagggattttaaaaccgcgaagatgattcgggaagacaaaaaattaacgcgctactaccgccgtgtaaaacggggcaatttgataaaagaagcgataagcaagttgctttatttcagcatcgccatacctgttctgacggtcctgctgcggtgctggttcggcctcaaaatagaaaacaggaaagttttgcgcaagataagaagatcgggcgccgtcgtcatatgcaaccatatccaccagatggattcgcccatttgcggggtagggattccatggcggaaacttatttatgtaagcataccggaaaacttttccatgaaggtcgcgggtcttttcgtggaaatattcggatccgtccccatcccttcgacgcccaaggaattacagattttcatctataccctttcaaggaaactgagacaaagacaatcggttctcttttttccggaaggcaagcggataaattataatgaaaatatactggagttccagcgcggggcgttctatcttgccgcggacgcgcgggtgccggtgctccccataaggatacaaccgcgtaatcccgacggtctgttgaaattggtgcggaaaaaaccgtgttttacccttgtttttggggaacctctgtatcctgatgacagtatgtccaataacgaagcggccgacgacctgaaggaacgggctgaaaaagccatgatataa

SEQ ID NO: 42470 - protein, 604 aa, Unknown
  Obtained from environmental sample
  DOMAIN (425)...(555): Acyltransferase
  misc_feature (1)..(604): Xaa is any amino acid
MTIVIVEDNYIHETDGMAISTHRFRNELIKRGHTVRIVAIGVEGPDMYGVKEHYVPIASEVARKHNQHFAKFDKKVVAKAFEGADVVHLLFPWQMERRCLSLAKKMGIPVSGAFHLQPENVTYNMKIKLLXFANTFFYFLFRTWLYGKIENIHCPSQFTARELSRHKYTARFHVFSNGISDRFVPPSAPVPKEPDTIRILMIGRIAEEKRQDILIKAVRHSKYKDKIQLHFIGRGPMYGRYHRYGLKLPRPPIFEPEFIPQERMPEQIYKADLYVHASEVEIEGIACIEAISCGKVPIIADSKTSAAPQFALDERSLFRKGKYLDLRDKIDYWIEHPEERERMGAEYAKMREKYNIKYSVSKLEKMFKDSIRDFKTAKMIREDKKLTRYYRRVKRGNLIKEAISKLLYFSIAIPVLTVLLRCWFGLKIENRKVLRKIRRSGAVVICNHIHQMDSPICGVGIPWRKLIYVSIPENFSMKVAGLFVEIFGSVPIPSTPKELQIFIYTLSRKLRQRQSVLFFPEGKRINYNENILEFQRGAFYLAADARVPVLPIRIQPRNPDGLLKLVRKKPCFTLVFGEPLYPDDSMSNNEAADDLKERAEKAMI

SEQ ID NO: 42471 - DNA, 471 bp, Unknown
  Obtained from environmental sample
  misc_feature (1)..(471): n is a, c, g, or t
ttggcggaagaatctttggcgcaaaacgacggcgcggacgcttccgtcagatcagaggcttatgaaatgatcgcttccggttatggccatatttgtatgttaaagtcaacggcctgggttatagccaatggtccgaaagtggaggaaaacgccaaaaaagccctgcggcttgacagccggaacgcgagggccctatatatgctttcctcccgttgggtcttcggccccggcctgttcggcgatcccaaacggggaattacggagatggaaggtatacttaacggtccggcggataaggaaagagacagttattataatgtttataccgccctcggctatgcctatatgcgccttaaccggaatcaggaagcgttgtcctggattcaaaaggcccttgccctgtatccgaccaataaattttccctggatttacaatcccaaattcaacagaaagtcaggacggcgaaatga

SEQ ID NO: 42472 - protein, 156 aa, Unknown
  Obtained from environmental sample
  DOMAIN (105)...(138): Tetratricopeptide repeat
  misc_feature (1)..(156): Xaa is any amino acid
MAEESLAQNDGADASVRSEAYEMIASGYGHICMLKSTAWVIANGPKVEENAKKALRLDSRNARALYMLSSRWVFGPGLFGDPKRGITEMEGILNGPADKERDSYYNVYTALGYAYMRLNRNQEALSWIQKALALYPTNKFSLDLQSQIQQKVRTAK

SEQ ID NO: 42473 - DNA, 1110 bp, Unknown
  Obtained from environmental sample
  misc_feature (1)..(1110): n is a, c, g, or t
atggataatacggatttttttgccgaagcgttagctgaaatctgccgccgttcgcttgtcacgcaggataagccgggcgagccttgctcgccattacgttgggccattatcgcaaaccccgcggccggcggttttaccatgcgttcccgccgtaataagtgccgcaaggcgctggagcaatgcctggccgaagcgcggaaaaaccccttacgacaagattgcgctcccgcgtcggtggccgccgctcttgcctccaatggattggcgcagaccgacgggcacggctgcgcggcaaaatacgccgaagccctgattgaggaagccaaaacaaataaagagtctttttaccttgtcatcatagccgggggcgatggcaccagttgggaagtcctgtccgccctataccacgcgccccgggaagcgcgctcaaacatggctattctccgcctgcctatgggaaccggcaacgacggcgccgactcgcctaatcttgccgacgcgctcatgcttttaataaaaccgtcgcgtattgaatttacccccgccctcaggcttgtaaccgcgccgggtggacaggccgcgaaaaaccaccccgcttgtcttgccttcaacatcctgtccgtgggccttgacgctttcgtaacccacatgaccaacaagatgaagggaaagcttcccggcgattcctacaaactctgggtggacatcgcctcgctgctctacgaccgcttgtatacggtcgatttccttgacgtgaaagccgacggcggcgcgataactctgcatgaaaaattgctcctgcttgccgtcggcgcttccggtcacaggacctacggcgcccaaaagaaaatactccccgacgatcggaacgtctgcgccctcaagcagatgcccctgctgcgcaaggttgccttaaaggaccttttcacaaccggaaaacatattgacaagccggaagcgatcctgttcaacgcccgccgcgtggaatttaccggcagtttcccaattctcgcccagatggacggcgaagctatcctgctgcagccggaagatttccccgccgcgatagagctcaccgagccggttatcccggtgctgaagcttggctaa

SEQ ID NO: 42474 - protein, 369 aa, Unknown
  Obtained from environmental sample
  DOMAIN (33)...(185): Diacylglycerol kinase catalytic domain (presumed)
  misc_feature (1)..(369): Xaa is any amino acid
MDNTDFFAEALAEICRRSLVTQDKPGEPCSPLRWAIIANPAAGGFTMRSRRNKCRKALEQCLAEARKNPLRQDCAPASVAAALASNGLAQTDGHGCAAKYAEALIEEAKTNKESFYLVIIAGGDGTSWEVLSALYHAPREARSNMAILRLPMGTGNDGADSPNLADALMLLIKPSRIEFTPALRLVTAPGGQAAKNHPACLAFNILSVGLDAFVTHMTNKMKGKLPGDSYKLWVDIASLLYDRLYTVDFLDVKADGGAITLHEKLLLLAVGASGHRTYGAQKKILPDDRNVCALKQMPLLRKVALKDLFTTGKHIDKPEAILFNARRVEFTGSFPILAQMDGEAILLQPEDFPAAIELTEPVIPVLKLG

SEQ ID NO: 42475 - DNA, 648 bp, Unknown
  Obtained from environmental sample
  misc_feature (1)..(648): n is a, c, g, or t
atgaagattttccaccttcccgaagaatgcgccgctattctctntgatatggattcaaccctgtactcgaatcccgattacgcccagtctcagatcgatcttcccattgaacggcttgccggcctgcagggtaaaaccttctctgaaatgaaggatgaaattgccatgttcaggaataactgggcccttgaacatgaggggcagactatcagccttgccaatatttttgccgcctttggcgtcagcatttatgaaagtgtcagatggcgggaagaactgtgcaagccggaacaataccttacggaagataaacggctgcgtaaggcgcttgaaaaacttgaatcctgtttttatctggcgattgtaacgaataaccccgtctccgtggctgaaaggaccctgtatgcgcttggcgcaggcgacctgttccatacgattgtcggccttgatacgtgcggcgtatccaaaccccacgaagcaatgtttatgaaggcggctattcaatgcggcgccccgcctgaaacctgcgtcgctgtgggcgaccgttacgacatagacattgcccttcccctggaacttggcatgggcggcattctcgttgacggggtggaagacgtgtataaactccctgaaattcttgtaaagtag

SEQ ID NO: 42476 - protein, 215 aa, Unknown
  Obtained from environmental sample
  DOMAIN (10)...(203): haloacid dehalogenase-like hydrolase
  misc_feature (1)..(215): Xaa is any amino acid
MKIFHLPEECAAILXDMDSTLYSNPDYAQSQIDLPIERLAGLQGKTFSEMKDEIAMFRNNWALEHEGQTISLANIFAAFGVSIYESVRWREELCKPEQYLTEDKRLRKALEKLESCFYLAIVTNNPVSVAERTLYALGAGDLFHTIVGLDTCGVSKPHEAMFMKAAIQCGAPPETCVAVGDRYDIDIALPLELGMGGILVDGVEDVYKLPEILVK

SEQ ID NO: 42477 - DNA, 594 bp, Unknown
  Obtained from environmental sample
  misc_feature (1)..(594): n is a, c, g, or t
gtggggcgtttctaccggcttgacgaatacgagggatggtgctttacggcgcatgggcggtaccccacaaatacgccggggtggtggggcggcgcgcatccgttcgcgcttttggactataccgtagtgcataacggcgaaatatcatcctacgacgccaaccgccgggctattgaaatgcacggctataaatgcacactgcagaccgacactgaagttattacatatattatagactatcttcacaggaaaaaggggcttacgctgaacgaaatcgcctcggttatcgccgcgccgttttggcaggtaatagaacaaatgccgcctgaagagcgcgaaacgcatgagtacctgcgaattatgtttagcgcgcagcttataaccggcccgttttcaatacttgtcggttttgacggcgggctgatggcgttaaacgaccggctaaagctgcggagcatggttattggtgagaagggttcaacagtgtatatggcaagcgaggaagcggccatccgcgtaattgagcctgatctggacacggtttgggcgcccgcgggcgggcagccggttattgtcagacttgcggggaggtga

SEQ ID NO: 42478 - protein, 197 aa, Unknown
  Obtained from environmental sample
  DOMAIN (1)...(168): Glutamine amidotransferases class-II
  misc_feature (1)..(197): Xaa is any amino acid
MGRFYRLDEYEGWCFTAHGRYPTNTPGWWGGAHPFALLDYTVVHNGEISSYDANRRAIEMHGYKCTLQTDTEVITYIIDYLHRKKGLTLNEIASVIAAPFWQVIEQMPPEERETHEYLRIMFSAQLITGPFSILVGFDGGLMALNDRLKLRSMVIGEKGSTVYMASEEAAIRVIEPDLDTVWAPAGGQPVIVRLAGR

SEQ ID NO: 42479 - DNA, 1065 bp, Unknown
  Obtained from environmental sample
  misc_feature (1)..(1065): n is a, c, g, or t
gtggcgataaattacatatatcccgaatatgaagttgcgcgcaattacgaccgctgtatcgtctgccgggtctgcgaacgccagtgcgtgaacgaagtgcatgaatttctgcctggcgccgataaaatggtttgcgacgacgctaaatgcgttaactgccaccgctgtgtttcgctctgcccaacccgcgccttaaaaatcgtacacagcggcagcacatataaacaaaatgtgaactggaactgcanaactatcaacgaaatttacaagcaggcggactcaggcggcgtactgttgtcaagcatgggtaatcctgaaaattatccagtgtactttgataaaatacttttaaacgcttcacaggttacaaacccgtccatagaccctttgcgcgagccgatggagacaagggtatccctcggcgcaaagcccgaaaaaatagaacgagacggaaaaggaagaattatcaacaacctgccgccgcagcttcacctgtcgataccggtaatgttctccgcaatgagttacggttccataagttacaacgcgcacgaaagtctggcgcgagccgccgaagagctcggtattctttacaacacgggcgaaggcgggctgcatgaagatttttataaatacggaaaaaacacgattgtacaggtagcctccggacgtttcggcgttcatactcaatatttgaactcaggcgcggcagttgagatcaaaatgggtcaaggcgcaaaacccggtataggtgggcatctgccgggaaagaaaattgtcggcgatatttcccgtaccagaatgattcccgaaggaactgacgcaatatcccccgcgccgcatcacgatatatactctattgaagatttgcgtcagcttgtcttctctttgaaagaagcgacaaattatcaaaagccgataattgttaagatagccgccgtccataacgttacagccattgcaagcggcatagcaagaagcggcgcagacataatagccattgacggctttcgcggcggaacgggagctgcgccgacacgcatctcggccaatctgtcattgtga

SEQ ID NO: 42480 - protein, 354 aa, Unknown
  Obtained from environmental sample
  DOMAIN (43)...(66): 4Fe-4S binding domain
  misc_feature (1)..(354): Xaa is any amino acid
MAINYIYPEYEVARNYDRCIVCRVCERQCVNEVHEFLPGADKMVCDDAKCVNCHRCVSLCPTRALKIVHSGSTYKQNVNWNCXTINEIYKQADSGGVLLSSMGNPENYPVYFDKILLNASQVTNPSIDPLREPMETRVSLGAKPEKIERDGKGRIINNLPPQLHLSIPVMFSAMSYGSISYNAHESLARAAEELGILYNTGEGGLHEDFYKYGKNTIVQVASGRFGVHTQYLNSGAAVEIKMGQGAKPGIGGHLPGKKIVGDISRTRMIPEGTDAISPAPHHDIYSIEDLRQLVFSLKEATNYQKPIIVKIAAVHNVTAIASGIARSGADIIAIDGFRGGTGAAPTRISANLSL

SEQ ID NO: 42481 - DNA, 795 bp, Unknown
  Obtained from environmental sample
  misc_feature (1)..(795): n is a, c, g, or t
ttgtctgtgtttttaaacgtcgtttggattttgttttttgctggcgcatttatagcctgccttatccaatgttttttttttggcgacagcggaattttcaacgaggttatgcaaagcgtttttagcatgtctaaaacggcttttgaaattgccataggcttaacaggaattttggctttttggcttgggataatgaaaataggtgaaaaggctggcgcggttcaaatgctagccagattggtttcccctttgatgaaacggcttttcccaagcgtcccgtcaaaccatcccgcaatgggcagtatgctcatgaacataagcgcaaatatgctcgggctggataacgccgccactcctcttggtttaaaagctatgaaggaattgcaagacataaaccctaacaaagataccgcgagcgatgcccagattttatttttggttttgaacgcgagcggcttaacgctcattccggttagcataatgacttatagggcaaagctaggagcggcaaaccccgctgatatttttttgcctattttattcgcgacgtttttcagcaccgtggctgggattttggtcacttccttttttcaaaaaattgaaataaaaaatatggttttcatatcttggtttgttggtctctgcgcggcggtgttcgggactctttggtatttttctacgctctcggcagaggcgatgggtgttgccagcgcgtttttgggcggcatagttttatttgccattgtcatattctttttgattttagccgctgttaaaaaagtatatgccttttga

SEQ ID NO: 42482 - protein, 264 aa, Unknown
  Obtained from environmental sample
  DOMAIN (51)...(171): Nucleoside recognition
  misc_feature (1)..(264): Xaa is any amino acid
MSVFLNVVWILFFAGAFIACLIQCFFFGDSGIFNEVMQSVFSMSKTAFEIAIGLTGILAFWLGIMKIGEKAGAVQMLARLVSPLMKRLFPSVPSNHPAMGSMLMNISANMLGLDNAATPLGLKAMKELQDINPNKDTASDAQILFLVLNASGLTLIPVSIMTYRAKLGAANPADIFLPILFATFFSTVAGILVTSFFQKIEIKNMVFISWFVGLCAAVFGTLWYFSTLSAEAMGVASAFLGGIVLFAIVIFFLILAAVKKVYAF

SEQ ID NO: 42483 - DNA, 1023 bp, Unknown
  Obtained from environmental sample
  misc_feature (1)..(1023): n is a, c, g, or t
atggcagaaatattttccgaagatgaaattaaacagcttctcgacgctataaacgcgggagccgcggaaccggaggagatagccccgctttcgcgaaaaatcaaaatatacgattttaaacgaccggataaattttccaaagaacagataagggcgatttcaatcatccacgaaacctttgctcgcttaacaagcgacaggctttccgcccaacttcgcagtatggttcacgtccatgtcgcttcggtagatcagttaacatacgaagaatttatccgctccattcccaccccgacaaccttggctatcatcaatatggaccccctcaaaggaaacgctattttagaaatagaccccgcgattacattttcaataatcgaccgtctttttggcggtacgggcgaaggcaccaaatcccagcatgaattgacggatatcgaacagtcggtaatggaagggattatcgtccgtattttagggaatatgcgcgaagcgtggactacggttatcgacctgcgcccccgccttgggcagattgacaccaatccgcagtttgcgcaaatcgtaccgcctacggaaatggtcgttcttgtaacgcttgaaacaaaagtaggcgacgtggaaggcatgatgaacttctgtattccctatcttacaatagagccgataatcggcaaattgtccgcccaattctggtattcttcggtacgccgtaacgccaccacggaaaacctcaatgttctaaaggataaactcgcaacggtcgatattaatgtaacagccgaaattggaaagataaacgtgccggttcgggacgttctttccttacagattggggatgtaatcaggctttataatacacgtattggcgatccctattctcttaatattggcacaaggaaaaagtttctgtgccgtcccggcattatcgggaagaaaatcgctgttcagataacgcagaagatagacgagcttgtgcatgaggaatttgaagagctcgcgtctgaaggagaggaattatga

SEQ ID NO: 42484 - protein, 340 aa, Unknown
  Obtained from environmental sample
  DOMAIN (248)...(325): Surface presentation of antigens (SPOA) protein
  misc_feature (1)..(340): Xaa is any amino acid
MAEIFSEDEIKQLLDAINAGAAEPEEIAPLSRKIKIYDFKRPDKFSKEQIRAISIIHETFARLTSDRLSAQLRSMVHVHVASVDQLTYEEFIRSIPTPTTLAIINMDPLKGNAILEIDPAITFSIIDRLFGGTGEGTKSQHELTDIEQSVMEGIIVRILGNMREAWTTVIDLRPRLGQIDTNPQFAQIVPPTEMVVLVTLETKVGDVEGMMNFCIPYLTIEPIIGKLSAQFWYSSVRRNATTENLNVLKDKLATVDINVTAEIGKINVPVRDVLSLQIGDVIRLYNTRIGDPYSLNIGTRKKFLCRPGIIGKKIAVQITQKIDELVHEEFEELASEGEEL

SEQ ID NO: 42485 - DNA, 408 bp, Unknown
  Obtained from environmental sample
  misc_feature (1)..(408): n is a, c, g, or t
ttgatttattggggaaagcaccgtcatgttatggctccctgcggcggctggcaaagcaccaaagtcggcgcgggcccttgccctatcgaaacatcagaaggctggcttgttttttatcacggagttttgacaagctgtaatggctttgtgtacgcattcagcgcggcgttgatggatattgaaaaaccgtggaaaataatcgcgcggccaaaaccgtatatcatcaatccgcgcgaaatttatgagctggcgggcgatgtacccaatgttaccttcccggtagccgcgctggtggacaaagactcaggcaggatagcgatttattacggatgcgccgatacggtaaccggcctggtttttggcaaagttgaagaaattattgactgggtaaaaaagaaccggatgtag

SEQ ID NO: 42486 - protein, 135 aa, Unknown
  Obtained from environmental sample
  DOMAIN (1)...(132): Domain of unknown function (DUF377)
  misc_feature (1)..(135): Xaa is any amino acid
MIYWGKHRHVMAPCGGWQSTKVGAGPCPIETSEGWLVFYHGVLTSCNGFVYAFSAALMDIEKPWKIIARPKPYIINPREIYELAGDVPNVTFPVAALVDKDSGRIAIYYGCADTVTGLVFGKVEEIIDWVKKNRM

SEQ ID NO: 42487 - DNA, 477 bp, Unknown
  Obtained from environmental sample
  misc_feature (1)..(477): n is a, c, g, or t
atggtacgactggtattgcagacagtccctatcttcagcgacaacatggttgtgcagcacggaaaaccggtcagagtctggggatggagcggagatgaacagggtacggtcagtgtccgctgggaatgtgaggaacacagtgtttccacgtcaaccgtagtgtatcgcggtgagtggagcctgttgctgccgcccctggcagccgggttaagcggcgagttggtcgtcagcgacagatgggacgagatacgttttcgcaatgtaataaccggcgacgtatggtttgccggcggccagagcaacatggaactggaactggtaaattgcaaaaacggtcccgctgaacttgccgcctgcaccaattccaacatacgtttttatcaggtagttaaacgcgccattgtagacgatgattaccttcgtgaagaagcggcaagcaagtggcaatctgtgcgccggatacagccgctatgttaa

SEQ ID NO: 42488 - protein, 158 aa, Unknown
  Obtained from environmental sample
  misc_feature (1)..(158): Xaa is any amino acid
MVRLVLQTVPIFSDNMVVQHGKPVRVWGWSGDEQGTVSVRWECEEHSVSTSTVVYRGEWSLLLPPLAAGLSGELVVSDRWDEIRFRNVITGDVWFAGGQSNMELELVNCKNGPAELAACTNSNIRFYQVVKRAIVDDDYLREEAASKWQSVRRIQPLC

SEQ ID NO: 42489 - DNA, 312 bp, Unknown
  Obtained from environmental sample
  misc_feature (1)..(312): n is a, c, g, or t
atgctgaacggacaggacgtgcgggagcttttaggcaagcggattcagttttaccggaaacaacggcaattatcccaagccactcttgcggaaaaagcgaacatttcaatcacattcctcagtaaaatcgagcggggaattaagtatcccacttcggaaaccatatccggtattaccaatgggctgggggtggaactctgtgatttgttccggcaagacgaaatgccggatacttatgggaatatgctagaccggctaaaaaacgatataatgcaaacggttgaggtggtattcaaagcatatagagaataa

SEQ ID NO: 42490 - protein, 103 aa, Unknown
  Obtained from environmental sample
  DOMAIN (15)...(69): Helix-turn-helix
  misc_feature (1)..(103): Xaa is any amino acid
MLNGQDVRELLGKRIQFYRKQRQLSQATLAEKANISITFLSKIERGIKYPTSETISGITNGLGVELCDLFRQDEMPDTYGNMLDRLKNDIMQTVEVVFKAYRE

SEQ ID NO: 42491 - DNA, 1392 bp, Unknown
  Obtained from environmental sample
  misc_feature (1)..(1392): n is a, c, g, or t
ttgaggtggtattcaaagcatatagagaataaaaattgccgaaaagccataaggaaggataaagcaatggccaaattcgcgtttataggagcaggcagttttgggtttaccagaactttggttcgggatattttaacattcgacgcttttaaggacgctacaatagcgcttatggatattgacgaaacccgtcttgattatattacgaaagcaattaagaaaattgtaaaggctggaaaccacggagcaaaaataatctccactaaaaatcgcgccgaagcattggaaggcgcggacggcgttctttgcaccattctaaacggcgatgtcgatatttggcgttacgacattgaaatcccaaaagaatacggcgttgatattaacgtcggagataccagaggcccagccggaattttccgcgccctgcggacaatccccgttatgcttgacatttgcaaagatatagaaaaatactgccccaacgcggtattcctgaactatacaaacccgatggccatgctatgccgcgcaatgcaaagccggtttccaaacctgaaaatttccggcctttgccacagtgtacagggaaccgccataatgctcgcccattggattggcgcaaaagacgaagatatcacatacacatgcgcgggtatcaatcatcaggctttttatctggattataaatggaaaggaaaagacgcttatcctcttttaagggaagcgatgaaagatccaaaaatatacaacgaagaaattgtgcgtaacgaaatgtttctgcttttggattattatccgacagaatcttcgggccataattcggaatacaacgcatggttccgtaagcgtcccgatttaatcgaaaaattctgtgttcacggaacaggctggaatccgggcgtttacgcttatattctgaatgaatacctcatacaaaaagattcatggcaaaaaggaatagaagactggttaaatgagccaaacgtcaatctgagccgtgggcatgaatacgcggcttacatttttaacgcgatgttcggcgataaaacaatatttaaatttaacggcaatgttttgaacaaaggcttaattgaaaatcttccgcagggcgcctgcgtagaagtgcctgtactcacctcctctcacggatttgaagcgataaagatcggcaagcttccggatcaactggcggcccttgtacacacaagttccatctgtgaagaattggcagttgaaggcgctcttgccagcgactcgcgaaaagtttatcaggcaatcgcatttgatccattaacttcggcggtattgggcattaaggaaataaaggaaatgacaataaaaatgttcaaacagaacgccgactatctatcagggtataattgcgttttatga

SEQ ID NO: 42492 - protein, 463 aa, Unknown
  Obtained from environmental sample
  DOMAIN (25)...(432): Family 4 glycosyl hydrolase
  misc_feature (1)..(463): Xaa is any amino acid
MRWYSKHIENKNCRKAIRKDKAMAKFAFIGAGSFGFTRTLVRDILTFDAFKDATIALMDIDETRLDYITKAIKKIVKAGNHGAKIISTKNRAEALEGADGVLCTILNGDVDIWRYDIEIPKEYGVDINVGDTRGPAGIFRALRTIPVMLDICKDIEKYCPNAVFLNYTNPMAMLCRAMQSRFPNLKISGLCHSVQGTAIMLAHWIGAKDEDITYTCAGINHQAFYLDYKWKGKDAYPLLREAMKDPKIYNEEIVRNEMFLLLDYYPTESSGHNSEYNAWFRKRPDLIEKFCVHGTGWNPGVYAYILNEYLIQKDSWQKGIEDWLNEPNVNLSRGHEYAAYIFNAMFGDKTIFKFNGNVLNKGLIENLPQGACVEVPVLTSSHGFEAIKIGKLPDQLAALVHTSSICEELAVEGALASDSRKVYQAIAFDPLTSAVLGIKEIKEMTIKMFKQNADYLSGYNCVL

SEQ ID NO: 42493 - DNA, 678 bp, Unknown
  Obtained from environmental sample
  misc_feature (1)..(678): n is a, c, g, or t
atgccgccaaacgggcaagacatccgtattgaggaattggtggagaaggcgcgaagggtacagccgtggctcttatccgctgaccgtacctgcggcggcgtttgcgaaaactatgtaacgcctgagcaaagcgtgcctggcaagccgcttgccgtaccatgggaaagctgtgtaagcatgggtgacggcttcgcgtacagttacgatgataattacaaatcaaccaagcgcctgctgcgtctgctgatagaaatcgtggcgaagggcggtaacctggcgcttaacgttgccccccagccggatgggcgtttgcccaagcccgcgttatgccgcatggcggaaatgggcgcgtggcttacaaaatacggcgaagcgatttatggtacccgcgtttgcgctccatacacatcggacgaatttgccttcactcaaaaggcaggggagggtaaggtgtttgcgttctatctgagcgacaaagggtttacgccggaactaacaattccgtatgataggaaacatgttgtcgcagttaagaacatgacaacaggcgaaaaaatactttttaaaatgaaaaatgattgcgttgcaattacgattgatgcacctgcgcacagtgaagcgtacggcggtgagtttgtagcggaagtgtttgaactaacggttgagactaaagaatga

SEQ ID NO: 42494 - protein, 225 aa, Unknown
  Obtained from environmental sample
  misc_feature (1)..(225): Xaa is any amino acid
MPPNGQDIRIEELVEKARRVQPWLLSADRTCGGVCENYVTPEQSVPGKPLAVPWESCVSMGDGFAYSYDDNYKSTKRLLRLLIEIVAKGGNLALNVAPQPDGRLPKPALCRMAEMGAWLTKYGEAIYGTRVCAPYTSDEFAFTQKAGEGKVFAFYLSDKGFTPELTIPYDRKHVVAVKNMTTGEKILFKMKNDCVAITIDAPAHSEAYGGEFVAEVFELTVETKE

SEQ ID NO: 42495 - DNA, 606 bp, Unknown
  Obtained from environmental sample
  misc_feature (1)..(606): n is a, c, g, or t
atgaaccaggaaaaaatcgcatctttacattcaaggtacaatccctgcggggaagctgaacggtatattggttccctttccctgaacgagaaaatccgcttttttatcctgatagaaccagggttaggctacatggtcgctcccctaaaaagaagggtcccgggcgcaaaggttattgcgctccacgccgaaaaacccggcctgacacctacggaggccattgagcccgtcgaaaaacctgattcacagtggcatcctgaaacaagcgtatccgtacaggaatttctggaagctgaaatcccggattccgaggcttccgaaatacgccttttggaatggcggcctgcgcttaacgtatacggtcactcgtaccttgtccttttggaagaagcggctgcgtttataaagcgctcggacgcaaatgcaaggacaacaaaaactttcggttccaagtggtttaagaattttatcaaaaacctgtcaatcataaaaacagcaataaaccctattagcagtaattcgccattggtttccccagccattgctggtaacaggcgcgggtcctggcctggaagatgcaatccagattatcaaacaaactattaa

SEQ ID NO: 42496 - protein, 201 aa, Unknown
  Obtained from environmental sample
  misc_feature (1)..(201): Xaa is any amino acid
MNQEKIASLHSRYNPCGEAERYIGSLSLNEKIRFFILIEPGLGYMVAPLKRRVPGAKVIALHAEKPGLTPTEAIEPVEKPDSQWHPETSVSVQEFLEAEIPDSEASEIRLLEWRPALNVYGHSYLVLLEEAAAFIKRSDANARTTKTFGSKWFKNFIKNLSIIKTAINPISSNSPLVSPAIAGNRRGSWPGRCNPDYQTNY

SEQ ID NO: 42497 - DNA, 894 bp, Unknown
  Obtained from environmental sample
  misc_feature (1)..(894): n is a, c, g, or t
ttgctggtaacaggcgcgggtcctggcctggaagatgcaatccagattatcaaacaaactattaaaaaagaaatggcgcgaacagctttttttatcctggcatcttcttcatcagtagcggctctggaatcaaacgatttagtccccgatttggcaattagcacagacggatccaactgggccaggcttcacctttataactctttcagaagcaattccagaaaaaaagcctacccccttgcactgtcgcttactgcggccattccctcacagtgcgacagtttaccgcttttggtaatctgcgacgggagcctttggcaaacgctgattctacaagaaatgcgaattccctatatcaccctgccgcaacggggaaccgttaccgccgccgctttggatttggcttttgctcttagcagtggacgaatttatattgccggcatggatttggaaaaccgggacatgcgttcccatgcgcggccttacagctttgatatcctgatcgaggagaaagccataagaacagatcctgagtattcccaaacttacaggaggtcttctctgctaaaagcgggcgggagctacggaatttacgcttcctggtttaaaaaacagctttccctttacccgaggccccttttcccgataggaaagaacaattctgtttttgacccttcaaaagctacgtttccacgcaccggagaacaaggaggggctacgctggaattccaaaccgtccctttgagttttaataccagcccgcgcgaaaaagccatcgaggttctgaaaaacggtttaaaagatcctgccctatcggacgcgcttcaaaaagaactaaaaacccttattcccgagttcaatgaatgttttttatcacaggatttatatggataa

SEQ ID NO: 42498 - protein, 297 aa, Unknown
  Obtained from environmental sample
  misc_feature (1)..(297): Xaa is any amino acid
MLVTGAGPGLEDAIQIIKQTIKKEMARTAFFILASSSSVAALESNDLVPDLAISTDGSNWARLHLYNSFRSNSRKKAYPLALSLTAAIPSQCDSLPLLVICDGSLWQTLILQEMRIPYITLPQRGTVTAAALDLAFALSSGRIYIAGMDLENRDMRSHARPYSFDILIEEKAIRTDPEYSQTYRRSSLLKAGGSYGIYASWFKKQLSLYPRPLFPIGKNNSVFDPSKATFPRTGEQGGATLEFQTVPLSFNTSPREKAIEVLKNGLKDPALSDALQKELKTLIPEFNECFLSQDLYG

SEQ ID NO: 42499 - DNA, 429 bp, Unknown
  Obtained from environmental sample
  misc_feature (1)..(429): n is a, c, g, or t
atgagccttgaagtgctgactgaaatatcccgctattacggaaaaaaaagcgactatgttctcgccggaggcggaaacacgtcctggaaggacgagaacaccctttatgttaaaggatcgggtatatccctggccgaagctgttcccgattcctttgtgaaaatggacagaaaggccctggccatgatttgggaaaaacagtatccaaaatcaaatgacgagcgggaaagcgcggtacttgccgacctgatggccgcaagaaaagcaggcgaagaaaacaagcggccaagcgttgaaacgttattgcacgacatcctgccgtttgcttttgttgttcatctgcatcctgcgcttgtaaacggccttacctgttcacagcagggagagaaaacggcggaagaaatttcggcaaagaagctatttggatag

SEQ ID NO: 42500 - protein, 142 aa, Unknown
  Obtained from environmental sample
  misc_feature (1)..(142): Xaa is any amino acid
MSLEVLTEISRYYGKKSDYVLAGGGNTSWKDENTLYVKGSGISLAEAVPDSFVKMDRKALAMIWEKQYPKSNDERESAVLADLMAARKAGEENKRPSVETLLHDILPFAFVVHLHPALVNGLTCSQQGEKTAEEISAKKLFG

SEQ ID NO: 42501 - DNA, 513 bp, Unknown
  Obtained from environmental sample
  misc_feature (1)..(513): n is a, c, g, or t
atgggcctttgggtaattcaatcggtacgccatgagcttaatgacgcgtatagttttgcggaactggagaacatggcaagggaaacggaaaaaacagcgcctaaaaactgggcaatagatattaaccagccgcaatttttagcgccggagagtatgataactgaaataaaaaacgaatatgggcggcttgacaaaaaagtcccggaaagcccggcagagttggctttttctgtttacaccagccttgcgcaatgctataaaaccgcgattgacgatcttgaaaaaatcaccgggaaaaaatatccgtctatctcaattattggcggcggcagtaaagacgcatacctaaacacgctaaccgcgaaatatactggaaaaaccgtttttgccggtcctacagaagcgacagcggtcgggaatatcctgctccaaatgcaggcagcaggtgatcctgctgtgcgggacggttttgagaaactggtggagaagtcgtttaatatagcgaagttctaa

SEQ ID NO: 42502 - protein, 170 aa, Unknown
  Obtained from environmental sample
  misc_feature (1)..(170): Xaa is any amino acid
MGLWVIQSVRHELNDAYSFAELENMARETEKTAPKNWAIDINQPQFLAPESMITEIKNEYGRLDKKVPESPAELAFSVYTSLAQCYKTAIDDLEKITGKKYPSISIIGGGSKDAYLNTLTAKYTGKTVFAGPTEATAVGNILLQMQAAGDPAVRDGFEKLVEKSFNIAKF

SEQ ID NO: 42503 - DNA, 1251 bp, Unknown
  Obtained from environmental sample
  misc_feature (1)..(1251): n is a, c, g, or t
atggggttagacatgaaaaccagaaaaaagatttgcggaagactttacaagcgttaccagagagcgagtaaaaaaggcaaggcaaaaatccttgacgagtatgccccaatgcttgggcataaccgggattatttggctcatctgttaacaaactgggggaagaaacgatactcggtctcggatgggaaaccagtcaaatatgtcgccaaaccagccgtacaaggccgccagaaggcacctgggggcaaaaaaacagggaggccggaaaaatatcattccgccttcgttgaagcgcttgtggccatctgggaattttttgatcttcagtgcgggaaactcttgtcgcccctgatcaagggggtgatgggttttctggttcccgagtttaatctcagcgaagaattgcaggcattgttccagtccgttagccctgcaaccatcgaccggaaactcaggaaggaaaaaaagcggtatcgtctgaaaggcgtatccaccaccaaggcggggacgctgctgaaaagccagatccccatacgggtttgttttaaccgggacgagaagcgtccgggttttttcgagacggataccgtcagccattgcggggtgagcgcatccggccagttctgccagaccttgacgctcaccgacgtgggatcagggtggaccgaagagtgcgccctgctcaacagcgcccaccgctgggtcaaggaacagatcgcctgcaccaaagatactctgccgttccccatgctcggcatcgacagtgataacggcggggagttcatcaaccaccagctccttgactggtgcatccagaacggtatcaagttcaccaggggccgcccgtaccgtaaaaacgacaattgtttcgtcgaacagaaaaacggcgatgtggtacgaaaaaccgttggatatgcccgttttgagggtcaaaacgcgttcaatgccttgtctgacgtataccgtcatttgaacccgcttctgaattatttttatccaaccctccgcctcattgccaaggaaaaacttccctcgggcaggtacaaaaaaatttacgagaaagaacccaagacgccttaccagcggcttcttgagtcccctgatgttagcgatgattgtaaggcggagcttcgcctaaggaaggctgctttgaatcctgttgtgttgaaacgtgctttggacgaagcaagggatcgcctcttgaaactttctgttatagattctagtatcccttccagcaaggtttcttga

SEQ ID NO: 42504 - protein, 416 aa, Unknown
  Obtained from environmental sample
  DOMAIN (184)...(364): Integrase core domain
  misc_feature (1)..(416): Xaa is any amino acid
MGLDMKTRKKICGRLYKRYQRASKKGKAKILDEYAPMLGHNRDYLAHLLTNWGKKRYSVSDGKPVKYVAKPAVQGRQKAPGGKKTGRPEKYHSAFVEALVAIWEFFDLQCGKLLSPLIKGVMGFLVPEFNLSEELQALFQSVSPATIDRKLRKEKKRYRLKGVSTTKAGTLLKSQIPIRVCFNRDEKRPGFFETDTVSHCGVSASGQFCQTLTLTDVGSGWTEECALLNSAHRWVKEQIACTKDTLPFPMLGIDSDNGGEFINHQLLDWCIQNGIKFTRGRPYRKNDNCFVEQKNGDVVRKTVGYARFEGQNAFNALSDVYRHLNPLLNYFYPTLRLIAKEKLPSGRYKKIYEKEPKTPYQRLLESPDVSDDCKAELRLRKAALNPVVLKRALDEARDRLLKLSVIDSSIPSSKVS

SEQ ID NO: 42505 - DNA, 507 bp, Unknown
  Obtained from environmental sample
  misc_feature (1)..(507): n is a, c, g, or t
ttgacagattcggccgagggaagcatgatacacaacaccatggagcttgttgcaaagagcggcgtggcggacatatcggataaaatagttcttattgccggcctgccgcttgaaagcccaaacatgataaataccgtccgcgtcgtcattatcggaacggttctcgcgcgttcaagcgccggcggttacgcgaatcccgacaatatccgcgcgcacggaaagatagtccacgccgcgaccgccgatgaagccagcaaaaaactcatgtcctcaggcggcggaatactgatttgcaaagagattaccgaagaatatatgcctgttctccgcatggctcaaggagtcatttgcgaaggcgtttctgttatcggcgaagagaagttacgcgtcatcaatcccaatcttgtctggcttacccgcatcagggaggcggcaaaaaaactcgaagccgggttaacggtgacgatagacgggaaagagctgcttgtgtacgagggaacgatttaa

SEQ ID NO: 42506 - protein, 168 aa, Unknown
  Obtained from environmental sample
  misc_feature (1)..(168): Xaa is any amino acid
MTDSAEGSMIHNTMELVAKSGVADISDKIVLIAGLPLESPNMINTVRVVIIGTVLARSSAGGYANPDNIRAHGKIVHAATADEASKKLMSSGGGILICKEITEEYMPVLRMAQGVICEGVSVIGEEKLRVINPNLVWLTRIREAAKKLEAGLTVTIDGKELLVYEGTI

SEQ ID NO: 42507 - DNA, 1071 bp, Unknown
  Obtained from environmental sample
  misc_feature (1)..(1071): n is a, c, g, or t
ttggcggacctcgccaaattccaactggccgacggctcgttcccctattggcccgggggcagtacaggcaatctttttgtcagcataaggatggcgcatatcgcggcgttagcaaaggaaaaaaatatgaatgtcccggactcgctggatacccggaaacttttatcgtatatcgggacggcctcaagcgaggctaaattaaaagacccgttcctcaagggttattcattgtgggtcagaaccatgtacaaggaaagaatcggctcggaaataacggcctttttaaagcgcggggatgaactgggaatttcaggctgggccttcgctggccttgccgcgctggaaatggggcaaaaggatctggctgcgtccgccaaggatcgcgtgcgccgctttatccgcccgggaacccgcagcctcgacctgaccgacacctacgagcggcagggcaatttctggggctacgattccgaccgttacgccctcgcgcttatgctcttcaattcccttgatccccagggcgatgacatgacaacgcgccttgccacatccctcatcgagcggcagcgcaggggcgtatggaacaacaccgcgtcatctttctgggcggcgctcgcctttggaatgttaggcgacgcagaatcgtccgaatggaaagcggctaacggcgcgccgcttgacgtgacaacgagcctcggcggggtgtccctgtttaaagccgaatttaaaaaatacggcggcgttccggtgtcgtataacggacacttcacggaaaagcccgtgctcgatcttccccgcgacacccttctgcccctgcggattgagcgttcgggacccggcaggctctactacacggcgagcctccgctacggcattcccgtagaacttgccggcgcccgcgacgaggggcttggcgtatttgttgaaacccttgattcaaatggcaaccctgtcaaaacggcaggctccagccgggcaagacctacacccgacgcgtcaccgtttccagttcccgcgaccgcacccatgtcgcgctacgctcgcccatcccatccggcgctgaaattgtag

SEQ ID NO: 42508 - protein, 356 aa, Unknown
  Obtained from environmental sample
  misc_feature (1)..(356): Xaa is any amino acid
MADLAKFQLADGSFPYWPGGSTGNLFVSIRMAHIAALAKEKNMNVPDSLDTRKLLSYIGTASSEAKLKDPFLKGYSLWVRTMYKERIGSEITAFLKRGDELGISGWAFAGLAALEMGQKDLAASAKDRVRRFIRPGTRSLDLTDTYERQGNFWGYDSDRYALALMLFNSLDPQGDDMTTRLATSLIERQRRGVWNNTASSFWAALAFGMLGDAESSEWKAANGAPLDVTTSLGGVSLFKAEFKKYGGVPVSYNGHFTEKPVLDLPRDTLLPLRIERSGPGRLYYTASLRYGIPVELAGARDEGLGVFVETLDSNGNPVKTAGSSRARPTPDASPFPVPATAPMSRYARPSHPALKL

SEQ ID NO: 42509 - DNA, 597 bp, Unknown
  Obtained from environmental sample
  misc_feature (1)..(597): n is a, c, g, or t
ttgaaaatggaaaaatcaacatttacaaagggagttttttttgcggtctttacctatcttttgtggggatttcttccgatttactggaaaattctggacgagataaactctctgcacatcctgggttttaggatcatactttctctgcttttagtgagctgccttttattggcaagtaaaaatacttcctggctgaagttttataaagactggcgaaagggaataattattgtattagccagtttaacgatcacttttaactggggcatttatatcctggcggtgaacggcgggcatacaattgaaaccgcgataggctactacatcaaccccctgctttctatagttttagggatgattttttttaaggaaaaactgaaagttttacagttactggcttttattatcgttattgtaggcgtattaattgagactgttctgacagtcagtctgccatgggttgcgaagggtctgcctttcagtgttgcgctttacgacttgttaaagaagacagtacatcttactgctctggaatcgctaggcgttgaaaccctggttgcgttccctactggaattttgctactcttcataccataa

SEQ ID NO: 42510 - protein, 198 aa, Unknown
  Obtained from environmental sample
  DOMAIN (20)...(146): Integral membrane protein DUF6
  misc_feature (1)..(198): Xaa is any amino acid
MKMEKSTFTKGVFFAVFTYLLWGFLPIYWKILDEINSLHILGFRIILSLLLVSCLLLASKNTSWLKFYKDWRKGIIIVLASLTITFNWGIYILAVNGGHTIETAIGYYINPLLSIVLGMIFFKEKLKVLQLLAFIIVIVGVLIETVLTVSLPWVAKGLPFSVALYDLLKKTVHLTALESLGVETLVAFPTGILLLFIP

SEQ ID NO: 42511 - DNA, 1263 bp, Unknown
  Obtained from environmental sample
  misc_feature (1)..(1263): n is a, c, g, or t
atgcctgacagcattgaatacctgcctggcggcgctcccggcgattcacccaattcgctttcccaaaacactttcatcgaagtggatcatttccagctttgcaaatacaaacagaatgcgcccggggacgtgtttctttcgcaaaaaaaccccagcgacggacgggtgatcaccgccctttccgacggcctcggctccgggataaaggccggggtgcttgccacgctcaccgcgactatggccgccaaatttatttcatgtaacattccgattaagcgggcgaccgaaatcatcatgaacagcctgcctgtttgcaaagagcgggggatcagttatgcgacattcacgttggtcgatattgcccctaacgcttcggtaagaattatggagtatgacaacccgccctacacgtttataagaaaaggaacgttacttgaaccctcgaagagagaaaacccttttgagcggcaggacaaatcgaccgggcctaaaagagagaccagcgtactgtactcgcactttaaggcccaaagcggcgaccgcctgatttttttctccgacggcgtaagtcaggcgggcatgggaaccaaaccccaccccttcggctggacaaccgccaaggcccgtgagtttgccctccagagcgtcagggagaaaccggaaatcagcgcccgcgaattggcccactccatagtccagaaggcttcgcaattcgatttaatgaagccaaaggatgatatttcctgcggcgttatttatttccgggagccgagggatatgcttatacttaccggcccgccggttcaccccgaaagcgacaaggagatagcgaacattttttcgtctttcgtcgggaagaaagtgatttccggcggcaccaccgccaccattatcagccgggagcttaacaggaagataaaagtgaacatgaaaagcttcgacagaacaataccgccctggtcggagatggaaggggcggacatggtaaccgaaggcatcataaccctgggggcggttcaggctatgctggagaaccgcagtgaactggaggcgcacgccggaggccgggacgccgcttcccgcatgatcgacctactactggacagcgaccggatcacatttatcgtgggcaccaagatcaacgaagcccaccaggatcctaccatgcctgttgagctggaaatcaggcgcaatgtgatcaaacgcctcgcttccctgttaaaagaaaaatacctcaaagaggtacagatacgttatttttag

SEQ ID NO: 42512 - protein, 420 aa, Unknown
  Obtained from environmental sample
  DOMAIN (52)...(255): Stage II sporulation protein E (SpoIIE)
  misc_feature (1)..(420): Xaa is any amino acid
MPDSIEYLPGGAPGDSPNSLSQNTFIEVDHFQLCKYKQNAPGDVFLSQKNPSDGRVITALSDGLGSGIKAGVLATLTATMAAKFISCNIPIKRATEIIMNSLPVCKERGISYATFTLVDIAPNASVRIMEYDNPPYTFIRKGTLLEPSKRENPFERQDKSTGPKRETSVLYSHFKAQSGDRLIFFSDGVSQAGMGTKPHPFGWTTAKAREFALQSVREKPEISARELAHSIVQKASQFDLMKPKDDISCGVIYFREPRDMLILTGPPVHPESDKEIANIFSSFVGKKVISGGTTATIISRELNRKIKVNMKSFDRTIPPWSEMEGADMVTEGIITLGAVQAMLENRSELEAHAGGRDAASRMIDLLLDSDRITFIVGTKINEAHQDPTMPVELEIRRNVIKRLASLLKEKYLKEVQIRYF

SEQ ID NO: 42513 - DNA, 312 bp, Unknown
  Obtained from environmental sample
  misc_feature (1)..(312): n is a, c, g, or t
atggggaagaaaagtacagaacggcgtgttcacacgaaggaattcaaagccgaggcggtagcattggcggagaaaaaggaaaagccagtaagccggatcgcaacggatctgggaatcaacgagaatatgctgcaccggtgggtaaaggcatctcgggagtcggcggggagcggcttgcaagcgttcccgggtcacggacggccaaaggatgcagagcttgcccgcctgcggaaagagaacaaagcgctcagggaggcaaatgaaattttaaaaaaagcggcggtcatcttcgcgcaaggagaaccccaataa

SEQ ID NO: 42514 - protein, 103 aa, Unknown
  Obtained from environmental sample
  DOMAIN (8)...(90): Transposase
  misc_feature (1)..(103): Xaa is any amino acid
MGKKSTERRVHTKEFKAEAVALAEKKEKPVSRIATDLGINENMLHRWVKASRESAGSGLQAFPGHGRPKDAELARLRKENKALREANEILKKAAVIFAQGEPQ

SEQ ID NO: 42515 - DNA, 480 bp, Unknown
  Obtained from environmental sample
  misc_feature (1)..(480): n is a, c, g, or t
atggaaattatcatcatcgccgctatggcggaaaatcgtgtaatcggtaaaaacaacacgctgccctggtcgctgaaagcggacatggcccatttcaaagaattgaccaccggctggccctgcatcatgggcagaaaaacatgggaatccctgccgaagcgcccgctgccgaggcggcccaatatcatcgtttcacgatcgctccccgtagaagccgcgccgcaagtagccattttcccttcactgcaagaggctattcagcactgcgcggactatcaaaaaatttttatctgcggcggcgcttcaatttaccgcgaggcgctgccgctggcgcataaaattgaactcacggtgatacaccggcagtacgaaggcgatgcttttttcccggaaattgatcctgcgcagtggacaaaaacacggcacgggttgattttgatgggttttcgtttgttagttatgagaaatgccggcatctaa

SEQ ID NO: 42516 - protein, 159 aa, Unknown
  Obtained from environmental sample
  DOMAIN (2)...(154): Dihydrofolate reductase
  misc_feature (1)..(159): Xaa is any amino acid
MEIIIIAAMAENRVIGKNNTLPWSLKADMAHFKELTTGWPCIMGRKTWESLPKRPLPRRPNIIVSRSLPVEAAPQVAIFPSLQEAIQHCADYQKIFICGGASIYREALPLAHKIELTVIHRQYEGDAFFPEIDPAQWTKTRHGLILMGFRLLVMRNAGI

SEQ ID NO: 42517 - DNA, 867 bp, Unknown
  Obtained from environmental sample
  misc_feature (1)..(867): n is a, c, g, or t
atgaaagcatatcttgatatagtagaaaaaattctctcgcaggggttttgcaaaaaaaaccgcaccggcgttgacgccctgactatcgccggagccatgttcgagcatgatatggctttggggtttccccttttaaccacaaaaaaagtcccgttcaggctggtttcgtcggaactggagttctttatccggggcattaccgacaaggaatggctgaaggaaaggaacaaccatatctgggacgaatggtgctcaggtgacgtggtggattacgggaatgacgcccagacgcaggccagaatgaaggccgaacgggagcttgggccgatttacggctggcaatggcggaacttcggggcgggttatatggcgcataacgttactgccgaagggaagggggtagaccagcttcgcctgctggtagaaacgctgaaaaagggtcaggacagccgccggatgatagtgagcgcgtggaatcccctggacctttctcgcatggctttaccgccctgccattacagctttcaggtaacggtaatcgacggaaagctgaacctcatgtggaaccagcgctcggtggatgtcgctctagggttgccgtttaacattgccagttacggatgccttttgcacctgctggcgcaagaggccgacttgggcgaaggcaagctcatcggctttttgggagatacgcacatttacgttaatcatgtcgacgccattcgtgagcagtcagccagaacgccccgcgctctgcctgttatcaaaaccacgcctttttcttcgatttttgactggcattacaccgacacggtagtcgagggttacgatcctcacccggcgattaaatttgacattgccgtttag

SEQ ID NO: 42518 - protein, 288 aa, Unknown
  Obtained from environmental sample
  DOMAIN (2)...(288): Thymidylate synthase
  misc_feature (1)..(288): Xaa is any amino acid
MKAYLDIVEKILSQGFCKKNRTGVDALTIAGAMFEHDMALGFPLLTTKKVPFRLVSSELEFFIRGITDKEWLKERNNHIWDEWCSGDVVDYGNDAQTQARMKAERELGPIYGWQWRNFGAGYMAHNVTAEGKGVDQLRLLVETLKKGQDSRRMIVSAWNPLDLSRMALPPCHYSFQVTVIDGKLNLMWNQRSVDVALGLPFNIASYGCLLHLLAQEADLGEGKLIGFLGDTHIYVNHVDAIREQSARTPRALPVIKTTPFSSIFDWHYTDTVVEGYDPHPAIKFDIAV

SEQ ID NO: 42519 - DNA, 543 bp, Unknown
  Obtained from environmental sample
  misc_feature (1)..(543): n is a, c, g, or t
gtgagaaaaaagaatctttgtggtattaccgccattgccgcggtaatcgtattaactgccctggctctgacaggctgcgataacggaaacggcggaggcaatgaaaacagtgggaacagtgggaacagcggaggtcaaatcgactatagcgcaaacagcattgaagcattggcagtttggctttccaatcaacctgccaataccgcatccgccccctataatgttcagttgtcggtagacgatcttacagatttcgatgccctcacagaggcgcttaacaaggcaggtagatacgtcaaacttaacctttccggcagcgccttaaaaaccattccggagggcgctttttctggaatcgaagaaccctatggatgcgcctcgcttgtcggaataaccatacccgacagcgtgacgagtatcggcggatgggcgttctccggttgtagcggcctgacgagcgtaacatttcaggggacgaatacttcgttttacattcatagcggacggacagtgctcttgcctttttcctcaaatatattataa

SEQ ID NO: 42520 - protein, 180 aa, Unknown
  Obtained from environmental sample
  SIGNAL (1)...(22)
  misc_feature (1)..(180): Xaa is any amino acid
MRKKNLCGITAIAAVIVLTALALTGCDNGNGGGNENSGNSGNSGGQIDYSANSIEALAVWLSNQPANTASAPYNVQLSVDDLTDFDALTEALNKAGRYVKLNLSGSALKTIPEGAFSGIEEPYGCASLVGITIPDSVTSIGGWAFSGCSGLTSVTFQGTNTSFYIHSGRTVLLPFSSNIL

SEQ ID NO: 42521 - DNA, 648 bp, Unknown
  Obtained from environmental sample
  misc_feature (1)..(648): n is a, c, g, or t
ttgcggttttttttctcctttttgtatcaatatgggctttattacatccagcgtttctttgcaatggacacagcaagtttaaggccctttttccaggctttccctttcgcttatatttttgtaattccggttttgaccatgagggtttgggccgaagaaaaaaagcttggcagcgcggagattcttttcaccatgcctttcaccgaatgggaacttgtgctgggcaagtttttatcctgcttcgcgctgttattcgcaatggttttgcttaccgtccctgttccgttaagcattttgccgcttgggcgttttgaaggcgctttgatattcggcgagtacgcagggaccttgtttcttggcgcaagcgcaaccgcgctgggggtttttctttcaggcgtttccaaaaaccaggccgccgcgtttgtgggaagcgtagtggccatgcttgcggtaatgctaatgcaccaactgacggagaacctgccttcgggccttgcgtccttaataaattacctttcacttgcttttcattttgaaagtttttcccgagggcttttggacagccgtgacatggccttctttcttataactacgatcctctttttgtttctcaatacgcaggttcttgtctatagaaggtggaagtag

SEQ ID NO: 42522 - protein, 215 aa, Unknown
  Obtained from environmental sample
  misc_feature (1)..(215): Xaa is any amino acid
MRFFFSFLYQYGLYYIQRFFAMDTASLRPFFQAFPFAYIFVIPVLTMRVWAEEKKLGSAEILFTMPFTEWELVLGKFLSCFALLFAMVLLTVPVPLSILPLGRFEGALIFGEYAGTLFLGASATALGVFLSGVSKNQAAAFVGSVVAMLAVMLMHQLTENLPSGLASLINYLSLAFHFESFSRGLLDSRDMAFFLITTILFLFLNTQVLVYRRWK

SEQ ID NO: 42523 - DNA, 1587 bp, Unknown
  Obtained from environmental sample
  misc_feature (1)..(1587): n is a, c, g, or t
gtggaagtagccatgaacaaaaatcaggccagggttattagcctcttgtcggcggcgatttttttgttggcttttcttataagcggccgccttttcttccgcctggacttaacaaagaacaaagcctacaccatctcggaagtctccaagaacctatacaaggaaatatcggatcaggtaaggattacctattttgtttctgaaaagctaaggcaagcccatcccatgcccggcgaaattgccgacttgttgcgcgaatacgcggcaaattcaagggggaaaatccgtttctttcaaaaggatcccgcaaaggcggagcttttacaagcggtggaagatctgggaatagagccccagcagattcagttggccgagcagaatgaaattaccgtcgctactgtctattccggaattcttatagaatacctggatcgggaaatggttattcctgtcgttttttcgttggataccctggaatacgacttaagctcccgcatccgctctttagtacgcaacgtggaaagggaaatcggggtcattgtcggcgacagctatagccagtgggaaagcgagtacggtcttttgaacgaggagcttgctttctcaggtttccgtgtgcggcttatcaaagccggggactatatcccttcaagccttcccgctctgtttgtgtttggcggggttgaagatttggacgaagatcagctccttccgattgacaattacatacttggcggcgggaatgtgttgtttgcccttgacggtgtttttgtggataccagaaggggctttgaggccagaaaaatgcaggacaggggcctgcttgccatgctggccaattacggggttgtggtacctggcgcgctggtaaatgatgtactggcgcttagcctgacattccagactcanagcagaaacggaactgttattcaaaccatgaggtatccccagtggcttggccttccggagcagatgggtaaccccgatcattcccttactgcccgttttttgggcctggatctttactgggcaagcccccttgaattgaatcccccgcaaggcgtttccgctgatgttctttttgaaagttctccccaggcatggcttcagacggaaaggtttgttaccaatcccaattattattcgcaatttcaagacgaagcggactatacccggggaaccaaaatactgggcgcgtccctttcgggaattttcccaagtgcttttcattggcgaagcgagccggttattagaaagccttcccggctgatcgtcgtggggaactcgcatttcgccggctcaattatgcaggcaaaccggggggaaggaagaaacctggattttctgattaaggctgcggactggctttccaatgacgaagacattgtcgcaatccgggggcggcaggcgcaggcgggcaggcttgaccgcatagctgaccgcgaccaaagaaacagggcaatggccttttcccgcacaatcaacaccatcgttattccccttggcgttgttttggcggggctatttctgaactggaaacgaagggcaaaaacttcaaaagacaaaggacattccattgacgtataa

SEQ ID NO: 42524 - protein, 528 aa, Unknown
  Obtained from environmental sample
  misc_feature (1)..(528): Xaa is any amino acid
MEVAMNKNQARVISLLSAAIFLLAFLISGRLFFRLDLTKNKAYTISEVSKNLYKEISDQVRITYFVSEKLRQAHPMPGEIADLLREYAANSRGKIRFFQKDPAKAELLQAVEDLGIEPQQIQLAEQNEITVATVYSGILIEYLDREMVIPVVFSLDTLEYDLSSRIRSLVRNVEREIGVIVGDSYSQWESEYGLLNEELAFSGFRVRLIKAGDYIPSSLPALFVFGGVEDLDEDQLLPIDNYILGGGNVLFALDGVFVDTRRGFEARKMQDRGLLAMLANYGVVVPGALVNDVLALSLTFQTXSRNGTVIQTMRYPQWLGLPEQMGNPDHSLTARFLGLDLYWASPLELNPPQGVSADVLFESSPQAWLQTERFVTNPNYYSQFQDEADYTRGTKILGASLSGIFPSAFHWRSEPVIRKPSRLIVVGNSHFAGSIMQANRGEGRNLDFLIKAADWLSNDEDIVAIRGRQAQAGRLDRIADRDQRNRAMAFSRTINTIVIPLGVVLAGLFLNWKRRAKTSKDKGHSIDV

SEQ ID NO: 42525 - DNA, 486 bp, Unknown
  Obtained from environmental sample
  misc_feature (1)..(486): n is a, c, g, or t
atgaaagcctgtccttgcggttcaggccgcgcctacgggcaatgttgcgagccctacatcaaagggaagaaacctgtgcctacagcagaagccttgatgcgcagccgttattccgcctatgccgaacacgaaataaactacattcttgagacttgttcagaggctgaaagaaaaaagattgatgtcaaacagacaaaagaatggagcgaaaactccaaatggcttggcttaaaaattatttccactgaaaaaggcggcttaaaagatacggaaggaatcgttgaatttgaagcgtcttacgaaatggacaaactaagggaagtccaccgcgaaaaggcctcgtttgtaaaaaccaacgaccgctggttttacacggaaggcgaggtaaagccggataccgttgttcgcgtcgggcccaaaattggcagaaacgacccctgtccctgcggctcggggaaaaaatacaaacattgttgcgcagtataa

SEQ ID NO: 42526 - protein, 161 aa, Unknown
  Obtained from environmental sample
  DOMAIN (2)...(20): SEC-C motif
  misc_feature (1)..(161): Xaa is any amino acid
MKACPCGSGRAYGQCCEPYIKGKKPVPTAEALMRSRYSAYAEHEINYILETCSEAERKKIDVKQTKEWSENSKWLGLKIISTEKGGLKDTEGIVEFEASYEMDKLREVHREKASFVKTNDRWFYTEGEVKPDTVVRVGPKIGRNDPCPCGSGKKYKHCCAV

SEQ ID NO: 42527 - DNA, 564 bp, Unknown
  Obtained from environmental sample
  misc_feature (1)..(564): n is a, c, g, or t
ttgtcaaactccttgcccgtaaaacggaactccgtcgggcttaacgccacttcccctaccgcgtggtccacccacagctccccgtacggcgtgactccaggtgctcgtatatcttcccttcaaagtccgtcaccaactgcgcgctccccaaatgatccccgtggtaataatacatcagacgcgattcctggctcacgctccccgtgtttccagcgtccttccgcttcgttactatccgcgtctcccccacgtagatgtgcttgctctccgccgcatacccgttcagcgccgacacctggaacatccggttgtagtacctcacctcgctccggtccgtcccgcttaccgtgtacttcagagcccgctgcccgtccgctccgtaccggtactcgctctggtacgtcttgttcacgctccgcttcatcaggttccgctcgttccactggtagtcccgccgctccacagccgcggccgagcctccttccgttccgctccggttcgtcagcgcgaacccgtagtccgtcgagtgtactccgttttcctcatacacttgcgcgttgttag

SEQ ID NO: 42528 - protein, 187 aa, Unknown
  Obtained from environmental sample
  misc_feature (1)..(187): Xaa is any amino acid
MSNSLPVKRNSVGLNATSPTAWSTHSSPYGVTPGARISSLQSPSPTARSPNDPRGNNTSDAIPGSRSPCFQRPSASLLSASPPRRCACSPPHTRSAPTPGTSGCSTSPRSGPSRLPCTSEPAARPLRTGTRSGTSCSRSASSGSARSTGSPAAPQPRPSLLPFRSGSSARTRSPSSVLRFPHTLARC

SEQ ID NO: 42529 - DNA, 546 bp, Unknown
  Obtained from environmental sample
  misc_feature (1)..(546): n is a, c, g, or t
atggcggaaagccttggggcccccgtggcggtaacggctaacaacgcgcaagtgtatgaggaaaacggagtacactcgacggactacgggttcgcgctgacgaaccggagcggaacggaaggaggctcggccgcggctgtggagcggcgggactaccagtggaacgagcggaacctgatgaagcggagcgtgaacaagacgtaccagagcgagtaccggtacggagcggacgggcagcgggctctgaagtacacggtaagcgggacggaccggagcgaggtgaggtactacaaccggatgttccaggtgtcggcgctgaacgggtatgcggcggagagcaagcacatctacgtgggggagacgcggatagtaacgaagcggaaggacgctggaaacacggggagcgtgagccaggaatcgcgtctgatgtattattaccacggggatcatttggggagcgcgcagttggtgacggactttgaagggaagatatacgagcacctggagtcacgccgtacggggagctgtgggtggaccacgcggtag

SEQ ID NO: 42530 - protein, 181 aa, Unknown
  Obtained from environmental sample
  misc_feature (1)..(181): Xaa is any amino acid
MAESLGAPVAVTANNAQVYEENGVHSTDYGFALTNRSGTEGGSAAAVERRDYQWNERNLMKRSVNKTYQSEYRYGADGQRALKYTVSGTDRSEVRYYNRMFQVSALNGYAAESKHIYVGETRIVTKRKDAGNTGSVSQESRLMYYYHGDHLGSAQLVTDFEGKIYEHLESRRTGSCGWTTR

SEQ ID NO: 42531 - DNA, 1167 bp, Unknown
  Obtained from environmental sample
  misc_feature (1)..(1167): n is a, c, g, or t
atgaataacggaagatttggcgaatacggcggtcagtatatacccgaaacattgatgaacgagatcatcaatctggaaaaagcctacaaccattacaaagacgacggcgcgttcaaagcggaacttgacagcctgctgaagaattacgcgggcaggccgtctcttttatactatgcgggaaaaatgacgcgcgatttgggaggggcgaaaatctaccttaagcgcgaggacttaaaccacaccggctctcacaagatcaacaacgtgctgggtcaggctttgctggcgaaaaaaatgggtaaaacgcggattatagccgaaacaggcgcgggccagcacggagtcgcggcggcgaccgcggcggctttgctggggcttgagtgcgaggtctttatgggaaaagaggacaccatacgccaggcccttaacgtgtaccgcatggaattgttaggcgcaactgttcatcctgttacgacagggacgcaaaccctgaaagacgcggtaaatgaaaccatgcgggaatgggtcagccgcgtccatgacacccactacgcgcttggctctgttatgggaccgcatccctttccgacaatagtgcgtgattttcaaagcgtgatcggcagggaagcgcgggaacagataataaaggcggacggcaaacttccggcggctgtgattgcctgcgtgggcggcggcagcaacgctatgggcgttttttttaagttcattccggatacggaagtgaagcttatcggctgcgaggccgcgggccttggaatagataccgaacaacacgcggccaccatcacaaaaggctccgtgggaatattccacgggatgaaatcctacttctgccagaacgacgagggtcagatcgccccggtttattcaatatcagcgggcctggattatccgggcataggccctgaacacgcgtggctcaacgacaccaagcgcgccgaatatgcgcccgtaaccgacgaggaagcggtatgcgcctttgagtacctttcccgcaccgagggaatcatatgcgcgattgaaagcgcccacgccgtggcccacgcgcaaaaaattgcgcgtaacttctccaatgataaaagtattattatctgtctttccggccgcggcgacaaagacgctgcggcaatagcgcctcggcgataa

SEQ ID NO: 42532 - protein, 388 aa, Unknown
  Obtained from environmental sample
  DOMAIN (47)...(376): Pyridoxal-phosphate dependent enzyme
  misc_feature (1)..(388): Xaa is any amino acid
MNNGRFGEYGGQYIPETLMNEIINLEKAYNHYKDDGAFKAELDSLLKNYAGRPSLLYYAGKMTRDLGGAKIYLKREDLNHTGSHKINNVLGQALLAKKMGKTRIIAETGAGQHGVAAATAAALLGLECEVFMGKEDTIRQALNVYRMELLGATVHPVTTGTQTLKDAVNETMREWVSRVHDTHYALGSVMGPHPFPTIVRDFQSVIGREAREQIIKADGKLPAAVIACVGGGSNAMGVFFKFIPDTEVKLIGCEAAGLGIDTEQHAATITKGSVGIFHGMKSYFCQNDEGQIAPVYSISAGLDYPGIGPEHAWLNDTKRAEYAPVTDEEAVCAFEYLSRTEGIICAIESAHAVAHAQKIARNFSNDKSIIICLSGRGDKDAAAIAPRR

SEQ ID NO: 42533 - DNA, 483 bp, Unknown
  Obtained from environmental sample
  misc_feature (1)..(483): n is a, c, g, or t
gtgaacgcgcaaattgatgagattgccgccctgtacaataacggtgttatttccatcgctcagcttcacggcggcgaagacgacgattatatcgcgaagctaaaggaaaaaagcaacagccttcccgtgattaaagtttgcaagtttttatcaataaaacggaaaaaagaatcaacagaaaaggaagaagacaatagggactttgcgtatttcgcgtattcgggaattataaacaataaaagagcggattatatccttattgattcgggagcgggatctggaaaaacttttaattgggacttactgaaaaaattaaaaatagaaaaaccgtggtttctcgccggaggtatcaattctgacaatataatcaaggctcttgcgttaaaccctttcgccttagacgtaagcagcggagccgaaacggacggtatcaaaaaccgcgaaaaaatattacaattaatcgctatcgcaagaaaaggataa

SEQ ID NO: 42534 - protein, 160 aa, Unknown
  Obtained from environmental sample
  DOMAIN (5)...(156): N-(5'phosphoribosyl)anthranilate (PRA) isomerase
  misc_feature (1)..(160): Xaa is any amino acid
MNAQIDEIAALYNNGVISIAQLHGGEDDDYIAKLKEKSNSLPVIKVCKFLSIKRKKESTEKEEDNRDFAYFAYSGIINNKRADYILIDSGAGSGKTFNWDLLKKLKIEKPWFLAGGINSDNIIKALALNPFALDVSSGAETDGIKNREKILQLIAIARKG

SEQ ID NO: 42535 - DNA, 432 bp, Unknown
  Obtained from environmental sample
  misc_feature (1)..(432): n is a, c, g, or t
atgcaggaaattttaggccgccttgcttcgatccttggggttccgcttgatcaactggaaaggaaagtcccccgatcaatatattttctttaccagcccgtggaggttgccattaacgtttcctttagcacaatttccgtcctttccgaacaggcagactccctgccgggagttttttggcagtcaaaacctctacgcaattatcaggatacaggcagccttgcccacataatcggctacgtgggcaatataaccagggacgagctgacagttctttataaccagggctaccagcagggggacataatcgggaagagcggcattgagaagcagtacgatgaattgctgcgcggaaaagaaggccgggaaaccaggactgtcgacgtaaggggaaggaacgttacgggggacaatacgaggattaacccctga

SEQ ID NO: 42536 - protein, 143 aa, Unknown
  Obtained from environmental sample
  DOMAIN (1)...(138): Penicillin-binding Protein dimerisation domain
  misc_feature (1)..(143): Xaa is any amino acid
MQEILGRLASILGVPLDQLERKVPRSIYFLYQPVEVAINVSFSTISVLSEQADSLPGVFWQSKPLRNYQDTGSLAHIIGYVGNITRDELTVLYNQGYQQGDIIGKSGIEKQYDELLRGKEGRETRTVDVRGRNVTGDNTRINP

SEQ ID NO: 42537 - DNA, 993 bp, Unknown
  Obtained from environmental sample
  misc_feature (1)..(993): n is a, c, g, or t
atgaagaaaatttcccttactggcattcaggccaccggcgagcttcacatcggtaactacttcggcgcaataaaaccggcgttgcgtcttgcggaagaatacgacgcacgatattttatcgcggattatcattccctcaattccgtaaagaacccgaaggaacttaacaacaacatcaggcaggtggccgcgggctggcttgccgccgggcttgacccggagaaagtcatcttttaccgtcagagttccattcccgaagtttttgaactcaccgttataatcatggcgtctaccgctaagggccttttgaaccgggcccatgcctacaaggccgcggtgcaggcaaacagcgaaaagggcagcgatcccgatgccggaattaacatggggctttttacctatccggcgcttatggcggcggacataattctttttgattccgatgttgtaccggttggcgaagatcagatgcagcacattgagatagcccaggatattgcgcaggcttttaacgccaactacggtaaggttctcaaagtaccacaggcggctatacaggaaaatgccgccatagtgccgggactggacggacggaaaatgagcaagagctacggcaatgtaatccctcttttcgcgccggaaaaaaccctgcgcaaaactatcatgaggataacaacaaattcccaaaccgttgaagagccgaaaaaccccgatgaaagccaaattttccagctttacaaattattcgcggacgcttcagagcaaaccgctcttgccgatcgctaccgcgcggggggcatgggctggggagacgctaaggaagaactgtttcgcgcagtaaaccgctgtctttcccccatacgcgagcgttatgacgcaatcatggctgacattccgtcgctggataaaatcttggcgcagggagcggaaaaagcgcgtcccatcgccgccgctaccgttaagcgttttagaaaagcggcaggagtagattga

SEQ ID NO: 42538 - protein, 330 aa, Unknown
  Obtained from environmental sample
  DOMAIN (2)...(285): tRNA synthetases class I (W and Y)
  misc_feature (1)..(330): Xaa is any amino acid
MKKISLTGIQATGELHIGNYFGAIKPALRLAEEYDARYFIADYHSLNSVKNPKELNNNIRQVAAGWLAAGLDPEKVIFYRQSSIPEVFELTVIIMASTAKGLLNRAHAYKAAVQANSEKGSDPDAGINMGLFTYPALMAADIILFDSDVVPVGEDQMQHIEIAQDIAQAFNANYGKVLKVPQAAIQENAAIVPGLDGRKMSKSYGNVIPLFAPEKTLRKTIMRITTNSQTVEEPKNPDESQIFQLYKLFADASEQTALADRYRAGGMGWGDAKEELFRAVNRCLSPIRERYDAIMADIPSLDKILAQGAEKARPIAAATVKRFRKAAGVD

SEQ ID NO: 42539 - DNA, 1251 bp, Unknown
  Obtained from environmental sample
  misc_feature (1)..(1251): n is a, c, g, or t
atggaggccacagggacacccgagggcgcgggcttcggaatgactattacgcgaaatttattagagcttatgggcggacagatcaatataaaaagcgcgataggcgaaggaacgacggtaaccgtgcgcataccgcaaaaaacgcccggcataggagttcgcgacttaatcggcaaggaaatgaccgatagccttaaacagttcaagcttggcaatgttgtgcagttgaaaaaatcacaggttaaacatgaatatatgccttacggcaaagtcctgattaccgacgatgttgaaacaaatttatacgtggcaaaagggcttatggccccgtacggccttaacatcgatcttgccacaagcgggtttgaagccatcgaaaaagtaaaaaacgggaatgtttacgacattatctttatggaccacatgatgccaaaactggacggcattgaaacgacgaaaattatccgcgaaacgggatacactcagcccgtaatcgcgttgacagctaacgccctcgcggggcaggcggaagtgtttttgaaaaacggttttgatgatttcatttccaaacctattgatatacgccagttaaacgccgcgcttataaaacatatacgcagcaaacagtctccggaaacgctggacgcagcgcaaaaggaaaaagaagattttgacaaaaaacaagcggccaacgccggcaaggggcagcaggtcgacccgcagctcgcgaacattttcgcgagagacgcggaaaaatcaattaatgtgctggacgccgttttgcagaaaaactttaaaacagaaagcgacatacagctgtatataatcaatgttcacgcgatgaagagcgcgcttgccaacataggggagccggaactgtcatcttccgcgttaaagcttgaacaggcgggcagggaaaaagacttaaaaacaatgaagtcggaaacaaataatttccttgaagcgcttaaagccgtaattctaaaaattaagcctaaggacgaggaagacgcgggtattgaagattcaaaagaagcccttgtctttttacgcgaaaagctcacggaaattaaaaacgcctgcgacgcttacgataaaaaaaccgttaaaaacacccttaacgaacttaaagaaaaaacctggtcgcacaaaaccaaagaactgatgaacaccatcgccgatcatttattgcacagcgaattcgacgaagtctcagctctcgcggacagttacattaaatcgatagaataa

SEQ ID NO: 42540 - protein, 416 aa, Unknown
  Obtained from environmental sample
  DOMAIN (89)...(202): Response regulator receiver domain
  misc_feature (1)..(416): Xaa is any amino acid
MEATGTPEGAGFGMTITRNLLELMGGQINIKSAIGEGTTVTVRIPQKTPGIGVRDLIGKEMTDSLKQFKLGNVVQLKKSQVKHEYMPYGKVLITDDVETNLYVAKGLMAPYGLNIDLATSGFEAIEKVKNGNVYDIIFMDHMMPKLDGIETTKIIRETGYTQPVIALTANALAGQAEVFLKNGFDDFISKPIDIRQLNAALIKHIRSKQSPETLDAAQKEKEDFDKKQAANAGKGQQVDPQLANIFARDAEKSINVLDAVLQKNFKTESDIQLYIINVHAMKSALANIGEPELSSSALKLEQAGREKDLKTMKSETNNFLEALKAVILKIKPKDEEDAGIEDSKEALVFLREKLTEIKNACDAYDKKTVKNTLNELKEKTWSHKTKELMNTIADHLLHSEFDEVSALADSYIKSIE

SEQ ID NO: 42541 - DNA, 846 bp, Unknown
  Obtained from environmental sample
  misc_feature (1)..(846): n is a, c, g, or t
ttggcggaagggaaaaatatctactcttacaaaatgaaaaattatatgtatgaggatacagttgtttttattaaaggaataaatcatggctggcgtttaggcatagtaattcctgtaaaagaatattacgcaaacataataaagactgcggtattccttatagtcggcggaattgtccttgcgttattgctgtgcatcatgctttacaatatttacagcgcaaaaacggaagcggataaaaaaacacggcaaaaaagcaattttctcgcgacaatgagccacgaaatccgtacgccattaaacgctattctgggcttaacagaaattcaaatgcagaattcctcgcacccgcctgcaacaagcgaagcttttagtaaaataaacaactcaggcaacctgcttttaaatattatcaacgacatactggatctttcaaaaatagagaccggggatttaatgctgaatcttgtaaaatatgaagtcgcaagtctggttaacgatgttgcccaattaaaccatatccgctatgaaggtatacctgtcgaatttaatgtcaatgtagatgaaaatactccgactgaattggtcggcgacgagcttcgcatcaaacaaatattgaataatcttctttccaacgcgtttaagtataccgagaaggggacggtcacgcttaccgtgggcgccgactgtgtatcgcgcgccggaacagtccttgtaacccttatttttcaggtaatcgacacgggacaggggatgacgcagaaacaggtagacaacctgtttacgaatatacgcattttaacatggaggccacagggacacccgagggcgcgggcttcggaatga

SEQ ID NO: 42542 - protein, 281 aa, Unknown
  Obtained from environmental sample
  DOMAIN (197)...(278): Histidine kinase-, DNA gyrase B-, and HSP90-like ATPase
  misc_feature (1)..(281): Xaa is any amino acid
MAEGKNIYSYKMKNYMYEDTVVFIKGINHGWRLGIVIPVKEYYANIIKTAVFLIVGGIVLALLLCIMLYNIYSAKTEADKKTRQKSNFLATMSHEIRTPLNAILGLTEIQMQNSSHPPATSEAFSKINNSGNLLLNIINDILDLSKIETGDLMLNLVKYEVASLVNDVAQLNHIRYEGIPVEFNVNVDENTPTELVGDELRIKQILNNLLSNAFKYTEKGTVTLTVGADCVSRAGTVLVTLIFQVIDTGQGMTQKQVDNLFTNIRILTWRPQGHPRARASE

SEQ ID NO: 42543 - DNA, 1425 bp, Unknown
  Obtained from environmental sample
  misc_feature (1)..(1425): n is a, c, g, or t
gtggatatttgcggggaaatgaagcgaaaactccaggaatcgccggatccgattttccgtgaacgggccgttgatattgctgatgtatcccgcaggataattaattgtctgcttcccgccgcgtccaggcgttcttcccttgttgaattggatgaggatgtaattctggtagcccatgatcttatgccttccgacacgctgactatggataagtcacgggtaaagggcatagtgctggatgaggggagcggaacctgtcacacggcaattctggcgcgggcatttaatataccggcagtgttggggctttcggtgatttcccgggaaataaagaacggcgaaatgatagcgctgaacggttccacggggatggtaacggttaatcctgaccggcagactctgaagctgcaggaaaacgaaaaaaaaatacagaataaacaaattgatgaactttccgccctgcgggatcttcccgctgaaacccttgacggttaccgggtggcgcttaaagcgaatattggtttacccgaagaagccgaaggaaccctgcactacggcgcggaaggcattggcttgtaccgttcggaatttctttttatagcgcccggcaggcatgccggagaagagactcagttccttgcctacagccaggttctgaaaacaatgggaaaattgcccgttaccatcagaactgttgacctggggggcgacaaggttattcctgaatttcanactgccggtgagaaaaatcccctgctgggatggagggcgatacgcctgtccctggccaacccggagatgttcaaggtccagttacgcgcaattctaagggcaagcgtccacggcaacgcgcggatcatgttccccatgatatcgggcatcgaagaactggaacaggcccacgccatgcttgacgaggcgcgcgccgaatgtaaaaaaatgagacagtccttcagcagggacattgaaaccggggcgatgattgagattccttccgccgcaatgaccgcggacatactcgccgaaaaagcggatttcttctctatcgggacaaatgaccttgtccagtacagcctcgcggtggatcgcggaaacgaaaaggtaagctatctgggcgaggcctttcatccggcgatactgcgtttcctcaaaaagattattgacgccgcccatgaaaggggaatcatcgcggcaatgtgcggggagcttgccggaaacccggaagctacatgcctgcttctcgggcttggccttgacgaattcagcatggccgcttcctccattccccgtataaaagaaattattcggtcttgcagcctgaaagcctgtaaatcgctggcgactgacgcgctgcgcgccaggtcaatcgaggaagtccgcacattgctgaatgaatggaaggcggacaatgcccggaaacattga

SEQ ID NO: 42544 - protein, 474 aa, Unknown
  Obtained from environmental sample
  DOMAIN (40)...(123): PEP-utilising enzyme, mobile domain
  misc_feature (1)..(474): Xaa is any amino acid
MDICGEMKRKLQESPDPIFRERAVDIADVSRRIINCLLPAASRRSSLVELDEDVILVAHDLMPSDTLTMDKSRVKGIVLDEGSGTCHTAILARAFNIPAVLGLSVISREIKNGEMIALNGSTGMVTVNPDRQTLKLQENEKKIQNKQIDELSALRDLPAETLDGYRVALKANIGLPEEAEGTLHYGAEGIGLYRSEFLFIAPGRHAGEETQFLAYSQVLKTMGKLPVTIRTVDLGGDKVIPEFXTAGEKNPLLGWRAIRLSLANPEMFKVQLRAILRASVHGNARIMFPMISGIEELEQAHAMLDEARAECKKMRQSFSRDIETGAMIEIPSAAMTADILAEKADFFSIGTNDLVQYSLAVDRGNEKVSYLGEAFHPAILRFLKKIIDAAHERGIIAAMCGELAGNPEATCLLLGLGLDEFSMAASSIPRIKEIIRSCSLKACKSLATDALRARSIEEVRTLLNEWKADNARKH

SEQ ID NO: 42545 - DNA, 459 bp, Unknown
  Obtained from environmental sample
  misc_feature (1)..(459): n is a, c, g, or t
atggttacaattccgtccggcatcgaaaacggaaaacgggtggtaattcccaaacagggggacgcaggtcccaacggggggcagccgggcgacctttatgtgttcataagggtaaagcgccatgaatactttgaaaggcaggggcacgatctttactgcgccgttcctgtctccgtaagccaggcggctctcggctcggaaattcaagtaacaacgcttgataacaaaacgataaaagtaaaagtaccgggcggcactcaaagcggaaaactgctccgtatccgcggcgagggagtcccgtcgggcggagtacgcggcgatatgtacatcaaacttattgtacagatacctgaaaaactttcccgccgcggaaaagaactactggaagaattcgcaaaatccgaaggccagaacgacagccccaaaccaatcccgctatctcagcttgcggagaattaa

SEQ ID NO: 42546 - protein, 152 aa, Unknown
  Obtained from environmental sample
  DOMAIN (12)...(132): DnaJ C terminal region
  misc_feature (1)..(152): Xaa is any amino acid
MVTIPSGIENGKRVVIPKQGDAGPNGGQPGDLYVFIRVKRHEYFERQGHDLYCAVPVSVSQAALGSEIQVTTLDNKTIKVKVPGGTQSGKLLRIRGEGVPSGGVRGDMYIKLIVQIPEKLSRRGKELLEEFAKSEGQNDSPKPIPLSQLAEN

SEQ ID NO: 42547 - DNA, 396 bp, Unknown
  Obtained from environmental sample
  misc_feature (1)..(396): n is a, c, g, or t
atgctggataaaatacacgcccatattctggatgaattgagaattaacgcaaggacggatacaatatttattatatcctcggtatcaattaattttttaacgctggcaataaatgcggcggtatcagactccagtaaagatgacattttaattatgttctgttttataattttaacgattgtcgtttgcgttgtagcggaaataggcctgatacgcggccagcaagcaagcgcaaaattgattaccgggcttatagaaatgtataaagacaacggggttgataaatattacaatccgtcattgctaaaattttataaattgagatataatttatttgtaattattattttaataacagggctaatatcaataatagtgccatttctaaaaatataa

SEQ ID NO: 42548 - protein, 131 aa, Unknown
  Obtained from environmental sample
  misc_feature (1)..(131): Xaa is any amino acid
MLDKIHAHILDELRINARTDTIFIISSVSINFLTLAINAAVSDSSKDDILIMFCFIILTIVVCVVAEIGLIRGQQASAKLITGLIEMYKDNGVDKYYNPSLLKFYKLRYNLFVIIILITGLISIIVPFLKI

SEQ ID NO: 42549 - DNA, 414 bp, Unknown
  Obtained from environmental sample
  misc_feature (1)..(414): n is a, c, g, or t
atgaagaataaaaacaaaattttggaggaaattatgctaactgatgacattcttgcatcggcaataacttataacgggaatgacgtaaaacgcgtcaatcatttactcaaagttttttcatttgcccaccatattggagttacggaaaaatgtgatataaaaacacaggaaatcatagatatttcctcgatactccatgatattggcattcatgaagcggaacggaaacataattcaagcgccggaaactggcaggaaatcgaaggccctccggttgccgatgaacttctgaagaagttcaatttagatgatattattaaagacagggtattatttcttatcggacaccatcaccaatataatagtattgatggcatggattttcaatactgggtgaagctgattttttggtaa

SEQ ID NO: 42550 - protein, 137 aa, Unknown
  Obtained from environmental sample
  misc_feature (1)..(137): Xaa is any amino acid
MKNKNKILEEIMLTDDILASAITYNGNDVKRVNHLLKVFSFAHHIGVTEKCDIKTQEIIDISSILHDIGIHEAERKHNSSAGNWQEIEGPPVADELLKKFNLDDIIKDRVLFLIGHHHQYNSIDGMDFQYWVKLIFW

SEQ ID NO: 42551 - DNA, 756 bp, Unknown
  Obtained from environmental sample
  misc_feature (1)..(756): n is a, c, g, or t
ttggaccggagcttcaaccttaacattgaccgggccgtgaggatcatggaattctttcttgaaaggattgcggcggggaagcggctctgcgtccacttcgagatggttccctcgcgttttcccccggaactccgggaaaccatccgccgctttcccccgggaaccctgcgccttgagctgggcatccagacctttaacccgaaaaccgcggcgctcattcaccgcacgagcgagccggaagctgaactcgaagccgtggaattcctccgccgtgaaaccagcgcggtcatccacgccgaccttatcgcgggcctccccggcgaaggcctctcctccttcggagcggggtttgaccggctttggcgcgtcctgtccggaagcggccacggcgcgccacatgacagccctttcgagatacaactgggtattctcaaatgccttccgggaactcccatcagccgccacaacgaaacattcgggatgaagtattccccggaacctccctacgaagtgactgaaacaggcgccctctccgcagaggaactcgggcggataaaaaacttcgcccgtttctgggagctcatcgtgaaccgcggccactttcccggtctgatgccccggcttcttccgcccggagaagccgcctttgacagattcatgatcctttcggacagaatgtttgcgcggttcggcaggaactggggcctggatcggaaagaattggaagcttttcttgcggaatgtacctgtttttaa

SEQ ID NO: 42552 - protein, 251 aa, Unknown
  Obtained from environmental sample
  misc_feature (1)..(251): Xaa is any amino acid
MDRSFNLNIDRAVRIMEFFLERIAAGKRLCVHFEMVPSRFPPELRETIRRFPPGTLRLELGIQTFNPKTAALIHRTSEPEAELEAVEFLRRETSAVIHADLIAGLPGEGLSSFGAGFDRLWRVLSGSGHGAPHDSPFEIQLGILKCLPGTPISRHNETFGMKYSPEPPYEVTETGALSAEELGRIKNFARFWELIVNRGHFPGLMPRLLPPGEAAFDRFMILSDRMFARFGRNWGLDRKELEAFLAECTCF

SEQ ID NO: 42553 - DNA, 615 bp, Unknown
  Obtained from environmental sample
  misc_feature (1)..(615): n is a, c, g, or t
atgaatgagaaaatgaacaatctggtccccattgtcgttgagcaaaccggcatgggtgagcgttcctatgatatttactcccggcttctaaaagacaggatagtattcatggatggcgagattaacgatctgagcgccgatttggtagtagcccagttgctttttctggacgggcaggatacggagaaggatattaacctttatatcaattctcccggcggctcggtaaccgcggggcttgccatctacgataccattcagcatgtaaagtctgacgtgcagactatttgcctgggccaggcggcaagcatggcggctcttgttctggcgtctgggtcgccgggcaagcgcgtgatccttccctcttccagagttctgatccaccagccctggggcggcgctcaggggcaggcgcgggacatcggcattcagtcaagggagattatccgccttaaaaaaatgaccattgattatttcgccctgcataccggtaaaaccgcggaacaaatcgcggcggatatggaaagggatttgtatatgtcggcacaagacgctgtggattacggcgtgntggattcggtgttaaagagggagaaaaatggccaagcttcgtaa

SEQ ID NO: 42554 - protein, 204 aa, Unknown
  Obtained from environmental sample
  DOMAIN (17)...(198): Clp protease
  misc_feature (1)..(204): Xaa is any amino acid
MNEKMNNLVPIVVEQTGMGERSYDIYSRLLKDRIVFMDGEINDLSADLVVAQLLFLDGQDTEKDINLYINSPGGSVTAGLAIYDTIQHVKSDVQTICLGQAASMAALVLASGSPGKRVILPSSRVLIHQPWGGAQGQARDIGIQSREIIRLKKMTIDYFALHTGKTAEQIAADMERDLYMSAQDAVDYGVXDSVLKREKNGQAS

SEQ ID NO: 42555 - DNA, 1260 bp, Unknown
  Obtained from environmental sample
  misc_feature (1)..(1260): n is a, c, g, or t
atggccaagcttcgtaacggcccccggggctttgagagggtctgctctttctgcggaaaaagcgccgacatggcgcgcaggttaatcgccggtcctaacgatgtttttatctgcgatgaatgtatagaagtctgccgtaaaattttaagcgaagaagaacatgagcttacttcgcatttcacgggcgatattccgactcctcaggaaataaaagcatacctcgatctctttatcatcggacaggataacgcgaaaaaagcgctctccgtcgccgtttacaaccactacaaaagaatcgcgaacccttcaaaagaaagcgaagaagttgaaattgaaaaatccaacgttctgttaatcggtcctacgggaaccggcaaaacattgctcgcgaaaatattggcgaagaaattaaaagttccgtttgccattgtggatgccacaactctaacggaagccggttatgtcggcgaagacgtggagaacattctccttaaactgatacagagcgcgggcggcaatatctccgccgcggaaagaggaattgtttatatcgatgaaatcgacaaaattgcgcgcaagggcgaaaacatttccattacccgcgacgtttcaggcgagggcgttcaacaggcgcttttaaaaataatcgaggggactgtagcctctgttccgccgcaggggggcagaaaacatcccaatcaggaaatgatacggattgacaccacaaatattctttttatttgcggcggagcttttgtaggactggataaattaatcgctcagcgcgttgttaaccacccgctgggctttggctccgagacatacggcggagaaaaatctttaagggagctttacgacgccctgcatccggacgatttaatccgtttcggcatgattcccgaatttatcgggaggcttcccattaccgtcggtcttgaagaattaagactcgaagatttaaagcgcatcatcacggagccgcgcaacgctattgtgcgccagtatcaggcgtcgttggcttatgacaatgtaaaacttgagtttacggagaaagcaatcgacgcgatagctgacaaggcgattaagcaaaaaacaggcgcgcgcggtttaagggcgattgtcgaaaaacttatgactgacattatgttcgatattccttcgataccgggcgataaaaaaataataatttcacaggatacagtggaaaaatcagaaccgccgcagataatatatctggagcagaagcaaaagagcgcataa

SEQ ID NO: 42556 - protein, 419 aa, Unknown
  Obtained from environmental sample
  DOMAIN (115)...(333): ATPase family associated with various cellular activities (AAA)
  misc_feature (1)..(419): Xaa is any amino acid
MAKLRNGPRGFERVCSFCGKSADMARRLIAGPNDVFICDECIEVCRKILSEEEHELTSHFTGDIPTPQEIKAYLDLFIIGQDNAKKALSVAVYNHYKRIANPSKESEEVEIEKSNVLLIGPTGTGKTLLAKILAKKLKVPFAIVDATTLTEAGYVGEDVENILLKLIQSAGGNISAAERGIVYIDEIDKIARKGENISITRDVSGEGVQQALLKIIEGTVASVPPQGGRKHPNQEMIRIDTTNILFICGGAFVGLDKLIAQRVVNHPLGFGSETYGGEKSLRELYDALHPDDLIRFGMIPEFIGRLPITVGLEELRLEDLKRIITEPRNAIVRQYQASLAYDNVKLEFTEKAIDAIADKAIKQKTGARGLRAIVEKLMTDIMFDIPSIPGDKKIIISQDTVEKSEPPQIIYLEQKQKSA

SEQ ID NO: 42557 - DNA, 921 bp, Unknown
  Obtained from environmental sample
  misc_feature (1)..(921): n is a, c, g, or t
gtgatcgcgagttctccgaactttggcgccgatccctggggccttgtttataaagacagggtatatgtgtacatgacaggcgacacattcaggttatcttcaggctcaagccccgcgccggatttttcaaacttgcaggcaaatgattattcaaacatcaataccatccgggtggtgtcttcttccgatctggtaaactggactgagcatcctgaaataagggcggccggttcacagggggcggcgacgcaggcaaccaactcatgggcccccgccgcggcttacaaaaacatcggcgggaaagattattttttcctgtactttgccgacaacgccaacggcatattcgtgcttcgcgcggaaagccctctcggcccctttaccaatcccctcccggacggcagtgcgctcatcaacaggtcaacgcccaattgttcaaatgttacctggctgtttgatcccgcggttctgatcgatgatgacgggaaggcctatatctattttggcggcggggttcccccaggcggcagcgcggctcagtttacatctaacgatccgcttccaggcactgaacgcgccgcgcggcttggtgacgacatgatcagcatcgttggaacgccgcagaatttaaatgttccgtttatttttgaagattccggcattaataaaataggcggtatttattactattcttattgctccaattttaatgtaagaacctatttgcagaagccggaagaataccctgccgccgtgacgataggcaagaacggggcaatcacatacatgacaagcgataatcctctggggccgtatacattgcggaaaatgatactgcaaagccccaaagagacattcaaccagcatggaaaccaaacaaccatcatgcgatatttgaattcaggggaaagtattacatag

SEQ ID NO: 42558 - protein, 306 aa, Unknown
  Obtained from environmental sample
  DOMAIN (28)...(305): Glycosyl hydrolases family 43
  misc_feature (1)..(306): Xaa is any amino acid
MIASSPNFGADPWGLVYKDRVYVYMTGDTFRLSSGSSPAPDFSNLQANDYSNINTIRVVSSSDLVNWTEHPEIRAAGSQGAATQATNSWAPAAAYKNIGGKDYFFLYFADNANGIFVLRAESPLGPFTNPLPDGSALINRSTPNCSNVTWLFDPAVLIDDDGKAYIYFGGGVPPGGSAAQFTSNDPLPGTERAARLGDDMISIVGTPQNLNVPFIFEDSGINKIGGIYYYSYCSNFNVRTYLQKPEEYPAAVTIGKNGAITYMTSDNPLGPYTLRKMILQSPKETFNQHGNQTTIMRYLNSGESIT

SEQ ID NO: 42559 - DNA, 525 bp, Unknown
  Obtained from environmental sample
  misc_feature (1)..(525): n is a, c, g, or t
atggcaatgggcgtacccgaaactcttccgagggaagggtatcgaagcacccacattgacgaggttaacatattgctggacggaaccattgaagaaattaaaggcagcagaaaaggcgcggcgcagtcgggcaggtttaacccgtttgaattgacaagcgccgcgaccataggcaaccaggcgggaataagcaccgttgctgtcccaggcgagcagcggatgaaggtgacggacattgattcgggcgactggatcgccctgtacggagtggattttggcggtgcgggagcgcgaacatttaattgtcgcgtaacgcctcctaaaagcggcagcggcagtgccggcggcgtaatccagatcaagctggacgggcttgacggcaaaccaatcggctatgtcaatgtcgaacccggaaagccggatataacggtaaaattatcgcagaccgttaccggcgtacacgatctggtttttgttttctacggtcagggctatgaatttgtgcagtggcagttccttcaataa

SEQ ID NO: 42560 - protein, 174 aa, Unknown
  Obtained from environmental sample
  DOMAIN (53)...(174): Carbohydrate binding module (family 6)
  misc_feature (1)..(174): Xaa is any amino acid
MAMGVPETLPREGYRSTHIDEVNILLDGTIEEIKGSRKGAAQSGRFNPFELTSAATIGNQAGISTVAVPGEQRMKVTDIDSGDWIALYGVDFGGAGARTFNCRVTPPKSGSGSAGGVIQIKLDGLDGKPIGYVNVEPGKPDITVKLSQTVTGVHDLVFVFYGQGYEFVQWQFLQ

SEQ ID NO: 42561 - DNA, 972 bp, Unknown
  Obtained from environmental sample
  misc_feature (1)..(972): n is a, c, g, or t
ttggacgcggtcggcggcccaaagtgggataatcttccagggcacctgcgccatgaaagagcgctgctgggtcttcttgagggacttggcgttttcgcaaaccttcgtcccgccgctctgctccttcaattaaaatcagcctgcccgattaaagacgaagtgctaatcgcaagcaacagcgcagcaagcagcggcgagggaaaagccgctttcgatatattaatcgtaagggaattaacaggcgggctatacttcggcaagcgcgggcggctggatgagccttcaaacggacacagtcccggttccgcctttgatactgaaacttattcatggatggaaatagagcgggtcctccgttcgggctacgaagcggcggctgtgcgccggaaaaaactttgcatagtggacaaggcaaatgtgcttgagtcttctcgtttctggcgcgaagttgccgcggtggtttcaaaggactatcccgatatagagacaagttacctctacgttgacaacgccgccatgcagttgatccgagcgcccggacaattcgatgtaatcgttacatcaaatctttttggagacattctttccgatgaggcgtccgtgcttacaggttcaatcggtatgcttgcctcggcgagtctaggcgcgcctgtgcagggcggaacaagaccgggaatgtacgagcctatccacggttctgcgcctgatatcgctgggaaggacatcgccaatccgcttgcggcaatactttcggcggcgatgatgctccgctactccttcggtcttgagaaggaagcgctgtctattgaaacggctgtcaacaaggtgctggatcagggactgcggacaggagacatcgcaagtagaagcgcggcaagcggcggcggcacggcaagctacagcgagagaattgtgggcactaaggcaatgggcgaagcggtacttaaagcgttggagactactcttccttaa

SEQ ID NO: 42562 - protein, 323 aa, Unknown
  Obtained from environmental sample
  DOMAIN (1)...(314): Isocitrate/isopropylmalate dehydrogenase
  misc_feature (1)..(323): Xaa is any amino acid
MDAVGGPKWDNLPGHLRHERALLGLLEGLGVFANLRPAALLLQLKSACPIKDEVLIASNSAASSGEGKAAFDILIVRELTGGLYFGKRGRLDEPSNGHSPGSAFDTETYSWMEIERVLRSGYEAAAVRRKKLCIVDKANVLESSRFWREVAAVVSKDYPDIETSYLYVDNAAMQLIRAPGQFDVIVTSNLFGDILSDEASVLTGSIGMLASASLGAPVQGGTRPGMYEPIHGSAPDIAGKDIANPLAAILSAAMMLRYSFGLEKEALSIETAVNKVLDQGLRTGDIASRSAASGGGTASYSERIVGTKAMGEAVLKALETTLP

SEQ ID NO: 42563 - DNA, 882 bp, Unknown
  Obtained from environmental sample
  misc_feature (1)..(882): n is a, c, g, or t
gtgaatgtcttaagaactgtaaattcggcgcggtgcggaaggcataggagtaataaaatggttaacatcaaaattaacggcaagccccttcaggttgaagatggaatttccattctggatgcggcaaaactggtcaatataaaaattccaactctctgttacaatccggatctccctgcctgggcttcctgcggactctgcatagtcagaacagcgggacccggttctccccgcatggcccgggcgtgtataaccgaagtggcggaaaacatggatattatcacccacgatcctgagttaatcgcgacccgtcgcacggtgctggaactcatcctttccaatcatccgaccgactgcctccagtgccccaggaacggaagctgcgaacttcagaccctggccgcggaatcgggtatacgggaattgcctttcaaacaagaaactaatcaccttccaattgacgattccaacccggccatagtactcaatcctgaaaaatgcatacgctgcgggcgctgtgtcaaggtatgccaggatgtgcagaatgtctgggccattgaattccttggccggggcatcgacggaaagatcgccagcgccgcggacgtgcctctgggagaaagcccctgcatcaagtgcggccaatgcgccgctcactgccctgtgggagcaatctacgaaagggacgatacagtaaaagtctgggcagcccttcagaacccggatgttcacccggtggttcagatcgctccggcagtgcgggtggccttggcggaagaattcgggctccccccggaacggtccttaccaaaaagatctacgccgcgctcaggcggctcggtttcaagaccgtgtttgacacaaacttctccgccgatttga

SEQ ID NO: 42564 - protein, 293 aa, Unknown
  Obtained from environmental sample
  DOMAIN (23)...(89): 2Fe-2S iron-sulfur cluster binding domain
  misc_feature (1)..(293): Xaa is any amino acid
MNVLRTVNSARCGRHRSNKMVNIKINGKPLQVEDGISILDAAKLVNIKIPTLCYNPDLPAWASCGLCIVRTAGPGSPRMARACITEVAENMDIITHDPELIATRRTVLELILSNHPTDCLQCPRNGSCELQTLAAESGIRELPFKQETNHLPIDDSNPAIVLNPEKCIRCGRCVKVCQDVQNVWAIEFLGRGIDGKIASAADVPLGESPCIKCGQCAAHCPVGAIYERDDTVKVWAALQNPDVHPVVQIAPAVRVALAEEFGLPPERSLPKRSTPRSGGSVSRPCLTQTSPPI

SEQ ID NO: 42565 - DNA, 597 bp, Unknown
  Obtained from environmental sample
  misc_feature (1)..(597): n is a, c, g, or t
ttgggttatcgcgggcaaaaatattccgtggagttcgtatgctcggccgcgcatttcgcggagatgcccgcgcccaaaggcgaagagtacgccgttttgggacggtcgaacgtgggaaagtccaccttcatcaaccactccctggcctgcggaccgctggcgcgcgtctccaagaggcccggcaagaccacccttgccaatctatacagactggacgccaccctcttctgggtcgacctccccggctacggctacgccgaagcctccggcgccgaaaaagatcgctggagcaaactgatcgccgactactgcaacaaccgaaacaacctagccggaatcatctggctactagacatccgccacccgggcgctaaagcggacatggaggccaacgagtggctggccggactaaataggcgggtactgccggtattaaccaagggggacaaactctcacgctcccaacagaagaaacaagtacacgatttctgcaatatcttcggatttgacgaggaaccgataatctactcatcattagaacacgattcacgagaacgattttgggatagatttgacttgtggcgcagggacggataa

SEQ ID NO: 42566 - protein, 198 aa, Unknown
  Obtained from environmental sample
  DOMAIN (28)...(149): GTPase of unknown function
  misc_feature (1)..(198): Xaa is any amino acid
MGYRGQKYSVEFVCSAAHFAEMPAPKGEEYAVLGRSNVGKSTFINHSLACGPLARVSKRPGKTTLANLYRLDATLFWVDLPGYGYAEASGAEKDRWSKLIADYCNNRNNLAGIIWLLDIRHPGAKADMEANEWLAGLNRRVLPVLTKGDKLSRSQQKKQVHDFCNIFGFDEEPIIYSSLEHDSRERFWDRFDLWRRDG

SEQ ID NO: 42567 - DNA, 990 bp, Unknown
  Obtained from environmental sample
  misc_feature (1)..(990): n is a, c, g, or t
ttgacttgtggcgcagggacggataatgctgaaagaaaacgcgaaaaaaggattgacccgcatagcctccggctcctggaaacgcctctccggcctctggcacaccgcctgcggcatggccggactgctcttcgacaccgtctacgccgcattccgcaagggccgcacccccaacctctccctcctaagccagatcaaccgccaaatcctctacaccggcgtggaggccttttggctcgtgggatccatagccgtgctatgcgggagcgccataatcttgttcgcaatgttcaacatgcccaagatcggcgccggggagcacttcggcaagatactgataatcgccgtggttggcgaactgggcccgttcgtcacgtcgctcgtggtcgtggggcgctccggcacggcgctcgcaacctacatcgggacaatgcgcgtatcgcgggaggtcgacgcgctggaggtgatggggatcgaccccatacagttcatcgtgcagccggccttcgtgggcatagtggcctccgtgatctgcctcaatctgtacttcatcaccatagcgatctgcggcgggctcgtcgtggcgtggatctcgaccggggtgccgctcgggatatcgttcggccgggtgctggacgcgctgcaattcaaggacgtggcagtcagcctgctcaagagcgccgccttcgggacaatcgtggcgctcacgagttcgtactacggcttgggcgtgcgcaacgtgcgcatggtgcccatagcggccataaacgcggtggtggggtcgatgtttttcaccatcgcggtcaacctgctcctgagcttcggatactatgtcctttagattggaactgcgcaaagtgtcatatcggcacggggaaaatactatattggatggtgcggaccttgcgctgccgcccgggggcgtggccctcttcggggggcgcagcgggtgcgggaaatccacgctgctcgaaatctgcgccggcctga

SEQ ID NO: 42568 - protein, 329 aa, Unknown
  Obtained from environmental sample
  misc_feature (1)..(329): Xaa is any amino acid
MTCGAGTDNAERKREKRIDPHSLRLLETPLRPLAHRLRHGRTALRHRLRRIPQGPHPQPLPPKPDQPPNPLHRRGGLLARGIHSRAMRERHNLVRNVQHAQDRRRGALRQDTDNRRGWRTGPVRHVARGRGALRHGARNLHRDNARIAGGRRAGGDGDRPHTVHRAAGLRGHSGLRDLPQSVLHHHSDLRRARRGVDLDRGAARDIVRPGAGRAAIQGRGSQPAQERRLRDNRGAHEFVLRLGRAQRAHGAHSGHKRGGGVDVFHHRGQPAPELRILCPLDWNCAKCHIGTGKILYWMVRTLRCRPGAWPSSGGAAGAGNPRCSKSAPA

SEQ ID NO: 42569 - DNA, 834 bp, Unknown
  Obtained from environmental sample
  misc_feature (1)..(834): n is a, c, g, or t
gtggcgcagggacggataatgctgaaagaaaacgcgaaaaaaggattgacccgcatagcctccggctcctggaaacgcctctccggcctctggcacaccgcctgcggcatggccggactgctcttcgacaccgtctacgccgcattccgcaagggccgcacccccaacctctccctcctaagccagatcaaccgccaaatcctctacaccggcgtggaggccttttggctcgtgggatccatagccgtgctatgcgggagcgccataatcttgttcgcaatgttcaacatgcccaagatcggcgccggggagcacttcggcaagatactgataatcgccgtggttggcgaactgggcccgttcgtcacgtcgctcgtggtcgtggggcgctccggcacggcgctcgcaacctacatcgggacaatgcgcgtatcgcgggaggtcgacgcgctggaggtgatggggatcgaccccatacagttcatcgtgcagccggccttcgtgggcatagtggcctccgtgatctgcctcaatctgtacttcatcaccatagcgatctgcggcgggctcgtcgtggcgtggatctcgaccggggtgccgctcgggatatcgttcggccgggtgctggacgcgctgcaattcaaggacgtggcagtcagcctgctcaagagcgccgccttcgggacaatcgtggcgctcacgagttcgtactacggcttgggcgtgcgcaacgtgcgcatggtgcccatagcggccataaacgcggtggtggggtcgatgtttttcaccatcgcggtcaacctgctcctgagcttcggatactatgtcctttag

SEQ ID NO: 42570 - protein, 277 aa, Unknown
  Obtained from environmental sample
  DOMAIN (28)...(275): Domain of unknown function DUF140
  misc_feature (1)..(277): Xaa is any amino acid
MAQGRIMLKENAKKGLTRIASGSWKRLSGLWHTACGMAGLLFDTVYAAFRKGRTPNLSLLSQINRQILYTGVEAFWLVGSIAVLCGSAIILFAMFNMPKIGAGEHFGKILIIAVVGELGPFVTSLVVVGRSGTALATYIGTMRVSREVDALEVMGIDPIQFIVQPAFVGIVASVICLNLYFITIAICGGLVVAWISTGVPLGISFGRVLDALQFKDVAVSLLKSAAFGTIVALTSSYYGLGVRNVRMVPIAAINAVVGSMFFTIAVNLLLSFGYYVL

SEQ ID NO: 42571 - DNA, 729 bp, Unknown
  Obtained from environmental sample
  misc_feature (1)..(729): n is a, c, g, or t
atgtcctttagattggaactgcgcaaagtgtcatatcggcacggggaaaatactatattggatggtgcggaccttgcgctgccgcccgggggcgtggccctcttcggggggcgcagcgggtgcgggaaatccacgctgctcgaaatctgcgccggcctgatcaagccgcggggcggcgccgttctgtgggacggcgaagagataacggacatgccgcgctacgagctgtacggacggcggaggtccatgggctacgtctttcaggggcacgcgttgatatccaaccactccgccttcgacaacatcgccctgccgctcaagtgcggcgaggcggatctgggctccgagacgatagagaagcgggtgaggtcgctgatggacgagctcggcatcgccaaaagtatcgagaagcggtttcccgaagccctctccgccgcgcagctgaaatgcgtcgccgtggcgagggcgcttataagcgatccgacgctcctgatactcgacgagccgttcagcggggtcgaccccgtaacggcgaagatgatcgcggacgtcctgcacggcaggtggaagaggggcggcatgagcgtcttgatggcggcgcactcgttcagcgcgtggccgggacacgcggcgcaacgctttatgctgaaagccgggcgcttggaaccggcggacgaggcgttcgtcaaagtacgcggctttacgcacaaccagagatacgaaccatga

SEQ ID NO: 42572 - protein, 242 aa, Unknown
  Obtained from environmental sample
  DOMAIN (30)...(219): ABC transporter
  misc_feature (1)..(242): Xaa is any amino acid
MSFRLELRKVSYRHGENTILDGADLALPPGGVALFGGRSGCGKSTLLEICAGLIKPRGGAVLWDGEEITDMPRYELYGRRRSMGYVFQGHALISNHSAFDNIALPLKCGEADLGSETIEKRVRSLMDELGIAKSIEKRFPEALSAAQLKCVAVARALISDPTLLILDEPFSGVDPVTAKMIADVLHGRWKRGGMSVLMAAHSFSAWPGHAAQRFMLKAGRLEPADEAFVKVRGFTHNQRYEP

SEQ ID NO: 42573 - DNA, 762 bp, Unknown
  Obtained from environmental sample
  misc_feature (1)..(762): n is a, c, g, or t
gtgcgggaaatccacgctgctcgaaatctgcgccggcctgatcaagccgcggggcggcgccgttctgtgggacggcgaagagataacggacatgccgcgctacgagctgtacggacggcggaggtccatgggctacgtctttcaggggcacgcgttgatatccaaccactccgccttcgacaacatcgccctgccgctcaagtgcggcgaggcggatctgggctccgagacgatagagaagcgggtgaggtcgctgatggacgagctcggcatcgccaaaagtatcgagaagcggtttcccgaagccctctccgccgcgcagctgaaatgcgtcgccgtggcgagggcgcttataagcgatccgacgctcctgatactcgacgagccgttcagcggggtcgaccccgtaacggcgaagatgatcgcggacgtcctgcacggcaggtggaagaggggcggcatgagcgtcttgatggcggcgcactcgttcagcgcgtggccgggacacgcggcgcaacgctttatgctgaaagccgggcgcttggaaccggcggacgaggcgttcgtcaaagtacgcggctttacgcacaaccagagatacgaaccatgatgcacgacaaacacagatcgcagccgacggcggagcctttcgtccggagacaccgctccgtctttgtggggctcttcgtgctggcgccgacgctcgccgtgccggcgctgctgatctttacggtgtcaagagcgacctctcggccgatctga

SEQ ID NO: 42574 - protein, 253 aa, Unknown
  Obtained from environmental sample
  misc_feature (1)..(253): Xaa is any amino acid
MREIHAARNLRRPDQAAGRRRSVGRRRDNGHAALRAVRTAEVHGLRLSGARVDIQPLRLRQHRPAAQVRRGGSGLRDDREAGEVADGRARHRQKYREAVSRSPLRRAAEMRRRGEGAYKRSDAPDTRRAVQRGRPRNGEDDRGRPARQVEEGRHERLDGGALVQRVAGTRGATLYAESRALGTGGRGVRQSTRLYAQPEIRTMMHDKHRSQPTAEPFVRRHRSVFVGLFVLAPTLAVPALLIFTVSRATSRPI

SEQ ID NO: 42575 - DNA, 1041 bp, Unknown
  Obtained from environmental sample
  misc_feature (1)..(1041): n is a, c, g, or t
atgagcggtaataaagagcatggtttcaatcatatgaccgatagaattattgaagaactcagaattattgtgggaaagggcaatgtcgttatcgaaaaagaaaaactggaagcttattcccacgatgaaacagacgcgcaagaatacggacacagtcccgaagcagtaattttcccttctactaccgaagagaccgccttcatcgtaaaactggctaacaaggagcacatacccataaccccaagaggcgcgggatcggggctttctggcggggccattcccgaatatggagggcttgtcctttccctggaaaaaatgaacaagatcatcgaaattgacagggaaaatatgcttgccgtagtggaggcgggcgttgttaccaatgactttgccaaggcggtggaggcacagggtctgtttttcgcgggctaccccatgagccttcagacctgcgtcataggcggcaacattgccgaaaacgccgggggtggcaaggcggtaaagtacggcgttacaggccgctacatactgggccttaccctggttactcccctgggagaaatcgttgaacttgggggaaagattgtaaaagatgtttcgggttacgatttaaaatcattgattatcggttcggagggaaccctgggcatagttactcaggccataatccggctcatcggctacccgtcatcaaagtcggacctcctttcgctctttaagactcccaaagacgccatagacctggtgcctgaaattctcggcaagggccttacccccacaagcatcgaattcatggacaagatttcgatagaaacaagctgtaaatacctcaatgaaagcctcccttacgaagactgcggggccatgctcctcatcgaattggacggctcgaatccggaacaggttgaggcggatcttgttgaaacaggcaaactctgcgaaaaccggggcgctctggaagtgtacgttgccgaagatcgtaacaacattgagcgcatatggaacgtcaggagaaacatgccgaagctttcaggtttttag

SEQ ID NO: 42576 - protein, 346 aa, Unknown
  Obtained from environmental sample
  DOMAIN (53)...(192): FAD binding domain
  misc_feature (1)..(346): Xaa is any amino acid
MSGNKEHGFNHMTDRIIEELRIIVGKGNVVIEKEKLEAYSHDETDAQEYGHSPEAVIFPSTTEETAFIVKLANKEHIPITPRGAGSGLSGGAIPEYGGLVLSLEKMNKIIEIDRENMLAVVEAGVVTNDFAKAVEAQGLFFAGYPMSLQTCVIGGNIAENAGGGKAVKYGVTGRYILGLTLVTPLGEIVELGGKIVKDVSGYDLKSLIIGSEGTLGIVTQAIIRLIGYPSSKSDLLSLFKTPKDAIDLVPEILGKGLTPTSIEFMDKISIETSCKYLNESLPYEDCGAMLLIELDGSNPEQVEADLVETGKLCENRGALEVYVAEDRNNIERIWNVRRNMPKLSGF

SEQ ID NO: 42577 - DNA, 891 bp, Unknown
  Obtained from environmental sample
  misc_feature (1)..(891): n is a, c, g, or t
atggcagaaaccttacaagattctttttcgaacgccatttccgctgaagcccttgcacagtttactacggaacagaggaacgatgcgtccctggacattgacgccaaaagttctttggaaattgtttctatcattaacagcgaagataaaaaagtccctgctgccgtaacacagatactgtgcgaaatcgcggccctggtggatgacattgtcgccgccttcaaaaggggcggcaggcttatctatatcggcgcgggaacttcgggacgcctgggcgtactggatgcctcggaatgtccacctacctacggggtggagccgggcatggtcatggggttaatcgcgggcggacaggaagccctgacaaagtcgattgagtctgccgaagacagggcagaggaaggggtaagggaacttaaggccctgggttttagcgggaaagacgtgttggtgggtattaccgcgtccggtcaggcgccttacgtgctgggcgctctggaatacgcccgggatattggagcggtaaccggcgctataagctgcaacgccaattcaaaaacctttgattacgccaggcatcggctctacgcgaatgttggtcccgaggtggtgaccggctctaccaggatgaagagcggcacagcccagaaactcatcctcaatatgctttccaccgccgccatgatccgcatggggaaggtctataaaaatctaatggtggatctgaagccggtaaaccataaactagtcctcagatcaataaggcttatccgggaagttacgggctgtacaccagaagaggccagggaaagttttgatgcgtcgggaaagcgcccgaagaccgccattgtaatgatcctgctaaaaaaggaaagggaagaggcccagtaa

SEQ ID NO: 42578 - protein, 296 aa, Unknown
  Obtained from environmental sample
  misc_feature (1)..(296): Xaa is any amino acid
MAETLQDSFSNAISAEALAQFTTEQRNDASLDIDAKSSLEIVSIINSEDKKVPAAVTQILCEIAALVDDIVAAFKRGGRLIYIGAGTSGRLGVLDASECPPTYGVEPGMVMGLIAGGQEALTKSIESAEDRAEEGVRELKALGFSGKDVLVGITASGQAPYVLGALEYARDIGAVTGAISCNANSKTFDYARHRLYANVGPEVVTGSTRMKSGTAQKLILNMLSTAAMIRMGKVYKNLMVDLKPVNHKLVLRSIRLIREVTGCTPEEARESFDASGKRPKTAIVMILLKKEREEAQ

SEQ ID NO: 42579 - DNA, 1122 bp, Unknown
  Obtained from environmental sample
  misc_feature (1)..(1122): n is a, c, g, or t
atgtggacgctatcgaagaccttgcgggcaaggaggcttgcaagcttttcggcgctcagtacgccaatgtacagccgcactgcgggggcggacgccaatttgcttgcatattgggctatactttctacacgcatagaaaatccggcgatggcaaaatggaacgagactaccttttataaccttacagacgaccaatggaaagaacttaaagcttcgctggggaaccagcgccttttggggcttgattactattcgggcgggcacttaacccacggttaccggaacaatctttccagccggatgtttgaggttcacggatattcggtttccgaaaaggacgggcttctggattacgatgatattgaaaaacaggctatggaattgcgtcccctaatccttcttgcgggatattcggcttacccgcggaagatcgattttaagcgcatgagggagattgccgacaaagcgggctccgtctttatggtggatatggcgcattttgccgggcttgtggcgggtaaggtttttacgggcgagtttgatcctatgccctgggcgcatgtcgtgacaagcactacccacaagacattgcgcgggcctcgggcgggaattgtgctttccacttccgagtttgccgaggctttggacaagggctgcccccttactatgggcgggcccctgccccatgtgatagcggcaaaggcggtcgctttccgcgaggcttcgcagccggaattcaagaagtacgcgcagaatatcgttgataactgtcaggcgctcgccacttcctgtattgaaaacgggcttaacgtgcttacgggcggaacagacaaccatttgattttaattaatgttcacaagaactcacttacgggcaggcaggcggaaagcgccctgcacgagtgtcacataacgcttaaccggaacagccttccgcgcgaccctaacggcccgtggtatacgtccgggataaggcttggaacggcggctgtaacaagcctggaatggcaaggcggagatgaaggaacttggcgctttgattgcggaagtgataaaggggacgacccagcagccggacaagaaagacccttccaaaaaaagcagggcaaaatacgacattaa

SEQ ID NO: 42580 - protein, 373 aa, Unknown
  Obtained from environmental sample
  SIGNAL (1)...(27)
  DOMAIN (1)...(345): Serine hydroxymethyltransferase
  misc_feature (1)..(373): Xaa is any amino acid
MWTLSKTLRARRLASFSALSTPMYSRTAGADANLLAYWAILSTRIENPAMAKWNETTFYNLTDDQWKELKASLGNQRLLGLDYYSGGHLTHGYRNNLSSRMFEVHGYSVSEKDGLLDYDDIEKQAMELRPLILLAGYSAYPRKIDFKRMREIADKAGSVFMVDMAHFAGLVAGKVFTGEFDPMPWAHVVTSTTHKTLRGPRAGIVLSTSEFAEALDKGCPLTMGGPLPHVIAAKAVAFREASQPEFKKYAQNIVDNCQALATSCIENGLNVLTGGTDNHLILINVHKNSLTGRQAESALHECHITLNRNSLPRDPNGPWYTSGIRLGTAAVTSLEWQGGDEGTWRFDCGSDKGDDPAAGQERPFQKKQGKIRH

SEQ ID NO: 42581 - DNA, 324 bp, Unknown
  Obtained from environmental sample
  misc_feature (1)..(324): n is a, c, g, or t
ttgaattccggctgcgaagcctcgcggaaagcgaccgcctttgccgctatcacatggggcaggggcccgcccatagtaagggggcagcccttgtccaaagcctcggcaaactcggaagtggaaagcacaattcccgcccgaggcccgcgcaatgtcttgtgggtagtgcttgtcacgacatgcgcccagggcataggatcaaactcgcccgtaaaaaccttacccgccacaagcccggcaaaatgcgccatatccaccataaagacggagcccgctttgtcggcaatctccctcatgcgcttaaaatcgatcttccgcgggtaa

SEQ ID NO: 42582 - protein, 107 aa, Unknown
  Obtained from environmental sample
  misc_feature (1)..(107): Xaa is any amino acid
MNSGCEASRKATAFAAITWGRGPPIVRGQPLSKASANSEVESTIPARGPRNVLWVVLVTTCAQGIGSNSPVKTLPATSPAKCAISTIKTEPALSAISLMRLKSIFRG

SEQ ID NO: 42583 - DNA, 459 bp, Unknown
  Obtained from environmental sample
  misc_feature (1)..(459): n is a, c, g, or t
atgaataataaccctgttgcggcttatcttgccgctgtggcgccggataaaattaatacgagtttgttggcttacctttgtaatttgactgaggttgccaaagtaacgccggagattgcttcctctatcgtgaaggaactggaaaaccagcggaagagagtgaagttgattgcaagcgaaaattactgctctatcgcggtacagttggcgatggggaaccttttaaccgataaatacgcggaaggcgtgccttatcacaggttttacgccggaaacgaanatgtggacgctatcgaagaccttgcgggcaaggaggcttgcaagcttttcggcgctcagtacgccaatgtacagccgcactgcgggggcggacgccaatttgcttgcatattgggctatactttctacacgcatagaaaatccggcgatggcaaaatggaacgagactaccttttataa

SEQ ID NO: 42584 - protein, 152 aa, Unknown
  Obtained from environmental sample
  misc_feature (1)..(152): Xaa is any amino acid
MNNNPVAAYLAAVAPDKINTSLLAYLCNLTEVAKVTPEIASSIVKELENQRKRVKLIASENYCSIAVQLAMGNLLTDKYAEGVPYHRFYAGNEXVDAIEDLAGKEACKLFGAQYANVQPHCGGGRQFACILGYTFYTHRKSGDGKMERDYLL

SEQ ID NO: 42585 - DNA, 765 bp, Unknown
  Obtained from environmental sample
  misc_feature (1)..(765): n is a, c, g, or t
atgcgatacggattttttgacaatacacaatgcgaatatgtgattgagcgggtcaatacgcccatgagctggaccaattacattggcaccgagaacatggtaggcgtcttcaaccagacctgcgggggttacctgttttacaagagagcggagcatcatcgtataacacgtttcagaggtaacgccgttccgactgaccgccccggccattatgtatatctgcgtgatgatgaaaccggagattactggacgataagctggcagccgacggcaaagcctgtcgagtgttacagggcaaggcacggtctttcctattcggtgtattcctgcgattattcggggatttacgcggagcaaaccctgtttatcccgagaggcgcggatgtggagctatgggatgtcaaaatcgaaaatcgttccggcaggccacggaagataagcgtgttttcttacgctgaaatgagctggcatcagattgacggtgacaataaaaattttcagagtactctttactgcgccggagcctcatacaaagacggcgttattgagcaggaactccattacgaggagaacagttatcagttctttaccgccgactttgaaccggacggttttgaaattgagcgggagcgttttaccggcgtctggcaaagcgagggcaatcccgaagcggtggaaaaaggcgcgttaaaaggacgaactacatggcatggcggcaaccagtgcgcgagcctgtacaaagcggctttcgctgcccgaaggtaa

SEQ ID NO: 42586 - protein, 254 aa, Unknown
  Obtained from environmental sample
  DOMAIN (1)...(63): Putative carbohydrate binding domain
  misc_feature (1)..(254): Xaa is any amino acid
MRYGFFDNTQCEYVIERVNTPMSWTNYIGTENMVGVFNQTCGGYLFYKRAEHHRITRFRGNAVPTDRPGHYVYLRDDETGDYWTISWQPTAKPVECYRARHGLSYSVYSCDYSGIYAEQTLFIPRGADVELWDVKIENRSGRPRKISVFSYAEMSWHQIDGDNKNFQSTLYCAGASYKDGVIEQELHYEENSYQFFTADFEPDGFEIERERFTGVWQSEGNPEAVEKGALKGRTTWHGGNQCASLYKAAFAARR

SEQ ID NO: 42587 - DNA, 1920 bp, Unknown
  Obtained from environmental sample
  misc_feature (1)..(1920): n is a, c, g, or t
atggcacgaggcggaatattgtatgaagctggtgactttaaagtatataccagttcagaaccttctcatgggataagttcggtagcgttcagtcctgacggtaaaacaattgtttcaggatcgtatgataaaacggtaaaattctgggatgcagttacaggccgggagattcgtaccttttcagagcttccaagcacggtatgtttcgtagcgttcagccctgatggaaaaactgtcgcttctggattgggagatgatacggtaaaactttgggatgttgcgacaggcagggagatacgtactctttcgaggcaatccgatacgaatgattccaaatcgtctgattcggaagatgcgggtatgcttaaaatttttacttcaaccggtataacttccctggcgttcagcccggacagcaaaagcgttgtttcaagctcatgggaggcaacaatactctgggataccgcaacaggtaaggagatccgtacctttgggggtccttcaatagcgtcttccgtggcatttaatcctgatgggaaaactataagtacaggatcatggattaatagtatacaactttggaatgtggcgactggcgaggaaatacgtactatttcggggtattcagttccggtacattatgtggcgttcagttccgataataaaactgtcgtttcggattcatgggttgatacgataaaattgtgggatgttactgcgggtcgggtgcttcataccatcatttcagattataaaagttttgattatatccctttagcaatcagtcctgatggtaaagccattgcttcaggagaaggtgaaataaaactttgggatgccgccacgggacgagagattcgtactttttcaggctcagattcggtacggtccgtagcgttcagccctgacgggaaaaccgttgtttcaggatcaatagatgatacgataaaactatgggacgtagttacaggccgtgagatccgcaccctgtcgggtcatttagcttcggtgaattccgtaatgttcagccctgacggcaaaacccttgtttcaggttcagatgataaaaccataaaaatctgggacgtaagtacaggccgtgagctccgcaccctgtcgggtcattcattttgggtgaaatccgtagcgttcagccctgacggtaaaaccattgcttcaggatcatgggatgagacgataaaactatgggacgttgtaacaggccgtgaaatccgcaccctgtcgggtcattcagatttgttaagctgcgtagcgttcagccctgacggtaaaaccattgcttcaggatcatgggatgatacgataaaactatgggaccttgtaacaggccgtgagctccgcaccctgtcgggtcatttacattgggtgaattctgtagcgttcagccctgacggtaaaacccttatttcaggatcaagggatatgacgataaaactatgggatcttgtaacaggccgtgagctccgcaccctgtcgggtcattcagactgggtggattccgtagcgttcagccctgacggtaaaaccattgtttcaggatcaacagataagacgataaaactatgggatgttgtaacaggccgtgagctccgcaccctgtcgggtcattcatactgggtaatgtccgtagcgttcagccatgacggtaaaacccttgtttcaggatcaatgcctgagataaaaatctggaaccttgtaacaggctctgagaatcgcaccctttcgggtcattcagatttggtatcatcagtagcattcagtcctgacaataaaatcgttgtttcaggatcaaatgataaaacgataaaactctgggacacaggtacaggccgggaaatccgcaccctgtcgggtcattcagattcggtgaattcaataacgttcagtcatgacgggtaa

SEQ ID NO: 42588 - protein, 639 aa, Unknown
  Obtained from environmental sample
  DOMAIN (295)...(372): SMP-30/Gluconolaconase/LRE-like region
  misc_feature (1)..(639): Xaa is any amino acid
MARGGILYEAGDFKVYTSSEPSHGISSVAFSPDGKTIVSGSYDKTVKFWDAVTGREIRTFSELPSTVCFVAFSPDGKTVASGLGDDTVKLWDVATGREIRTLSRQSDTNDSKSSDSEDAGMLKIFTSTGITSLAFSPDSKSVVSSSWEATILWDTATGKEIRTFGGPSIASSVAFNPDGKTISTGSWINSIQLWNVATGEEIRTISGYSVPVHYVAFSSDNKTVVSDSWVDTIKLWDVTAGRVLHTIISDYKSFDYIPLAISPDGKAIASGEGEIKLWDAATGREIRTFSGSDSVRSVAFSPDGKTVVSGSIDDTIKLWDVVTGREIRTLSGHLASVNSVMFSPDGKTLVSGSDDKTIKIWDVSTGRELRTLSGHSFWVKSVAFSPDGKTIASGSWDETIKLWDVVTGREIRTLSGHSDLLSCVAFSPDGKTIASGSWDDTIKLWDLVTGRELRTLSGHLHWVNSVAFSPDGKTLISGSRDMTIKLWDLVTGRELRTLSGHSDWVDSVAFSPDGKTIVSGSTDKTIKLWDVVTGRELRTLSGHSYWVMSVAFSHDGKTLVSGSMPEIKIWNLVTGSENRTLSGHSDLVSSVAFSPDNKIVVSGSNDKTIKLWDTGTGREIRTLSGHSDSVNSITFSHDG

SEQ ID NO: 42589 - DNA, 429 bp, Unknown
  Obtained from environmental sample
  misc_feature (1)..(429): n is a, c, g, or t
atggcaaacgtaaaaataataaaaggaacaagggtacggctcagtcccagggatcagttgttctataccattatagacatatttctggtagtaatgctgatcgtcatgtttattcccatgtggagtacgatcaccctttctttccgttccaatacctttatcggttccaatcttgatggaatgttcctggttccgtggaaatggtccacagccgcctacaaaaccctgttaggcaacagcggttttatcaacgcttttttcaacagccttaaaattttcattatgggcgtaacttgcgccctgttttttaccattcccctggcgtattcgctttcgataaaaaccttgcccggtcggaaattctttaatgtgtttatgcttatcccttacctttttaacgtaggtttagtccctacatacttggtgtaa

SEQ ID NO: 42590 - protein, 142 aa, Unknown
  Obtained from environmental sample
  misc_feature (1)..(142): Xaa is any amino acid
MANVKIIKGTRVRLSPRDQLFYTIIDIFLVVMLIVMFIPMWSTITLSFRSNTFIGSNLDGMFLVPWKWSTAAYKTLLGNSGFINAFFNSLKIFIMGVTCALFFTIPLAYSLSIKTLPGRKFFNVFMLIPYLFNVGLVPTYLV

SEQ ID NO: 42591 - DNA, 924 bp, Unknown
  Obtained from environmental sample
  misc_feature (1)..(924): n is a, c, g, or t
atgaaaaaattatcgcagaaaaacgatacgatgcggcaaatcaaacggcatcgttcggtctatttgctcctggttcttccggttgcctggtacattgtttttaggtatatacccatctggaacggccaaatcgcctttcgtgatttcatgcctctggacggaataaccggcagcaggtgggttggctttgagaatttcaaggtctttaccaaatctttttattttactgaactcttgcggaataccctgttctacagctttggaaaattgtttgtcagtgttccgtcggcaataatcctcgcgattgccctgtacgaatgtgcaaggcccaaactggccaaagtggtacagacgcttgcgtattttccgcacttcctctcgtgggttattatgtacggcattcttcttgccctgctggcccccggcgacggtatcattaacgatgttatcaaggcatttggcggcgagccaatcgctttcctgaccaacactaaaacctttccctggatagtgatcttctccgatacttggaaggaagtaggctggagtgccatcatctttatcgccgcgcttttgggcatcgatatttccctgtttgaggccgccgttgtagaaggggcgtccgccctgcagcgggtgtggaatattacccttccggccatcaagccggtgattgtcatagtggtactgctcaggattggaaccattcttgacgcgggttttaaccagatgttcatgctgtacaccgttcccgtttacagcgtggcggatattatagacacatgggtgtaccgacagggcctgttgaattttcagtttgggctggcgacagcggtcggcattttcaaaggcgtcatagggcttctcctgcttatcgtgagcaataatctggtgaagaaattcggcgagtcgtctttattttaa

SEQ ID NO: 42592 - protein, 307 aa, Unknown
  Obtained from environmental sample
  DOMAIN (79)...(303): Binding-protein-dependent transport system inner membrane component
  misc_feature (1)..(307): Xaa is any amino acid
MKKLSQKNDTMRQIKRHRSVYLLLVLPVAWYIVFRYIPIWNGQIAFRDFMPLDGITGSRWVGFENFKVFTKSFYFTELLRNTLFYSFGKLFVSVPSAIILAIALYECARPKLAKVVQTLAYFPHFLSWVIMYGILLALLAPGDGIINDVIKAFGGEPIAFLTNTKTFPWIVIFSDTWKEVGWSAIIFIAALLGIDISLFEAAVVEGASALQRVWNITLPAIKPVIVIVVLLRIGTILDAGFNQMFMLYTVPVYSVADIIDTWVYRQGLLNFQFGLATAVGIFKGVIGLLLLIVSNNLVKKFGESSLF

SEQ ID NO: 42593 - DNA, 1353 bp, Unknown
  Obtained from environmental sample
  misc_feature (1)..(1353): n is a, c, g, or t
atgtcgatgcgactgtattggggaaggacagtgtnaataatctgcagaaattatgcgccctcagagaagcaaaagaaagcacccgacaaaatcagagagtatatgccctacggcaaagtattggtcgtagacgatatggagccgaatctttatgttactaacatggttcttgccccttacgggttgacaatatccaccgccaaaagaggacaagaagcgattgataaagttaaaagcggcatggtatttgatattatttttatggaccattacatgccggaaatggacggggcggaagcgacaaagataatacgcggtcttgggtacaagcaccctattgtcgcgctgaccgctaacgctttggccgggcaagccaagatttttatggaaaacggctttagcgggtttcttaccaaacctattgacacgcgccagctcaatgcgacgctgaacaaatttgtccgtgacaaataccctgtcaaagttgtcgaagccgcccggaagatgaaaaagccggatgatgacgaagacgaagaggaagacctgccggatttaagccagctgaaagcgctgattgtggacgattttaagccgaatttgaacggggaagccgcaatgcttaaagagtataagatgcaggcggattgcctgttaagcgggcaggaagcggttgaccgcataaaaagcggggaaccgaaatatgatattgtttttatggatcttatgatgccgggaatggacggtatagaagcgaccaaagcgatacgctccctcggcaccgaatatgcggacaccgtgccgattattgcccttacggcgatgccggatgatgacgccaccggcaaggaaaaagcgcttttggacagcggttttcagaaagttatgtacaaacccttcacccttgaaaccgtggatacttttattaaagactggatgagtgataaaataaagaactgtacaataccacctgaaaaaaaggaaaaatctatggaagtggacataccccaggtggacaatgaaaggataaaaaaaatttacggcaaaaagtttaacatctatttggacgttttgcgttcatatctggacgttgtgcccaaatctcttgaagagatgagccatgttaccaaggaaacattgacggcttacgttaccagcgtacacggcgtaaaaagcgtcagcgacttcatcggcgcggaagaagcgcggaaaatggcccttgaactggagatgcagggcagggcaggagacctttccggcgtactggcaaagaacgacacgttcattcaatacgcgaaagagcttatagtcaatgtagaaaaatatctggcgaagatagacgtacctgttacatag

SEQ ID NO: 42594 - protein, 450 aa, Unknown
  Obtained from environmental sample
  DOMAIN (188)...(309): Response regulator receiver domain
  misc_feature (1)..(450): Xaa is any amino acid
MSMRLYWGRTVXIICRNYAPSEKQKKAPDKIREYMPYGKVLVVDDMEPNLYVTNMVLAPYGLTISTAKRGQEAIDKVKSGMVFDIIFMDHYMPEMDGAEATKIIRGLGYKHPIVALTANALAGQAKIFMENGFSGFLTKPIDTRQLNATLNKFVRDKYPVKVVEAARKMKKPDDDEDEEEDLPDLSQLKALIVDDFKPNLNGEAAMLKEYKMQADCLLSGQEAVDRIKSGEPKYDIVFMDLMMPGMDGIEATKAIRSLGTEYADTVPIIALTAMPDDDATGKEKALLDSGFQKVMYKPFTLETVDTFIKDWMSDKIKNCTIPPEKKEKSMEVDIPQVDNERIKKIYGKKFNIYLDVLRSYLDVVPKSLEEMSHVTKETLTAYVTSVHGVKSVSDFIGAEEARKMALELEMQGRAGDLSGVLAKNDTFIQYAKELIVNVEKYLAKIDVPVT

SEQ ID NO: 42595 - DNA, 888 bp, Unknown
  Obtained from environmental sample
  misc_feature (1)..(888): n is a, c, g, or t
atgagccatgaaatacgttcgccgatgaatgtgattttgggtattgtagaaatgcagcttgagaaaaaaggcctgccgcaggaaacaatggaagcgctgggtaagatgcagaattccggtcatttgctgcttaatataatcaacgacatactggacctttccaaaattgaatcgggcaagatggaattggtggcgggcagttatgatattccaagcctgatcaacgatacggtacagtttaacgttatacgttttgacagcaagcccattaattttgttttaaatattgatgaaaatattcctttaaatttattcggcgacgctctgcgtatcaaacagatattgaataacctgctctccaactctttcaaatacacagacatgggagaagttacactgtcgttttccgccgaagcctccggtgcaggtgtgcccggagcgggcgcatccggcgcaggtacacccgaagcgggcgtgtccggcgcggacaagactgtaacgcttgttataaaggtgagtgataccgggcagggcatgactcaggaacagttagacaagctgtttgatgattatacccggtttaatatagatcccaaacgtcaaattcagggtacaggcctgggcatgagcgttaccaaacgctttatcgaaatgatgaacggcgaaattaccgttaaaagcgagccgggaaaaggcacagagtttactatacgaataccgcagggctatgtcgatgcgactgtattggggaaggacagtgtnaataatctgcagaaattatgcgccctcagagaagcaaaagaaagcacccgacaaaatcagagagtatatgccctacggcaaagtattggtcgtagacgatatggagccgaatctttatgttactaa

SEQ ID NO: 42596 - protein, 295 aa, Unknown
  Obtained from environmental sample
  DOMAIN (1)...(59): His Kinase A (phosphoacceptor) domain
  misc_feature (1)..(295): Xaa is any amino acid
MSHEIRSPMNVILGIVEMQLEKKGLPQETMEALGKMQNSGHLLLNIINDILDLSKIESGKMELVAGSYDIPSLINDTVQFNVIRFDSKPINFVLNIDENIPLNLFGDALRIKQILNNLLSNSFKYTDMGEVTLSFSAEASGAGVPGAGASGAGTPEAGVSGADKTVTLVIKVSDTGQGMTQEQLDKLFDDYTRFNIDPKRQIQGTGLGMSVTKRFIEMMNGEITVKSEPGKGTEFTIRIPQGYVDATVLGKDSVNNLQKLCALREAKESTRQNQRVYALRQSIGRRRYGAESLCY

SEQ ID NO: 42597 - DNA, 1044 bp, Unknown
  Obtained from environmental sample
  misc_feature (1)..(1044): n is a, c, g, or t
gtgaaagactatttggggaaccaatctattttatttgtgagaaaattagaaacgaatggctggtatatggcaattatgactccaagagataagtattatgaaaatttagaaaacatgatgaaggttatggttgcgctaggtatattattggctgtggtgctgagtttaattctgctccgcattatatcggcaaagattaaagcggataaactcgttcaggctatattggatgtaactccgcttgcgttgaacctttgggacaaacatctaaaaaataccaaaaccaataaagaagctgtgaagttgtttgacttgtccaataaagaggaatatttaaatagattttatgaattttcacctgtgtatcaaccggatgggcggctttctagcgagaaggctccagagtatatgaataaagcgtttgaagaaggctattgccgttttgaatgggtgcatcaaaaactgaacggcgagccgattccatgcgaagtcactttaattcgcataacttatgaagacgattttatggttgtggggtacatcagggatttacgtgagcaaaaagctatgcttgccgagatacacaaggaaaacgagaactcacgtgcaatggcccattggtataattcaatcctcaattcaatccctttgcccatatctgttaccaatgctgatgcgagatggacgttcataaatacggcggttgagagaattcttggaataacgctcaaagacgccgtaggcaagccttgcagcaattggggttcggttgtctgcaataccccggactgcggcatagcctgcgttaaaaggggcattacgcaaacatatttttccacaggggacttatcgctccaggttgatacagcaatactcaaagatttaaaaggcgatacaattgggtatatagaaatagcgcaggatatcaccaaccttaacttatggcaaaaaagcaggctgacgcggaagccgccagcccgcgccaaatccgcttttcctgctaggataagcatgagatacgccgcccatgaatgccatttttag

SEQ ID NO: 42598 - protein, 347 aa, Unknown
  Obtained from environmental sample
  DOMAIN (212)...(314): PAS fold
  misc_feature (1)..(347): Xaa is any amino acid
MKDYLGNQSILFVRKLETNGWYMAIMTPRDKYYENLENMMKVMVALGILLAVVLSLILLRIISAKIKADKLVQAILDVTPLALNLWDKHLKNTKTNKEAVKLFDLSNKEEYLNRFYEFSPVYQPDGRLSSEKAPEYMNKAFEEGYCRFEWVHQKLNGEPIPCEVTLIRITYEDDFMVVGYIRDLREQKAMLAEIHKENENSRAMAHWYNSILNSIPLPISVTNADARWTFINTAVERILGITLKDAVGKPCSNWGSVVCNTPDCGIACVKRGITQTYFSTGDLSLQVDTAILKDLKGDTIGYIEIAQDITNLNLWQKSRLTRKPPARAKSAFPARISMRYAAHECHF

SEQ ID NO: 42599 - DNA, 1545 bp, Unknown
  Obtained from environmental sample
  misc_feature (1)..(1545): n is a, c, g, or t
ttgatcggagagcggcttttctttcccgcttgcgaaggggaagatgacagcggcggcggagtaacacctacactaactcccgaacacacccaccaatgggacgagtggacggtaacaaaagacgcaacctgtacagaaaaaggcgaggaaacaagagtttgtacgcttgacgaaacacacaaagaaacaagggaaatcctgacagcgcagcatgattgggtgtatttatcaggaggaatagcaccaacttgtacaacggaaggtagcggaaacggaaagtgtaaaatttgtaacaaagaagaaacacttgatgttataccggcgctcggacacgattatggaaattggacagaaataaaagccgcaacttgcattgcaataggcgctgaaacaggtacttgttcccgtgacgcatcgcatgagacggtacgccaaataccgatagacacgacagcgcatcaatggggagcatggacacaaacaactgcgcctaattgcacaatgacgggaatagatacaagaatttgtaatcataacgtagcacataaagaaacacgcactggagcagcagcgctcggacatgattgggagtggatagtaactgcaccgagttacataacggatgtaatagaaacagaaacgtgcaaacgtgacccttcgcatacaaacgaaacacgcatagttccccaactaatctataccgcaaccagcattgccgaccttaaaacatttttagaaagccagccggcaaataccccctcaacttcttttaaaattaaactgaacgtgagcgatcttggtggtcagcgcagcgatacaggaagcgcaggaaacgtactttacaacaacaataccaaatatgtatcccttgacctttcaggaagtacatttaccagttttattgctgattggctgatctcttacggggcttttaaagaatgcaccaatcttaccagcgtaatcataccaaacagcgttacctccattggaaattatgatttttcgggttgtaccagtcttaccagcataaccataccgaacagcgttaccagcattgagaggtgggcttttcaggaatgcaccagccttaccagcataaccataccggacagcgttacctacattaggtctgaagctttttcgggttgtaccagtcttaccagtataactatacccaatagcgtaaccagtattgggggtgaggcttttagaaaatgcaccaatcttaccagcataaccataccgaacagtgttaccagcattgagaggtgggcttttgaggaatgcaccagccttaccagagtaactataccgaatagcgttaccagaattgagaatggggtttttcaatactgtaccagtcttaccagcgtaacatttgcaacaggaagtaacataccagacgttaattttaaagaaaatgtatttcctgaaggaagatatggaaatggaggaaacaccttaaaaaccgcatacagtacaggaaaagcgggaacttatacgaggatggcagacggcgatatttggacgaaaatatcggattaa

SEQ ID NO: 42600 - protein, 514 aa, Unknown
  Obtained from environmental sample
  misc_feature (1)..(514): Xaa is any amino acid
MIGERLFFPACEGEDDSGGGVTPTLTPEHTHQWDEWTVTKDATCTEKGEETRVCTLDETHKETREILTAQHDWVYLSGGIAPTCTTEGSGNGKCKICNKEETLDVIPALGHDYGNWTEIKAATCIAIGAETGTCSRDASHETVRQIPIDTTAHQWGAWTQTTAPNCTMTGIDTRICNHNVAHKETRTGAAALGHDWEWIVTAPSYITDVIETETCKRDPSHTNETRIVPQLIYTATSIADLKTFLESQPANTPSTSFKIKLNVSDLGGQRSDTGSAGNVLYNNNTKYVSLDLSGSTFTSFIADWLISYGAFKECTNLTSVIIPNSVTSIGNYDFSGCTSLTSITIPNSVTSIERWAFQECTSLTSITIPDSVTYIRSEAFSGCTSLTSITIPNSVTSIGGEAFRKCTNLTSITIPNSVTSIERWAFEECTSLTRVTIPNSVTRIENGVFQYCTSLTSVTFATGSNIPDVNFKENVFPEGRYGNGGNTLKTAYSTGKAGTYTRMADGDIWTKISD

SEQ ID NO: 42601 - DNA, 948 bp, Unknown
  Obtained from environmental sample
  misc_feature (1)..(948): n is a, c, g, or t
ttgatgaaaatacatttttggggagtacgcggttctattccgacatcggtatcgccttcatgtataaaaagtaagatttctgcaatcgtagagcagatcactgtcgatgatttggcaagcgcggaaagcagggaaaagtttttatcggggcttccgccgtggttgttcggcactacgggcggaaacagtccgtgcgtcagcgtgtcgcttaacaattcaaaggaagagtgtattgtttttgactgcggttccggtttgcgggagttgggaatagcgcaggcaagcgccgaaaataaaataaaccattatcatatttttctttcgcattttcactgggatcatattcaagggcttcctttttttggtcccggatataatcccgcggtaaaaatagatttctattcgccggcgggcaacttagaaaaaatattaagcggacaaatggttcacccctattttccggtaggcttggactcaatgggctcagcaaaaacatttcactatatggaaaatgatatagatattctgggttgtaaaatcagcaagaagaaaatgaatcaccccggcgactcatacgcgtattgcataaacgagaacggcaagcgttttatttacgcgacggacacggaattaacatcgggcgattttttaaagaccgatgaaaacaccgcgttttttaacggcgcggacgttatagttattgactgccaatacactttaggcgaagcaattgataaatacaactggggacacagcgcttttagtttggcggtagacttttccgtaaactggaatattaaacacatggtattattccaccatgatccaacttatgacgatcataaactgtacggaatattacaatcggcaaaatggtatctggaaagaatgaaccttaaaggcattgaattgactcttgcctatgaaggcttggaaatttcaatttaa

SEQ ID NO: 42602 - protein, 315 aa, Unknown
  Obtained from environmental sample
  DOMAIN (64)...(251): Metallo-beta-lactamase superfamily
  misc_feature (1)..(315): Xaa is any amino acid
MMKIHFWGVRGSIPTSVSPSCIKSKISAIVEQITVDDLASAESREKFLSGLPPWLFGTTGGNSPCVSVSLNNSKEECIVFDCGSGLRELGIAQASAENKINHYHIFLSHFHWDHIQGLPFFGPGYNPAVKIDFYSPAGNLEKILSGQMVHPYFPVGLDSMGSAKTFHYMENDIDILGCKISKKKMNHPGDSYAYCINENGKRFIYATDTELTSGDFLKTDENTAFFNGADVIVIDCQYTLGEAIDKYNWGHSAFSLAVDFSVNWNIKHMVLFHHDPTYDDHKLYGILQSAKWYLERMNLKGIELTLAYEGLEISI

SEQ ID NO: 42603 - DNA, 603 bp, Unknown
  Obtained from environmental sample
  misc_feature (1)..(603): n is a, c, g, or t
ttgaataagaaaaaaaataaaaaaataattacctcatttttacgttttatcactgtaattatcgcgttaattcttgttttaattcccattacaatcggttttgttatgtactttaacgctccggttcgcggcagcgaaaaatacgtggttttatcgcagaatgacgcgataaaattgacagacgacggttatttaatcgatatacgaagaggcgaaagctcgcagtcggtagggatgcgtcttgaaagaacgggacttatacgcaacagatatttttggaacgcgatatgccgtcttggaaaagatcaaattaaaacgggaacatatataattaaaatgcccgcgagccagatagctatttacaaaactctcatttcaggaagagaagttttgcataaggttactattccggaaggtgtaacgcttaanaaaatggcaaatataattgaggaatcgggagtatgttccgcgcaggattttctttccgccgctcacgatatgacaatagtcaacaaatataatataccgaaatcaatcaatggaaggatatctttttcccgatacatacttattcccgggcggaatatcccgcggaaaaaatag

SEQ ID NO: 42604 - protein, 200 aa, Unknown
  Obtained from environmental sample
  SIGNAL (1)...(27)
  DOMAIN (64)...(191): Aminodeoxychorismate lyase
  misc_feature (1)..(200): Xaa is any amino acid
MNKKKNKKIITSFLRFITVIIALILVLIPITIGFVMYFNAPVRGSEKYVVLSQNDAIKLTDDGYLIDIRRGESSQSVGMRLERTGLIRNRYFWNAICRLGKDQIKTGTYIIKMPASQIAIYKTLISGREVLHKVTIPEGVTLXKMANIIEESGVCSAQDFLSAAHDMTIVNKYNIPKSINGRISFSRYILIPGRNIPRKK

SEQ ID NO: 42605 - DNA, 486 bp, Unknown
  Obtained from environmental sample
  misc_feature (1)..(486): n is a, c, g, or t
atggcggacaatctttttagtaatttaaaaaatatagacccggcaattctttcgatgactccgaaagagttaaacgaaaaaatagtaatcgcttccattgttgaaagagaatacagagtggagcaagaagcgcctgttatggccggagttttttataacagattaaaaataaaaatggcgctgcaatcctgcgctaccgtagaatacattataacggaaatacaaaaccgtcctcatccgtctgttttattattttcagacatagaaattgatcacccgtataatacatacattaagccgggtcttccgccgggaccgatttccgctcccggacttaccgccttgcaagccgcattttccccctcaaatacaaattatctgtatttccggcttgaagatgtcgcaagcggaagacattatttttcccggacttatgacgaacacataaaagccggtcagcttataacaaaaccatcatggcgttaa

SEQ ID NO: 42606 - protein, 161 aa, Unknown
  Obtained from environmental sample
  DOMAIN (1)...(155): Aminodeoxychorismate lyase
  misc_feature (1)..(161): Xaa is any amino acid
MADNLFSNLKNIDPAILSMTPKELNEKIVIASIVEREYRVEQEAPVMAGVFYNRLKIKMALQSCATVEYIITEIQNRPHPSVLLFSDIEIDHPYNTYIKPGLPPGPISAPGLTALQAAFSPSNTNYLYFRLEDVASGRHYFSRTYDEHIKAGQLITKPSWR

SEQ ID NO: 42607 - DNA, 486 bp, Unknown
  Obtained from environmental sample
  misc_feature (1)..(486): n is a, c, g, or t
atgcccgttatgcaggatgttacgctgttctcaggcacgatagaagaaaacataacgcttggtttggatttttcttccgaacaaattattgaggcggcaaaaacagtttatgcccatgattttatttcagctcttcccgacggatacaaaacggtcctttccgaaggcgccgcgaatatttccaccggccagcgccagcttataagctacgctcgcgttattgcgcataacccccgcgtcgtcgttttagacgaagcgacaagttcagtcgataccgaaacagagcgtttaattcagctcggaataaaaaaagtaatgtccggcagaacttcttttgtaatcgcccaccgtctatccacaataaaaaacgccgaccgcatccttgtcttgtccgccggccgtttggtggaagaaggcactcacgaagaacttatcgcaagagatggtttgtacgcgggcttatatcggttacagtacgaggaatga

SEQ ID NO: 42608 - protein, 161 aa, Unknown
  Obtained from environmental sample
  DOMAIN (2)...(133): ABC transporter
  misc_feature (1)..(161): Xaa is any amino acid
MPVMQDVTLFSGTIEENITLGLDFSSEQIIEAAKTVYAHDFISALPDGYKTVLSEGAANISTGQRQLISYARVIAHNPRVVVLDEATSSVDTETERLIQLGIKKVMSGRTSFVIAHRLSTIKNADRILVLSAGRLVEEGTHEELIARDGLYAGLYRLQYEE

SEQ ID NO: 42609 - DNA, 918 bp, Unknown
  Obtained from environmental sample
  misc_feature (1)..(918): n is a, c, g, or t
ttgaaaaacgtgctgccgcaagcccgcgaaaagggagttgttttttccaatctttgcccgttttcccacgatttttaccgcaaattcggctatgaaattgcctgcgccagaaaaaacataaccatcccgacaggcgatttaccggaaataaaaccaaccgggcagtttattcatattcttccgaaagacgacacgtcgcttctcgctcaagttcattcggcgtacatatcggacatcaaccacggaattcacagggattattggttcgacaatcgcgcatggaagcggtttacaaaggaagacccatatacttcagggtcatacctgtatttgtggaaagacgaaaacggcgccgcgcgcggttatatacagtacaaggacatcatagaagacggcgagcacaatatgtctgtaacggagcttgtttttaccgacaaaaaaggcctttacggcgcgcttggcataactgcgggccttgccgcccaatttgaaaacctaaaatggatgatgcccaccttcatcgacgcttccgattttctgggcgacgcgtggtcattggaacaaaaaatcaaccccagagacatgacaagggtaatcaatgtaaaaaccgcccttgagttgatgcgccgccccaagaacgaaggcgaatatgtaatcgaagtagaagacgaaaacatagaagccaactcaggcaaatacctcgtacagttcggtccgcaaggagcaaaagtatcatcaacaaaaaaagacgcggacatttcatgcgacgttctcacgctaagccagcttgtaacaggctacaggtcgctggaaaacgcgctgtactcaagacgcgaaggattagaaattcacggtaatttggaaaccttaagaacggtattcactgaacgcccccagcatataacagaatacttttaa

SEQ ID NO: 42610 - protein, 305 aa, Unknown
  Obtained from environmental sample
  misc_feature (1)..(305): Xaa is any amino acid
MKNVLPQAREKGVVFSNLCPFSHDFYRKFGYEIACARKNITIPTGDLPEIKPTGQFIHILPKDDTSLLAQVHSAYISDINHGIHRDYWFDNRAWKRFTKEDPYTSGSYLYLWKDENGAARGYIQYKDIIEDGEHNMSVTELVFTDKKGLYGALGITAGLAAQFENLKWMMPTFIDASDFLGDAWSLEQKINPRDMTRVINVKTALELMRRPKNEGEYVIEVEDENIEANSGKYLVQFGPQGAKVSSTKKDADISCDVLTLSQLVTGYRSLENALYSRREGLEIHGNLETLRTVFTERPQHITEYF

SEQ ID NO: 42611 - DNA, 642 bp, Unknown
  Obtained from environmental sample
  misc_feature (1)..(642): n is a, c, g, or t
atggatgattttgccgatatttcgcaggaagatacagaaataatcgccgaagcccaaaatagcgatgaattggacaaactgcgcgaagaaggcgcgatgcccacgacggaagcccctgaaaacagcgattatcttgaaaacgattcaatggatctgtcagacgcggtaattgacgaacctgtattatcatctaacgagcttttggaaaaagaagtattaacagaaccttctttggacggagaagattttgacatggattcttttgataatttatcaattgattccgatacagatgacgatttttcttctcttgacgacgatacagcatcgcagccggaagctcccgcgcccgctccgcagcctgccgcaaaagctcctcctccacccgttcaagaagctgccgctccgcagcccgcgcctcaaaccgctccacaatccacttctgtagccgtagcgggaggacaagccggcggcggcgctccgtttacccttccttcgggtttaagatcagaacttagaaatattttaagctacatggatcagcttcttgaatcattaccggaagaaaaaatcgaagagttcgcaaaatcagaatacttcgattcctacaagaaactctttaaggatttggggctggtataa

SEQ ID NO: 42612 - protein, 213 aa, Unknown
  Obtained from environmental sample
  misc_feature (1)..(213): Xaa is any amino acid
MDDFADISQEDTEIIAEAQNSDELDKLREEGAMPTTEAPENSDYLENDSMDLSDAVIDEPVLSSNELLEKEVLTEPSLDGEDFDMDSFDNLSIDSDTDDDFSSLDDDTASQPEAPAPAPQPAAKAPPPPVQEAAAPQPAPQTAPQSTSVAVAGGQAGGGAPFTLPSGLRSELRNILSYMDQLLESLPEEKIEEFAKSEYFDSYKKLFKDLGLV

SEQ ID NO: 42613 - DNA, 912 bp, Unknown
  Obtained from environmental sample
  misc_feature (1)..(912): n is a, c, g, or t
atggaaattcccgttattattacgggatcaggtccaagccttgaacaagctctgcctgttattcaaaaagtgcaagccaactgccttatcatcgccgcgtcttcttccgttcttgcgctgtcgtcggcgggtataacagcggatatagtcattgcgacagacggcggcagttgggcgttaaaacacatttaccctttctacagagataaaaaacacgtaaacacttccgcttttgccgtcaatctctgcgccgccctgccctctcagtgcgcggacagcgcgcaattaattttaaacgacggcagtttttggcagaacatcgttcttcacgagctaaatctgccgtccgtgatatttccgcaaagaggaacagtaaccgcaaccgccgtagagcttggctttgttctttcaaacggaaacatctatcttgccggtttggatttttcagttaacgacattagaacccacgcaagaccgtatagttttgacaatttattttacagccgcgctaaccgttttgttcctttttattcggaaagttattcgcgttcaagactgcttcatcagggcggaagtatggacatatacgcgtcatggtttaaggagcagttaaacaagtggtcaaaacgaatttattccataggcggcaataaaatttttgaacacggggagccttcatcgcataacggtttaaaaaagactgatgatttttttaagacggttgaagttgaaaactcaaatgtcttttgcgaaaatgggatacaagccttgcttaacgccttgaaacagtctgagtatgcgcaaaacataaagagggaacttaattccctgcttttttcaggcgaaaatgaagtaacggagcgggaattggaaaccgcaataaaagaaacctgtataaaggcgcttacatga

SEQ ID NO: 42614 - protein, 303 aa, Unknown
  Obtained from environmental sample
  DOMAIN (1)...(148): Protein of unknown function DUF115
  misc_feature (1)..(303): Xaa is any amino acid
MEIPVIITGSGPSLEQALPVIQKVQANCLIIAASSSVLALSSAGITADIVIATDGGSWALKHIYPFYRDKKHVNTSAFAVNLCAALPSQCADSAQLILNDGSFWQNIVLHELNLPSVIFPQRGTVTATAVELGFVLSNGNIYLAGLDFSVNDIRTHARPYSFDNLFYSRANRFVPFYSESYSRSRLLHQGGSMDIYASWFKEQLNKWSKRIYSIGGNKIFEHGEPSSHNGLKKTDDFFKTVEVENSNVFCENGIQALLNALKQSEYAQNIKRELNSLLFSGENEVTERELETAIKETCIKALT

SEQ ID NO: 42615 - DNA, 351 bp, Unknown
  Obtained from environmental sample
  misc_feature (1)..(351): n is a, c, g, or t
atgaaacgattaggcatgatatttattaaaaatttgaaggaataccgtaaaaaaagcggttttacacaggctcaacttgctgaaaaggtcaaagttaccccaaattatataggtatgctagaaatgggtcgtaattttcccgctactgatcttatagagcgtattgccaaggctttaaatatagaaatgtacgatttgtttgtggaaaacagttcccctactaaagagttggaaaagttaagacaagatataatgcttgaaataaagaaaacgattactgaaaccgtaatacaaacagtaagagaagcatttgaagaaaatagcanacgctgttcacctaaatcaaaataa

SEQ ID NO: 42616 - protein, 116 aa, Unknown
  Obtained from environmental sample
  DOMAIN (12)...(66): Helix-turn-helix
  misc_feature (1)..(116): Xaa is any amino acid
MKRLGMIFIKNLKEYRKKSGFTQAQLAEKVKVTPNYIGMLEMGRNFPATDLIERIAKALNIEMYDLFVENSSPTKELEKLRQDIMLEIKKTITETVIQTVREAFEENSXRCSPKSK

SEQ ID NO: 42617 - DNA, 981 bp, Unknown
  Obtained from environmental sample
  misc_feature (1)..(981): n is a, c, g, or t
atggatttgctggagcagattgaaaacgtaataaacgagtctaaatactcggcggacagcaagggagattattccggcgcgttgtgtacccgcgtccgctctttgaccaacggcttgaacgcccttattttctgcaacaacgatttaccggacgccgccttgtttgatgaaatcgcgattgtggacctgagccgcgtgggttccacggagacgaagtctttgattatggggctgctggtcatgaagctgaacgagtaccgctcgtcggcgaacaaaggaaccaacctcccgttaaagcatattacggtgcttgaggaggcgcacaaccttttgaagcggacctcgacggagcagtcttccgagggttccaacctgcttgggaagtcggtggagttgctcgccaactcgatagcggagatgaggacatacggggagggcttcatcatagccgaccagtcgccggggctcttggatatgtcggttatccgcaacacaaacacaaaaatcatactgcgcctgccggaacagagcgaccgcgaacttgtcgggttttcggcaagtctaaacgaggagcagattacggaactctccaagttggagcaaggcgtcgcggcggtgtatcagaacgattgggtggagcctattctggtaaaggtaaactactgcgagcttaacgctaaagaaacgccatacgacggttccgctcatatcgccaaggcggattttaagggtatcagaaagcagatagtctatatgctgattcagggcagggtgaatgagcgtcttgaatttgacgtaggcgagatagaaaaaaatatcggcgcgcttaatctctccgccagaaattatattttattaaaggagcagatcgcggagtttaaggccaaaaaggcgctctctatatggcaagcggagagcttcccgaagttggcgaggcagatcgtcgacgtattggatgtccgtagccgtgtggaaaactag

SEQ ID NO: 42618 - protein, 326 aa, Unknown
  Obtained from environmental sample
  misc_feature (1)..(326): Xaa is any amino acid
MDLLEQIENVINESKYSADSKGDYSGALCTRVRSLTNGLNALIFCNNDLPDAALFDEIAIVDLSRVGSTETKSLIMGLLVMKLNEYRSSANKGTNLPLKHITVLEEAHNLLKRTSTEQSSEGSNLLGKSVELLANSIAEMRTYGEGFIIADQSPGLLDMSVIRNTNTKIILRLPEQSDRELVGFSASLNEEQITELSKLEQGVAAVYQNDWVEPILVKVNYCELNAKETPYDGSAHIAKADFKGIRKQIVYMLIQGRVNERLEFDVGEIEKNIGALNLSARNYILLKEQIAEFKAKKALSIWQAESFPKLARQIVDVLDVRSRVEN

SEQ ID NO: 42619 - DNA, 636 bp, Unknown
  Obtained from environmental sample
  misc_feature (1)..(636): n is a, c, g, or t
atgattcaaattcgctggagccgtaatgaagcctattatgccgaggcgccatggcgcggaacatgggaacaagatggcggaacattgatgaaccagtgtactcacggtattgatctccttcagtggatgatgggcgaggacgcggtacgggtgcaggcgcagacaaggcgttttatgcgccctatcgaagcggaagattttggcgccgctatcgtagagtttaaaagcggcgcagttggtattatcgaaggtactgcggatatttttcctgcgaatataaacgaaacactttccatttttggggaaaaaggatcggtagtaatcggcgggctggcagttaataaactggaaatatggcgttttgccgacgctgattctgcaggagataccgaggataaggtcttaaatcccaatgaaaaagatccgcccaccgtatacgggtttgggcataccgccctttttaaagactttattgattcaatcgaatcagatcgcgaaccattagtgtcaggggaaagcggcaaaaaagcgctggaggtaatccttgcgatatataaatcccaaaaaacaaacaagcctgtcgatttgccctgtgatttttctacgcttgatatgaaaggaatatttgataaatga

SEQ ID NO: 42620 - protein, 211 aa, Unknown
  Obtained from environmental sample
  DOMAIN (1)...(100): Oxidoreductase family, C-terminal alpha/beta domain
  misc_feature (1)..(211): Xaa is any amino acid
MIQIRWSRNEAYYAEAPWRGTWEQDGGTLMNQCTHGIDLLQWMMGEDAVRVQAQTRRFMRPIEAEDFGAAIVEFKSGAVGIIEGTADIFPANINETLSIFGEKGSVVIGGLAVNKLEIWRFADADSAGDTEDKVLNPNEKDPPTVYGFGHTALFKDFIDSIESDREPLVSGESGKKALEVILAIYKSQKTNKPVDLPCDFSTLDMKGIFDK

SEQ ID NO: 42621 - DNA, 1212 bp, Unknown
  Obtained from environmental sample
  misc_feature (1)..(1212): n is a, c, g, or t
atgaaagccgccgatgattctgtttcttcttttaaagaacagcttgatcacggccttgaagaagccagaaaagaagccgagatttcacttcaggctgaaattggaaattattcccttaagacggcggagacggttaaaaaataccagcgggaacttgatgacgcatggaacgggctttcggcgcggcttaaggaactggatgaaaacgtggaggatgcacgccagcggatcagggagttggccgcggagaccgacaaccgcatcgtgtcggtgcatacctcggtggatgacgcggagcggcatatcagggaggcggttgatcaaaccaagcttattgacaaggccgatgcaatgaggctggagatggaacgccgcatcgaggatcttaaaggcgatattgatcgcctggatcaacgcagggccgaagccgcaaggatcgaaaacgaattcatcaaaatcaaacgtattgaagacgagattaattccaagtacatcaagatcctttcggaagaacgcaggattgaaaacatggaagcgaactttacccgctttcttcaaatttcccgctcggtggaagacaaactttcggaggttaccgcctctgacgatacgctccaggctttgcagctaaagatccgcaaactcgaagaggccctcggcggtacggaggaaagattccaaaggatcgaaaagaagaaccagattctggacaataccaacgacggcatagacaggaactttaaagtttgcagggagtcggaaaagctgtctgacagaataggcggggagctggagcgttatgccgaagatctggaattaataaaaacttccatagaaaaactggcgggtgaaagcgagagggcaaaggaagcaacggacaagatagaagtgctggataatctgcttgaagaaattgaggagcgtataaaatccatgcagagggcaagagcatggatcgccgaaactgagaccaggcttgaagagctcaacaaacagctccagacgcaggcgagagcaatagacgccgtggcaaaaggcaagaaaccgggccctcccatgaaccttggcaagggagcgccgccgcagcagataaaagaggatgtcattgccctggcgcgtcagggctggaaagttgacgaaatagcaaaggcgatgaagatttccaggggagaagtggaactcattctcgaaatggcccccagggacgtttga

SEQ ID NO: 42622 - protein, 403 aa, Unknown
  Obtained from environmental sample
  misc_feature (1)..(403): Xaa is any amino acid
MKAADDSVSSFKEQLDHGLEEARKEAEISLQAEIGNYSLKTAETVKKYQRELDDAWNGLSARLKELDENVEDARQRIRELAAETDNRIVSVHTSVDDAERHIREAVDQTKLIDKADAMRLEMERRIEDLKGDIDRLDQRRAEAARIENEFIKIKRIEDEINSKYIKILSEERRIENMEANFTRFLQISRSVEDKLSEVTASDDTLQALQLKIRKLEEALGGTEERFQRIEKKNQILDNTNDGIDRNFKVCRESEKLSDRIGGELERYAEDLELIKTSIEKLAGESERAKEATDKIEVLDNLLEEIEERIKSMQRARAWIAETETRLEELNKQLQTQARAIDAVAKGKKPGPPMNLGKGAPPQQIKEDVIALARQGWKVDEIAKAMKISRGEVELILEMAPRDV

SEQ ID NO: 42623 - DNA, 318 bp, Unknown
  Obtained from environmental sample
  misc_feature (1)..(318): n is a, c, g, or t
atggacgcgcttctggctcttccaggggtggggcggaaaacagccaatctggttcttaccgaagcgttcgatatgtacggtatttgcgtggacattcatgtacaccggatctgtaacagggcaggctgggtcgcaacgcctgacccggaaaaaactgaaacggttttgagggaaaaattgcccaagagatattggaaacggattaacggcttgctggttctatacgggcaaaatatctgtcggccgctgagccctctctgttcacgctgcgttattccaaactggtgtgagcggcggggcgtggaaaaaagccgctag

SEQ ID NO: 42624 - protein, 105 aa, Unknown
  Obtained from environmental sample
  misc_feature (1)..(105): Xaa is any amino acid
MDALLALPGVGRKTANLVLTEAFDMYGICVDIHVHRICNRAGWVATPDPEKTETVLREKLPKRYWKRINGLLVLYGQNICRPLSPLCSRCVIPNWCERRGVEKSR

SEQ ID NO: 42625 - DNA, 396 bp, Unknown
  Obtained from environmental sample
  misc_feature (1)..(396): n is a, c, g, or t
atgagcaaatcttatggtaataccattgaaatttttttagagccaaaagaactaaaggcaaaaatcgggaaaatagttaccaatagccaacctatagaagaaccgaaagatcctgataaatgcaatgtgtttgccttgtataaactttttgcaagcgaagagcaaagtgctgctttggcggctcgttaccgtgcaggcgggctgggctgggggcatgcaaaagaagccttgcgcgagcttttggaagaacacctcgctgcgccaagggaaaaatataaagcattactctcagatacagcgcaaatagataaaattctcgcttatggcgcagaaaaagcaagggcggtttcaaaaccctttatggaagagattagagctgtcgtggggatagggtag

SEQ ID NO: 42626 - protein, 131 aa, Unknown
  Obtained from environmental sample
  misc_feature (1)..(131): Xaa is any amino acid
MSKSYGNTIEIFLEPKELKAKIGKIVTNSQPIEEPKDPDKCNVFALYKLFASEEQSAALAARYRAGGLGWGHAKEALRELLEEHLAAPREKYKALLSDTAQIDKILAYGAEKARAVSKPFMEEIRAVVGIG

SEQ ID NO: 42627 - DNA, 555 bp, Unknown
  Obtained from environmental sample
  misc_feature (1)..(555): n is a, c, g, or t
atgcgcctgacaaaaatttacacacgcaccggagacaaaggctatacctctattattggtggcgagcgagtgccaaaatcgcacctgcgtttggagtgctatgggactattgatgagttaaacgctttcacgggtaaattgaaatttacctgcaaggcgagcaaaaataaaaccttgcgggcaataagcggaaatttgaacaatattcaaaaaatgcttctcaatgttggggctgtgcttgcaaccccaaagggcaaagaatggaagggaatgccaagcataaacgaaacacatatcaaagaattagaagtagaaatagacaaaatgaactctaaacttaaacccttaaaagagttcaccatttcgggcgaaaacgaaataaatgcagaggctcatatttgccgcacagtttgccgcagagcagagagaattttagccaaggcaaaagaaaacaaaatgactatagacgattttgccatggcttatataaataggctttcggattatttctttgtacttagccgctactctaccctatccccacgacagctctaa

SEQ ID NO: 42628 - protein, 184 aa, Unknown
  Obtained from environmental sample
  DOMAIN (6)...(179): Cobalamin adenosyltransferase
  misc_feature (1)..(184): Xaa is any amino acid
MRLTKIYTRTGDKGYTSIIGGERVPKSHLRLECYGTIDELNAFTGKLKFTCKASKNKTLRAISGNLNNIQKMLLNVGAVLATPKGKEWKGMPSINETHIKELEVEIDKMNSKLKPLKEFTISGENEINAEAHICRTVCRRAERILAKAKENKMTIDDFAMAYINRLSDYFFVLSRYSTLSPRQL

SEQ ID NO: 42629 - DNA, 633 bp, Unknown
  Obtained from environmental sample
  misc_feature (1)..(633): n is a, c, g, or t
gtgctagacgaaattttaacaaagcatccagaaatggaatttgtgcagcttcaaataaattaccttgactgggaagattcaggaattgaatctcgcaaatgctttgaggttgctacaaaacacaaaaaacccattatagttatggaacccgtaaaaggcggctcgcttgcaaacattccaaaagaagccgaagaaattttcaaagcgcataatccaaaaatgtccatcgcttcgtgggctattcgctatgctgcctcgctaaataacgtgataatggtgctaagcggaatgagcaatgatgctcaactcgcagacaatatgaattatatgctggaatttgaaccgctttcaaaaaaagaatttgaaattataaatagcgtagctcaaataatcaaaacagacattgcaatcccctgcaccgcctgccgttattgcgtagaaggctgtcccaaaaaaatcccaattccagagctattttccatttacaacgaattcaaaaaatctggtactctccaaagcccgccaaatggcggcaaggcttctgactgcatttcttgcggaaactgcgaggaacattgcccccagcatttgcctgtgagcaagtatttggaaaatgtagctaagattttgtag

SEQ ID NO: 42630 - protein, 210 aa, Unknown
  Obtained from environmental sample
  DOMAIN (176)...(199): 4Fe-4S binding domain
  misc_feature (1)..(210): Xaa is any amino acid
MLDEILTKHPEMEFVQLQINYLDWEDSGIESRKCFEVATKHKKPIIVMEPVKGGSLANIPKEAEEIFKAHNPKMSIASWAIRYAASLNNVIMVLSGMSNDAQLADNMNYMLEFEPLSKKEFEIINSVAQIIKTDIAIPCTACRYCVEGCPKKIPIPELFSIYNEFKKSGTLQSPPNGGKASDCISCGNCEEHCPQHLPVSKYLENVAKIL

SEQ ID NO: 42631 - DNA, 426 bp, Unknown
  Obtained from environmental sample
  misc_feature (1)..(426): n is a, c, g, or t
atggaaaactttttaaccgacaacgaagatattctgttccagctggaacatcttgatctggatcgcatcattcatctgaaagaggaaaatttcagccaggcgaagctttacccccacgcccccaaggacgccgaggacgcaaaagattcgtaccgcatggttttgaatatcatcggcgggatcgcgtgcgagttcatagcgcctaacgcacctgctgttgacgaagccggccccaccctggcgaacaaccaggtaacccttcaccccgcgacacagaaggcgctggatatgatggcaaaagccgacatgatgggtttcatcattccccggaagtacggcggcattaatatgcccaatacgatcctcagcatcgcggcagagatactcgtgccgctcgtgccgctcgtgccgctcggccgattctga

SEQ ID NO: 42632 - protein, 141 aa, Unknown
  Obtained from environmental sample
  misc_feature (1)..(141): Xaa is any amino acid
MENFLTDNEDILFQLEHLDLDRIIHLKEENFSQAKLYPHAPKDAEDAKDSYRMVLNIIGGIACEFIAPNAPAVDEAGPTLANNQVTLHPATQKALDMMAKADMMGFIIPRKYGGINMPNTILSIAAEILVPLVPLVPLGRF

SEQ ID NO: 42633 - DNA, 1014 bp, Unknown
  Obtained from environmental sample
  misc_feature (1)..(1014): n is a, c, g, or t
atgagcgcagaaaacagcgtaatggtatacattcaacaaaacggcgggaaagccgccgaggtgagcctggagcttgtgtccaaggcacgtgaactcgcggacaagcttggggtggaggttagtgccgcgctttttggcgacaaggtctcgggagaagtttcccgccttgcgagcctcggcgcggatcgcgtgtacgtactagaagacccccgcctgaaattttacactccaattccatacagcaagctgatgattcaaacagtctccgaaaggaagcctcagatcgtcctttacggcgcgagtaccgagggcagagacattgcaccacgtgtggcgtctcgcctcaaagtggggctgacagcagactgcacggatttgcagatcggcgaccatacccagcaggaaacggaatacaagaacatcctttaccagatacgtccggctttcgggggcaacataatcgccaccatcgtatgcccggagaagaaaccccagatggccacggtccgcgagggcgttatgcgtatggcacagcctaacccttcacgcaaggccgagaccgtgaatatctccgcaaagctagggccggaagatttccccagcgaaataattgagcgggtcatggaagaaaagaccgtcaacctcaagggcgcacagatcattgtatcaggcggtataggtgtgggaagcaaggacaatttcgcgcttataagggagcttgcggaaaccctcggcgcggaagtgggcgcttcccgcgcggcggtggacgctggctttatcggcaaagagcaccaggtcgggcagacgggaacaaccgtcaggccgaagctctacatagcttgcggcatttccggcgcgatccagcaccgcgccggcatggacgattccgcccgcatcatcgcaatcaacagcgaccctgaagcgccgattttcagcattgcccattatggtattgtaggagacatgaacgaggttatcccccggatgattaaagcgtacaaggccagagtatag

SEQ ID NO: 42634 - protein, 337 aa, Unknown
  Obtained from environmental sample
  DOMAIN (6)...(202): Electron transfer flavoprotein domain
  misc_feature (1)..(337): Xaa is any amino acid
MSAENSVMVYIQQNGGKAAEVSLELVSKARELADKLGVEVSAALFGDKVSGEVSRLASLGADRVYVLEDPRLKFYTPIPYSKLMIQTVSERKPQIVLYGASTEGRDIAPRVASRLKVGLTADCTDLQIGDHTQQETEYKNILYQIRPAFGGNIIATIVCPEKKPQMATVREGVMRMAQPNPSRKAETVNISAKLGPEDFPSEIIERVMEEKTVNLKGAQIIVSGGIGVGSKDNFALIRELAETLGAEVGASRAAVDAGFIGKEHQVGQTGTTVRPKLYIACGISGAIQHRAGMDDSARIIAINSDPEAPIFSIAHYGIVGDMNEVIPRMIKAYKARV

SEQ ID NO: 42635 - DNA, 960 bp, Unknown
  Obtained from environmental sample
  misc_feature (1)..(960): n is a, c, g, or t
atgaaacagataacggcggcggtaggctgttcaaagcaggttatttataagctgtgggccaagtggctggcatgtaaaaacaagcatgaaaaagccgaagtgctgaaagtaaacccgcggggtatcaaacacggcgagcacaggacgctgacacccgagcaggaaaaaatcattcaaaacacaattatagaaaaatatcctgatgaactgcattttgatttcgccctatggacccgtgaagcggtcagagggttgatactgaaattgttcgtcataacgatgccgattaggacagtaggggagtatctgaatcgctggggatacaccccgcagaagccggtaaaatatgcctatgaacggaaagaagaaaaagtcgaagaatggctggaaaagacctataaagcgataaaaaggcgggctaaacggctcggagctgttattttctggggtgatgagacaacaatcaaggcagaggatgtgcgggggcgcggttatgcgccgcagggaagaacgcctgtggtaaggcgaaccaagcgcagggaaaatatcagcatgatttccgcgataaccaaccaggggaaagtaatgtggaaactgtacgaagggagtgtcaataccgaacggtttctagaatttgtgaagcacctgataaaataccagagaaagaaagtgtttttgatagtggataacgccaagcctcatagaggcaagctgctaaaacagtggcttgaaacaaacaaagaccggatagaaatattctatctgccgtcctatagcccggacctaaatcctgatgaacacataaacgccgatgtaaagtacggagtgggttcaaagcatccgaaaagaaacaaggaagaattgagaaaagcaacggaagaatatatgcgtttgctggatcgatcacctgaaaaaattatcaaatactttcttgatccggcgattagttacgccgcataa

SEQ ID NO: 42636 - protein, 319 aa, Unknown
  Obtained from environmental sample
  misc_feature (1)..(319): Xaa is any amino acid
MKQITAAVGCSKQVIYKLWAKWLACKNKHEKAEVLKVNPRGIKHGEHRTLTPEQEKIIQNTIIEKYPDELHFDFALWTREAVRGLILKLFVITMPIRTVGEYLNRWGYTPQKPVKYAYERKEEKVEEWLEKTYKAIKRRAKRLGAVIFWGDETTIKAEDVRGRGYAPQGRTPVVRRTKRRENISMISAITNQGKVMWKLYEGSVNTERFLEFVKHLIKYQRKKVFLIVDNAKPHRGKLLKQWLETNKDRIEIFYLPSYSPDLNPDEHINADVKYGVGSKHPKRNKEELRKATEEYMRLLDRSPEKIIKYFLDPAISYAA

SEQ ID NO: 42637 - DNA, 582 bp, Unknown
  Obtained from environmental sample
  misc_feature (1)..(582): n is a, c, g, or t
atgtccagccgggaactgacccctgcggaaatcgggaccgggcttgaagacctggtcatcgccattgacggtatcgccgttatcctcaataatgccaaccccgttaccagcctgagcacggatcagatcaaggacatttacaccggaaacattacccgctgggaacagcttggttcttcggcaaacggtaaaaccggcggtattgcggtaatctcaagggaacccggttcgggaacaagaggcgcttttgaggaactgctcaaatttcaggatcaactggtcaagggcgcaatcgagtttgacggtacgggcgcaatcaaagccgaagtatcccgcaatgccgatgcgataggctatatctcgcttggctctctggacaataccattaaacccctgaatgtcggagacattgctccgagtaatgacaatgtagtatccggctcttataaaatcgcccgtccctttatcctggtaaccagaaaaggcgttcccctcaacgcggaaaccaaagcctttattgactggatcatgggtagcgcgggccagagtattgtcaagaaaagctggattcctgtaaagtaa

SEQ ID NO: 42638 - protein, 193 aa, Unknown
  Obtained from environmental sample
  misc_feature (1)..(193): Xaa is any amino acid
MSSRELTPAEIGTGLEDLVIAIDGIAVILNNANPVTSLSTDQIKDIYTGNITRWEQLGSSANGKTGGIAVISREPGSGTRGAFEELLKFQDQLVKGAIEFDGTGAIKAEVSRNADAIGYISLGSLDNTIKPLNVGDIAPSNDNVVSGSYKIARPFILVTRKGVPLNAETKAFIDWIMGSAGQSIVKKSWIPVK

SEQ ID NO: 42639 - DNA, 306 bp, Unknown
  Obtained from environmental sample
  misc_feature (1)..(306): n is a, c, g, or t
gtgatggacagagaagaaaaaatgtccaccggcatgaagcacggcatcgctattccgcacggaaaatgcgcctcttctgaggatctggtcgcgtgcatcggtatttcggaaaaacccgtagactttgattctttggacaaacagccatgcagaatttttataatgactctttcaccggtggaaaaaacagggccgcatttacagtttcttgcggaagtcagtttattgtttaaaagcgccgaaaaacgcgatgaaattataaaagccaaaacgcccgaagaagtgctggaaatactcgcagattaa

SEQ ID NO: 42640 - protein, 101 aa, Unknown
  Obtained from environmental sample
  DOMAIN (1)...(101): Phosphoenolpyruvate-dependent sugar phosphotransferase system, EIIA 2
  misc_feature (1)..(101): Xaa is any amino acid
MMDREEKMSTGMKHGIAIPHGKCASSEDLVACIGISEKPVDFDSLDKQPCRIFIMTLSPVEKTGPHLQFLAEVSLLFKSAEKRDEIIKAKTPEEVLEILAD

SEQ ID NO: 42641 - DNA, 534 bp, Unknown
  Obtained from environmental sample
  misc_feature (1)..(534): n is a, c, g, or t
atgtacgttaaagaaaatctaattctggacaatgaaggcagagttttaattctgcgcggagtgaatctggggggagattcaaaaattcctttctgcgaacaaggcggcgaaataaaacccgattttttaaatactcaaaataatatttcctttgtaggaaggccttttccgcttgaagacgcggaagatcattttaagcggttaaaaaaagccgggatgatctttctaagactgattgttacatgggaagctattgaacatgaggggccgggaatttacgatgaagcgtatttggcgtacttgcgaaaaattcttttaatagccgataaagaggggatttctgtttttatcgatcctcatcaggacgtgtggagccgctggacggggggcgacggcgctcctgcgtggactttggaaaaactgggaatgaatcccgataattgcgatatttgctcagcggcaattacgcgacagcgttacgcgctgtaccataagagcaaaaaatatcccgacggagagccttttccgaaatga

SEQ ID NO: 42642 - protein, 177 aa, Unknown
  Obtained from environmental sample
  misc_feature (1)..(177): Xaa is any amino acid
MYVKENLILDNEGRVLILRGVNLGGDSKIPFCEQGGEIKPDFLNTQNNISFVGRPFPLEDAEDHFKRLKKAGMIFLRLIVTWEAIEHEGPGIYDEAYLAYLRKILLIADKEGISVFIDPHQDVWSRWTGGDGAPAWTLEKLGMNPDNCDICSAAITRQRYALYHKSKKYPDGEPFPK

SEQ ID NO: 42643 - DNA, 840 bp, Unknown
  Obtained from environmental sample
  misc_feature (1)..(840): n is a, c, g, or t
atgatttgccgaggggcccaacaacagggaatgcccccactcgcgtgggcacggacgccaactgggcggtcgtgtcggcgggcgtcacacacaccctcgccatcaagacggacggcagcctctgggcgtgggggtacaacggctccggctggctcggcctcggcgacaccgacagcaggagcacccccacacgcgtgggcgcggacgccaactgggcggccgtgtcggcgggctacggccacaccctcgccatcaggacggacggcagcctctgggcgtgggggtacaactggtacggccagctcggcctcggcgacagcggctctggtacaaacaggagcacccctacacgcgtgggcacggacacaaactgggcggcagtgtcggcgggcgaacaacacaccctcgccatcaggaccgacggcagcctctgggcgtgggggtacaactacgaaggccagctcggcctcagcacctacgaccgagatgcacaccccacccccacacgcgtgggcacggacaccaactggaaggccgtgtcggcgggctgggactacacccttgccatcagaacagacggcagcctccacgcgtggggggacaactactacggccagctcggcctcggcgacaccaacaacagaaatacccccacacgcgtgggcacggacgccaactgggcggccgtgtcggcgggcggcagccactcgctcgccatcaggacggacggcagcctccacgcctggggaagcaacgaatacggccagctcggcgacggcacggcgtggcgtgtgttccccgtccttgtgggtgcgccctagtgaccaggcggttgtatag

SEQ ID NO: 42644 - protein, 279 aa, Unknown
  Obtained from environmental sample
  misc_feature (1)..(279): Xaa is any amino acid
MICRGAQQQGMPPLAWARTPTGRSCRRASHTPSPSRRTAASGRGGTTAPAGSASATPTAGAPPHAWARTPTGRPCRRATATPSPSGRTAASGRGGTTGTASSASATAALVQTGAPLHAWARTQTGRQCRRANNTPSPSGPTAASGRGGTTTKASSASAPTTEMHTPPPHAWARTPTGRPCRRAGTTPLPSEQTAASTRGGTTTTASSASATPTTEIPPHAWARTPTGRPCRRAAATRSPSGRTAASTPGEATNTASSATARRGVCSPSLWVRPSDQAVV

SEQ ID NO: 42645 - DNA, 816 bp, Unknown
  Obtained from environmental sample
  misc_feature (1)..(816): n is a, c, g, or t
ttgccgaggggcccaacaacagggaatgcccccactcgcgtgggcacggacgccaactgggcggtcgtgtcggcgggcgtcacacacaccctcgccatcaagacggacggcagcctctgggcgtgggggtacaacggctccggctggctcggcctcggcgacaccgacagcaggagcacccccacacgcgtgggcgcggacgccaactgggcggccgtgtcggcgggctacggccacaccctcgccatcaggacggacggcagcctctgggcgtgggggtacaactggtacggccagctcggcctcggcgacagcggctctggtacaaacaggagcacccctacacgcgtgggcacggacacaaactgggcggcagtgtcggcgggcgaacaacacaccctcgccatcaggaccgacggcagcctctgggcgtgggggtacaactacgaaggccagctcggcctcagcacctacgaccgagatgcacaccccacccccacacgcgtgggcacggacaccaactggaaggccgtgtcggcgggctgggactacacccttgccatcagaacagacggcagcctccacgcgtggggggacaactactacggccagctcggcctcggcgacaccaacaacagaaatacccccacacgcgtgggcacggacgccaactgggcggccgtgtcggcgggcggcagccactcgctcgccatcaggacggacggcagcctccacgcctggggaagcaacgaatacggccagctcggcgacggcacggcgtggcgtgtgttccccgtccttgtgggtgcgccctag

SEQ ID NO: 42646 - protein, 271 aa, Unknown
  Obtained from environmental sample
  DOMAIN (86)...(136): Regulator of chromosome condensation (RCC1)
  misc_feature (1)..(271): Xaa is any amino acid
MPRGPTTGNAPTRVGTDANWAVVSAGVTHTLAIKTDGSLWAWGYNGSGWLGLGDTDSRSTPTRVGADANWAAVSAGYGHTLAIRTDGSLWAWGYNWYGQLGLGDSGSGTNRSTPTRVGTDTNWAAVSAGEQHTLAIRTDGSLWAWGYNYEGQLGLSTYDRDAHPTPTRVGTDTNWKAVSAGWDYTLAIRTDGSLHAWGDNYYGQLGLGDTNNRNTPTRVGTDANWAAVSAGGSHSLAIRTDGSLHAWGSNEYGQLGDGTAWRVFPVLVGAP

SEQ ID NO: 42647 - DNA, 786 bp, Unknown
  Obtained from environmental sample
  misc_feature (1)..(786): n is a, c, g, or t
gtgggggtacaacggctccggctggctcggcctcggcgacaccgacagcaggagcacccccacacgcgtgggcgcggacgccaactgggcggccgtgtcggcgggctacggccacaccctcgccatcaggacggacggcagcctctgggcgtgggggtacaactggtacggccagctcggcctcggcgacagcggctctggtacaaacaggagcacccctacacgcgtgggcacggacacaaactgggcggcagtgtcggcgggcgaacaacacaccctcgccatcaggaccgacggcagcctctgggcgtgggggtacaactacgaaggccagctcggcctcagcacctacgaccgagatgcacaccccacccccacacgcgtgggcacggacaccaactggaaggccgtgtcggcgggctgggactacacccttgccatcagaacagacggcagcctccacgcgtggggggacaactactacggccagctcggcctcggcgacaccaacaacagaaatacccccacacgcgtgggcacggacgccaactgggcggccgtgtcggcgggcggcagccactcgctcgccatcaggacggacggcagcctccacgcctggggaagcaacgaatacggccagctcggcgacggcacggcgtggcgtgtgttccccgtccttgtgggtgcgccctagtgaccaggcggttgtatagcaattcgcgcttgtattgcccgctcaacggcgggcaatacgcggccatgattttcaagcagatcatggcatag

SEQ ID NO: 42648 - protein, 261 aa, Unknown
  Obtained from environmental sample
  misc_feature (1)..(261): Xaa is any amino acid
MGVQRLRLARPRRHRQQEHPHTRGRGRQLGGRVGGLRPHPRHQDGRQPLGVGVQLVRPARPRRQRLWYKQEHPYTRGHGHKLGGSVGGRTTHPRHQDRRQPLGVGVQLRRPARPQHLRPRCTPHPHTRGHGHQLEGRVGGLGLHPCHQNRRQPPRVGGQLLRPARPRRHQQQKYPHTRGHGRQLGGRVGGRQPLARHQDGRQPPRLGKQRIRPARRRHGVACVPRPCGCALVTRRLYSNSRLYCPLNGGQYAAMIFKQIMA

SEQ ID NO: 42649 - DNA, 1173 bp, Unknown
  Obtained from environmental sample
  misc_feature (1)..(1173): n is a, c, g, or t
atggaccgtccggcgctcgacacgctggcgttgctcgacgagatagagcgtgtgttgaatatcagggcgtacccgatgaatttgccgatgggttccggggttgatttccgggggatttttgaccgtcgtaccgggatggcaaacttttacgagcgtgtccccggcggcgcgtatcgggcgccggcggctacgagcggcggtatcggcgaccctattgtgaaggatgcgttgacgccctccgtgtacgcggcgttgcgcgaggaggcggagatggtggagcacgccggggcgtcgttttctccccaggatgtgctggccggccgcacgacgccggtgtttttcggcagcgccgcgaacaacttcggggtgcagttgctgctcgacggcttcttggagttctccccgcccccgcagccgaggatgagcgttaacggcggcgcggcggtggaccccgggtcggagatcttttccggttttgtgttcaagatacaggcgaacatggaccccaagcatagggacaggatggcctttgtgcggatcgtctccggccgcttcgagcgggggatgaccgccgtaaacgtccgcaccgggaagtcgctgcgccttgcaaattcgagcgccctcttcgggagggagcgcaccacggtggacgaggccttcgccggcgatgtgataggcgttctggggcaggacgcgttgcggataggcgataccctatgcggcgattcaaccgttttatacgacgagataccgctcttcccccccgagtgcttcgcgataatccacaaccccagtccggccaattataagcgctttcgcgagggtctgacccagttggcgcttgagggcttggtcaagctgtacgagataccggcgggtcaccaaagaatatcgctattgggggcggtcgggccgttgcagttcgatttggtgcgctacagactggagtccgagtacggagccgcgtcgcgtatagagaacacggagtggactatggtcaggcggattggggttaacggtgttgatgttgttgaagaaaattcgctgcacatacccgccggagcgcgtttggccgttgatagcgacggtcatcaagcgatgctgttcccgacagattggcatttacgtttttttgaggagcacaacgaggggatcgttatcagtgaaatttga

SEQ ID NO: 42650 - protein, 390 aa, Unknown
  Obtained from environmental sample
  DOMAIN (173)...(240): Elongation factor Tu domain 2
  misc_feature (1)..(390): Xaa is any amino acid
MDRPALDTLALLDEIERVLNIRAYPMNLPMGSGVDFRGIFDRRTGMANFYERVPGGAYRAPAATSGGIGDPIVKDALTPSVYAALREEAEMVEHAGASFSPQDVLAGRTTPVFFGSAANNFGVQLLLDGFLEFSPPPQPRMSVNGGAAVDPGSEIFSGFVFKIQANMDPKHRDRMAFVRIVSGRFERGMTAVNVRTGKSLRLANSSALFGRERTTVDEAFAGDVIGVLGQDALRIGDTLCGDSTVLYDEIPLFPPECFAIIHNPSPANYKRFREGLTQLALEGLVKLYEIPAGHQRISLLGAVGPLQFDLVRYRLESEYGAASRIENTEWTMVRRIGVNGVDVVEENSLHIPAGARLAVDSDGHQAMLFPTDWHLRFFEEHNEGIVISEI

SEQ ID NO: 42651 - DNA, 345 bp, Unknown
  Obtained from environmental sample
  misc_feature (1)..(345): n is a, c, g, or t
atgttaagtgacgagataggtaagcggcggacgtttgcgatagtctcccatccagacgccggtaagacgacgcttacggaaaagttgttgttgtacggaggcgctctgcacttggctgggacggttacggcgcggaagaaggagcgggcgactgtttcggattggatggagcttgagcgcaagcgcggcatctccgtcagttccacggtgctgaatttcgattacggcggttaccgtgttaacctattggacacgcccggccacaaggatttttcggaggatacttatcgggtgcttacggcggtggattcggtcatcatggttatagacggggcaagggcatag

SEQ ID NO: 42652 - protein, 114 aa, Unknown
  Obtained from environmental sample
  DOMAIN (7)...(114): Elongation factor Tu GTP binding domain
  misc_feature (1)..(114): Xaa is any amino acid
MLSDEIGKRRTFAIVSHPDAGKTTLTEKLLLYGGALHLAGTVTARKKERATVSDWMELERKRGISVSSTVLNFDYGGYRVNLLDTPGHKDFSEDTYRVLTAVDSVIMVIDGARA

SEQ ID NO: 42653 - DNA, 825 bp, Unknown
  Obtained from environmental sample
  misc_feature (1)..(825): n is a, c, g, or t
atggtaacactgcctaatttttttgaagaggatcccccgtatcttgatgcattaacgagacagcggcagaaacatgaatcggaagagaaagcgctgcaatgcctagccgcttactgcggcatgattgaatttacggataactgtataggtgttattcatgatgagtttagttcttttgcaaagaagcgtcaaagtgaatctgtgtttgtttatttgtcggatcatggcgatcaggcaggggaacggaaactgtacggcaaacagactttttttgaaaaatcagcaaaaatccctttggttatggaaggaaccggcattcctgctggagtgcaaatcaattccccggtgagcataatcgatatagggcctaccctgtgcggttttgcgtcagtggaaccgccgccccggcaagaaggccgcgatttacgccccttgtttacagatccgaaggccaatgaagacagggcgattctgagcgaaatgatatataaagacggcgaaggctatcaattacaccggatgattcgtcatggcaattataaattgatcaccaatcagaaagacaaaaccagtgacatattgtttgatttgtcaagcgatcctgatgaaaaaatgaatgtctgcaacaagcatccagaagcggtaaaacgttgtttgcgggaattggtaagcttgaaacatactgatgaggtcgctgctaatcaaatcctgagggataaggaagttgatctgtttaaggcatgggaaagcgcggttggagaaaaagacccggaaagatggaaaggtaatccagcaagcgccagagatttacctgtcatccaatag

SEQ ID NO: 42654 - protein, 274 aa, Unknown
  Obtained from environmental sample
  misc_feature (1)..(274): Xaa is any amino acid
MVTLPNFFEEDPPYLDALTRQRQKHESEEKALQCLAAYCGMIEFTDNCIGVIHDEFSSFAKKRQSESVFVYLSDHGDQAGERKLYGKQTFFEKSAKIPLVMEGTGIPAGVQINSPVSIIDIGPTLCGFASVEPPPRQEGRDLRPLFTDPKANEDRAILSEMIYKDGEGYQLHRMIRHGNYKLITNQKDKTSDILFDLSSDPDEKMNVCNKHPEAVKRCLRELVSLKHTDEVAANQILRDKEVDLFKAWESAVGEKDPERWKGNPASARDLPVIQ

SEQ ID NO: 42655 - DNA, 681 bp, Unknown
  Obtained from environmental sample
  misc_feature (1)..(681): n is a, c, g, or t
atgtatcgccacaaaaaacaatcgggtggcgccggtcagttcggcgaggttcacatgttggttgagccttactatgacggcatgcctaatcaaacgaaataccccattcgcggcacagaaacgcacgatttgtcttggggcggaaaactggtgttcaacaactgtattgtgggtggcgctattgacgcgcgtttccaaccggctattctgaaagggatcatggaaaaaatggaagaaggcccgttaaccggttcttacgcacgcgatattgtggtgaatatctttgatggaaaaatgcacgatgtggactctaacgaaatggcgttcaaactcgccggccgtaatgcgttccgtgaagcattcaaaaacgccggtccgaaaattttagagccgatttatgatgttgaagttatggttcctgctgatagaatgggcgatgtgatgaccgatttgcagggccgccgcgctgtggtcatgggtatggacagcgaaggcagtttccaaatcatcaaagccaaagtgcctttggctgaaatgaatcgctattcgacatcgctgagctcaatcacctccggacgcggtacctattcgatgaaattcgccgaatatacccaagttccggcagatgttcaatctgtactgctgaaagcctacgaagcggaacagaaagacgaagactaa

SEQ ID NO: 42656 - protein, 226 aa, Unknown
  Obtained from environmental sample
  DOMAIN (1)...(125): Elongation factor G, domain IV
  misc_feature (1)..(226): Xaa is any amino acid
MYRHKKQSGGAGQFGEVHMLVEPYYDGMPNQTKYPIRGTETHDLSWGGKLVFNNCIVGGAIDARFQPAILKGIMEKMEEGPLTGSYARDIVVNIFDGKMHDVDSNEMAFKLAGRNAFREAFKNAGPKILEPIYDVEVMVPADRMGDVMTDLQGRRAVVMGMDSEGSFQIIKAKVPLAEMNRYSTSLSSITSGRGTYSMKFAEYTQVPADVQSVLLKAYEAEQKDED

SEQ ID NO: 42657 - DNA, 1797 bp, Unknown
  Obtained from environmental sample
  misc_feature (1)..(1797): n is a, c, g, or t
atgataaacttgaaaataaacggcattccgatccaggttgaggaaggaaccacgattctcgaagccgccaaaaaggcaaatataatcattccttcgctttgttataatcccgatcttccggcgtgggcttcctgcggtatctgcgtagtccgtgtggctggcagccccaagctgatccgcgcctgcacgaccccggttgacggggggctggaaagcaaggatattatcacccatgacggtgagattatcgccacccggcgcgttgtgttggaattgatcctttccaaccatcctaacgattgtctgcaatgcccccgcaacaataactgcgagttgcagacccttgccgcggaattcggcatacgcgaatcaccctacagaaaggtgtcgaacggaatccccgttgacgattcaaacccggcaatagtccttaaccccgaaaaatgcatacgctgcggaaggtgcgtcaaggtctgccaggacgtgcagaacgtctgggcgcttgaatttctgggacgcggcatcaagggaaaggtcgccagcgccgccgacgttccgttaggcgacagcccatgcatcaagtgcggccagtgttcagcccactgcccggttggggcgatttacgagcgcgatgacacggcaaaagtctggaaagctctgcaaaacaacgatcttcatacggtggtgcagatcgccccagcggtccgcgtcgctctcgctgaggaattcgggcttgatcccggtacgattgtcaccaaaaagatctacgccgcgctcagacggctcggtttcaagaccgtgtttgacacaaacttttccgcggaccttacgatcatggaagaaggcagtgaacttaaaaaacgccttgttacaaaaggcagtaccatcccgctgattacctcctgctgcccggcctgggtcgattatatggagaaatactaccctgacatgatcgataacttctccacggcgaaatccccgcagcagatgatgggcgctatgataaaggcgtattgggcaaaaaaggccggagtcgctccggaaaaagtgtattcggtttcggttatgccctgtaccgcgaaaaaatgggaaacccaccgcaacgatgacatgaagagcgcggggaattttctcggcatgaccacgggctacgatgtggacatctcgattacctcccgcgaacttgccagaatgataaaacaggccggtattgacatactgcatcttgtcgacgaggaagcggacaacccgttagggccgtacaccggcgcgggcaccatcttcggcacaacaggcggcgttatggaagcggcggttcgcagcgcctacttccttgtcaacaacaaggaacttccggatgtggaattcaagccggtacgcgggcttgaaggcgtaaagtccgccgaggttgattttggcgtgcccattccgaacggttccggaacaaagatacgcatagccgtcgcccaccagatgggaaacatcgccgcggtgctggatgaaatccgtaaagccagacaagagggtaaggagcctccgtatcactttgtggaggtcatggcctgccgtggcggatgcgtagccggaggcggccagccttacggcgctaccgatgaagtccgcggcaaacgcgcacagggcctttaccttgacgatgaaaaatcccagtaccgttgttcgcatcaaaaccccttcatcaaccaggtgtacaaggaatttcttgacgagccgaacggccataaggcgcatgagttgctgcataccaaatatacggaacgggagctttacatcagatga

SEQ ID NO: 42658 - protein, 598 aa, Unknown
  Obtained from environmental sample
  DOMAIN (142)...(165): 4Fe-4S binding domain
  misc_feature (1)..(598): Xaa is any amino acid
MINLKINGIPIQVEEGTTILEAAKKANIIIPSLCYNPDLPAWASCGICVVRVAGSPKLIRACTTPVDGGLESKDIITHDGEIIATRRVVLELILSNHPNDCLQCPRNNNCELQTLAAEFGIRESPYRKVSNGIPVDDSNPAIVLNPEKCIRCGRCVKVCQDVQNVWALEFLGRGIKGKVASAADVPLGDSPCIKCGQCSAHCPVGAIYERDDTAKVWKALQNNDLHTVVQIAPAVRVALAEEFGLDPGTIVTKKIYAALRRLGFKTVFDTNFSADLTIMEEGSELKKRLVTKGSTIPLITSCCPAWVDYMEKYYPDMIDNFSTAKSPQQMMGAMIKAYWAKKAGVAPEKVYSVSVMPCTAKKWETHRNDDMKSAGNFLGMTTGYDVDISITSRELARMIKQAGIDILHLVDEEADNPLGPYTGAGTIFGTTGGVMEAAVRSAYFLVNNKELPDVEFKPVRGLEGVKSAEVDFGVPIPNGSGTKIRIAVAHQMGNIAAVLDEIRKARQEGKEPPYHFVEVMACRGGCVAGGGQPYGATDEVRGKRAQGLYLDDEKSQYRCSHQNPFINQVYKEFLDEPNGHKAHELLHTKYTERELYIR

SEQ ID NO: 42659 - DNA, 588 bp, Unknown
  Obtained from environmental sample
  misc_feature (1)..(588): n is a, c, g, or t
ttgcccattgattttgacactcttacagccaacggctccatgatgggttccggcggcatgatcgtcatggacgaggatgactgcgttgttgacgtcgcgcgtttctatatggacttctgcgttgacgaaagctgcggtaaatgttctccctgccgcatcggtacaacacagatactcaatctgctggataaaatcaccaacggcaacggcgaagaatcagaccttgacaagcttgaagagatcggcacggctatgaccaaggcgagcctctgtatgcttggcggcagcgcggcaaaccccacgctgtccacgatcaagaatttccgcgatgaataccttgagcatatccatgacaagaaatgccgcgccggcaaatgcaaaaaaatgctgcgcttcgccattgacgcggagaagtgcattggctgcgggatgtgcgcgaagaaatgtcccgccggctgcattaaagcgctggatccggcgaaatatccgaacaagaaaaagcccccttacgccatcgatcagggcgcctgcgtaaaatgcggcgaatgtctgaagaattgcaaattcagcgcaattacgcggagctag

SEQ ID NO: 42660 - protein, 195 aa, Unknown
  Obtained from environmental sample
  DOMAIN (170)...(193): 4Fe-4S binding domain
  misc_feature (1)..(195): Xaa is any amino acid
MPIDFDTLTANGSMMGSGGMIVMDEDDCVVDVARFYMDFCVDESCGKCSPCRIGTTQILNLLDKITNGNGEESDLDKLEEIGTAMTKASLCMLGGSAANPTLSTIKNFRDEYLEHIHDKKCRAGKCKKMLRFAIDAEKCIGCGMCAKKCPAGCIKALDPAKYPNKKKPPYAIDQGACVKCGECLKNCKFSAITRS

SEQ ID NO: 42661 - DNA, 1482 bp, Unknown
  Obtained from environmental sample
  misc_feature (1)..(1482): n is a, c, g, or t
atggagctggttccgcgctgcttaaggggcggtcctctggttcttgttaccatgggtcttttngtcactggtttgtatatccaccgcgatggtattttatgctgttttaggggcgaattagcaatggcagcgaaaataaagatgatcctcggatctcatgcccatgtgccatacggctcgaataccgccgagtttgaaaatgtttacatgaattttctgcggccttttgttaccagcctgtacagataccccggtatccaggcggttctccattattcaggcgtactgttgcattgggttgagcgctcgcatcccgagttgttcatgctgattaatgatatggttgcccgcaaacaggcggaaatactcggaggagggttttacgagcccatgctgccgattatacctttgcaggataaaatagggcagattgagatgttaaccacctacatccgcaaacagtttgggaagcggccccagggctgctggataccgggctttgcctgggagcagggtctggtaagccccctcgcgagctgcggcatgggttttacttttctcggcaagcgccagtttaccctggcgggcggcaatgacgccccctgcatctgcgaagatcagggaaagcttattaccgttttcccggtgtcccagtccattcaggaggacttaaccaaaaagaatcttctccctatattaaaaaatgttaacagtattcgcgatgaagatcaggagagcatcgtttccatatttcccggcaggctgaacaccggtcctgaggggtctgtcgattgggcatggggtaatttttttgaggagctttccaaatgtgaaagttttattgagacaataaatcccggcaaattgcttaaaagctttaaagggctgcaaaaactgtgtatccccgattcaacatgcaatgaaaacagcgtgccaccccggcgtttcatcattgtgaatccggaagcgggcgggatttactcaaagatgatctttaccaacgtgctgataaaccagctccggggcgacaagtcgcgcaagctgtccgcccacgaggaactgtggaaagcccagagcagcgaccttttctgttcaacgggccagaggctgcgcagccattcgatcaggaacgcggcttattccgcccttctgcgcgccgagcaggttacccgcgaaaagggaaaatttgccccgtcgcttgttccctttgactttaacctggacggcgttgaagagtggcttttccaggacgcgaagatcaactgttatgtgcaaagcgtcggcggcggtatttttgagcttgattaccagccgacagcctggaattacctggacacctgcggcggaaggccggcctttgccgaccggctgctgccaaagggggccggggttgaaacggcggaacatgacggtataaaaggcgcggcgcgccaggaggcggcgcgtctatcggcgcggctgtgttataacgagntgttatga

SEQ ID NO: 42662 - protein, 493 aa, Unknown
  Obtained from environmental sample
  DOMAIN (47)...(295): Glycosyl hydrolases family 38 N-terminal domain
  misc_feature (1)..(493): Xaa is any amino acid
MELVPRCLRGGPLVLVTMGLXVTGLYIHRDGILCCFRGELAMAAKIKMILGSHAHVPYGSNTAEFENVYMNFLRPFVTSLYRYPGIQAVLHYSGVLLHWVERSHPELFMLINDMVARKQAEILGGGFYEPMLPIIPLQDKIGQIEMLTTYIRKQFGKRPQGCWIPGFAWEQGLVSPLASCGMGFTFLGKRQFTLAGGNDAPCICEDQGKLITVFPVSQSIQEDLTKKNLLPILKNVNSIRDEDQESIVSIFPGRLNTGPEGSVDWAWGNFFEELSKCESFIETINPGKLLKSFKGLQKLCIPDSTCNENSVPPRRFIIVNPEAGGIYSKMIFTNVLINQLRGDKSRKLSAHEELWKAQSSDLFCSTGQRLRSHSIRNAAYSALLRAEQVTREKGKFAPSLVPFDFNLDGVEEWLFQDAKINCYVQSVGGGIFELDYQPTAWNYLDTCGGRPAFADRLLPKGAGVETAEHDGIKGAARQEAARLSARLCYNEXL

SEQ ID NO: 42663 - DNA, 1812 bp, Unknown
  Obtained from environmental sample
  misc_feature (1)..(1812): n is a, c, g, or t
ttggctcttttggcgttacttccggttgttgaatcggttatgcgtcttttcagaaccggcatactcggttcttcgtcgtttttggtgtgccttttgctgttcgcggggcttctttgcggaatgatctgtaccagaaatgaagggcatctggcgatttcccttacgcattatgttcccgaaggcaaaataaaaaaacgtttgggaattttctgcaatctgctttcggcttttattgctgttgtaatagcgtggagttcgataacttatatcaaattcgcccttgtcggcaataaaattggatttattcccgagcctgttcttgcctcaattatcccttttgctttttttgtaatcgcctttcgttttgcgcgcatgacaaaacttacaggatggatggctgttatccccgtcttaactattttattgggaacaatcgcctcttttcccgttatcgcggaattaatatgggttgatattaagcctgattttgtcttaactatttgtaaagtattattcaattttacatgtttttttaaaacaccttttgtaatattgcttattttcgcggctcttagcgggacaccgctttttattatcatgggcggcctttttttgattcttagtcaggctgcggaatttaatgatatggcttttgaaatgattgctgtcgctctcaatattcatgtcaagcttacagactcaaacattatagcgattccgctttttactatcgtcggatttttcctttctgaaagcaaggcgggagaacggcttgttcataccttccgcagttttttcagctggcttcccggcggaataataattgtcaccgtatttatctgcgctttttttacttcttttacgggggcgtccggcgttacaatactcgcgcttggcggcattttgtatacgatactgaaagaccatcttaaatacccggaagaattttcaatagggcttttaacatccgtgggaagcatagggcttctttttccgccgagccttccgctgattcttgtaggcaccgttactcaaacaaatatttttcatcttttcctgggcggtatcgcgcccggctttattttggttttggcaatggcgattttcggcatttttatttccgtaaaaacaaaaattccggtggaaaaatttgaaggacgcaaggcgttaatcgctttaaaagattccgcttttgagattttacttcccatatttcttatttcaggttatttttccgggattctttcgctggtggaaataggagccgccgccgttttgtatatttttattgtagaagtgtttatcaaccgcgacataaagctttcggaagttaaaagagtctttgataaagccattcctataataggcggcgtgctttcaattcttgctctttcaaaagcgctttcggattatattgtgtttacggaagcgccggtaaaaatcgccgcgtggatgaaaagcgccatttcgtcggaatatgttttccttctgctccttaacctggcgcttcttgttgtcggctgtcttatggatattttttcggccatacttatcgtgcttccgcttattgttcggttaggtcaaatttacggcattaacccggtgcatttgggaattatttttatagtcaatctggaagtagggtatataacgccgcctgtgggtctgaatttattccttgcctcgttcaggtttaaaaagccgtttatagatatttgccgctatgtgtcccccttccttcttgtaaggatagtggtagtccttttagtaacatacatgccatggcttagtacatttttaattaagggatga

SEQ ID NO: 42664 - protein, 603 aa, Unknown
  Obtained from environmental sample
  DOMAIN (180)...(597): DctM-like transporters
  misc_feature (1)..(603): Xaa is any amino acid
MALLALLPVVESVMRLFRTGILGSSSFLVCLLLFAGLLCGMICTRNEGHLAISLTHYVPEGKIKKRLGIFCNLLSAFIAVVIAWSSITYIKFALVGNKIGFIPEPVLASIIPFAFFVIAFRFARMTKLTGWMAVIPVLTILLGTIASFPVIAELIWVDIKPDFVLTICKVLFNFTCFFKTPFVILLIFAALSGTPLFIIMGGLFLILSQAAEFNDMAFEMIAVALNIHVKLTDSNIIAIPLFTIVGFFLSESKAGERLVHTFRSFFSWLPGGIIIVTVFICAFFTSFTGASGVTILALGGILYTILKDHLKYPEEFSIGLLTSVGSIGLLFPPSLPLILVGTVTQTNIFHLFLGGIAPGFILVLAMAIFGIFISVKTKIPVEKFEGRKALIALKDSAFEILLPIFLISGYFSGILSLVEIGAAAVLYIFIVEVFINRDIKLSEVKRVFDKAIPIIGGVLSILALSKALSDYIVFTEAPVKIAAWMKSAISSEYVFLLLLNLALLVVGCLMDIFSAILIVLPLIVRLGQIYGINPVHLGIIFIVNLEVGYITPPVGLNLFLASFRFKKPFIDICRYVSPFLLVRIVVVLLVTYMPWLSTFLIKG

SEQ ID NO: 42665 - DNA, 351 bp, Unknown
  Obtained from environmental sample
  misc_feature (1)..(351): n is a, c, g, or t
atgaaaatacatgatgttgcagaatggttaataatcgcagaagatgatgtagagactgctgaaattattaaagacaaaaaactaaataatgcgtattatcactgttcacaagcagttgaaaaatatcttaaatcttttttatatgccaatgatgtaacgattaattataatcatgatatagcggaaacattaaacagatgtattagtttgaatgattcttttcaagatattatacaaggctgtgataaaattacgatgtcaattaaaaatcttcgttatccgggaagaatggcagctactaaagaagatgttgaatttgcatttaatttggtcgataaaacaaaatcttaa

SEQ ID NO: 42666 - protein, 116 aa, Unknown
  Obtained from environmental sample
  DOMAIN (6)...(115): HEPN domain
  misc_feature (1)..(116): Xaa is any amino acid
MKIHDVAEWLIIAEDDVETAEIIKDKKLNNAYYHCSQAVEKYLKSFLYANDVTINYNHDIAETLNRCISLNDSFQDIIQGCDKITMSIKNLRYPGRMAATKEDVEFAFNLVDKTKS

SEQ ID NO: 42667 - DNA, 615 bp, Unknown
  Obtained from environmental sample
  misc_feature (1)..(615): n is a, c, g, or t
ttggaggaaaatatggtgtacggttacatcagagtcagtacagacaagcaaacggtcgataaccagcgttttgaaatagagcggttttgctctaaaaacgagataactattgatcagtggattgaggaaacaatcagcggaacactattgccggaaaaacggctgttaggctcgctgcttgccgaggcaaaaacaggcgatttaatcgtttgttccgaattgtccaggctgggcaggaatatgttcatgattatgtcgatattgaaccttttgttgataaatggcgtgaaaatatggacgattaaggacaattatcggctcggagacagtattcaggctaaaattctagcatttgccttcggattagccgctgaaatagagcgagacctcatctcccaaaggacgaaagaggctcttgcccgcaagcggtcggaaggttttacgctgggcagaccccttgggagtaagtctgaccagctaaaactttcaggacatgaagcggaaatacagacgcttttggacgaaaacacctcaaaaagcgctattgcccgcaggctcggcgtgtgtaggcagacggttacttcatttttgaaaaacatcaaaaaccgtcaataa

SEQ ID NO: 42668 - protein, 204 aa, Unknown
  Obtained from environmental sample
  DOMAIN (6)...(148): Resolvase, N terminal domain
  misc_feature (1)..(204): Xaa is any amino acid
MEENMVYGYIRVSTDKQTVDNQRFEIERFCSKNEITIDQWIEETISGTLLPEKRLLGSLLAEAKTGDLIVCSELSRLGRNMFMIMSILNLLLINGVKIWTIKDNYRLGDSIQAKILAFAFGLAAEIERDLISQRTKEALARKRSEGFTLGRPLGSKSDQLKLSGHEAEIQTLLDENTSKSAIARRLGVCRQTVTSFLKNIKNRQ

SEQ ID NO: 42669 - DNA, 714 bp, Unknown
  Obtained from environmental sample
  misc_feature (1)..(714): n is a, c, g, or t
ttgttcaatgacgaaaaagcctttacccgcatcgacatgagcgagtacggggaaaaacactcggtaagcagattaatcggcgcgccccccggctacgtcggttacgagcagggaggccagttaacggaggcggtacgccggcggccttacagtgtgatcctttttgacgaaatagaaaaagcccatcaggaagtgttcaatgttttcttacagatactagacgacggccgcctgacagacggacaggggcgcgttgtcgatttcaagaatgttatcatcattatgacaagcaacttaggctcggacttgattctcagcgcgaaaaacccggaaaccttgcgtaactcgcttttggaattactgaaacaaagtttcaggccggagttcttaaaccggatagacgagacggtcattttcaacaggctggaaaaaaccgaaatcagcaaaatcgtggatattcagctaacgcgtctttcgcacaggcttgcggagcgcaagattacgctgaaggtgacggacgcggcaaagtccctgcttgccgagagaggctatgatccaatgttcggggcgaggcctttgaagcgcacaatacagtccgaccttgaaaatccgctggcaaagcaggttattgcgggcacaatccgcgacggagaaacggtgacagcggacgtgtcaggcgccggaattgtgtttaagaagtctaaagctttgtaa

SEQ ID NO: 42670 - protein, 237 aa, Unknown
  Obtained from environmental sample
  DOMAIN (1)...(136): ATPase family associated with various cellular activities (AAA)
  misc_feature (1)..(237): Xaa is any amino acid
MFNDEKAFTRIDMSEYGEKHSVSRLIGAPPGYVGYEQGGQLTEAVRRRPYSVILFDEIEKAHQEVFNVFLQILDDGRLTDGQGRVVDFKNVIIIMTSNLGSDLILSAKNPETLRNSLLELLKQSFRPEFLNRIDETVIFNRLEKTEISKIVDIQLTRLSHRLAERKITLKVTDAAKSLLAERGYDPMFGARPLKRTIQSDLENPLAKQVIAGTIRDGETVTADVSGAGIVFKKSKAL

SEQ ID NO: 42671 - DNA, 1719 bp, Unknown
  Obtained from environmental sample
  misc_feature (1)..(1719): n is a, c, g, or t
gtgcgggaggctgttacgcgacccgaaatctacggagaggcggctcaggttttcttttcggcggcggcatcaaaggttctcgcaaaggcggaaattgaggcttcggcgttaaaggacgagtatgtctctaccgaacacattttactcgccatcgccgcgggagacggaaaggccgccgatttcttaaaaaaagcgggcgtcacgaaaaacgcgattctgggcgcgctcaagcaagttaggggaaacgcccgcgttaccgatcaaaatcccgaagaaaaataccaggtgctggaacgctattgccgcgacttaacagcgcttgcccgtcaggaaaaactcgacccggtgataggccgcgacgaggaaatccgcagatgtatgcaggtactgtcgcggcgcaccaagaacaaccccgtacttatcggcgagccgggcgtgggcaagacagccattgtcgaggggcttgcgcgccgaatagtcgaaggcgacgtaccggaagggttaaaaggaaaaaaactacttgcgctggatttaggagcgcttgtagccggcgcgaaattccgcggcgagtttgaggagcgtctgaaagctgtcattcacgaagtgcaggcaaccgacggaaaaataatattattcatcgacgagcttcatacgcttgtgggagcgggagctgcggaaggagcgacagacgcttccaatctgctcaagcccgcgcttgcgaggggcgagcttcgatgtataggcgcgactacgttagacgaataccgaaaacacattgagaaggacgcggctcttgaacggcgttttcagcaggtctacacggcggaaccttctgttgaggatacgattgcgattttgcgcgggcttaaggagcggtacgaagttcaccacggcgtgcggattaaagatgaggcgcttgtggcggcggctactttgtccagccgttacatcacaagccgctttctgccggacaaggcgattgatcttgttgatgaggctgcaagccgcctgaaaatggaactggacagccgccccacggagttagataaacttgagcggaaacttcttcagctttcgattgaaaagcaggctctttcgcgcgaggaggatcccgcgtctaaagaccgcctcttaaaactggaaaaagaaatcgcaggtattacggaagagcgcgacgcgatgaaagcccaatgggaaaatgaaaagatcgatattcagaaaattcgaaaactcaaacagcagatagaagaattaaaaattgaggaaaaccgttatataagggaaggcaatctttcaaaagcggcggaagtaaaacacggaagaattcccgaagcggaaaaacagcttgccgcgcttacggctcagatggaaaaaaagcgggaacacgccgctctgttacgcgaagaagtgagcgaggaagacatcgccggagtcgtgtcagcgtggacggggatacccgtttcaaagatgctttcgggcgaactgcaaaaatatcttgacttggaaaaggttcttgaaaagcgcgttgtcgggcagaacgaggcgcttgccgcagtcgccgacgcgatcaggcgcaacaaggcggggctttccgacgccgcgcgcccgctggggtcgtttttgtttttggggccgacaggagtcggaaaaaccgagctgcaaaaacgcttgcggactttttgttcaatgacgaaaaagcctttacccgcatcgacatga

SEQ ID NO: 42672 - protein, 572 aa, Unknown
  Obtained from environmental sample
  DOMAIN (137)...(331): ATPase family associated with various cellular activities (AAA)
  misc_feature (1)..(572): Xaa is any amino acid
MREAVTRPEIYGEAAQVFFSAAASKVLAKAEIEASALKDEYVSTEHILLAIAAGDGKAADFLKKAGVTKNAILGALKQVRGNARVTDQNPEEKYQVLERYCRDLTALARQEKLDPVIGRDEEIRRCMQVLSRRTKNNPVLIGEPGVGKTAIVEGLARRIVEGDVPEGLKGKKLLALDLGALVAGAKFRGEFEERLKAVIHEVQATDGKIILFIDELHTLVGAGAAEGATDASNLLKPALARGELRCIGATTLDEYRKHIEKDAALERRFQQVYTAEPSVEDTIAILRGLKERYEVHHGVRIKDEALVAAATLSSRYITSRFLPDKAIDLVDEAASRLKMELDSRPTELDKLERKLLQLSIEKQALSREEDPASKDRLLKLEKEIAGITEERDAMKAQWENEKIDIQKIRKLKQQIEELKIEENRYIREGNLSKAAEVKHGRIPEAEKQLAALTAQMEKKREHAALLREEVSEEDIAGVVSAWTGIPVSKMLSGELQKYLDLEKVLEKRVVGQNEALAAVADAIRRNKAGLSDAARPLGSFLFLGPTGVGKTELQKRLRTFCSMTKKPLPAST

SEQ ID NO: 42673 - DNA, 891 bp, Unknown
  Obtained from environmental sample
  misc_feature (1)..(891): n is a, c, g, or t
gtgttttgtttaatggcattgttttgtctagttctgcctttatcggcgcagaaccggggcagtcaggaagccggaggcggcgcggttgaaatcgtggacgccagcggcggtgttgtcgggcggtttacagaggcatacgcccttataatcggcgaaagcgaatatatcaacacaggggcatggagaaaactccccggagtaaaagatgacgtagttgcggtaaaaaatttgcttacagaacagggcttcaatgttgtaacaatagaaaatgcgaatagcgttaacctcagaaacggaataacgaattttcttgacaaatacggctacaaaactgacgctcgtattattgtgtattttgccggacacggagaaacaagaaactttgatggccgtaaaatgggttatatagttccgattgacgctccccaagcaagtaacaacagtgattttttacagacagttatccccatgtcgcaatttgaaacatgggcgaaacagtacaccagccgccatattctttttatgttcgacagttgctttgccggttccgtgttccgttctcaatcaacaatgccccccgcaataaaccgccttataaaccagcctgtccgtcagtttatcacttctggagacgctaacgaagaagtccccgatgaaagcgtattccgcagggaacttgaacacgctttacggaacggcgcggctgatgccaataaagacggctttgtaagcggtacggaattagggctatacctgtataacagggtgtcaaactacatgaacggcaagcagaatcccagggtaggtaaactgaacgacaccaaccttgataaaggggattttatcttttttgtaaacgcttctcaaatcggttcttctcccgcagtgtaa

SEQ ID NO: 42674 - protein, 296 aa, Unknown
  Obtained from environmental sample
  SIGNAL (1)...(18)
  DOMAIN (45)...(278): Caspase domain
  misc_feature (1)..(296): Xaa is any amino acid
MFCLMALFCLVLPLSAQNRGSQEAGGGAVEIVDASGGVVGRFTEAYALIIGESEYINTGAWRKLPGVKDDVVAVKNLLTEQGFNVVTIENANSVNLRNGITNFLDKYGYKTDARIIVYFAGHGETRNFDGRKMGYIVPIDAPQASNNSDFLQTVIPMSQFETWAKQYTSRHILFMFDSCFAGSVFRSQSTMPPAINRLINQPVRQFITSGDANEEVPDESVFRRELEHALRNGAADANKDGFVSGTELGLYLYNRVSNYMNGKQNPRVGKLNDTNLDKGDFIFFVNASQIGSSPAV

SEQ ID NO: 42675 - DNA, 366 bp, Unknown
  Obtained from environmental sample
  misc_feature (1)..(366): n is a, c, g, or t
gtggtttataggagcggcggacaaagatattctttccaaaacaatctttacaattattacaaggaaaaagacacgggctacccgtgcataaagcgctgcgtcattgaaggctggatcatgaacaaggagtattcccttgtgcccgacggagcgcttgtcctccatattgacacaaggcaaaaattcacattcacgttaaaatacacgccgaagccccggcttaaggtgctggctgaggaatttaaggcccatgactacccggtacgcggattaaaagcgggagggatgaggctctcaaacaaacaggtttccaaagctgacgtgtccaagatggacattgggagaaaaaaagatgatgacgactga

SEQ ID NO: 42676 - protein, 121 aa, Unknown
  Obtained from environmental sample
  misc_feature (1)..(121): Xaa is any amino acid
MVYRSGGQRYSFQNNLYNYYKEKDTGYPCIKRCVIEGWIMNKEYSLVPDGALVLHIDTRQKFTFTLKYTPKPRLKVLAEEFKAHDYPVRGLKAGGMRLSNKQVSKADVSKMDIGRKKDDDD

SEQ ID NO: 42677 - DNA, 792 bp, Unknown
  Obtained from environmental sample
  misc_feature (1)..(792): n is a, c, g, or t
ttggtaattaaaaacgggcttcccgccgttatgactgtaagcgagattatcaagtatcacgctaaacagcttgtaaaaattcttacaaaagaactggaacttgaaaaaaaggaattattggacaaactgcacctgcgcactctggaaagaatatttatagaggagcggatttacaaagctatcgagaaaatgaagacggcaaagggtgtgcaggaggcggtgcttacgggctttaatccgttcttaaaagaggtaggaccgcgaaagataacagacgatgatattgaacatcttttgcgcataccaatccgcagaatatcgttatacgatattaacaaagcccgcgaggaaatggagcagatacaggcgcgtataaaagaaattaacaaccaccttaaaaatataaccgcttattcggtttcctaccttaaaggtatcattacaaaaataaaggcaaatgaggaaatcggtcgcggagagagaaaaaccttagtgggcgaatttgacaaagttatcgccaaagaagttgttaagcgcgacgttgaattgaaatatgacagtaaaacaggctaccttggaacaaatgtatcgggagcgaaaatcgcggaagtatcgccctatgaccgtattcttgcaatccgcaagaacggaatgtataccgttatggatttaagcgaaaaggcgttcatcggcgcggaagcgtggtttataggagcggcggacaaagatattctttccaaaacaatctttacaattattacaaggaaaaagacacgggctacccgtgcataa

SEQ ID NO: 42678 - protein, 263 aa, Unknown
  Obtained from environmental sample
  misc_feature (1)..(263): Xaa is any amino acid
MVIKNGLPAVMTVSEIIKYHAKQLVKILTKELELEKKELLDKLHLRTLERIFIEERIYKAIEKMKTAKGVQEAVLTGFNPFLKEVGPRKITDDDIEHLLRIPIRRISLYDINKAREEMEQIQARIKEINNHLKNITAYSVSYLKGIITKIKANEEIGRGERKTLVGEFDKVIAKEVVKRDVELKYDSKTGYLGTNVSGAKIAEVSPYDRILAIRKNGMYTVMDLSEKAFIGAEAWFIGAADKDILSKTIFTIITRKKTRATRA

SEQ ID NO: 42679 - DNA, 663 bp, Unknown
  Obtained from environmental sample
  misc_feature (1)..(663): n is a, c, g, or t
atggacggcaggcttaagcttatcgtaagaaattatcaggaagagcaggaccagcagattctttttattattgactcaggttaccgcctgccggatcaccattttgacagcgcgttagaggcaatgcttatgctttcatatatagcgcttaaacacggcgatgcgacggctgcggcaagtttcggcgctcatgatatttggataccgccgcgaaagggcatgaaagcgtataccggtcttatgaacggtttatatgatcttcacagcgaaccggttccgtcatcgccttttctcgctcttgaaaacgctttaagccgccttcaccgccgcagctttattgttttaatcagcaacttccgcgaagaagacgacaaatccctttcgtggatacttccgcacataaaaaaacgccatctgcttcttctggtcagtttccgcgaggatgaggcggtgaaactggcttttcctgataaaatttcacataacagaactgacgaggaagtacttgaaactgcggcggcttttgcctatcttgaaaaccgccggcgtttgtacagtaaatgggagcattccggccttttggtgctggaaacttcgcccaaacaaatttccgccgatctcatcaataaatatttaagaataaaaaaaagcggaaaactctaa

SEQ ID NO: 42680 - protein, 220 aa, Unknown
  Obtained from environmental sample
  misc_feature (1)..(220): Xaa is any amino acid
MDGRLKLIVRNYQEEQDQQILFIIDSGYRLPDHHFDSALEAMLMLSYIALKHGDATAAASFGAHDIWIPPRKGMKAYTGLMNGLYDLHSEPVPSSPFLALENALSRLHRRSFIVLISNFREEDDKSLSWILPHIKKRHLLLLVSFREDEAVKLAFPDKISHNRTDEEVLETAAAFAYLENRRRLYSKWEHSGLLVLETSPKQISADLINKYLRIKKSGKL

SEQ ID NO: 42681 - DNA, 870 bp, Unknown
  Obtained from environmental sample
  misc_feature (1)..(870): n is a, c, g, or t
atgcaagatggagatagcatttttgttttttcaagcacaaagcacaataccaatgccattcaggtcacaggctctgttttttacccaggctattacgtgtggaaagaaggaatgttagttaaagatgctattgccttggctggcgggctttcttctgaagcatttaaagacagagccattgtggaaaggataaatgcagattccagtttttcttatttttctgatgattttgcaggcagcagaaaattaaagttgctccctggcgataatgtggttgttttggattccagaaaactgaaaaattggagaacggttagcgttacgggttatgtaaaagagccaaacgactttgaatggcaagagaatttagacgctttggatttggtagctttgtgcggaggctttttgccaaatgctatgaagaatgaaataatgattgaaaggcttattgaaggcaaacaaaaaacagaaattatcaacttgcctataaaaaacgaactgagcgcaaaaaacaataagagcttgactttgatgccaggcgataggattgttgtgaaaatagatacttcttattatgagcaagaagttgtagctcttaccggagctttcaaaaaccctggcttttattcgcttgcgaggcgtggcgaaacatttaagaattttatgaaacgtttagccattactgacgaggcggcttttataaaaggcgggcagttgtttcgcagagtgcccaaagcttcagacattgcctctactgctgcctctaggatttccaatgcaaacaatatgatggacacgtctgcttttttcaaaactccagatacaaccattgcaagctacagaataaattttgactttgaacgtgtttga

SEQ ID NO: 42682 - protein, 289 aa, Unknown
  Obtained from environmental sample
  misc_feature (1)..(289): Xaa is any amino acid
MQDGDSIFVFSSTKHNTNAIQVTGSVFYPGYYVWKEGMLVKDAIALAGGLSSEAFKDRAIVERINADSSFSYFSDDFAGSRKLKLLPGDNVVVLDSRKLKNWRTVSVTGYVKEPNDFEWQENLDALDLVALCGGFLPNAMKNEIMIERLIEGKQKTEIINLPIKNELSAKNNKSLTLMPGDRIVVKIDTSYYEQEVVALTGAFKNPGFYSLARRGETFKNFMKRLAITDEAAFIKGGQLFRRVPKASDIASTAASRISNANNMMDTSAFFKTPDTTIASYRINFDFERV

SEQ ID NO: 42683 - DNA, 843 bp, Unknown
  Obtained from environmental sample
  misc_feature (1)..(843): n is a, c, g, or t
atggtcatagcccagccctgtccggctattgtcagctatatcgaaatttatcatcctgaattaataccctacctcgcgccggcggacagccccatgctccacaccgtcaaaatgatacgggagtattataagcagtacaaagactataaaattgccgttatttccccctgtattgccaagcggcgggaatttgacgaaaccggacatggggaatacaacgttacaatgaccgccctgaaaaaatatttaaaggatcagaatgtcgatctttcttccaaaccagaggtggaatataccggaatacttgccgaacgggcggttcagttttccagtcccggcggtcttcttgacactgccgagcgctttgtgccgggcatacggcggaatacccgcaagatcgagggattgcccaatatatacccctaccttacggaaattgccgaattattgaacgacaaaaccgtggaattcccgctcctgatagactgcctgaactgtgagaagggctgtaacggcggctccggaacaggcaaccattccgtgcctttggacaaactggaaggccccatccgcaagcgcagcgcggaacatgaaacgaaaattgccacgctgaaaaagaaaaattatgaaaaataccacgagcagttgaaccagttctggagacgcggcctgtatgaccgcagttaccgcaacctttcgggaaatcttgttttgcgccatccaagcgagtccgaattaaccgaaatctaccgtaaaatgaaaaagtttgacaaatctcatttatacgattgcggagcctgcggttacggaagctgcaagggaatgagcatagcgattttttaa

SEQ ID NO: 42684 - protein, 280 aa, Unknown
  Obtained from environmental sample
  misc_feature (1)..(280): Xaa is any amino acid
MVIAQPCPAIVSYIEIYHPELIPYLAPADSPMLHTVKMIREYYKQYKDYKIAVISPCIAKRREFDETGHGEYNVTMTALKKYLKDQNVDLSSKPEVEYTGILAERAVQFSSPGGLLDTAERFVPGIRRNTRKIEGLPNIYPYLTEIAELLNDKTVEFPLLIDCLNCEKGCNGGSGTGNHSVPLDKLEGPIRKRSAEHETKIATLKKKNYEKYHEQLNQFWRRGLYDRSYRNLSGNLVLRHPSESELTEIYRKMKKFDKSHLYDCGACGYGSCKGMSIAIF

SEQ ID NO: 42685 - DNA, 864 bp, Unknown
  Obtained from environmental sample
  misc_feature (1)..(864): n is a, c, g, or t
ttgatcagatcggccgagatgggcggggaaataagcatggaaagcgaatacggcaaaggcagcgtattcacggcagttatcccacaaggtattgaatcagaaggttccttcgccgtggtaaaagatgcagagaaaaagaaggttctggtttatgagggcagagctgtctatgccaaatcggtatgctggactttggataatatgggcgttccacatacaatggtagcaaataaggatgattttgccgcggccctttaccgcgaagaatggttctatgtgttttcaggatacggcctttatgaaaagatcgaaccgtttatggaaaaaagcgatgcggttttctgcggggggaaaaagccgtcactggctctgatgatagaatggggaaccgaagcctacatacccaacgtacggtttgtatccataccggttcagtcgctgtcaattgccaatattttaaacggcatggcggaaaacaaagggtatatcaaaaattccggtataatacgttttaccttcccacgggcgcgtttgttggtagcggatgacattgtaaccaacctgaaagtagttgagggtcttcttgccccataccttgcggaagtggacacatgcctaaacggtttacaggccatagaactggtaaaacgcaacaaatacgatattgtattcatggatcacatgatgccggaaatggacggcattgaagcgacgacaactatccgtgcgctaaaaggcgagcgcttccgtactatgacaataatcgccttaacggccaatgcggttgttggaatgcgggaaatgtttatcgaaacggattcaatgattttctttccaacccatagacgttacaaaactggatga

SEQ ID NO: 42686 - protein, 287 aa, Unknown
  Obtained from environmental sample
  DOMAIN (176)...(285): Response regulator receiver domain
  misc_feature (1)..(287): Xaa is any amino acid
MIRSAEMGGEISMESEYGKGSVFTAVIPQGIESEGSFAVVKDAEKKKVLVYEGRAVYAKSVCWTLDNMGVPHTMVANKDDFAAALYREEWFYVFSGYGLYEKIEPFMEKSDAVFCGGKKPSLALMIEWGTEAYIPNVRFVSIPVQSLSIANILNGMAENKGYIKNSGIIRFTFPRARLLVADDIVTNLKVVEGLLAPYLAEVDTCLNGLQAIELVKRNKYDIVFMDHMMPEMDGIEATTTIRALKGERFRTMTIIALTANAVVGMREMFIETDSMIFFPTHRRYKTG

SEQ ID NO: 42687 - DNA, 861 bp, Unknown
  Obtained from environmental sample
  misc_feature (1)..(861): n is a, c, g, or t
atggaaagtgaaaaaaaactggtcatacttgtagacgataacattgccaatcttaaaatcggcaataatattttggaagaaaaatatatcgtcgccacctcccccttcgctgaaaaaatgttccgtcttttggaaaacaatacccccgcattgattctgctggatatcgacatgccggaaatgaacggttatgaggcgataaaattactcaaatctaaaccaaaaacaaaagatattcctgtaatctttctaaccgcaaaaacagaatctaatgatgaactggaaggactttccctaggcgcgattgactatatcacaaaaccttttaatccggctctgcttttaaaacgtattgaagtacatttgctggtggaaggtcagcgtaaagaattgcaatactttaatgaaaatttacaaaaaatggtggaagaaaaaacgcaaagcattctggaactgcaaaacgctctcttaaaaacaatggcggaactggtagaatgccgcgatgacattacgggaggccacatagaaagaacgcagcggggaatagaaataatgctggaaaaaattgaaagaagcggcgtttacctggaagagacaaagggctgggacaagaaccttctgctccagtcatgccagctccatgacgtaggcaaaatatccatcagcgacagcatactaaaaaaaccgggaaagcttaccgatgaagaatttaatgtaatgaaaaaacacgcaagttttggcgaacaaataattgaaaaaattgagactttgtcaaaggaaagcgattttttaaattacgcgaaaatttttgccgcaagccatcacgaaagatgggacggttccggtatccgcgcgggctaa

SEQ ID NO: 42688 - protein, 286 aa, Unknown
  Obtained from environmental sample
  DOMAIN (171)...(286): HD domain
  misc_feature (1)..(286): Xaa is any amino acid
MESEKKLVILVDDNIANLKIGNNILEEKYIVATSPFAEKMFRLLENNTPALILLDIDMPEMNGYEAIKLLKSKPKTKDIPVIFLTAKTESNDELEGLSLGAIDYITKPFNPALLLKRIEVHLLVEGQRKELQYFNENLQKMVEEKTQSILELQNALLKTMAELVECRDDITGGHIERTQRGIEIMLEKIERSGVYLEETKGWDKNLLLQSCQLHDVGKISISDSILKKPGKLTDEEFNVMKKHASFGEQIIEKIETLSKESDFLNYAKIFAASHHERWDGSGIRAG

SEQ ID NO: 42689 - DNA, 756 bp, Unknown
  Obtained from environmental sample
  misc_feature (1)..(756): n is a, c, g, or t
gtgggcggctgcgttttgtccctcgctttcggtcctgatgtgtttaaggaatttcttgcgggagccgccgaagcggacaaacttgctttggagactgatattcttaaaaacgccgcccttcttgacgcgctaatcggcgtatgggaacgcaactttttacagtatccgtatactgcggttttgccgtacagtcaggcgctttcgcggtttccggcgcatttgcagcagatggacatggagtcaaacggaaagcgcgtaaaccgcgacgggcagcctgttaattacagtacgggaccggttattttcggagagccgggaacaaacggccaacattcattttatcagcttcttcatcagggaacgggcattatcccgcttcagtttatcggtttttttgaaagccagagaggcgacgatgtaagcgttgacggctcggtaagccagacaaaattaaaagcaaatcttgccgctcaaattgtggctttcgcaaaagggcaggacagcagcgacggaaacaaagaatttacaggagagcgcccgtcaagtttgatttttggaaagaagttgacacccgccgtattggggagtttgcttgcacactatgaaaacaaggttatgtttcagggatttgtctggaatcttaacagttttgatcaggagggcgtgcagcttggaaagatcctgacaaaaaaagtgctttccggcaacttcggcgatggggcgctggaagcttacagcaaactgttaggcgtataa

SEQ ID NO: 42690 - protein, 251 aa, Unknown
  Obtained from environmental sample
  DOMAIN (1)...(249): Phosphoglucose isomerase
  misc_feature (1)..(251): Xaa is any amino acid
MGGCVLSLAFGPDVFKEFLAGAAEADKLALETDILKNAALLDALIGVWERNFLQYPYTAVLPYSQALSRFPAHLQQMDMESNGKRVNRDGQPVNYSTGPVIFGEPGTNGQHSFYQLLHQGTGIIPLQFIGFFESQRGDDVSVDGSVSQTKLKANLAAQIVAFAKGQDSSDGNKEFTGERPSSLIFGKKLTPAVLGSLLAHYENKVMFQGFVWNLNSFDQEGVQLGKILTKKVLSGNFGDGALEAYSKLLGV

SEQ ID NO: 42691 - DNA, 657 bp, Unknown
  Obtained from environmental sample
  misc_feature (1)..(657): n is a, c, g, or t
atgaaaatttgcaaaaaatggtggaagaaaaaaacgcaaagcattctggaactgcaaaacgctctcttaaaaacaatggcggaactggtagaatgccgcgatgacattacgggaggccacatagaaagaacgcagcggggaatagaaataatgctggaaaaaattgaaaaaagcggcgtttacctggaagagacaaagggttgggacaagaacctgctgctccagtcctgccagcttcatgacgtaggcaaaatatccattagcgacagcatactaaaaaaaccaggaaagcttaccgacgaagaatttaatgttatgaaaaaacacgcaagttttggcgaacaaataatcgaaaaaatcgagactttgtcaaaagaaagcgattttttaaattacgcgaaaatttttgccgcaagccatcacgaaagatgggacggttccggttatccgcgcgggctaaaagaaaacaaaataccactgcttggccgcatcatggcgattgccgacgtatacgacgcgctcacttcggagcgcccttacaaaaaagccttcagccacgaggaagcggtgcgtattataactgaaggcagcggaacccaatttgatccggcgctggtagaagtattcacaggcgcggcggaacaattcagaaactag

SEQ ID NO: 42692 - protein, 218 aa, Unknown
  Obtained from environmental sample
  DOMAIN (37)...(174): HD domain
  misc_feature (1)..(218): Xaa is any amino acid
MKICKKWWKKKTQSILELQNALLKTMAELVECRDDITGGHIERTQRGIEIMLEKIEKSGVYLEETKGWDKNLLLQSCQLHDVGKISISDSILKKPGKLTDEEFNVMKKHASFGEQIIEKIETLSKESDFLNYAKIFAASHHERWDGSGYPRGLKENKIPLLGRIMAIADVYDALTSERPYKKAFSHEEAVRIITEGSGTQFDPALVEVFTGAAEQFRN

SEQ ID NO: 42693 - DNA, 414 bp, Unknown
  Obtained from environmental sample
  misc_feature (1)..(414): n is a, c, g, or t
atgcttagcccaaagagaacaaaacatcgcaaaatgatgaaaggccgaatgaaaggcatggctaccactggcgattatatcgcatttggtgattttggcattcaggctcttgaacagtgctggctcacggctcgccaaatagaggcagcgcgtatttgcatgactcgcaaaataaagagaggcggaaaggtttggattcgcgtgtttcccgacaaacccgtttccaaaaagccagctgaaacccgtatgggtaaaggcaagggtgcaccggaattttgggcagcagtggtgctgccgggcagaatattgtttgagatgggtggagttgaaaaggctctcgctttggaggctttgaatggagccgctcaaaaattgccaataaaagttaaaatagttgaggcttcggagatataa

SEQ ID NO: 42694 - protein, 137 aa, Unknown
  Obtained from environmental sample
  DOMAIN (1)...(132): Ribosomal protein L16
  misc_feature (1)..(137): Xaa is any amino acid
MLSPKRTKHRKMMKGRMKGMATTGDYIAFGDFGIQALEQCWLTARQIEAARICMTRKIKRGGKVWIRVFPDKPVSKKPAETRMGKGKGAPEFWAAVVLPGRILFEMGGVEKALALEALNGAAQKLPIKVKIVEASEI

SEQ ID NO: 42695 - DNA, 840 bp, Unknown
  Obtained from environmental sample
  misc_feature (1)..(840): n is a, c, g, or t
ttgagcggctccattcaaagcctccaaagcgagagccttttcaactccacccatctcaaacaatattctgcccggcagcaccactgctgcccaaaattccggtgcacccttgcctttacccatacgggtttcagctggctttttggaaacgggtttgtcgggaaacacgcgaatccaaacctttccgcctctctttattttgcgagtcatgcaaatacgcgctgcctctatttggcgagccgtgagccagcactgttcaagagcctgaatgccaaaatcaccaaatgcgatataatcgccagtggtagccatgcctttcattcggcctttcatcattttgcgatgttttgttctctttgggctaagcataaattaaatcctttttggttcggtggaagtataatctcccttgcgaagtttttctccgtgcataatccaaacttttacgccattggtgccgtaaagagtttttgctgttgcagttgcataatcaatatctgcgcgaagggtgtgaagcggaaccctgccctctgcgtatttttctactctggcaatttccgctccgccaaggcgaccgccaatttgaatgcgaatgccttcaactccaaaacgcattgcgttttgaatggcgcgtttcattgcacggcgacccgttacgcgtttctccaactggcgagcgatgttctctgccaccagcttggcatctgtttcgccgcgcttgatttctattatctcaatatgaacgtcttttttggtcacgattttcaattcttccttcaatccatccacaacctcgcctttgcgacctattataacgcctgggcgagcggtgtgaattaa

SEQ ID NO: 42696 - protein, 279 aa, Unknown
  Obtained from environmental sample
  misc_feature (1)..(279): Xaa is any amino acid
MSGSIQSLQSESLFNSTHLKQYSARQHHCCPKFRCTLAFTHTGFSWLFGNGFVGKHANPNLSASLYFASHANTRCLYLASREPALFKSLNAKITKCDIIASGSHAFHSAFHHFAMFCSLWAKHKLNPFWFGGSIISLAKFFSVHNPNFYAIGAVKSFCCCSCIINICAKGVKRNPALCVFFYSGNFRSAKATANLNANAFNSKTHCVLNGAFHCTATRYAFLQLASDVLCHQLGICFAALDFYYLNMNVFFGHDFQFFLQSIHNLAFATYYNAWASGVN

SEQ ID NO: 42697 - DNA, 669 bp, Unknown
  Obtained from environmental sample
  misc_feature (1)..(669): n is a, c, g, or t
atgggtcaaaaaacacatccaaacggtctgaggctgggaatcatcaaaacctgggattctcagtggtttgttgaaaagaaaaaggatttctcaaaattcattctcaacgatatgcaggttcgccgttatttatccaaaagatttgaaggtgcgcaaatttccaaaatagagattcgccgcacaaaaaataccgtagaggttttaattcacaccgctcgcccaggcgttataataggtcgcaaaggcgaggttgtggatggattgaaggaagaattgaaaatcgtgaccaaaaaagacgttcatattgagataatagaaatcaagcgcggcgaaacagatgccaagctggtggcagagaacatcgctcgccagttggagaaacgcgtaacgggtcgccgtgcaatgaaacgcgccattcaaaacgcaatgcgttttggagttgaaggcattcgcattcaaattggcggtcgccttggcggagcggaaattgccagagtagaaaaatacgcagagggcagggttccgcttcacacccttcgcgcagatattgattatgcaactgcaacagcaaaaactctttacggcaccaatggcgtaaaagtttggattatgcacggagaaaaacttcgcaagggagattatacttccaccgaaccaaaaaggatttaa

SEQ ID NO: 42698 - protein, 222 aa, Unknown
  Obtained from environmental sample
  DOMAIN (64)...(118): KH domain
  misc_feature (1)..(222): Xaa is any amino acid
MGQKTHPNGLRLGIIKTWDSQWFVEKKKDFSKFILNDMQVRRYLSKRFEGAQISKIEIRRTKNTVEVLIHTARPGVIIGRKGEVVDGLKEELKIVTKKDVHIEIIEIKRGETDAKLVAENIARQLEKRVTGRRAMKRAIQNAMRFGVEGIRIQIGGRLGGAEIARVEKYAEGRVPLHTLRADIDYATATAKTLYGTNGVKVWIMHGEKLRKGDYTSTEPKRI

SEQ ID NO: 42699 - DNA, 423 bp, Unknown
  Obtained from environmental sample
  misc_feature (1)..(423): n is a, c, g, or t
atgtcgggagttttggtaagagtttccaatggagtggaaattttagaaaaagaagatgctggcgatatttgctacggcgttgccaaattgtgcaacacccgttatggcgttttaaaaatgcgcaggttgctggatattttgcgcgaaagttctgttgaaagggcttttggcatattgtctgttatgcgcacaaagttgaaaggcgctgcaatagcagaaaaaaccatgaaaaccgccgtgaataattacaatcaagctcgtgccaaaaaaggcggggtggcaaaaccagcgagcgagctaaaaatacgcgctattttcgcagatggaggtccaataataaagagagcaagacctcactcacacggaagagcgttccctattcacaagtcactctctcatcttacaatagtcgtttcggactag

SEQ ID NO: 42700 - protein, 140 aa, Unknown
  Obtained from environmental sample
  DOMAIN (28)...(140): Ribosomal protein L22p/L17e
  misc_feature (1)..(140): Xaa is any amino acid
MSGVLVRVSNGVEILEKEDAGDICYGVAKLCNTRYGVLKMRRLLDILRESSVERAFGILSVMRTKLKGAAIAEKTMKTAVNNYNQARAKKGGVAKPASELKIRAIFADGGPIIKRARPHSHGRAFPIHKSLSHLTIVVSD

SEQ ID NO: 42701 - DNA, 447 bp, Unknown
  Obtained from environmental sample
  misc_feature (1)..(447): n is a, c, g, or t
atgccactaaaagaaattcccttgaatgctttgattcacaatgttgagttgaaacctgggcacggcggtcagcttgcccgttctgccggaacagccgcagaactcattgccaaagacgaaaagtattgccaagttcgcttgccttctggcgaggttcgtttggtgctttctgtttgcttggcaaccataggtcaaatatccaacatagaccataacaatgaagtttccggttctgccggtcgcagccgctggctgggcattcgcccgtctgtgcgcggcgtggttatgaaccccattgaccatcctcttggtggcggcgaaggtcgcacatctggtggtcgccatccatgttctccttggggcaaaaactccaagggcaaaaaaacccgtaacaacaagcgcaccgataaaatgattgtgcgccgtcgtcagaagaagagggcataa

SEQ ID NO: 42702 - protein, 148 aa, Unknown
  Obtained from environmental sample
  DOMAIN (1)...(123): Ribosomal Proteins L2, C-terminal domain
  misc_feature (1)..(148): Xaa is any amino acid
MPLKEIPLNALIHNVELKPGHGGQLARSAGTAAELIAKDEKYCQVRLPSGEVRLVLSVCLATIGQISNIDHNNEVSGSAGRSRWLGIRPSVRGVVMNPIDHPLGGGEGRTSGGRHPCSPWGKNSKGKKTRNNKRTDKMIVRRRQKKRA

SEQ ID NO: 42703 - DNA, 339 bp, Unknown
  Obtained from environmental sample
  misc_feature (1)..(339): n is a, c, g, or t
atggcgaccaccagatgtgcgaccttcgccgccaccaagaggatggtcaatggggttcataaccacgccgcgcacagacgggcgaatgcccagccagcggctgcgaccggcagaaccggaaacttcattgttatggtctatgttggatatttgacctatggttgccaagcaaacagaaagcaccaaacgaacctcgccagaaggcaagcgaacttggcaatacttttcgtctttggcaatgagttctgcggctgttccggcagaacgggcaagctgaccgccgtgcccaggtttcaactcaacattgtgaatcaaagcattcaagggaatttcttttag

SEQ ID NO: 42704 - protein, 112 aa, Unknown
  Obtained from environmental sample
  misc_feature (1)..(112): Xaa is any amino acid
MATTRCATFAATKRMVNGVHNHAAHRRANAQPAAATGRTGNFIVMVYVGYLTYGCQANRKHQTNLARRQANLAILFVFGNEFCGCSGRTGKLTAVPRFQLNIVNQSIQGNFF

SEQ ID NO: 42705 - DNA, 2259 bp, Unknown
  Obtained from environmental sample
  misc_feature (1)..(2259): n is a, c, g, or t
atggacatcctggggcttaagaccctggatgttattaaaaacaccgaggaattaatccgcaacaggggaggggagctcgccaatttcagcgttgaggccgtagacgaaaacgacaaggcaacattcaggatgctgggcgagggcctgagttttgaggtcttccagtttgaatccgatggcatgcaggatactcttaaaagggcaaagccggacaaaattgaagatcttatagctcttaacgccctttaccgccctggcccaatggcaaatatccccaggtatatcaactcaaaaaacggccgccaggcgatcacttaccctgatcccagcctggaagaggctttaaaagatacttacggcgttattgtctatcaggaacaggtcatgcaggttgcgcggatcatagcagggtacagcatgggacaggccgaccttttaaggcgggcaatggggaaaaagaaaaaggaaataatcgacaaggaaaaaataccttttcttgagggcgcggtcaggcagggcttttccaaaacaagagcgggagagatttacgacatgctggtcccgtttagcgactacggttttaacaagagccacgccgccggttactctgttctggcttaccggactgcctatttaaaggcaaattttccggcggaattcatggcggccaatcttaccaacgagattcacagcacagacaaagacaagctttcggagtgtatttccgaagcgcgaaagatgggcattgctgttgatccgccagatataaaccgctcgtttaagcttttcacgatagcggacgggcatatcgtttacggctttttgggaatcaagggcctgggagacgggcctgccgacgaaatagtaaattgccgaaaggatgggccttacaaagactttttggattttcttaaccgcgtggacatcaaggcggtcggaaagagcgttattgaaaagctaatccagaccggctctttcgacaatttgggaaggcggagggaaacccttttgggaaacctggagcaggcggtggaatacgtccaaaaaattaaggacgggaaaaaattcggccaggtgagccttttcatggacacgggggaaaaggagtaccaggattttaggtttgaagagtttcccgagatttccaaagccgacaagctaaagactgaaaaagagctcataggcttttacttctccgcccatcccatggacgagtataaggctgtctggaaagaccttgtgaaagccgatttgggccatcctgaagccctggttttgggcaaccatattcttgtggggcttattaagaacgtcaaggtaatatccacaagcaagggggatcgaatggccttcgctacgctggaagattacaacggcgaaattgagctgactttcttccccggggcctggacccaatgcaaagaaaaaattgaaaacgataaagtagctatcgttaagggcaaaatagattaccagcagaacaaggacaagcgcagtttcacagtggatgaatgtttagaaccagatgatattgccaatgccgtaattgccaataaagaagatgtccagttatggggccggttcgcaaatttacggaagtacgcgaaagatatggatataaatctgctggatgtaagcaaggggagggcggaagccggaacctacattgccatcggaatattaaaatcaataaggacccacgttgataaaaagggcaaggaaatggcctttggaaccttgcaagaccaaagcggggaaatagacattttgttttttgccaaaacatgggaaaactgcaaggccaaggcagtgatcggtgaggtcttggcccttaagggaaccatcgaagcgcaaagggatcaatataacgggaagaatgcccttcttgtgaccagcatacaggatatcgataaattggttcgtgcagcggatagaaaagcgacggataaaaaatccgggcagggccgggaagatgcggctgataaaacaaaaacaacaatgcacatccgcctggccgccggtgcggcggaagacgaagagatgctaagttttcttaaaaattgcatagaggaaaatccaggctcatgtccggtatttatccatgttcccgttcttgccctggggaaagaaagctcccaggatgaaaatcccaaagagacaataatacgcacggctagtttaataaatgcggaggcttctgtttcgcttggctcattggagagatgccctgccgtagcagatgtttggtgcgccgggtaa

SEQ ID NO: 42706 - protein, 752 aa, Unknown
  Obtained from environmental sample
  DOMAIN (1)...(173): Bacterial DNA polymerase III alpha subunit
  misc_feature (1)..(752): Xaa is any amino acid
MDILGLKTLDVIKNTEELIRNRGGELANFSVEAVDENDKATFRMLGEGLSFEVFQFESDGMQDTLKRAKPDKIEDLIALNALYRPGPMANIPRYINSKNGRQAITYPDPSLEEALKDTYGVIVYQEQVMQVARIIAGYSMGQADLLRRAMGKKKKEIIDKEKIPFLEGAVRQGFSKTRAGEIYDMLVPFSDYGFNKSHAAGYSVLAYRTAYLKANFPAEFMAANLTNEIHSTDKDKLSECISEARKMGIAVDPPDINRSFKLFTIADGHIVYGFLGIKGLGDGPADEIVNCRKDGPYKDFLDFLNRVDIKAVGKSVIEKLIQTGSFDNLGRRRETLLGNLEQAVEYVQKIKDGKKFGQVSLFMDTGEKEYQDFRFEEFPEISKADKLKTEKELIGFYFSAHPMDEYKAVWKDLVKADLGHPEALVLGNHILVGLIKNVKVISTSKGDRMAFATLEDYNGEIELTFFPGAWTQCKEKIENDKVAIVKGKIDYQQNKDKRSFTVDECLEPDDIANAVIANKEDVQLWGRFANLRKYAKDMDINLLDVSKGRAEAGTYIAIGILKSIRTHVDKKGKEMAFGTLQDQSGEIDILFFAKTWENCKAKAVIGEVLALKGTIEAQRDQYNGKNALLVTSIQDIDKLVRAADRKATDKKSGQGREDAADKTKTTMHIRLAAGAAEDEEMLSFLKNCIEENPGSCPVFIHVPVLALGKESSQDENPKETIIRTASLINAEASVSLGSLERCPAVADVWCAG

SEQ ID NO: 42707 - DNA, 1737 bp, Unknown
  Obtained from environmental sample
  misc_feature (1)..(1737): n is a, c, g, or t
gtgagccttggctacaatgataacgccgcaagggtgaatatcaacgggcagagcggcgtttacattcaggtaaccagcgaaagcggcagcaaccaggtaaaggtgtccgataatgtcagagcttcgttaggtgaaatcaattcagagctgccccaggggattacgcttgaaatactgtcagataacaccaacatgatcagggctaccctgaaccaggtgtataacaacgcgtggcagggcggtttattggccatgatcatcctgcttatattccttcggaatataaggggaaccattataatcgggctttcagtccccatttcaatgctgcttacccttatgttcatgtcgatattcgggtttacccttaacctcttaacaatgaccgggcttatcatgggcatgggcatgacgatggacagttccatagttatcctggaaaacgtccacaaataccgggaacgcggggcaaaggccgccatcgccgccatcctgggaagccgggaaatgatgcgggcgattatcgcctccgcggcgaccaccctgtgcgtttttataccgctgatcatctataaaaacgatctcaaggaaatggggcagctttttaacgaccttatttttaccgtggtaatttcccttacagcctccctgctggtagccattaccctggtgccgagcctctgcggcgcgatactgccgctgcaaacacgcatgcaaaaacctcttaaaaacagagtgctgcgtaaaacagacgacgcgatggagagattcttcaaagcccttgaaaacggatacagtaacgcgcttaattactgcctgtcccaccggctgttaattgtaactctggtcgtccttattctgattttttccctgctgcaattcggcggcatcgggatgaatatgtatacccgcatacgcgtcgatgacaacgtcaacatcaacgtggctatgccccagggaaccgcgattgacgttaccgagaacatgctgttcaggctggaagaaattgtcaagcgcgaggtgaagggctataaccacctgatcctcaccgccaggcgcagcgggaccaaccagggaaccctccagattgtccttccggaaccggcaaagcagatagacacgcctgacgcgataatccgcaggctcacgcccattacaagccagattcctggaataagggctacttacagggcgggacgggggattggaaccacgtcggcgatcgagattgccgtaagctcacgcaattatcccgccattatggacaccgcgaacgagatactcggcatcattcaacgttatctgccggatattgaaaaccccactgttaacattgacgagggcgcgccacagcttcagattgaaattgaccgcgaccgcgcctcaagtttcggcctttccctcgcgtctattgcctcggaaatacgcacggccatggacggcgttaccgccaccacgatgaccaggggcgaaaggctggtaaacgtccaggtgcagttaagagacgacgatcggcagggactgccgaacctggacgccgtttttgtaatgagccgtaacggttcgcgcgtttccctttccaatgtggcgcgcatcagggaaagccgcgccccaacgtcaatacgccacgagaggcaggagcgcgtcgtccgtgtcacgggcgatctaggccctggaatagccgccaccgacatgcagcgccgtcttataagcacgggaaaatctcggccaatctga

SEQ ID NO: 42708 - protein, 578 aa, Unknown
  Obtained from environmental sample
  DOMAIN (2)...(578): AcrB/AcrD/AcrF family
  misc_feature (1)..(578): Xaa is any amino acid
MSLGYNDNAARVNINGQSGVYIQVTSESGSNQVKVSDNVRASLGEINSELPQGITLEILSDNTNMIRATLNQVYNNAWQGGLLAMIILLIFLRNIRGTIIIGLSVPISMLLTLMFMSIFGFTLNLLTMTGLIMGMGMTMDSSIVILENVHKYRERGAKAAIAAILGSREMMRAIIASAATTLCVFIPLIIYKNDLKEMGQLFNDLIFTVVISLTASLLVAITLVPSLCGAILPLQTRMQKPLKNRVLRKTDDAMERFFKALENGYSNALNYCLSHRLLIVTLVVLILIFSLLQFGGIGMNMYTRIRVDDNVNINVAMPQGTAIDVTENMLFRLEEIVKREVKGYNHLILTARRSGTNQGTLQIVLPEPAKQIDTPDAIIRRLTPITSQIPGIRATYRAGRGIGTTSAIEIAVSSRNYPAIMDTANEILGIIQRYLPDIENPTVNIDEGAPQLQIEIDRDRASSFGLSLASIASEIRTAMDGVTATTMTRGERLVNVQVQLRDDDRQGLPNLDAVFVMSRNGSRVSLSNVARIRESRAPTSIRHERQERVVRVTGDLGPGIAATDMQRRLISTGKSRPI

SEQ ID NO: 42709 - DNA, 855 bp, Unknown
  Obtained from environmental sample
  misc_feature (1)..(855): n is a, c, g, or t
atgaaaaggcaaaccagggattttttatccaagctgtatgatttcagaaagaaaatcgagatggataaaccaaggataaaaaacggtatttccaattccaggcagataagcgacgggcagaatttgcgggttttggtaaaaggttacggtgtttatatgtcgcaagtcgtaaaaaataccaacacttacatagcaatatcgcgaccggtaaacagtaaactgccggcaactttttcctggcagggtatgaagctttccgtttacttttggcgcagtgaggatgctggttatgtttttgattcggaggttctggatgaagtcttttccaagggcattgcatctctaaaaatttcccacaccgactctctttttagaactcaaaaacggaaatctgtccgtgtaaaaaagcataaggcggcctatctttaccctgttttgagcgaagaagaaataaacaggatagaagacaatccgggtatcaaatgttttattgaagacctttccgataccggctgtgccataaaaatcggaggaaaagcccagccgggtttgcgtattaaggtgcagtttcatctgaataattcccttatttgtatgagcggtactatccgctcggttgatttcaaggaagatttgaacagatccctgcttcatgttgaggctgatcccctgcctatcgaaatcaggaatcagatactgggagaagttttcggtatgcttccggaagatgaagaggagcttcctttcaggatactgggagaggaagccgaggaaatggctacggagatagagccggaagaagacggcgaagaatcaattgccgctgaatctgaggtctcgggggccgagttctga

SEQ ID NO: 42710 - protein, 284 aa, Unknown
  Obtained from environmental sample
  DOMAIN (127)...(238): PilZ domain
  misc_feature (1)..(284): Xaa is any amino acid
MKRQTRDFLSKLYDFRKKIEMDKPRIKNGISNSRQISDGQNLRVLVKGYGVYMSQVVKNTNTYIAISRPVNSKLPATFSWQGMKLSVYFWRSEDAGYVFDSEVLDEVFSKGIASLKISHTDSLFRTQKRKSVRVKKHKAAYLYPVLSEEEINRIEDNPGIKCFIEDLSDTGCAIKIGGKAQPGLRIKVQFHLNNSLICMSGTIRSVDFKEDLNRSLLHVEADPLPIEIRNQILGEVFGMLPEDEEELPFRILGEEAEEMATEIEPEEDGEESIAAESEVSGAEF

SEQ ID NO: 42711 - DNA, 1218 bp, Unknown
  Obtained from environmental sample
  misc_feature (1)..(1218): n is a, c, g, or t
atgaggcagtttttaaaaagggcgcttcaaaaagccgacgaactaaagccggagcaggttaagaatttacttaatctgtcgtccagggaaatcgatcgccttgaaacggtgatggattcccttatcaggggggttcttgtttgcgacacttcgcacaggttgatcttggtaaacaaagccgccagaaggttcctctccatagtttcttatgagcagggcagggaagccatctggagcgttatccccgaagagccggtcgccgagtttctcgcccaaaccctcctctccaccgacgtagcggaggaaagggaattctacgttgatgtcaacgggatgcagcggctgcttgcggtaagcgtgatgcctgtggttcaggatcgccaggtttccggctccgtgattcttattgaggacatcacggagcgaaggaaccgcgaggcaaagcttaggcaaatggaaaacctcgcaagtcttaccaccctggccgcgggagtagcccacgaaatcaagaaccccctgggcgcgctttcgatccacgtgcagcttttaaaaaaggctctggatgcccaggaaaagctatgcgcggcccatcaggcggcggcgggctcccacgaatgtgagccgtataaatatttccgccaaagcgacaaatacattaaagttctgaatgaggaaatagatcgccttaacagaattatcgttgattttcttttcgcggttaggccaatgaacctggagccaaggcggggcaacataaacgaatttattaaggaacttgccgaatttgtttcttttgaattaaaaaaagcccgcattgaatgtgttcttaacctggaagaaaatttaagcgacattgattttgacgccgctttaatgaagcaggtcttccttaaccttataaacaacgcctccgccgcaatgagcgggggagggatgctcaccatagccaccagggacgcggaaggggaagaaataataactattgccgatacggggaagggaatatccgaaaaagatttcccaaaaatttttgagccttactttaccaccaaagaagccggtacaggcctgggtcttactgttgtgttcaaggttgtcaaagaacacaagggagatatttacgtagaatcaaaggaaggggaggggactgtttttaccatttccctgcccaagcctcagccggagcagctgcttatcgcttacaagggagataaatga

SEQ ID NO: 42712 - protein, 405 aa, Unknown
  Obtained from environmental sample
  DOMAIN (38)...(144): PAS fold
  misc_feature (1)..(405): Xaa is any amino acid
MRQFLKRALQKADELKPEQVKNLLNLSSREIDRLETVMDSLIRGVLVCDTSHRLILVNKAARRFLSIVSYEQGREAIWSVIPEEPVAEFLAQTLLSTDVAEEREFYVDVNGMQRLLAVSVMPVVQDRQVSGSVILIEDITERRNREAKLRQMENLASLTTLAAGVAHEIKNPLGALSIHVQLLKKALDAQEKLCAAHQAAAGSHECEPYKYFRQSDKYIKVLNEEIDRLNRIIVDFLFAVRPMNLEPRRGNINEFIKELAEFVSFELKKARIECVLNLEENLSDIDFDAALMKQVFLNLINNASAAMSGGGMLTIATRDAEGEEIITIADTGKGISEKDFPKIFEPYFTTKEAGTGLGLTVVFKVVKEHKGDIYVESKEGEGTVFTISLPKPQPEQLLIAYKGDK

SEQ ID NO: 42713 - DNA, 903 bp, Unknown
  Obtained from environmental sample
  misc_feature (1)..(903): n is a, c, g, or t
ttgggtatagatcaggcgacgcgcgacgcggcgatggctcttaaagaaactctggaagaatttaaaattcaagccgaagttaccggcatacgcaaaggccccgtcatcactctgttcgagattctccccgcgcccggcgtaaaactttcaaaaatcgtcggcttgcaggacaacatagccctgcgtcttgcggcgtcctcggtgcgtattgtagcccctattcccggcaaacacgcggtaggcatagaagttcccaacgcaaagcgcaacatagtctctttccgtgaaattattgaggggcagcttcatgacgatcaaaaaatggaaatcccggttgttatgggcaaagatatttccggggaagcccaaacaatcgatcttgttcagatgccccatcttctgatcgcgggagcgacaggttcaggaaaatcggtctgcgtaaactcgatgatcctttcgatactgtaccagcgcactccggcggaatgccgtctgatgcttattgatccaaaaatagttgagctcaaactttataatgatattccccatttattaacgcctgtaattaccgagccgaaaaaagcgtttcaggctcttcaatactgtatttacgaaatggagcggcgttacgcctgccttgattcggttggagtgcgcgacatccgcagttacaacaagcgcatcanagaaaaaaacatcgcgcaggaacacatgccttacattgtcgtggtaattgacgagtttgccgacctcatggcgaccaccggaaaagaacttgaatccaccgtcgcccgtctcgccgcgatgagccgcgccgtcggtattcatcttgtgcttgccacccagcgcccttcgattgacgtttcacgggccttatcaaagcgaacattccaagccgcatag

SEQ ID NO: 42714 - protein, 300 aa, Unknown
  Obtained from environmental sample
  DOMAIN (93)...(286): FtsK/SpoIIIE family
  misc_feature (1)..(300): Xaa is any amino acid
MGIDQATRDAAMALKETLEEFKIQAEVTGIRKGPVITLFEILPAPGVKLSKIVGLQDNIALRLAASSVRIVAPIPGKHAVGIEVPNAKRNIVSFREIIEGQLHDDQKMEIPVVMGKDISGEAQTIDLVQMPHLLIAGATGSGKSVCVNSMILSILYQRTPAECRLMLIDPKIVELKLYNDIPHLLTPVITEPKKAFQALQYCIYEMERRYACLDSVGVRDIRSYNKRIXEKNIAQEHMPYIVVVIDEFADLMATTGKELESTVARLAAMSRAVGIHLVLATQRPSIDVSRALSKRTFQAA

SEQ ID NO: 42715 - DNA, 447 bp, Unknown
  Obtained from environmental sample
  misc_feature (1)..(447): n is a, c, g, or t
atggtagcgggaaaaatggacagccgcatcattattgatgctgtcggcgcggaaaaacttttaggcaagggcgacatgctctatgccggcgtagttgatcctttcccgattcgtatgcagggcgcattcgtctccgaagaagaggtcgaagccgtcgttgaacacgtaaaaaatttcggaaagcccaattacattgacgatgaaattttctttgaagaggaagaagaagactcgaacctttctcttttctcggacggcgacgatcccttatacgaaaaggcgcttgaaattgtttatcaacagggcagggcaagcgcgagctatatccagcgccgcctgaaaatcggctttaaccgcgccgcgcgccttgtggacgagatggaacatcacggcgtcgtggggcccgctcagggaagcaagccgcgggaattgctgcgcgggctttaa

SEQ ID NO: 42716 - protein, 148 aa, Unknown
  Obtained from environmental sample
  misc_feature (1)..(148): Xaa is any amino acid
MVAGKMDSRIIIDAVGAEKLLGKGDMLYAGVVDPFPIRMQGAFVSEEEVEAVVEHVKNFGKPNYIDDEIFFEEEEEDSNLSLFSDGDDPLYEKALEIVYQQGRASASYIQRRLKIGFNRAARLVDEMEHHGVVGPAQGSKPRELLRGL

SEQ ID NO: 42717 - DNA, 2151 bp, Unknown
  Obtained from environmental sample
  misc_feature (1)..(2151): n is a, c, g, or t
atgaaaacactgtttggcaaattgctaatatcgtttggcgtcatcattctcntgatgattgtttcggtacttgcaagtttttttctggtctattcaaaaagctatgaaaaacagataattgccgaaaattcacggcaggctctgtttgtggcgcgttccctgcaatcattcatcaatgcggcttacaatgaagtcgaagaccttgcatttaataacgatgttatttcgatggatacgcagcgtcagacaccggtgtttgtatcaacaataaaaagaagagattattttgaactcctttacgcgcagggcatggacggtatgcagacaggacgatcatcaggcaatttgggaaaccgcaaagaacgctggtggttcgttcaaatggaaaaactaaaaaaaccttttgtctcggaatcttattattcggtcgggacaaatatgccctgtgcttccgttttttatcccataatggatgaacagcaaatgacaggcattatggcaggtgatataaaactttccgcccttcatgatatggtcgttgaaaccgccgatacaggttcttattcttttattctggacggcaagggcgtagtcgtagcgcacccggacagaacctatcaggaggaattatacaattacgcgaagctaaccaaaaccgtaaccttaaaagacgctgcaggaaaacccatgcaaaacgcccagggtaatcttaccgaagaacagagttttagtatttcaaaagcgtacatagccgctataagcgacatgatgagcgggaataccaattccgcgaaattcaatgagggaggaaaaacagtttacgttagttaccgtcctgtggttatggacggctcttccgatccctggtatgtgctttcagtcagggacagggacattgccatgcggtccaggaatacggtaattacggtgattttggcaagttccgcagtcattattgtaattgccctgtttattgtttttttcatcgcaaggactatcagctctccggtaaaatcgatccgcctggttctggaaaaggtaaaggacggtgattttaccaaaaaagtaaccgtacaatcacaagatgaaatcggaaatttggcggattacttcaaccttacaatagaaaacataagaaacctcgtagggacaataaaatacaaaatcaacgggcttaaccataccagttttgaactttcagtcaacatgggcaaaacttctacagccgtagaacagatttcatctaacattgacaacatggaaaaccttgtagtcaaacaggaaaacggcgcgttggtagcaggcgaggcggtaggggctattaaaacaaatattgacagcctgaataaaatgatagaacaacaggctgaaagcgtagacatgtcatcttccgcaatagatgaaatgacagctaacattcattcggtaactcagacgcttgctgaaaacagcaaaaacgtcggttttttggttgaagcgtcggaaaacggcaaaacaggactccagaccgtagcgcaggaaatacgggaaatagcccatgattccgaaggactactggaaataaactcggtgatgaacaatattgcaagccagaccaatctgctttcgatgaatgcggctattgaagcggctcacgccggagacgccggaaaaggctttgcggtagttgcggacgaaatacgcaagttagctgaaaattcaagcgaacagtcaaaaattatcggcggtgttttaaagaagataaaaagctcaatggataaggttattctttccacaggcaatgtgcttaaaaagttcgaagctatcgattcaaatgtaaatatagtatcggaacaggaagaaaatattttatccgccatggaagaacagggcaaaggaagcaaacagatacttgaagttgtaagcaatgtaaatgaaatcacaaagcaggtaaagggcggttccaatgagatgcttgaaggcgcaaatgaagtaatacaggaaagcgataatctggaaaaaacaacgcaggaaataacgggcggaatgaacgaaatggcttcgggcgctgaacagataaacaccgctgtacatcatgtcaatgaaataagctccaaaaacagggcaggaattgatacgcttatgcgcgaggtttctaagtttaaggtatag

SEQ ID NO: 42718 - protein, 716 aa, Unknown
  Obtained from environmental sample
  SIGNAL (1)...(25)
  DOMAIN (136)...(214): Cache domain
  misc_feature (1)..(716): Xaa is any amino acid
MKTLFGKLLISFGVIILXMIVSVLASFFLVYSKSYEKQIIAENSRQALFVARSLQSFINAAYNEVEDLAFNNDVISMDTQRQTPVFVSTIKRRDYFELLYAQGMDGMQTGRSSGNLGNRKERWWFVQMEKLKKPFVSESYYSVGTNMPCASVFYPIMDEQQMTGIMAGDIKLSALHDMVVETADTGSYSFILDGKGVVVAHPDRTYQEELYNYAKLTKTVTLKDAAGKPMQNAQGNLTEEQSFSISKAYIAAISDMMSGNTNSAKFNEGGKTVYVSYRPVVMDGSSDPWYVLSVRDRDIAMRSRNTVITVILASSAVIIVIALFIVFFIARTISSPVKSIRLVLEKVKDGDFTKKVTVQSQDEIGNLADYFNLTIENIRNLVGTIKYKINGLNHTSFELSVNMGKTSTAVEQISSNIDNMENLVVKQENGALVAGEAVGAIKTNIDSLNKMIEQQAESVDMSSSAIDEMTANIHSVTQTLAENSKNVGFLVEASENGKTGLQTVAQEIREIAHDSEGLLEINSVMNNIASQTNLLSMNAAIEAAHAGDAGKGFAVVADEIRKLAENSSEQSKIIGGVLKKIKSSMDKVILSTGNVLKKFEAIDSNVNIVSEQEENILSAMEEQGKGSKQILEVVSNVNEITKQVKGGSNEMLEGANEVIQESDNLEKTTQEITGGMNEMASGAEQINTAVHHVNEISSKNRAGIDTLMREVSKFKV

SEQ ID NO: 42719 - DNA, 714 bp, Unknown
  Obtained from environmental sample
  misc_feature (1)..(714): n is a, c, g, or t
atggagatgatctaccttgaaccggggaataaatccatcagaagcaagatggacgagtattgggacgcctggcaggaactctcaatttaccctgcagatactgcgccgcgtctggcgcttttggaaagaggtaaaacccttattgacggcattcatgaacgctattttgcccttaaaacccttcaggaaagagcggatgaagacatacgcatgacggtcagcgagattaacgatctttccagccaaattgcggagctaaacaacgtcatacagaaagttaaagcccagggagataatcccaacgatctctatgacaggcgcgaccttttggtggacgttctgtcttcaaagctcaatgttaccgtagacaggcgcgatccggatgagttcatggttcataccaacgggatcgttcttgttcagggcagaatcgggcgtcagtttgatcttgtgctgaatcccgaaaccggatattcagacatagtctggagcgaaacgcgaaacaagcttgaattcctcaataacgaccataacgggagccttggcgctcttgtcgatcttcgcgactataccatcaacacagaaatacaaacgctggacaatatgaccatgaatttcgttggccttgtaaacgagatccacgaaaaagcctacggcattaacggagaaaacgggctaaagttttttacgaaacatcctttgntaccnatgtga

SEQ ID NO: 42720 - protein, 237 aa, Unknown
  Obtained from environmental sample
  misc_feature (1)..(237): Xaa is any amino acid
MEMIYLEPGNKSIRSKMDEYWDAWQELSIYPADTAPRLALLERGKTLIDGIHERYFALKTLQERADEDIRMTVSEINDLSSQIAELNNVIQKVKAQGDNPNDLYDRRDLLVDVLSSKLNVTVDRRDPDEFMVHTNGIVLVQGRIGRQFDLVLNPETGYSDIVWSETRNKLEFLNNDHNGSLGALVDLRDYTINTEIQTLDNMTMNFVGLVNEIHEKAYGINGENGLKFFTKHPLXPM

SEQ ID NO: 42721 - DNA, 1248 bp, Unknown
  Obtained from environmental sample
  misc_feature (1)..(1248): n is a, c, g, or t
atgagaagggtttcaacggatatgccaaatacggatatgcagtattaccttagaagacaggaagacaatctgcacaatcttcagacccagatagccaccggaaacaggctgaaccagcttaggaatgatcccctggcggctgcccacgcggtgcgctacgaatcatatctggccaggcttgaacgctttgaggccaataccctttacgccaaagatcacttcaaccagatagacgtttaccttcagcgggccgtggatgtaatgcagcggataagggaactagcggtaacaggcgcaaacggtatctatggcaaagacgacaccagggcaatgggcatagaggtaaacgagcttctcaaagaactggtttcaattgccaacactgtagggccggacggaaaacagctctttgcgggagacaaggcgtttaccgagcccttcaggctggtggaaggtacagtcgaggggggaggagaaacactgatagtaaatgtggagtaccggggttcagggccggcaagaagggccgaaataagcgacggtacctatacggaactggatattgggggaggggaggtgttctgggccgaaaagatgcagatcttctcttcaactgacgcttccgactggcgggccttgcaagacggcgctttttatgtagacggctacgaaataacagtaagggcaggcgatacgcttccggcgatagtggcgaagattaacgatcggggcgcggcggttaaagcatcggttgatcctgaaacaaggggcttaatgcttacaggcacaaatccccatctcatcagaatggaagacaatcagggttcaaggacgcttgaagagctggggataattcagtttaacaacgatccttcggcgcctaactggtctccctcggcaagagtcgcgggcggctctgctttcgatatggtaataaggctccgggacgcgcttttcagggcggacaagatgttcataggcggccttggaatcagcggcatagaccttgccctgcaaaacatggaaggtcacctgaccgaaataggaagccgccacgaacgggccacaatgacatggacaaggctaaaccaggaaatcccgaatgttacatcaatgctggccagggaatcgtctgtcaatatgattgatgcggcgacggatttggggatgatggattttgcccacaaggcggccctgcaaacggcggcaaagatcctaccgactaccttgcttgattttttgaaataa

SEQ ID NO: 42722 - protein, 415 aa, Unknown
  Obtained from environmental sample
  DOMAIN (28)...(163): Bacterial flagellin N-terminus
  misc_feature (1)..(415): Xaa is any amino acid
MRRVSTDMPNTDMQYYLRRQEDNLHNLQTQIATGNRLNQLRNDPLAAAHAVRYESYLARLERFEANTLYAKDHFNQIDVYLQRAVDVMQRIRELAVTGANGIYGKDDTRAMGIEVNELLKELVSIANTVGPDGKQLFAGDKAFTEPFRLVEGTVEGGGETLIVNVEYRGSGPARRAEISDGTYTELDIGGGEVFWAEKMQIFSSTDASDWRALQDGAFYVDGYEITVRAGDTLPAIVAKINDRGAAVKASVDPETRGLMLTGTNPHLIRMEDNQGSRTLEELGIIQFNNDPSAPNWSPSARVAGGSAFDMVIRLRDALFRADKMFIGGLGISGIDLALQNMEGHLTEIGSRHERATMTWTRLNQEIPNVTSMLARESSVNMIDAATDLGMMDFAHKAALQTAAKILPTTLLDFLK

SEQ ID NO: 42723 - DNA, 1056 bp, Unknown
  Obtained from environmental sample
  misc_feature (1)..(1056): n is a, c, g, or t
atggtcagattggccgagaatctgacgaacgccagagctatgggagagttcggggcggtgtcagtcgtgtcggggcttgtaagaggcgtcactacgaccatgccgnctttatatagacatcctttacggcgaatatatgttcaaatcggcctttgcggtagcctcccttctgacgttcttggctttggtgacgatcattgtaaaagcggtcttagagtactttatcgctgtgcaaagaaaatcaaaggaggtggagatacaatcatgagtatagagatacagaatatcaaaaaaacgttcggcaatttcgtcgcgttgaacgacatcagcctgaacattcccaaaggcgagatcaccgcccttctcggtccgtccggttgcggcaagacgacgcttttgcggatcatagccggcttggagacccccgattccggcgtgataagattttccggggaagatcagacaaataaacacgtaaaggatcggaaagtcggtttcgtgttccagcactacgccctcttcaggcacatgaacgtgtttgagaatatagccttcggccttcgggtgcgtccgcgaaaagtacgcccggacaagaaagcgatacatgaaagcgttatgcgcctcgtcgccatggttcaactggatagctacgtcaaccgctttccgtcggaactatccggcggccagcggcagcgcgtcgcgcttgcgagggcgcttgccgtggagccgtcagtgctgctgcttgacgagcctttcggcgcgttggacgcaaaagtaagaaaagaattgcggcggtggatacggcggctgcatgatgagattcacgtcacaagcgttttcgtaacgcacgaccaagacgaggcccttgaggtatcggatactatagtcattgtaaataaaggaaagatagaacaatccggcagcccggaagcggtatgcgactatccggcgaatccgtttgtcgccgactttctgagcgatgtaaacaggccgatagtaacgcaaaagaagaagactttgtcaggggtgataaatgacgataggcaggggatataa

SEQ ID NO: 42724 - protein, 351 aa, Unknown
  Obtained from environmental sample
  DOMAIN (116)...(301): ABC transporter
  misc_feature (1)..(351): Xaa is any amino acid
MVRLAENLTNARAMGEFGAVSVVSGLVRGVTTTMPXLYRHPLRRIYVQIGLCGSLPSDVLGFGDDHCKSGLRVLYRCAKKIKGGGDTIMSIEIQNIKKTFGNFVALNDISLNIPKGEITALLGPSGCGKTTLLRIIAGLETPDSGVIRFSGEDQTNKHVKDRKVGFVFQHYALFRHMNVFENIAFGLRVRPRKVRPDKKAIHESVMRLVAMVQLDSYVNRFPSELSGGQRQRVALARALAVEPSVLLLDEPFGALDAKVRKELRRWIRRLHDEIHVTSVFVTHDQDEALEVSDTIVIVNKGKIEQSGSPEAVCDYPANPFVADFLSDVNRPIVTQKKKTLSGVINDDRQGI

SEQ ID NO: 42725 - DNA, 516 bp, Unknown
  Obtained from environmental sample
  misc_feature (1)..(516): n is a, c, g, or t
ttgaaccatggcgacgaggcgcataacgctttcatgtatcgctttcttgtccgggcgtacttttcgcggacgcacccgaaggccgaaggctatattctcaaacacgttcatgtgcctgaagagggcgtagtgctggaacacgaaaccgactttccgatcctttacgtgtttatttgtctgatcttccccggaaaatcttatcacgccggaatcgggggtctccaagccggctatgatccgcaaaagcgtcgtcttgccgcaaccggacggaccgagaagggcggtgatctcgcctttgggaatgttcaggctgatgtcgttcaacgcgacgaaattgccgaacgtttttttgatattctgtatctctatactcatgattgtatctccacctcctttgattttctttgcacagcgataaagtactctaagaccgcttttacaatgatcgtcaccaaagccaagaacgtcagaagggaggctaccgcaaaggccgatttgaacatatattcgccgtaa

SEQ ID NO: 42726 - protein, 171 aa, Unknown
  Obtained from environmental sample
  misc_feature (1)..(171): Xaa is any amino acid
MNHGDEAHNAFMYRFLVRAYFSRTHPKAEGYILKHVHVPEEGVVLEHETDFPILYVFICLIFPGKSYHAGIGGLQAGYDPQKRRLAATGRTEKGGDLAFGNVQADVVQRDEIAERFFDILYLYTHDCISTSFDFLCTAIKYSKTAFTMIVTKAKNVRREATAKADLNIYSP

SEQ ID NO: 42727 - DNA, 948 bp, Unknown
  Obtained from environmental sample
  misc_feature (1)..(948): n is a, c, g, or t
ttggagccctacaccgaccccaaaaacaacgccacatacgccggccgcgcccgcgatatgctgggcaccataaggacgaccatggtaaaagacggtaagatcttgctgcccggcaattggggcggcgacggggccggcactataaacccgagttatttctcgccggcgtcatacgagatattcgccgaattcgactccgagaacgcgtctgattggaaaacgctcaccgccggggtatacgaaatgctcgcgaaatcccccggatactcacgggggcttgcgccggactggttcacctttgagggcggctccacgggcggcgccggatacaacgcctactttgccggagacgccatgtacatggacgccatcaggatattctggaagatcgggcttcactccatttggcacaaagacgagagggcgaagtcctatctaagcaaagcgataaatttcctcggctctcccgaaaaggcgaacttcttcacaatgaaaggcgagcttcttccagacaccgctattgacgccataagcgacggaaaaggcggcacggtaaagcgcccccgccggatgcacaaccacttgacggtcggaatgtggggcatcgcggccatggccgttggcggcgtggagatggccgagaaatacagcgaggagtttctcaaattctacgatgccgggaacgatttctttgcccacgcttccgacccggagggcgggaacgacacgctgcattgcgatatgtactacgatcagttcttaggctggtttggcgcctcggttttcggcggggcttttacaaacgtgtgggaggatctgaaaaacggcgtcccgcagggcccgccggagtggaaaacgcggcctatcctgaatacgcgggatatcgacgcgagcaaactgccgctgcgcgttaccgcgtcttttaccgctccgttcgctggacagtga

SEQ ID NO: 42728 - protein, 315 aa, Unknown
  Obtained from environmental sample
  misc_feature (1)..(315): Xaa is any amino acid
MEPYTDPKNNATYAGRARDMLGTIRTTMVKDGKILLPGNWGGDGAGTINPSYFSPASYEIFAEFDSENASDWKTLTAGVYEMLAKSPGYSRGLAPDWFTFEGGSTGGAGYNAYFAGDAMYMDAIRIFWKIGLHSIWHKDERAKSYLSKAINFLGSPEKANFFTMKGELLPDTAIDAISDGKGGTVKRPRRMHNHLTVGMWGIAAMAVGGVEMAEKYSEEFLKFYDAGNDFFAHASDPEGGNDTLHCDMYYDQFLGWFGASVFGGAFTNVWEDLKNGVPQGPPEWKTRPILNTRDIDASKLPLRVTASFTAPFAGQ

SEQ ID NO: 42729 - DNA, 693 bp, Unknown
  Obtained from environmental sample
  misc_feature (1)..(693): n is a, c, g, or t
gtggctgttacggggattagggagcttttaagggaaggacatgaacttaaactgccggttgaaaaagatcgatttaccgttttttccaaagacggagtgttattaagcgaaggcggcaggcggaaagggaagataacgttactggataaagatattttaattaacgcagggcttttttttcaaagtaattgttttatgttagaaaaactgactgcggaactgcgcattattgtagaagaggcgaataccaatttgcctatggcggatttatactgcggcgtgggaacatttgcttattttttaaaagatatgtttccgaggattacgcttgcggaggaaaacaaggctgctgtcagtattgcaagggaaaatctaagggagactgacgcggagttttttgccgtccgcgacacagattggccgcgcacattattgcgccgtaaagacgtatttggctttgccgttgtcgatccgcctcgggctgggcttgcgccaaagttggcaacggtattagcgcaggatggaccgcctgtcctcgcctatgtttcctgcgaggccgcttctcttgcccgtgattgtaaaatactgacaaacggcggatatgctcttgagaaactgtcattttttgatttttatccgcagacggcacatatagagagcttggctgtattccgacgtaaccggaatacttag

SEQ ID NO: 42730 - protein, 230 aa, Unknown
  Obtained from environmental sample
  misc_feature (1)..(230): Xaa is any amino acid
MAVTGIRELLREGHELKLPVEKDRFTVFSKDGVLLSEGGRRKGKITLLDKDILINAGLFFQSNCFMLEKLTAELRIIVEEANTNLPMADLYCGVGTFAYFLKDMFPRITLAEENKAAVSIARENLRETDAEFFAVRDTDWPRTLLRRKDVFGFAVVDPPRAGLAPKLATVLAQDGPPVLAYVSCEAASLARDCKILTNGGYALEKLSFFDFYPQTAHIESLAVFRRNRNT

SEQ ID NO: 42731 - DNA, 1236 bp, Unknown
  Obtained from environmental sample
  misc_feature (1)..(1236): n is a, c, g, or t
gtgagaagggcttattataaagcttggaaaaaactaaaaattctaagcattgtgattagtcgtttgccttacctgcaaactttttttgtttttatagcctttgcgttgatggttgctttgagttatatgtatgcaggggatattgaaaacaagcatttagtcagagatgccgaagatacgtttcatagcacggagataaagataaaagcagacttgcaggaacctaaaacaacattgataattttttcgcaaactgttcgttccatgattttaaatggggataaaacttctggattgcaggaatatttttccaaaatcaccagatatatgactgttggcgaagaaaagatgaatagttttgatggcgttcatgcttatttttatgaatttgggttgattgatggatttaacaggcctgtgccggagggctttaatgtgctggaacgcccttggtataaagcggcaattgaggcgaatggaaaagtggctatgacaaacccctacatcaacacttctggcaatctaattgtggcgcattcccgccttatctttgatgataaaggcgaacctttgggggtgatagctttggatataaagctggacagaattagcaggtatgctgttaatgcgcgaatctatgaaggtagctacgggatacttgcagacgaggattttaaaataatcgcccatccagaccctcgctttttagataaaacgctgagacagctcaatgatggtgctttacttgaaaacgcattgaggcaaggaaaggaaatttctggatatgaggtgaaagactatttgggaaaccgatctattttatttgtgagaaaattagaaacaaatggatggtacatggcaattatgaccccaaaggagaagtataacgaaaatttagaaaatatgatgaaggtcatggttgcgctaggtatagtattggctgtggtactaagctttattttactccgcattatatcggcaaagattaaagctgataagctcgttgaaaccatattggatgtaactccgcttgcgttgaacctctgggacaaaaatcttagaaataccaaaaccaatagggaagcggtaaagttgtttgacttgtccaataaagaggaatatttaaatagattttacgaattttcgcctgtgtatcaaccggacggacagctttctagcgagaaggctccagggtatacgcgtaaaacgtttgaagaaggctattgccgtttttga

SEQ ID NO: 42732 - protein, 411 aa, Unknown
  Obtained from environmental sample
  DOMAIN (164)...(243): Cache domain
  misc_feature (1)..(411): Xaa is any amino acid
MRRAYYKAWKKLKILSIVISRLPYLQTFFVFIAFALMVALSYMYAGDIENKHLVRDAEDTFHSTEIKIKADLQEPKTTLIIFSQTVRSMILNGDKTSGLQEYFSKITRYMTVGEEKMNSFDGVHAYFYEFGLIDGFNRPVPEGFNVLERPWYKAAIEANGKVAMTNPYINTSGNLIVAHSRLIFDDKGEPLGVIALDIKLDRISRYAVNARIYEGSYGILADEDFKIIAHPDPRFLDKTLRQLNDGALLENALRQGKEISGYEVKDYLGNRSILFVRKLETNGWYMAIMTPKEKYNENLENMMKVMVALGIVLAVVLSFILLRIISAKIKADKLVETILDVTPLALNLWDKNLRNTKTNREAVKLFDLSNKEEYLNRFYEFSPVYQPDGQLSSEKAPGYTRKTFEEGYCRF

SEQ ID NO: 42733 - DNA, 453 bp, Unknown
  Obtained from environmental sample
  misc_feature (1)..(453): n is a, c, g, or t
atggaaatttccttaagtgaaatttttgattcacgatccgtaattttaaaccttgagggtaaaaccaaggatgcggtttttagtgaactaataaaggcaataacaaaggttcaccctgaatatgatgaatcttctctacattcaatattatggaagcgagaaaaaaggctaagcaccggaattggttccggtattgcaattcctcacgcttattacgaaggaattgacaagattaccggagcaatcggtgtatctcaaacaggcattgaatataacgcgctggatcaacaggcggtcaatattgtgtttatgctcataatcggcgggaaggcgcatgaaaatcatttaaatgtcttaaatcaacttattacacttgcgcaatcagatgcgcccgcaatgataaaaaaagctcaaaaagaagaggctattatagagattttatcccattgctag

SEQ ID NO: 42734 - protein, 150 aa, Unknown
  Obtained from environmental sample
  DOMAIN (7)...(150): Phosphoenolpyruvate-dependent sugar phosphotransferase system, EIIA 2
  misc_feature (1)..(150): Xaa is any amino acid
MEISLSEIFDSRSVILNLEGKTKDAVFSELIKAITKVHPEYDESSLHSILWKREKRLSTGIGSGIAIPHAYYEGIDKITGAIGVSQTGIEYNALDQQAVNIVFMLIIGGKAHENHLNVLNQLITLAQSDAPAMIKKAQKEEAIIEILSHC

SEQ ID NO: 42735 - DNA, 627 bp, Unknown
  Obtained from environmental sample
  misc_feature (1)..(627): n is a, c, g, or t
atgcctgattattttcaaaaggacgagttcgaaggacgcacagttttggtgaaaaaactgaaaatcctgccgtttgaatttattgtaaggggatatatgttcggtaatatgtgggcggcctattccaaaggcgaggaattctgcggtcagaagataaaggaaggttataaacttgcagaaaagcttgacacccctcttttcacaccgtcaacaaaggctcatatcgggcatgatgaatatatcactgttaaatatgtcgctgatactatcggagcggagcttgccggtaaaatagaaaaagtgtgcttcgagctttataacgcctgttacaattacgcttacagtaaaaatattatcatcgccgatacaaaatttgaatttggccttgatgaaaatgataatctctttcttgcggatgaggtcttcacgcctgattcaagcaggttttggagtctttccgattaccaagtgggagtttctcccaaaagttatgataaacagcttgtaagggactggcttcttaataacaaaaaagacggcgagatgcaatttgacaatgtgcctgacgatgtactgagaaaaacgtcagagatatatgcggaatgtctgaaaaagataaccgggtaa

SEQ ID NO: 42736 - protein, 208 aa, Unknown
  Obtained from environmental sample
  DOMAIN (1)...(191): SAICAR synthetase
  misc_feature (1)..(208): Xaa is any amino acid
MPDYFQKDEFEGRTVLVKKLKILPFEFIVRGYMFGNMWAAYSKGEEFCGQKIKEGYKLAEKLDTPLFTPSTKAHIGHDEYITVKYVADTIGAELAGKIEKVCFELYNACYNYAYSKNIIIADTKFEFGLDENDNLFLADEVFTPDSSRFWSLSDYQVGVSPKSYDKQLVRDWLLNNKKDGEMQFDNVPDDVLRKTSEIYAECLKKITG

SEQ ID NO: 42737 - DNA, 432 bp, Unknown
  Obtained from environmental sample
  misc_feature (1)..(432): n is a, c, g, or t
gtgaaaagagtttatgtaaatgagaaatggtgtttaggatgccatttatgtgaatattactgcgcttttgcggaatcaagcgaaagcgacatggcgcgcgcgctgaaaggcataaaaatacgcccgagaattcacatagaaaaaaaagacgacattagtttcgccgtttcctgccggcactgcaaggaaccgtattgcgtcaaaggctgcatcacaggtgctttaacaataaccgatggcgttatcaccataaacaaggataaatgcgtaagttgttttacctgtattatgagctgcccgtacggcgcggtctcgccatccgaagacggtgcggtacaaaaatgcgaactgtgcgtaagtaccgtctccggaactcctgcctgcgtaaaaggatgcccgaacaacgccattgtttttgaggagagagggtaa

SEQ ID NO: 42738 - protein, 143 aa, Unknown
  Obtained from environmental sample
  DOMAIN (82)...(105): 4Fe-4S binding domain
  misc_feature (1)..(143): Xaa is any amino acid
MKRVYVNEKWCLGCHLCEYYCAFAESSESDMARALKGIKIRPRIHIEKKDDISFAVSCRHCKEPYCVKGCITGALTITDGVITINKDKCVSCFTCIMSCPYGAVSPSEDGAVQKCELCVSTVSGTPACVKGCPNNAIVFEERG

SEQ ID NO: 42739 - DNA, 420 bp, Unknown
  Obtained from environmental sample
  misc_feature (1)..(420): n is a, c, g, or t
ttgtttttgaggagagagggtaaatatttgaagtacgttatcatcggcaattccgcggcaggcattggcgcggtagaaggcataagatctgtagataagcaaggcgagatcacaattatcacaaacgaggcgtaccacacatattcgcgcccgctaatttcctaccttttgcttggcaaggttacggaagaaaccatgcggtaccgcggcgataatttttacagggacaataactgcaccgtactggcggataccatcgcggaaaaaattgacgccgccgcgaagaacgtagttttaaaatacggcaaaaaaacaccctacgacaagctgcttgtcgcgaccggttcctctccgtttgtaccgtctttccaggggctcgatacggtaaaggacaaattcacttttatgagccctggatga

SEQ ID NO: 42740 - protein, 139 aa, Unknown
  Obtained from environmental sample
  DOMAIN (11)...(139): Pyridine nucleotide-disulphide oxidoreductase
  misc_feature (1)..(139): Xaa is any amino acid
MFLRREGKYLKYVIIGNSAAGIGAVEGIRSVDKQGEITIITNEAYHTYSRPLISYLLLGKVTEETMRYRGDNFYRDNNCTVLADTIAEKIDAAAKNVVLKYGKKTPYDKLLVATGSSPFVPSFQGLDTVKDKFTFMSPG

SEQ ID NO: 42741 - DNA, 783 bp, Unknown
  Obtained from environmental sample
  misc_feature (1)..(783): n is a, c, g, or t
atgaggattaaggattgtaaaaacttatttttgtatgactgtaaccctggctctcctctgcattgggcatataaaatattcgttctgaaaaaacagtttctttccggcgaagcgttggagaaaccggaactttatcaagctatgttgttaaatccagaagataacagagacaatctgccggaagattatatctctgacattctcgatacattacctgaaaagcaaaaagcccgctttcgtgatggtctttgggttaaagcggagggcgtgatttatgacaagtttgatgaaagcatgattgtcaaggcttctgaccttcctgaacattttgaccgctttgccgccggacaggatttcggtttgaatattactttcgttaagattgcctggcttggcgatgtgatatatgtcctgtgcgattacggcgctttcaacatgactaccttgtcgtttaacgaggaattaaaagcgcggggctggtttgattgtccagacggtatgggcttgcctgtgtactgcgaccctgcggggggtgaacggatacaggaagttacaggcgggactaaagcaaataattctgttgacagcggtattgattttattaacgccaaaattgaacgccgtcaattttttgtttctgaacaatgtaccggggttctttcggagatttgggattactgtagggacgaagcgggacaaattgtaaaggttaatgaccattaccttgacgctttgcgttatgcgatatttacggacgttcagcaaggggttgtattatcatga

SEQ ID NO: 42742 - protein, 260 aa, Unknown
  Obtained from environmental sample
  misc_feature (1)..(260): Xaa is any amino acid
MRIKDCKNLFLYDCNPGSPLHWAYKIFVLKKQFLSGEALEKPELYQAMLLNPEDNRDNLPEDYISDILDTLPEKQKARFRDGLWVKAEGVIYDKFDESMIVKASDLPEHFDRFAAGQDFGLNITFVKIAWLGDVIYVLCDYGAFNMTTLSFNEELKARGWFDCPDGMGLPVYCDPAGGERIQEVTGGTKANNSVDSGIDFINAKIERRQFFVSEQCTGVLSEIWDYCRDEAGQIVKVNDHYLDALRYAIFTDVQQGVVLS

SEQ ID NO: 42743 - DNA, 729 bp, Unknown
  Obtained from environmental sample
  misc_feature (1)..(729): n is a, c, g, or t
gtggacgagaccctcgacgccaggctcaagctcaacaaacgcgccgtagtccgtgatggacaccactttgcccttcaccattgcgttcagtgggtagcgctcctccacggaaagccaagggtcggggaacttctgcttgtagccaagcgacacgcgctcgctttcgcggtcgtacttgagtaccgccacctctatcttgtcgccgacgtggaacatctcgccggggtggttcaggcggccccaggacatgtccgtgatgtgcagaagcccatccacgccgccaaggtcaatgaacgcgccatattcggttatattcttgacctgtccctcgaccagcttgccctcttccaggccggaaagggtttcttccttgaggctggcgttgaccgtctccatgaacagcttgcgggacagcacgatgttgcccctgcggcggttcaccttgatgaccttcatgtcgaaggacttgccgaggaaggggtccaggttgcggaccggcttggagtccacctggctgccggggaggaaggcgcggatgccgatatccacggccagaccgcccttgaccttttccaagacaacgccgtggacggtgaggtttgcgcggaatgccttttccacctcgtcccaaatcttcattttttcggcgcggtcgcggctcaggcgcacgttgcccctggcgtcttcgagatgctcgacgaggacctccacaacgtcgccgacctgtag

SEQ ID NO: 42744 - protein, 242 aa, Unknown
  Obtained from environmental sample
  misc_feature (1)..(242): Xaa is any amino acid
MDETLDARLKLNKRAVVRDGHHFALHHCVQWVALLHGKPRVGELLLVAKRHALAFAVVLEYRHLYLVADVEHLAGVVQAAPGHVRDVQKPIHAAKVNERAIFGYILDLSLDQLALFQAGKGFFLEAGVDRLHEQLAGQHDVAPAAVHLDDLHVEGLAEEGVQVADRLGVHLAAGEEGADADIHGQTALDLFQDNAVDGEVCAECLFHLVPNLHFFGAVAAQAHVAPGVFEMLDEDLHNVADL

SEQ ID NO: 42745 - DNA, 1641 bp, Unknown
  Obtained from environmental sample
  misc_feature (1)..(1641): n is a, c, g, or t
ttgcgccgcgcgagaagcatagagaccattatagtcgcaaatgagtatgaagccctgcttttggaaaacaccctgatcaaacagcatacgcctaaatacaatattaaccttaaagacggtaaaagttatcctgtaatacggataaccgccgacgaattcccaaaagtgttccgcacacgccgtattatagaagataaaagcctgtattacgggccttttcccgatttgcagaaggttaacgccatgatggacataatagataaattgttccctctgcgaaaatgccggacattcaagacgaggacagggccctgcatgtactaccatatacagcgctgtaaggctccgtgctgcggaaagatcgacgcggcggagtaccgccgccatgtcgagccggtacagcggcttctgtccggcgaaaccagtccgcttataatagatttgaccgaaaaaatgcacgaagccagtagagagctccggtttgagcgggccgccatgatcagggacgcgattctggcgattgagggcattgccggtgaaaacagttccgtagttgatttagaccctgaagggagggactacatcgcctgggcctcggaaggtctgctggcttcttttaccattttctcgatgcggggcggaaagatgacgggcagggaactgtaccgggcctgctccgcggctgatgaaaaggacaccctggaagtgtttttgacttcttattataacggcggccgccctccccctccgaaaatctaccttcagcagcgttttgacgacagcctgttgatcggctggtttaagtcaaatttcaactttgagcctgaactcttgtccccggctgaaaaacgccatgaggcggtcatcgcgatggcgcggcaaaacgcccttgaagacctccgcaagaggctgaaggaacgcggcgcgggcccggcgctggacgatctcgcccgcgtccttaacctgccctcaaggccgcagcggattgagggctttgatatcgcgcagcttgacggcaagcatcctgtcgcctcgcttgtctctttcaaaaacggcgcgccggacaagaagaactaccgctatttcaagctgcggagcgttatcggcgtggttgatgattttgccgccatgcgtgaagcggtgcataggcgctattcccggcttatccgcgaggatgccgatttacccgatctggttttgattgacggcggtataggccaggtgaacgccgctaaaggggtgatggacgatctgggcatcgacatccccgttgttggcctcgcgaagcgtgaagaggaactctggctgccccacgctaaagagccgcttgttttatcccggcgttccgaagcgctcaaagtcctccaatttgtccgcgatgaaacccatcgtttcgctacaggccttaaccagaggcttcgctcaaaagacctgttcttccccacgctggaatcggtcgaaggcataggaaaccgcagggcggcgaccattatgaagactttcggctcggttgaaaatatcgccgaagccgatcccgccgggatcgcggaactctgccgtatcagccggtcaagcgccaaagccgtccgcgccgccgcccgcctcgcccttgaggaccgaaagccgcccaaaagcggctaa

SEQ ID NO: 42746 - protein, 546 aa, Unknown
  Obtained from environmental sample
  DOMAIN (142)...(177): UvrB/uvrC motif
  misc_feature (1)..(546): Xaa is any amino acid
MRRARSIETIIVANEYEALLLENTLIKQHTPKYNINLKDGKSYPVIRITADEFPKVFRTRRIIEDKSLYYGPFPDLQKVNAMMDIIDKLFPLRKCRTFKTRTGPCMYYHIQRCKAPCCGKIDAAEYRRHVEPVQRLLSGETSPLIIDLTEKMHEASRELRFERAAMIRDAILAIEGIAGENSSVVDLDPEGRDYIAWASEGLLASFTIFSMRGGKMTGRELYRACSAADEKDTLEVFLTSYYNGGRPPPPKIYLQQRFDDSLLIGWFKSNFNFEPELLSPAEKRHEAVIAMARQNALEDLRKRLKERGAGPALDDLARVLNLPSRPQRIEGFDIAQLDGKHPVASLVSFKNGAPDKKNYRYFKLRSVIGVVDDFAAMREAVHRRYSRLIREDADLPDLVLIDGGIGQVNAAKGVMDDLGIDIPVVGLAKREEELWLPHAKEPLVLSRRSEALKVLQFVRDETHRFATGLNQRLRSKDLFFPTLESVEGIGNRRAATIMKTFGSVENIAEADPAGIAELCRISRSSAKAVRAAARLALEDRKPPKSG

SEQ ID NO: 42747 - DNA, 684 bp, Unknown
  Obtained from environmental sample
  misc_feature (1)..(684): n is a, c, g, or t
atggcaaaggcgggcattggttttcaggaatcgcaaagcgttggaacaaaagtttatgtcgcgtcgcaatgcgacgcgccgtcgttggacaacgcgccgtctaacaggttattcgccggctgtgttgttatttccgatgaaatcaaaccggacagccgtaacgccatatccgcgctgaaagcaaagggcgtgcgaaaaacggtaatgcttaccggggatgctccgaacattgccggggctgtcgccgccgagttgaaactggacgaagtatacggcggtttgctgccccatgaaaaagttgagaaagtggaaattcttaacgctaaaaaaagcgcaaaaggcaaacttgcttttgtcggagacggcataaatgacgcgcctgttctcgcgatggcggatataggcgtagcgatgggcggacttggttccgacgccgctattgaagccgccgatgtcgtgttaatgaccgatgagccttcaaagctgtgcgatgccattgatattgcccgttttacaaaaaaaatcgtatggcaaaacattgtttttgcgttaggtgtaaaatgcgtttttctcgcgctcggcgcttttggcgttgccacaatgtgggaagcggtttttgccgatgtcggggtatcgcttcttgcggtgttgaacgccatgaggataatgagggcagactgttag

SEQ ID NO: 42748 - protein, 227 aa, Unknown
  Obtained from environmental sample
  DOMAIN (3)...(142): haloacid dehalogenase-like hydrolase
  misc_feature (1)..(227): Xaa is any amino acid
MAKAGIGFQESQSVGTKVYVASQCDAPSLDNAPSNRLFAGCVVISDEIKPDSRNAISALKAKGVRKTVMLTGDAPNIAGAVAAELKLDEVYGGLLPHEKVEKVEILNAKKSAKGKLAFVGDGINDAPVLAMADIGVAMGGLGSDAAIEAADVVLMTDEPSKLCDAIDIARFTKKIVWQNIVFALGVKCVFLALGAFGVATMWEAVFADVGVSLLAVLNAMRIMRADC

SEQ ID NO: 42749 - DNA, 606 bp, Unknown
  Obtained from environmental sample
  misc_feature (1)..(606): n is a, c, g, or t
atggcgttcaacaccgcaagaagcgataccccgacatcggcaaaaaccgcttcccacattgtggcaacgccaaaagcgccgagcgcgagaaaaacgcattttacacctaacgcaaaaacaatgttttgccatacgattttttttgtaaaacgggcaatatcaatggcatcgcacagctttgaaggctcatcggtcattaacacgacatcggcggcttcaatagcggcgtcggaaccaagtccgcccatcgctacgcctatatccgccatcgcgagaacaggcgcgtcatttatgccgtctccgacaaaagcaagtttgccttttgcgctttttttagcgttaagaatttccactttctcaactttttcatggggcagcaaaccgccgtatacttcgtccagtttcaactcggcggcgacagccccggcaatgttcggagcatccccggtaagcattaccgtttttcgcacgccctttgctttcagcgcggatatggcgttacggctgtccggtttgatttcatcggaaataacaacacagccggcgaataacctgttagacggcgcgttgtccaacgacggcgcgtcgcattgcgacgcgacataa

SEQ ID NO: 42750 - protein, 201 aa, Unknown
  Obtained from environmental sample
  misc_feature (1)..(201): Xaa is any amino acid
MAFNTARSDTPTSAKTASHIVATPKAPSARKTHFTPNAKTMFCHTIFFVKRAISMASHSFEGSSVINTTSAASIAASEPSPPIATPISAIARTGASFMPSPTKASLPFALFLALRISTFSTFSWGSKPPYTSSSFNSAATAPAMFGASPVSITVFRTPFAFSADMALRLSGLISSEITTQPANNLLDGALSNDGASHCDAT

SEQ ID NO: 42751 - DNA, 852 bp, Unknown
  Obtained from environmental sample
  misc_feature (1)..(852): n is a, c, g, or t
gtgttattttcgtgcggcgcagattcagagcaaatcaaacagggcatggaaagttttttcgagcagaaaatgcccattgtgtcgggaggagaaccgacaaaaaccgtaagtttccacaatattatcgaacgcgcccttattcattgcaagtcagcgcaaaaaggcatggtcgatgtagctgatattcttgtttctctttacgacgaggaacgatgttacagcggctattatctgcgtaaagccggagtaaaacggctggaacttttgcatgtgctctcccacagttacagcgaagacggttttgtaaattctcaaaagaacgaaaaatacgctggtgtcgacgacgacgccgaagcgcagaaaaaagccggtaaaaaaacagcgcttgaacgctacgctatagatttaaccgcccttgcgcgggatcataaactggaacccgtaatcggcagagaagacgagcttgaccgcaccgtacaagtgctttgccgcaggctgaaaaataatcccattcatgttggagattcaggtgtaggaaagacggcgattacggaagggcttgcccagcgaatcattgccggcaatgttcctccgcttcttagaaactttagtatctacgcccttgatatgggttctctccttgccggcacaaagtaccgaggcgattttgaggaaagagtaaaacgggttgtcgaggaactgttaaagaaagaaaagacaatactttttatcgatgaaatacacacccttgtcggggcgggagcggtttccggcggcgcgatggacgcttccaatctgctaagcccgctcttacttcgggcaaactccgctgtatcggctccacacgcatga

SEQ ID NO: 42752 - protein, 283 aa, Unknown
  Obtained from environmental sample
  misc_feature (1)..(283): Xaa is any amino acid
MLFSCGADSEQIKQGMESFFEQKMPIVSGGEPTKTVSFHNIIERALIHCKSAQKGMVDVADILVSLYDEERCYSGYYLRKAGVKRLELLHVLSHSYSEDGFVNSQKNEKYAGVDDDAEAQKKAGKKTALERYAIDLTALARDHKLEPVIGREDELDRTVQVLCRRLKNNPIHVGDSGVGKTAITEGLAQRIIAGNVPPLLRNFSIYALDMGSLLAGTKYRGDFEERVKRVVEELLKKEKTILFIDEIHTLVGAGAVSGGAMDASNLLSPLLLRANSAVSAPHA

SEQ ID NO: 42753 - DNA, 480 bp, Unknown
  Obtained from environmental sample
  misc_feature (1)..(480): n is a, c, g, or t
atgatcagatcggccgaggatcagcatcacctggtggaggatacgggaatcgttttgggccagtgcttcacgaaggcgttaggtgaaaaaaggggaatacggcgcaacgggagctgcctttttcccatggacgagacacttgcccgcgccgcggttgatatttcaggccgcggttttttgttttttgacggccggcttggcgcagcgccactattggctgccgatgatccggacgggcttttccggttccaggtcgacaccattgaagatttttggcagggttttacaggcgcggccggctgcaatctgcatttagaaatactccggggcagaagcgaccaccacaaaatagaggccatgttcaaggcggccgcccgttccctccgttcagcctgcgaatttgacgagcgcgcgcgtgacgcgatcccctcgacaaaaggatcgctgccaggctttgactcgccgggagtactggtatga

SEQ ID NO: 42754 - protein, 159 aa, Unknown
  Obtained from environmental sample
  DOMAIN (1)...(129): Imidazoleglycerol-phosphate dehydratase
  misc_feature (1)..(159): Xaa is any amino acid
MIRSAEDQHHLVEDTGIVLGQCFTKALGEKRGIRRNGSCLFPMDETLARAAVDISGRGFLFFDGRLGAAPLLAADDPDGLFRFQVDTIEDFWQGFTGAAGCNLHLEILRGRSDHHKIEAMFKAAARSLRSACEFDERARDAIPSTKGSLPGFDSPGVLV

SEQ ID NO: 42755 - DNA, 636 bp, Unknown
  Obtained from environmental sample
  misc_feature (1)..(636): n is a, c, g, or t
atgaacatctttaaacagttgtgtcggacgcttgtgttgtcggcggtggcggtggcgttgtcggttgggttgatggggtgtcctccgccggatgttccggatgataatcccgttacgcctaacaacaacaccagaggttcgttctcctacaacggtcaaacatacaagactgtcaagataggcagtcagacgtggatggcggagaatatgaattatgcgacggaagattcttggtgccttgaaaaagacgagtacaattgcacgaataaaggcaaaggcaggctgtacagttggaagatggcgatgacggtctgtccgagtgaatggcacttgccgtcagctggagagtgggccgatttgaggaattttgtgggtggggctaagaagttgatgacaacaaccgattggggtgacggcgttggcacggacgaatttggttttgccgctgtgcctagcggaattcgcaccacttggaatgatggtttcatctacaaggacgaggcttggtggtggacatcgtcggagaaggatgagaaaaaagcctacaatcaagcactgagaggcggcggctatggaatgaatacttatgacgacgaaaaacgtaacggactggctgtgcgttgtctaaaagactaa

SEQ ID NO: 42756 - protein, 211 aa, Unknown
  Obtained from environmental sample
  SIGNAL (1)...(26)
  misc_feature (1)..(211): Xaa is any amino acid
MNIFKQLCRTLVLSAVAVALSVGLMGCPPPDVPDDNPVTPNNNTRGSFSYNGQTYKTVKIGSQTWMAENMNYATEDSWCLEKDEYNCTNKGKGRLYSWKMAMTVCPSEWHLPSAGEWADLRNFVGGAKKLMTTTDWGDGVGTDEFGFAAVPSGIRTTWNDGFIYKDEAWWWTSSEKDEKKAYNQALRGGGYGMNTYDDEKRNGLAVRCLKD

SEQ ID NO: 42757 - DNA, 537 bp, Unknown
  Obtained from environmental sample
  misc_feature (1)..(537): n is a, c, g, or t
atggatagagtacatttgcatttagacaacagcacgatagtctggcaatgcgacagtggaaataccggagaaggtatagattattctgacctatgccttcaacatgacgtaattatgataggtccgggaaatagcggtccgtattatcatggttgtttaacttcgcctgaatttgaagccgcttgcagagaaggtggggaaaatgtgaacagcacgaggagatatgttcggaatatcgccgtagatatggcagaaggtgagattgttgttcttaaacgcggtctatcagttgttcgcggtgttggcgtagttgtaggtgggtatcagcattaccctaatttcagggatatacgcggctggaatgtgtgtcattgcaggcgcgtgcgttggttttgggaagagggccatattttcaactctcatcctttggcgcagaacagattgtcgaagttatgggtagaagaagtgcgtaattggttaagaacaataagttatcgtgaatccgatatgaccagaccgctacgcccgctaccgtaa

SEQ ID NO: 42758 - protein, 178 aa, Unknown
  Obtained from environmental sample
  misc_feature (1)..(178): Xaa is any amino acid
MDRVHLHLDNSTIVWQCDSGNTGEGIDYSDLCLQHDVIMIGPGNSGPYYHGCLTSPEFEAACREGGENVNSTRRYVRNIAVDMAEGEIVVLKRGLSVVRGVGVVVGGYQHYPNFRDIRGWNVCHCRRVRWFWEEGHIFNSHPLAQNRLSKLWVEEVRNWLRTISYRESDMTRPLRPLP

SEQ ID NO: 42759 - DNA, 579 bp, Unknown
  Obtained from environmental sample
  misc_feature (1)..(579): n is a, c, g, or t
gtgccaaaaattaaaatatgtgggttgttcagagagcaagatattgagtttgcaaatgaggcaaaaccagattttgtgggctttgtttttgctaaaagccaccgacaaatcaattctgaaatggcggctttgtttaaaaagcggttaaatacgcaaataactaccgttggcgtgtttgtgaatgcggaaattccttctataaccaagctttataattctggcataataaatattgcgcaactgcacggtagcgaaagcgaagattatataaatactctaaaagaaacttgcgatgttcctgttataaaagccgtgaacatagaaagtgcaaaacctgcaaatgcagactacctgctttttgataatggcaaaggcggaacgggcaaggcttttgattggaatttaattcctaaatgcgacaaggaatttttcttggctggcggcataaatttaaataacattaaagaagccgtaaagctgaacccttacggcatagatttgagcagtggggtggaaaatgaaaaaggcgaaaaagacagggagaaaataattgaagcctgccgaattgtgaagggttaa

SEQ ID NO: 42760 - protein, 192 aa, Unknown
  Obtained from environmental sample
  DOMAIN (4)...(192): N-(5'phosphoribosyl)anthranilate (PRA) isomerase
  misc_feature (1)..(192): Xaa is any amino acid
MPKIKICGLFREQDIEFANEAKPDFVGFVFAKSHRQINSEMAALFKKRLNTQITTVGVFVNAEIPSITKLYNSGIINIAQLHGSESEDYINTLKETCDVPVIKAVNIESAKPANADYLLFDNGKGGTGKAFDWNLIPKCDKEFFLAGGINLNNIKEAVKLNPYGIDLSSGVENEKGEKDREKIIEACRIVKG

SEQ ID NO: 42761 - DNA, 915 bp, Unknown
  Obtained from environmental sample
  misc_feature (1)..(915): n is a, c, g, or t
atgaagcggcggtccctgttttcgggcagcagcgggttcaggctctacgacgtatataccgagggtggatcggttaacgagaatgttttcgcgtatcccaaccgcgcgtggattcacggtcacgatgaaagggcgcttatcttctataataactcgtattacgagactgccggctggattaaaaccagcgatccggcgattccccatggcagcggcgtaagacagcgggacagcctgcacgaggcccttgccctgcaccatgggaataactggtttacgctgttcagggatcagcgttccaacctgtggtatataagatcatcaaaacagataaacgagaacgggttctttgtcgcgcttaaaggctatgaggcgcaggtcttcattgacatatacgagattgaggatgacgcgaaaggccgttgggcgcgcctgcaccacgacttgcagggccgcggagtgagtaatccccaatcggctattatggatatttatcttggcgacctgtattaccgtttcttaaagctcctcaagccggagcttgtctgccaactgcacgacttctttaccgcgggcacggtggacaaacagaaagcccatgcctttgttgaatcgcttaaagagacggcggagaagtattttgaaaccgtggcgtactttatcaggggggcggacgggaagtttgaaccctgggaacagggaacagggaacagggaacagggacgcaaagagggcacggcgtcaagccgtgtttctgagaatatgcagcagtgcgggagccccaaaaatggccgcagtatgccagataagcgcgaaggctttagcctgagcagtgggcgtatggaacagggaacagagggaagattgttttttgctactctatttatggtgnaaatctgttctttttcacgctag

SEQ ID NO: 42762 - protein, 304 aa, Unknown
  Obtained from environmental sample
  misc_feature (1)..(304): Xaa is any amino acid
MKRRSLFSGSSGFRLYDVYTEGGSVNENVFAYPNRAWIHGHDERALIFYNNSYYETAGWIKTSDPAIPHGSGVRQRDSLHEALALHHGNNWFTLFRDQRSNLWYIRSSKQINENGFFVALKGYEAQVFIDIYEIEDDAKGRWARLHHDLQGRGVSNPQSAIMDIYLGDLYYRFLKLLKPELVCQLHDFFTAGTVDKQKAHAFVESLKETAEKYFETVAYFIRGADGKFEPWEQGTGNREQGRKEGTASSRVSENMQQCGSPKNGRSMPDKREGFSLSSGRMEQGTEGRLFFATLFMVXICSFSR

SEQ ID NO: 42763 - DNA, 1254 bp, Unknown
  Obtained from environmental sample
  misc_feature (1)..(1254): n is a, c, g, or t
atggccagaagcgacgccgacattatccttatgccggaaagctccgcgagcgaaatacaattatccgcggaaaacaatgcccgtattactgatagagtatcatatctctacaaaatggaaaaatcagacagtactccccggcaacaggaaatggcagcgcttaaaggcgaatacaaggccgattccggaaaaaccaatgttactgtttgttttgaagacttcggttgcgacgccatcttcgtagacgaggcccatcgctataaaaacttgttcagctcctctctttcgcgcgaaaccggcatgaacgacggcaggcagtccgcgaaggccatgtcgctttataaaaaatgcgaatatatcagggagcaaaacgacaacaaaaacgtatacctcctgacggcaacgccgctaaccaattccccgcttgaatattacaacatgatgcaatatgtcgctccggaggagctgaggcgcatgggcatccttaccattgacggctttattcgtgaatttgcaaatatcgagcagggatggctctatgactggggaagcggacaggcaaaacaaggcaatattcttaccggctttaaaaacctttccacgcttcaaaacctgtttttcgcttatacggatttacaaaataatccagaagccatcggccttgaaaaaccttcggcggaaaaccacccgcatattatcgcggccgataaaaaacagacgacggccgtcagagctatttccgtcgaacttgaccgctataaatctcttcaagccgcagagcgccagatagagtttcccgggcaaaacttccttacgttctattcccaaatgcgaacggcaagccttgaccttgaactttataatcctgtcaaatacaaaaactggaataaccctaagcttgaagcccttgcgaataacgcttttaccaattacaaggagactaaagggcttgatttcttgatggtcagggtcagtccacgcagggcggcaagccggggatcgccctcgccgcggttgcagacgcaggcgccttcgttcagattgcgcccgcaaacagggcacaatcccgcgcagtcgaaccggcacagggggtggaccggcagggagagcgagaattcttcccacaacagcgcggccagattgatttccgggccgttttcccccagacgcatgacgttttcgtcagcatccgcatccgtttccgcatcagaagggagccggatcggaaccggttcaaacgtctcaaaagactga

SEQ ID NO: 42764 - protein, 417 aa, Unknown
  Obtained from environmental sample
  misc_feature (1)..(417): Xaa is any amino acid
MARSDADIILMPESSASEIQLSAENNARITDRVSYLYKMEKSDSTPRQQEMAALKGEYKADSGKTNVTVCFEDFGCDAIFVDEAHRYKNLFSSSLSRETGMNDGRQSAKAMSLYKKCEYIREQNDNKNVYLLTATPLTNSPLEYYNMMQYVAPEELRRMGILTIDGFIREFANIEQGWLYDWGSGQAKQGNILTGFKNLSTLQNLFFAYTDLQNNPEAIGLEKPSAENHPHIIAADKKQTTAVRAISVELDRYKSLQAAERQIEFPGQNFLTFYSQMRTASLDLELYNPVKYKNWNNPKLEALANNAFTNYKETKGLDFLMVRVSPRRAASRGSPSPRLQTQAPSFRLRPQTGHNPAQSNRHRGWTGRESENSSHNSAARLISGPFSPRRMTFSSASASVSASEGSRIGTGSNVSKD

SEQ ID NO: 42765 - DNA, 519 bp, Unknown
  Obtained from environmental sample
  misc_feature (1)..(519): n is a, c, g, or t
gtgatcgtggatgatctcgcggtctggacggcgcccttgcgcgaattcgatgtgccctgtacagtgctttcgccgttcaaggccgacgtttttctgctcaggcaggaggacggctgctttgtccgcggacggctggccggcgcagtcagcctgccctgcgaccgttgcgcggaagagttccggacagtcatcgatcagtcttttgagacgtttgaaccggttccgatccggctcccttctgatgcggaaacggatgcggatgctgacgaaaacgtcatgcgtctgggggaaaacggcccggaaatcaatctggccgcgctgttgtgggaagaattctcgctctccctgccggtccaccccctgtgccggttcgactgcgcgggattgtgccctgtttgcgggcgcaatctgaacgaaggcgcctgcgtctgcaaccgcggcgagggcgatccccggcttgccgccctgcgtggactgaccctgaccatcaagaaatcaagccctttagtctccttgtaa

SEQ ID NO: 42766 - protein, 172 aa, Unknown
  Obtained from environmental sample
  DOMAIN (1)...(158): Uncharacterized ACR, COG1399
  misc_feature (1)..(172): Xaa is any amino acid
MIVDDLAVWTAPLREFDVPCTVLSPFKADVFLLRQEDGCFVRGRLAGAVSLPCDRCAEEFRTVIDQSFETFEPVPIRLPSDAETDADADENVMRLGENGPEINLAALLWEEFSLSLPVHPLCRFDCAGLCPVCGRNLNEGACVCNRGEGDPRLAALRGLTLTIKKSSPLVSL

SEQ ID NO: 42767 - DNA, 576 bp, Unknown
  Obtained from environmental sample
  misc_feature (1)..(576): n is a, c, g, or t
ttggaaaacgattcaagtaaaatccgctccatactagacaaaaaccgccttatgcacacttcatctagaaaggctcatcaagatacggattttgaagcggaaattactttgaacagacaaagtttggatgcgtttccaaatatgcttcccgttatgggagttatcagcaggcatttttcagaggagcatcaagcaactgattttgcagcagcgatgaatgaatctgtttttgcaacagctagcggaaaagttgttttcgctggcgataatggcaatctggggcttatggttgaaatagaccacggaggaggatttacaacccgttattctcatttagctaggatttccacaaaaaaaggaaataacgtacgcaaaagcgaagtaattggctttgttggcaacaccggtaactccagcgctccgcatttgcattacgaaattatgcacaacggaaaatttgtggatccagaattgtattttagaggaggatacatgggctcaaaaagatatttcggtaggctatgccctatttatagcgtgtgcagctgctataggcggctttttgttcggttttga

SEQ ID NO: 42768 - protein, 191 aa, Unknown
  Obtained from environmental sample
  DOMAIN (61)...(156): Peptidase family M23
  misc_feature (1)..(191): Xaa is any amino acid
MENDSSKIRSILDKNRLMHTSSRKAHQDTDFEAEITLNRQSLDAFPNMLPVMGVISRHFSEEHQATDFAAAMNESVFATASGKVVFAGDNGNLGLMVEIDHGGGFTTRYSHLARISTKKGNNVRKSEVIGFVGNTGNSSAPHLHYEIMHNGKFVDPELYFRGGYMGSKRYFGRLCPIYSVCSCYRRLFVRF

SEQ ID NO: 42769 - DNA, 576 bp, Unknown
  Obtained from environmental sample
  misc_feature (1)..(576): n is a, c, g, or t
atgagcgaaacgcactaccatatagaggccgtccncaataaatgccgcgcctgccgccgctgtgaaatcgcatgcatcgccgcgcaccacggtctgagcttcaaagacgccatgaaacgccgcgatgaactggtttcgcgcgtacacgtcatcaaggacgaagcattcaaaacgaccgtgcgctgccaccagtgcaaccccgcgccttgcgcggcagtttgccccatgaccgccctccagcaggagccggacggcgagattgtcatgcgggtgcaattttgcgccggatgtaaaatgtgcatccaggtgtgcccctacggcgccattgacatggaaacgctcggcatgcccggtgaaaacgaggaaaccatggcccagcgcgtccgcagggatgtcgccgtgcgttgcgacatgtgcaagggctggcgcatcagtgaaggcaaaaagctgaccgcctgcgtcgaagcctgccccgcgcgcgctctcagtatggtcggttccgacggttccgtcttcatggcgcccccgccgccgcccaaggccaagggtgagaaagaggaagcggccgaacaatag

SEQ ID NO: 42770 - protein, 191 aa, Unknown
  Obtained from environmental sample
  DOMAIN (87)...(110): 4Fe-4S binding domain
  misc_feature (1)..(191): Xaa is any amino acid
MSETHYHIEAVXNKCRACRRCEIACIAAHHGLSFKDAMKRRDELVSRVHVIKDEAFKTTVRCHQCNPAPCAAVCPMTALQQEPDGEIVMRVQFCAGCKMCIQVCPYGAIDMETLGMPGENEETMAQRVRRDVAVRCDMCKGWRISEGKKLTACVEACPARALSMVGSDGSVFMAPPPPPKAKGEKEEAAEQ

SEQ ID NO: 42771 - DNA, 567 bp, Unknown
  Obtained from environmental sample
  misc_feature (1)..(567): n is a, c, g, or t
atggttttgttaatcgacaattacgacagtttttcgtataacctgtatcagcttatcggctcaatagacccggttataaaagttgtgcgtaacgatgaaataggtgttgatgaaataaaatctctcgctcctgacttcattgtgatttctccggggccgggcaaaccttccgaagcgggcatttgcattgaagctgtcaagcggcttggttcatgcataccggtactgggtatttgtctcggccatcaggcgatatatgaagcattcggcggcactgtatcttacgcaagcaagttgatgcacggtaaatcttcaatgataacgcttgacggggagaacgctctgttcaaaaggcttccgcaaaccatacaggcggcgcgttatcattcattggccggcattaagccaaccttgcccgctgtactgaaaatcaccgcatggacagaagacggcgaaattatggccgtttgccataaagagtatccggtatacggcgtgcagtttcaccctgagtctattcttacgcccaacggaaaaacaattatcgaaaattttttaaaaagctga

SEQ ID NO: 42772 - protein, 188 aa, Unknown
  Obtained from environmental sample
  DOMAIN (24)...(171): Peptidase C26
  misc_feature (1)..(188): Xaa is any amino acid
MVLLIDNYDSFSYNLYQLIGSIDPVIKVVRNDEIGVDEIKSLAPDFIVISPGPGKPSEAGICIEAVKRLGSCIPVLGICLGHQAIYEAFGGTVSYASKLMHGKSSMITLDGENALFKRLPQTIQAARYHSLAGIKPTLPAVLKITAWTEDGEIMAVCHKEYPVYGVQFHPESILTPNGKTIIENFLKS

SEQ ID NO: 42773 - DNA, 360 bp, Unknown
  Obtained from environmental sample
  misc_feature (1)..(360): n is a, c, g, or t
gtgttttacgcgggcccgactcccgcaaaaccgcccaggccaatcggctgcatagggccgacaacctcagggagaatggacaagtactctcccctgttaatcccgaagggcttaaaggtaatgattggaaaaggaaaccgcaacagggaagttatcgaagctatcgttaaacaccgtggcctttatttagcggccataggcggcgtcgctgctcttatggcaaaaaccgttaaatccgccaaagttatcgcctttgaagagcttggaacagaagcggtgatggaacttgaagtagaaaatttccccgccatcgtcgcgatagattgctggggaaataatttgtacagttattcgccgtag

SEQ ID NO: 42774 - protein, 119 aa, Unknown
  Obtained from environmental sample
  DOMAIN (1)...(119): Fumarase C-terminus
  misc_feature (1)..(119): Xaa is any amino acid
MFYAGPTPAKPPRPIGCIGPTTSGRMDKYSPLLIPKGLKVMIGKGNRNREVIEAIVKHRGLYLAAIGGVAALMAKTVKSAKVIAFEELGTEAVMELEVENFPAIVAIDCWGNNLYSYSP

SEQ ID NO: 42775 - DNA, 468 bp, Unknown
  Obtained from environmental sample
  misc_feature (1)..(468): n is a, c, g, or t
atggataactttcacagacttccctccgcgtgccttgtaacgtggcagccgatattcaccgcgacaggaagtcccgctatgtgggtggggaaggtttcaatgttcacgcttagggctgtcgtcgtgccgccgaaacccgccgggcctatgccaagcgaatttattttttcaagcagttctttttctacgccgcgccaaaactcattcgcgttagcggaaccgacaggccgcaaaagcgctttcttgcccaaaagcgcgcatttttccattgttcccccgattcctacgccgacaataaccggagggcagggattggctccggcctttgacactgtattgataataaagctctttattccttcgatgccgtcagaagggttcagcataaccagcgcgcccatgttttcgcttccgaaaccttttggcgcgacggttatttttattttatcgcctttagtgattgaataa

SEQ ID NO: 42776 - protein, 155 aa, Unknown
  Obtained from environmental sample
  misc_feature (1)..(155): Xaa is any amino acid
MDNFHRLPSACLVTWQPIFTATGSPAMWVGKVSMFTLRAVVVPPKPAGPMPSEFIFSSSSFSTPRQNSFALAEPTGRKSAFLPKSAHFSIVPPIPTPTITGGQGLAPAFDTVLIIKLFIPSMPSEGFSITSAPMFSLPKPFGATVIFILSPLVIE

SEQ ID NO: 42777 - DNA, 714 bp, Unknown
  Obtained from environmental sample
  misc_feature (1)..(714): n is a, c, g, or t
ttggggaaaaaagtaatcctgacaattatcgaaaacgcgaaaatcgcaagggaagagcagatcncaatctgtcaggacaccggcatggcggttgtttttgtcgagcttggaaccgatgcgcatttttcaggagaccttgaaggggcaataaacgaaggcgtccgccgcgggtacaaaaatggctatttaagaaattccgtggtaagggatccaattgacagggtaaatacccaggacaataccccggcggtaattcattattcaatcactaaaggcgataaaataaaaataaccgtcgcgccaaaaggtttcggaagcgaaaacatgggcgcgctggttatgctgaacccttctgacggcatcgaaggaataaagagctttattatcaatacagtgtcaaaggccggagccaatccctgccctccggttattgtcggcgtaggaatcgggggaacaatggaaaaatgcgcgcttttgggcaagaaagcgcttttgcggcctgtcggttccgctaacgcgaatgagttttggcgcggcgtagaaaaagaactgcttgaaaaaataaattcgcttggcataggcccggcgggtttcggcggcacgacgacagccctaagcgtgaacattgaaaccttccccacccacatagcgggacttcctgtcgcggtgaatatcggctgccacgttacaaggcacgcggagggaagtctgtga

SEQ ID NO: 42778 - protein, 237 aa, Unknown
  Obtained from environmental sample
  DOMAIN (1)...(237): Fumarate hydratase (Fumerase)
  misc_feature (1)..(237): Xaa is any amino acid
MGKKVILTIIENAKIAREEQIXICQDTGMAVVFVELGTDAHFSGDLEGAINEGVRRGYKNGYLRNSVVRDPIDRVNTQDNTPAVIHYSITKGDKIKITVAPKGFGSENMGALVMLNPSDGIEGIKSFIINTVSKAGANPCPPVIVGVGIGGTMEKCALLGKKALLRPVGSANANEFWRGVEKELLEKINSLGIGPAGFGGTTTALSVNIETFPTHIAGLPVAVNIGCHVTRHAEGSL

SEQ ID NO: 42779 - DNA, 906 bp, Unknown
  Obtained from environmental sample
  misc_feature (1)..(906): n is a, c, g, or t
ttgttttgcggatgtaagtctgcttcaaagaacggcggggtcaatcagagtttcccggccgggcgggttgggaatagcgttgatttagataaccttcataaagaacaggaacattttgacaacttgtctttgaagtaccccgttatattggttcatgggattgccagtcgtgatcgtaatgatgatgcctccgtcacatggggaagaattccgcgtatattgagggagaacgggattgaagtatattttggaaatacggacgcgtggggaactattgaatcaaacgcggaattattaaaaacaactgtagacaaagtattgaaggaaacaggaaaagaaaaagttaatataatagcgcattccaaaggcggcctggattcccgttgtttgatatggaaatataactatcaggacaaggtagcaagcctgactacagtatcaacgccgcatcatggcgcggttcttgcggatatgattctaagtttaaaatctattcataccaaagccgcgaaaaaaaccttgggagatttggaaaaattgtacaaggatatatatcccgatatttataccgcaggctataatttaacaacggcaaatatgaaggaatttaacaaaatggtaacaatggatgacatagtattctatcaaagtatttattcggtaatgaacaatgccggggatgatctgctttttaccgccagctataaatatataaaaaaggaagcaggggcgaacgacggcatggtaaatgaatcttccgcaagatggggaaataatattaccaaagtagaaggcggaatatcccatgtacaaattgttgatgttatggggaaagaacagtttggtatgaaaattcccaatatttatttgagaattgtaaatgatttgggacagaaagggttttag

SEQ ID NO: 42780 - protein, 301 aa, Unknown
  Obtained from environmental sample
  DOMAIN (42)...(267): PGAP1-like protein
  misc_feature (1)..(301): Xaa is any amino acid
MFCGCKSASKNGGVNQSFPAGRVGNSVDLDNLHKEQEHFDNLSLKYPVILVHGIASRDRNDDASVTWGRIPRILRENGIEVYFGNTDAWGTIESNAELLKTTVDKVLKETGKEKVNIIAHSKGGLDSRCLIWKYNYQDKVASLTTVSTPHHGAVLADMILSLKSIHTKAAKKTLGDLEKLYKDIYPDIYTAGYNLTTANMKEFNKMVTMDDIVFYQSIYSVMNNAGDDLLFTASYKYIKKEAGANDGMVNESSARWGNNITKVEGGISHVQIVDVMGKEQFGMKIPNIYLRIVNDLGQKGF

SEQ ID NO: 42781 - DNA, 831 bp, Unknown
  Obtained from environmental sample
  misc_feature (1)..(831): n is a, c, g, or t
atgaaaactgatttgttaaccggaaatataacgaagtcattgcttattttcgcggttcccatgttattatccaatatatttcaacagttgtataataccgcggatatggtgatcgtagggcattatctcggtgaaacgtctcttgccgccgttggcgcgtgcgcggtaatatttgaattgcttataggtttcgctataggtattggcagaggttttggcattgttgtggcccggtattatggcgctggcgatcaggacatgttcaagcgtacggtcgccggctcggttgcaatcggtatcatagtgacgctttttatctcgcttaccgcgagtctgtttatgctaccgttgttaaaattgattaacgtaccggtatacataattgacacggcatactcgtatatctcgcttttaaccgccttttcggttgtaacttttacctacaatctttgcgcgggacttctgcacgctataggcaacagtacaatgccgtttttatttctggttatttcttctatactgaacataatattcgatgttatttttattacaagttttaatatgggagtccgcggcgcggcggtggctaccgttgcggcgcaaagcatctcgacaacgctctgtctggtttatattttcaggaaatgcccgatacttattccctcacaaaaacatttccgttatgatgctacgttgtacaaagagcttgtgggcgcagggcctttccatgggatttatgatgtcgattgtaactttcggctctgtcgcgcttcaacgcgccataaacgggctgggttatctggtaatagcggggcatataacggcgcgtaa

SEQ ID NO: 42782 - protein, 276 aa, Unknown
  Obtained from environmental sample
  DOMAIN (20)...(181): MatE
  misc_feature (1)..(276): Xaa is any amino acid
MKTDLLTGNITKSLLIFAVPMLLSNIFQQLYNTADMVIVGHYLGETSLAAVGACAVIFELLIGFAIGIGRGFGIVVARYYGAGDQDMFKRTVAGSVAIGIIVTLFISLTASLFMLPLLKLINVPVYIIDTAYSYISLLTAFSVVTFTYNLCAGLLHAIGNSTMPFLFLVISSILNIIFDVIFITSFNMGVRGAAVATVAAQSISTTLCLVYIFRKCPILIPSQKHFRYDATLYKELVGAGPFHGIYDVDCNFRLCRASTRHKRAGLSGNSGAYNGA

SEQ ID NO: 42783 - DNA, 804 bp, Unknown
  Obtained from environmental sample
  misc_feature (1)..(804): n is a, c, g, or t
atgttatttttattacaagttttaatatgggagtccgcggcgcggcggtggctaccgttgcggcgcaaagcatctcgacaacgctctgtctggtttatattttcaggaaatgcccgatacttattccctcacaaaaacatttccgttatgatgctacgttgtacaaagagcttgtgggcgcagggcctttccatgggatttatgatgtcgattgtaactttcggctctgtcgcgcttcaacgcgccataaacgggctgggttatctggtaatagcggggcatataacggcgcgtaaaatcaacagtttctgtatgatgccgatgaataccatagccattgcgctctctacatttgtttcacagaacaagggggcgaaccaactgagccgcatacgaaaggcggtgcgttacggtaactgtattgtggtaacatggggcgtgtttatatcagttgttcttatgttttcttcaaaagttctgataagattactttccggttcgaatgagagtattattattgaaaacggcgcgcggtatctcatgataaactcgccgttttacaccgttcttggcatgctgtttatttttcgcctcgcgctccagggaataggaaaaaaaatcgttccgcttatctccagcgtcatagagtttgtcagtaaaatactgttttcttttctgttagtgcccgttctcggttacttcggcgtgattatctgtgaaccgataatatggtgcgttatgtttttgcagttattgtattcattttatacgaatccgtatattaagggaaagataataatttaa

SEQ ID NO: 42784 - protein, 267 aa, Unknown
  Obtained from environmental sample
  DOMAIN (64)...(226): MatE
  misc_feature (1)..(267): Xaa is any amino acid
MLFLLQVLIWESAARRWLPLRRKASRQRSVWFIFSGNARYLFPHKNISVMMLRCTKSLWAQGLSMGFMMSIVTFGSVALQRAINGLGYLVIAGHITARKINSFCMMPMNTIAIALSTFVSQNKGANQLSRIRKAVRYGNCIVVTWGVFISVVLMFSSKVLIRLLSGSNESIIIENGARYLMINSPFYTVLGMLFIFRLALQGIGKKIVPLISSVIEFVSKILFSFLLVPVLGYFGVIICEPIIWCVMFLQLLYSFYTNPYIKGKIII

SEQ ID NO: 42785 - DNA, 1233 bp, Unknown
  Obtained from environmental sample
  misc_feature (1)..(1233): n is a, c, g, or t
atgaaaaaaacaaatgacgttctggaaggcgtcctggacgaaattgaaaacaatctcaaagacgatatcaatgccgatatactggctgatgaattttccgtatcttcaatccatttacagcggctttttaagcaaatgttcaaaaaaccgataggaacatatatccgctcccggaaattgtcggcaagcataggggatttattgtacagcgggttaaatgttcaggatattgctttggattacggttttagttatgaacaagcttatatattaagctttaagcgtgaattcggctttaccccgggcgatttacgcaaaagcaaatattttgtaagaaccactccgccactaaagcctttttgccaaaaggctgtatataaaaacgattttctgttcggcaacatcataaacgaaagatatatggacggcgcttattttgatgttataaagaatcattttaatattattacccccgaaaacgacttaaagcctgtttcggtaacatcaaacaggggcggcgcgtacaactggtcatatgcggacaaaatcgtgaatagatctctggaaaacggcatgcttgttcacggtcatgttttagtatggcacgattggactcccgaatggatgaccaaaggaacaagggcggaagtggaagacaacctaaaaaattatattaccgatgtaataaatcattatcgcggcaagattcattcgtgggatgtggtgaacgaggcggtaaggaactttcttcccgcgcaggaaaccagagactggaaaaagtgcctgcgtaccgataacccatggtatcgcgctttaggcgcaagctatattgaaactgccttccgcgccgcgcgggaagccgacccggatattacactttattacaatgataattggctggaatggccgactaaaaccgaagcggtatggaaaatgatcaatgatataaacaatcggtataaaaaagaaacagggcaggatcgcagccttattgaaggcttagggatacaatcccattacgatgccaaatggtttgatgaaaaaagagtacagatgtctatggataaactgaaaaccttaaacattgaattatctataagcgaactggacgtaaatttcgccgattacaaggaaggcagcggaaatgacattatcatgtctgaatatgacgccgcggtacaggcaaggatatatgcccaacttttcaggatataccgggaatattccgcgtaa

SEQ ID NO: 42786 - protein, 410 aa, Unknown
  Obtained from environmental sample
  DOMAIN (123)...(410): Glycosyl hydrolase family 10
  misc_feature (1)..(410): Xaa is any amino acid
MKKTNDVLEGVLDEIENNLKDDINADILADEFSVSSIHLQRLFKQMFKKPIGTYIRSRKLSASIGDLLYSGLNVQDIALDYGFSYEQAYILSFKREFGFTPGDLRKSKYFVRTTPPLKPFCQKAVYKNDFLFGNIINERYMDGAYFDVIKNHFNIITPENDLKPVSVTSNRGGAYNWSYADKIVNRSLENGMLVHGHVLVWHDWTPEWMTKGTRAEVEDNLKNYITDVINHYRGKIHSWDVVNEAVRNFLPAQETRDWKKCLRTDNPWYRALGASYIETAFRAAREADPDITLYYNDNWLEWPTKTEAVWKMINDINNRYKKETGQDRSLIEGLGIQSHYDAKWFDEKRVQMSMDKLKTLNIELSISELDVNFADYKEGSGNDIIMSEYDAAVQARIYAQLFRIYREYSA

SEQ ID NO: 42787 - DNA, 840 bp, Unknown
  Obtained from environmental sample
  misc_feature (1)..(840): n is a, c, g, or t
atggagaagaaaatgagaaaacaatcagtaacaaatagaatcatatcggtattgatttgctgctttttatcggcatgtgctttatcaaaatcaaatgagggacaggaaatgaaacaagattcgaagaatcaggattcaaagaatcaagaaccaaccgggataatatttaacggcaacagcggtggaagcaaacctttggaaggcactccttacagttatgaaatatggagcgccagcgggaataataatcggattatttggcgcgggcccgatacaggcggcggcgcggcgttcagggccgaatggaataacgcggatacttttctggggcgcgtgggactgtattggaaccggggaaaaccttatacggaatacaaaaatgtcttttgtgattttgagtttacaaaatccgccaatggcactgccggaggccattcatatctgggaatttacggctggtcgaaaaacccgatgatagaatggtacattgtggatgattggtacggaaacggaataatacagcctaataatataggcggaggggcggtcaaaaaaggcgagttttccgtggacggcgcaacctatttcatttatctggcaacaagacccgccggttccggcaatattgaaggcagtaaaaatcctttccctcaatatttcagcatacggcaggaacgccgccaaaaaggaacgatttccataacggaacattttaaggcatgggaaaaaatcggcttaaaattgggaacaaatatgtatgaggcaaaattccttgttgaggcgggcggcgggacaggttggttcgacgcctcgtatatatcgttttatcaaaaagactga

SEQ ID NO: 42788 - protein, 279 aa, Unknown
  Obtained from environmental sample
  SIGNAL (1)...(25)
  DOMAIN (68)...(272): Glycosyl hydrolases family 11
  misc_feature (1)..(279): Xaa is any amino acid
MEKKMRKQSVTNRIISVLICCFLSACALSKSNEGQEMKQDSKNQDSKNQEPTGIIFNGNSGGSKPLEGTPYSYEIWSASGNNNRIIWRGPDTGGGAAFRAEWNNADTFLGRVGLYWNRGKPYTEYKNVFCDFEFTKSANGTAGGHSYLGIYGWSKNPMIEWYIVDDWYGNGIIQPNNIGGGAVKKGEFSVDGATYFIYLATRPAGSGNIEGSKNPFPQYFSIRQERRQKGTISITEHFKAWEKIGLKLGTNMYEAKFLVEAGGGTGWFDASYISFYQKD

SEQ ID NO: 42789 - DNA, 495 bp, Unknown
  Obtained from environmental sample
  misc_feature (1)..(495): n is a, c, g, or t
ttggagagttggaaaaagaaaccgttctttcccgagccgccgaaatgcgaagttcattgggcgacaggngcttttttacgcgccattcactttttcaacgaaaacgaaagagtagacgcaatgaccgcaattttattggaaatggaaaagtccgcaacagccgccgacaaaaaacgggtattaagccgctatttggagttggtcaacgagtcgggcgattcctcatgggagtttttacaaaacgtatattcaccaacccgcccaaaagatcaaggcatcgccgcagctctcgcactgacaaaagattttttccgcaaacaaaaactgcaaggagcgtgcagagtccacggcggcggtttcgccggaaccattcaaacttatgtccccatagacgcaatgaccgcctaccgcacgcacatcgaagccgtattcggcgcaaactcgctgacggtattgcggataagggctaggggcgcggtggagttggagttttag

SEQ ID NO: 42790 - protein, 164 aa, Unknown
  Obtained from environmental sample
  misc_feature (1)..(164): Xaa is any amino acid
MESWKKKPFFPEPPKCEVHWATGAFLRAIHFFNENERVDAMTAILLEMEKSATAADKKRVLSRYLELVNESGDSSWEFLQNVYSPTRPKDQGIAAALALTKDFFRKQKLQGACRVHGGGFAGTIQTYVPIDAMTAYRTHIEAVFGANSLTVLRIRARGAVELEF

SEQ ID NO: 42791 - DNA, 747 bp, Unknown
  Obtained from environmental sample
  misc_feature (1)..(747): n is a, c, g, or t
gtgttggttgatcttatgatgatgggcgacgggtcgccgccctacacggacgaatcgaaggacgcgatatcggaacttttcaatcaggtgatgggcgcctacagcaccgcgctgggagggcagctcggtgaatccgtctccgccggaaacgtctccgtctccgagttcaacttcgcgagcccttccttcgacgccgcttcgtctgacatgggcattgctaagttcaccgtagccggtttggtcaacaccaacattgtggtggcgataccgaacaccttaggcgacaatatagtagcggcgacggtgtcgaagtcctccccggcgatggccgacctgaacgtcggcataagccaaagcgagatggacgcgctgaccaatatgtcgatgtcgagcttcggcgacaccgccggcggcggcggttcgttcggcgcgacgcagttcgccccgccccctcctccgccgagacaaagcacctacgacgggccaaaagagaatatagacatgctgcttgacgtggagttagacattaatatagagctgggccagtctgagttgtcaatcaagagaatattggagctggcgccggggtcgatagttgaacttaacaagatggccggcgagccggtggatctgattgtcaataataaggtcgtggccaggggcgaggtggttgtggttgacgagaatttcgggataaggattgtgtcgttggtatcggcggaggatagggtcaagagtttgaaatga

SEQ ID NO: 42792 - protein, 248 aa, Unknown
  Obtained from environmental sample
  DOMAIN (165)...(241): Surface presentation of antigens (SPOA) protein
  misc_feature (1)..(248): Xaa is any amino acid
MLVDLMMMGDGSPPYTDESKDAISELFNQVMGAYSTALGGQLGESVSAGNVSVSEFNFASPSFDAASSDMGIAKFTVAGLVNTNIVVAIPNTLGDNIVAATVSKSSPAMADLNVGISQSEMDALTNMSMSSFGDTAGGGGSFGATQFAPPPPPPRQSTYDGPKENIDMLLDVELDINIELGQSELSIKRILELAPGSIVELNKMAGEPVDLIVNNKVVARGEVVVVDENFGIRIVSLVSAEDRVKSLK

SEQ ID NO: 42793 - DNA, 1041 bp, Unknown
  Obtained from environmental sample
  misc_feature (1)..(1041): n is a, c, g, or t
atgacggtcattgcgaggagcgaagcgacgaagcaatccaggaatggacgattaatgcgattaattcacatacatatatctttatcgataccggcgttgttatcggtattaatatcgattgccgccgccaacgccgaagacactatccctatcccctcccccgccgtcttcttcctgcacgaaaagcaaagcgtaaaatccatagacagcctatccgcccgtttcaacaaatccggcgcggattctctatcggtaaaatcaaaaaatcagctatttaacaacgacgacgaccaaagcaacctctcaatcaccggctacaagtccttcggcgtatccataggcgaactcggcgaggtcaacttagaacagggtttggaggcgtctatagagggcgagatccgccccggcacaacgttacgggcgcaattgagcgaccaaggctcgcagatagagggttctacccgtgagataagcgagattgacatgatgttcttcgagttgaccaataagaaattcaccgtcgtagccggcgaccagtacgccaagtggttgcaaggcggggtgctttccggagagaagaagatagtggggatatcggcgtccgttacgcccgcggcctccgaccggttgacgcttagcgccttcgggtcgttttccggcggtaatcacactgtgcaaaccatgaggggccgcgagggggtgcaggggccctattacatgacgggaaacggggaagccggcatcatcacgccggtatcgggcacggtgcgggtgcgtttgggcgccaaggagatggtcgaggggatcgacgccgactacacagtagattacgacataggttcggtgacgttcggtccgcgagttctcatcggtcaagacgattttatacggatggagtacgaatacnaagtctttgactaccgccggatgtttgccggcggcggcgcggcgtttcgcgccggagacagcgcagttttccgtagagggagtcgtttggaacgaaagcgacgacaaaaacagccccatcgaaatgcaacttag

SEQ ID NO: 42794 - protein, 346 aa, Unknown
  Obtained from environmental sample
  misc_feature (1)..(346): Xaa is any amino acid
MTVIARSEATKQSRNGRLMRLIHIHISLSIPALLSVLISIAAANAEDTIPIPSPAVFFLHEKQSVKSIDSLSARFNKSGADSLSVKSKNQLFNNDDDQSNLSITGYKSFGVSIGELGEVNLEQGLEASIEGEIRPGTTLRAQLSDQGSQIEGSTREISEIDMMFFELTNKKFTVVAGDQYAKWLQGGVLSGEKKIVGISASVTPAASDRLTLSAFGSFSGGNHTVQTMRGREGVQGPYYMTGNGEAGIITPVSGTVRVRLGAKEMVEGIDADYTVDYDIGSVTFGPRVLIGQDDFIRMEYEYXVFDYRRMFAGGGAAFRAGDSAVFRRGSRLERKRRQKQPHRNAT

SEQ ID NO: 42795 - DNA, 906 bp, Unknown
  Obtained from environmental sample
  misc_feature (1)..(906): n is a, c, g, or t
ttgactaccgccggatgtttgccggcggcggcgcggcgtttcgcgccggagacagcgcagttttccgtagagggagtcgtttggaacgaaagcgacgacaaaaacagccccatcgaaatgcaacttagcgaggaagacaaagaggtattgagaaacagcggaaataaaccggcctacctatcgtccaccgcgaggcctgtacacccgctagacgtggcgaaggccagcgttttctatcctttgtacaaaaaagtatatgacgcttcggcacaggatagcatccttgtttacacaccctacgatccaatgaagccggaagatctttacggattccacaccgccctattcacgccgatacagcgcggagcgaaaggatccgattatgccgttgacacgaccgtcaaacgcgggatgtttgtctataaatatgtcggggcggggcaaggcgaccacacggtactcgcgccggtcgccgcgcctagacgagaatccgcgacggagataatcactcgattgaatacacgtagcgtcaaagcgtctcttaatctcgttggtaaagaggttgacaataatcttttttcggagattgatgacggcggcaacctatccgcggcggtgatgttcaagttggacgccggcaagcgacaacttgacaaacgtggagtttgggggggtgttgattatagatatagatcgcgacaattcaccgatgagattttttcggcggacgagcggaagagccgctgggacgttgatggatccgacggtacggacaatggtaataacggcggcggtatcgttgataaatccgatggacgcgcctttcacagcattgaatccactgtcggcgccacaataataaaaagcgcggcgctgagcgttaccggccggacgtacatacgttga

SEQ ID NO: 42796 - protein, 301 aa, Unknown
  Obtained from environmental sample
  misc_feature (1)..(301): Xaa is any amino acid
MTTAGCLPAAARRFAPETAQFSVEGVVWNESDDKNSPIEMQLSEEDKEVLRNSGNKPAYLSSTARPVHPLDVAKASVFYPLYKKVYDASAQDSILVYTPYDPMKPEDLYGFHTALFTPIQRGAKGSDYAVDTTVKRGMFVYKYVGAGQGDHTVLAPVAAPRRESATEIITRLNTRSVKASLNLVGKEVDNNLFSEIDDGGNLSAAVMFKLDAGKRQLDKRGVWGGVDYRYRSRQFTDEIFSADERKSRWDVDGSDGTDNGNNGGGIVDKSDGRAFHSIESTVGATIIKSAALSVTGRTYIR

SEQ ID NO: 42797 - DNA, 933 bp, Unknown
  Obtained from environmental sample
  misc_feature (1)..(933): n is a, c, g, or t
atggttgttttcaggaaatttcactttttgataaaccctataagcggcggagggcagggcaaagctgtctttgattttttgccagaaattatgcgctccatggatttcaaagaagatgaatggaagcgagagttcagcgttatagatctttttgagaaacagattgaaaatgccctagcaggctcggagtgccttatagcggttggtggtgatggaacaattacatctgtgttcagagttcttttgaagcacgaggaattcaggcatataaagattggtcttataccgcttggaacaggaaacgacctagcgagggttttgaacctttattccgcccttgtcgatagaggcctgctatacatagttcgcaggcttgttgttgcaaaatccaagaaatttgatttatggcaggtaaatgggaaatttgcaatggcaaattatttttccgcaggcatagatgcccatattgcccacgacttcaatagggacagaaaagaagggagaatagcaggcaattccgtgctaagaaacaaactgcattatgtaaaaaggtttttcgccaataaagactatcgcctaaaatctggagagctgcatataacagacgaatttggcaaaacgagaatttttcccttgcaaaacaactgcacggttatagcagggaacattcccagctttgccggaggcagcaacccttttggaaaatccgatatggcagacggcttgctggaaattttaagaatcaaatctattcaaacctttttgagagccatttcaattggagcaagcagttctgttataaaagccaaggaaattgaaattcaccttcaaaaagacgaatttattcaaatagacggcgaagacttcaaagataagctagaaatgccgatttccatcaaatttggcggaaaagtgaatatgctgcatttgtag

SEQ ID NO: 42798 - protein, 310 aa, Unknown
  Obtained from environmental sample
  DOMAIN (143)...(288): Diacylglycerol kinase accessory domain
  misc_feature (1)..(310): Xaa is any amino acid
MVVFRKFHFLINPISGGGQGKAVFDFLPEIMRSMDFKEDEWKREFSVIDLFEKQIENALAGSECLIAVGGDGTITSVFRVLLKHEEFRHIKIGLIPLGTGNDLARVLNLYSALVDRGLLYIVRRLVVAKSKKFDLWQVNGKFAMANYFSAGIDAHIAHDFNRDRKEGRIAGNSVLRNKLHYVKRFFANKDYRLKSGELHITDEFGKTRIFPLQNNCTVIAGNIPSFAGGSNPFGKSDMADGLLEILRIKSIQTFLRAISIGASSSVIKAKEIEIHLQKDEFIQIDGEDFKDKLEMPISIKFGGKVNMLHL

SEQ ID NO: 42799 - DNA, 1095 bp, Unknown
  Obtained from environmental sample
  misc_feature (1)..(1095): n is a, c, g, or t
atggctaaatttgtatgtcctttttgttttcagcattacaatcgaaagaaggttctgtatgtctgccctgactgcggggaggcagcaacccccgccagatttgaaaaagaaccaatcaaatgcaaaaaagccggctgcggcggccttgcgacacaaagaaaatgccctttttgtggcgcggatcttcccagaatgtcgttacagactccaaatcttcctttcagcataatcggcgtgtcaaactccggaaaaacaaactatataacggttatgctgcatgagatgagcaggggttcaggactccgtttggcgcttgggcaccaaaaccaggctacgctggatcatcagaatgaaaattataaacgtatttacgaggatcatatacctcccgacagtacggcgggaggcgaaagaatgccccaaatatggtatattaaaaaccttcttaagaagaggggaaacaacgttcctacctataccttcaccatatttgacggcgcaggtgaggatcacgagaagagtctggatcataattccccggtatgcaagtatatacagacatctaaagcaattatcattaccctggatccgctgatactggataccatcagaaaaggcaatatcgtagacgaaaatgtcaggcgtaattccatggcgggagggccagatgaacataaaaacgcggctgttgttgtaaatagtcttgctgactatattaagaatgcccgtggaatgaatgttaataaaatactgaagattcccgttgcgattgttttaaccaaattcgatacggtaaaaaaatcttttggtccaaacgcgcttgttacaagttccagtatgaatgtaagagacggcaagatcagtatggaagaaatcaagcaagtggacgatgaaatacgcaactggcttgaagaaaacggcgaacgctcatttattgacgcgcttgaggcgcattttaaggagttttatttttttggggtatccagttacggggaaccgcctgaaaatgcaacgacactaagtgagcgtataaacccccaccgggtgcttgatccgattttatggttttttaagaaagcaaaatttgtggattga

SEQ ID NO: 42800 - protein, 364 aa, Unknown
  Obtained from environmental sample
  misc_feature (1)..(364): Xaa is any amino acid
MAKFVCPFCFQHYNRKKVLYVCPDCGEAATPARFEKEPIKCKKAGCGGLATQRKCPFCGADLPRMSLQTPNLPFSIIGVSNSGKTNYITVMLHEMSRGSGLRLALGHQNQATLDHQNENYKRIYEDHIPPDSTAGGERMPQIWYIKNLLKKRGNNVPTYTFTIFDGAGEDHEKSLDHNSPVCKYIQTSKAIIITLDPLILDTIRKGNIVDENVRRNSMAGGPDEHKNAAVVVNSLADYIKNARGMNVNKILKIPVAIVLTKFDTVKKSFGPNALVTSSSMNVRDGKISMEEIKQVDDEIRNWLEENGERSFIDALEAHFKEFYFFGVSSYGEPPENATTLSERINPHRVLDPILWFFKKAKFVD

SEQ ID NO: 42801 - DNA, 741 bp, Unknown
  Obtained from environmental sample
  misc_feature (1)..(741): n is a, c, g, or t
atggaaaaaagaaaggattcaggcaagaaccaatcaaaccgccaaatggtcacttatggcagtttgaatgacggaaacatatccttttcattctccgataacgaccttgaggttcatgccgattttcttcccccgcttatgaatggaacgcccctgaatatcagagtaattactgaaattctggaaagcgtcaatttggtttacggcgtcgactggaatgctattgaacaggctctggaagaatgtaacgtgagccgccgccaggtaagggatgtattgatagcgtccggagaacccgccgaagttgaggttgccgagtattatgagttaaacaacatatttgttataaagccggaacgaaaaaccgaccataagggcaaaattgattacagggatatatcgccgttcaccattgtgaaaaaagggcaggtactcgcgactcttaaacccctaaaaccgggcaaggaagggatgactgtccgggggatgcccctgccttatgggagcataagcccccaaggggtaagctgcggaaaaaacacccgtattgagggaaacaatatagtcgcggctatccacggacaactcattatcgaaaataaaaccattctgaatgtccaggataccctggttatcaaaggcgcggtggactacagtacgggaaatatcgttttccccggcgacgtatttataaacgggccggtttcggatggctttaaatattcgctggcggctcgctga

SEQ ID NO: 42802 - protein, 246 aa, Unknown
  Obtained from environmental sample
  misc_feature (1)..(246): Xaa is any amino acid
MEKRKDSGKNQSNRQMVTYGSLNDGNISFSFSDNDLEVHADFLPPLMNGTPLNIRVITEILESVNLVYGVDWNAIEQALEECNVSRRQVRDVLIASGEPAEVEVAEYYELNNIFVIKPERKTDHKGKIDYRDISPFTIVKKGQVLATLKPLKPGKEGMTVRGMPLPYGSISPQGVSCGKNTRIEGNNIVAAIHGQLIIENKTILNVQDTLVIKGAVDYSTGNIVFPGDVFINGPVSDGFKYSLAAR

SEQ ID NO: 42803 - DNA, 669 bp, Unknown
  Obtained from environmental sample
  misc_feature (1)..(669): n is a, c, g, or t
ttgaccttaccaggggttgtaaccaagggcgacattcttgtaaccggcggaatagtcggcaagggcgccgccctgataaaatcaggcggaagcataagaacaaaatttattgaaaagtgccgcgtcgccgcgcgaaattccgttctggtcgatctggagatcctccattccgatgtttttgcccttaacaccgttgaaatgggagaaaaaggcaagattgtcggcgggaatatttacgctgcccacggtttacgaaccggatccataggcaagaaaggaagtccggcgacccatatccattgcggggttgattttgccgcacagcaggaaaaggagaactgcaacagccagcttcacatcatcgcggccaaactcaggaaactgcgcgagatgatggaggatgccgttctcgatgaaaaagtacttgttaaaattaaggccctgctaaaaaagctggaaaacgagcagaagacggtaacagagcggctgaccaaggttatggggaatataaatattgacgaaaatgcctttgtggaagtatcaggcggaattacaaccggcaccctgatagaaatatgccaggtcgcgctttttgtggatgagccgcttaaaagagtccgcatacgtcttgataaagaaaaaaacaaactggccgcggatccaatgtaa

SEQ ID NO: 42804 - protein, 222 aa, Unknown
  Obtained from environmental sample
  misc_feature (1)..(222): Xaa is any amino acid
MTLPGVVTKGDILVTGGIVGKGAALIKSGGSIRTKFIEKCRVAARNSVLVDLEILHSDVFALNTVEMGEKGKIVGGNIYAAHGLRTGSIGKKGSPATHIHCGVDFAAQQEKENCNSQLHIIAAKLRKLREMMEDAVLDEKVLVKIKALLKKLENEQKTVTERLTKVMGNINIDENAFVEVSGGITTGTLIEICQVALFVDEPLKRVRIRLDKEKNKLAADPM

SEQ ID NO: 42805 - DNA, 555 bp, Unknown
  Obtained from environmental sample
  misc_feature (1)..(555): n is a, c, g, or t
ttgtcgttggctatgctgttgtacatcgccttctctttattggcgtcgagtaccacgctgctgttgttgttaacccgcagcgtccccttgatctcgtcgcgcacgcgggtggcgctgccttcgagcagtttcttagtgttgaactctgtcgtgtttccgattctgtcaatttcagctttcaactgtgtgacctcggcttgcaactcttcgcggtctttgtcggtgtttgtgtcgttggccgactgtacggacagctcgcgcattctctgcaggatagagtgcgtttcggcgagggcgccttcggctgtttgtattagggagatggtgtccgaggagtttttggacgccatagaaaggcctctgacttggcctctcattttttcggaaatcgccaaacccgcggcgtcgtcgcctgcacggttgatgcggtatccgcttgaaagtttttccatcgatttcgagccgtccagctcgctgatacccatttggcggtgggtgttgatggcggttaagttgtggttgatacgcataaaaccctcctggttttgtttgtga

SEQ ID NO: 42806 - protein, 184 aa, Unknown
  Obtained from environmental sample
  SIGNAL (1)...(15)
  misc_feature (1)..(184): Xaa is any amino acid
MSLAMLLYIAFSLLASSTTLLLLLTRSVPLISSRTRVALPSSSFLVLNSVVFPILSISAFNCVTSACNSSRSLSVFVSLADCTDSSRILCRIECVSARAPSAVCIREMVSEEFLDAIERPLTWPLIFSEIAKPAASSPARLMRYPLESFSIDFEPSSSLIPIWRWVLMAVKLWLIRIKPSWFCL

SEQ ID NO: 42807 - DNA, 1662 bp, Unknown
  Obtained from environmental sample
  misc_feature (1)..(1662): n is a, c, g, or t
atgctgataatgcttgatgccattcacttaagattcaaaggaacaaataatttatgggaaaaacttattgatgaacaagaaccgccaataacttttttaaatataatattggaaaatttcggactttcagatgatctgtatataaaaatgaacgctagaggaaaacctttgactgagtttgaaaattttaaatctcaatttgaaaaatatatagaaaatgaagaaaataaatttgaagaggaagtcactaatcccgaagaacggtttgcacataagattgatactgattggacatatttattttggaaatacaaagaaaagcgggaagacaataatggcaaaacagacaaagaagagttaaaagataatatttataacatagacgataaaattattaattttatcgctggagcggccataaattattacgcggaaaaagaggaaattgtaaaaaacgatgaaacaacggaaaatgtcagaaaagaactatccgacaaaggaaaaattaaaaatattacagatgatgcaataaaaagagaacgaattgaacaaagaatacagcaactggcaaataattccaaagaaataattccggaagattttccgacaataggggcatttcaatatttagtgaattgttttaataagtattctgaagaaccagataacgtgtataaatatgcggaattaaaacccaatttatctttatggaattatttcaataacacaatcaattcactatttgaagattttattaaattcacaaagccggaatacaaaccccgtattttattttacgcgcaaacgctttatttattaaaaggaaataaaattaacgagtgtttttacgattggatgagggttataagaaatattgctgaaaacgcgacaatcgatcaatccagcgcctttgtttacgctgtaaatctggttcaggagctttcaaacggctgtgctgatatttacgcttatttggcgaatacaggagtatcttcaggattcgcgaaagagcaggtaaaagaagaaatcgaaaaagctaaaataattacggcaaaccccaaaaacagggaaattattcacaatacggaagatacaaatttctgtaaaggcaaaattgatttcgcgttatattgcattgattatgacattgaaaaagctcactctgtttcagattttgatccggacaaactggaaaaaatatataatgtattaataaaatatttatcgaaagacgatgtggaaaatgatttccgcagggcgttttttacaatcagaaacaatgacttttatgattatcggcattcttatcttcacgctgtaaaatcacaaaaaagagtaatgatagaagatatgtttgatttaagaaaatattttgtattaaggggtgaaaagaattgtaatatttccaataataatttagcttattttaaggaattggttttaaaattatcggaaaaagacattaacacaataatcaatgattatatttcaactcccgctttttccaaattgccaaattggaaaaaaagaattattaaggaaaaaggactgcttgatcatagtataaaacattatatcgcgataaaagacgataatagctgctgctggntaattcctggagntaaagtcgcggatgatgatcaatggaagataaagttatag

SEQ ID NO: 42808 - protein, 553 aa, Unknown
  Obtained from environmental sample
  misc_feature (1)..(553): Xaa is any amino acid
MLIMLDAIHLRFKGTNNLWEKLIDEQEPPITFLNIILENFGLSDDLYIKMNARGKPLTEFENFKSQFEKYIENEENKFEEEVTNPEERFAHKIDTDWTYLFWKYKEKREDNNGKTDKEELKDNIYNIDDKIINFIAGAAINYYAEKEEIVKNDETTENVRKELSDKGKIKNITDDAIKRERIEQRIQQLANNSKEIIPEDFPTIGAFQYLVNCFNKYSEEPDNVYKYAELKPNLSLWNYFNNTINSLFEDFIKFTKPEYKPRILFYAQTLYLLKGNKINECFYDWMRVIRNIAENATIDQSSAFVYAVNLVQELSNGCADIYAYLANTGVSSGFAKEQVKEEIEKAKIITANPKNREIIHNTEDTNFCKGKIDFALYCIDYDIEKAHSVSDFDPDKLEKIYNVLIKYLSKDDVENDFRRAFFTIRNNDFYDYRHSYLHAVKSQKRVMIEDMFDLRKYFVLRGEKNCNISNNNLAYFKELVLKLSEKDINTIINDYISTPAFSKLPNWKKRIIKEKGLLDHSIKHYIAIKDDNSCCWXIPGXKVADDDQWKIKL

SEQ ID NO: 42809 - DNA, 417 bp, Unknown
  Obtained from environmental sample
  misc_feature (1)..(417): n is a, c, g, or t
atgagaatctttatagacgctaacattgttcttgatgtattattaaaacgaatagaatttattgaggaatctgctaaggttttggctatatgcaagtcgaaaaaatccgcccttgctccgcatacaatttcaaatgtattttttatcacaagaaaagaatataccgcaaaagagcgtaaaaagattttgctagacatattggaatacatagacatagttcctactggtaaacatcaagtagtccaagcattgaaaaatgacaatatagatgattttgaggatgctttacaattagaatgtgcgaaagagtttaatgcggattatattgtaactcgtgatttgcctggtttcgctaacacggaaataacagttatttcgccagatgagtttataagaaattttgaaagttcaggctag

SEQ ID NO: 42810 - protein, 138 aa, Unknown
  Obtained from environmental sample
  DOMAIN (3)...(127): PIN domain
  misc_feature (1)..(138): Xaa is any amino acid
MRIFIDANIVLDVLLKRIEFIEESAKVLAICKSKKSALAPHTISNVFFITRKEYTAKERKKILLDILEYIDIVPTGKHQVVQALKNDNIDDFEDALQLECAKEFNADYIVTRDLPGFANTEITVISPDEFIRNFESSG

SEQ ID NO: 42811 - DNA, 540 bp, Unknown
  Obtained from environmental sample
  misc_feature (1)..(540): n is a, c, g, or t
ttgccctttatttatcttgccaaaaattctatcgggctgagttctcaactgctgcattgtaattaccatagaaatgctccttttttcctaaattgtaatatagtaattttttcctgcataaatttattactaaattttccaagacaaggagaaaagcggatgccaaatatttccccaaaatggattaaatctctaagcgaaaacgaaatttttgtttttggcagcaacttagctggctttcacggcggcggcgcagccgaactggctatggaatggggagcggtttgggggcagggcgttggcttgcaggggcaaacttatgccataccaacgatgtttaaaaacgcagaggagatgaaaccctatatagatgaatttttggtttttgcaaaagcacatccggaattaaaatttctcgtcacggaaataggctgcggaatagcgggctttacgccaaaagaggtggctccgttctttaaagcggtgattgatgaaaatatggagaatgtatatttgccagagcgatttgtggggggatag

SEQ ID NO: 42812 - protein, 179 aa, Unknown
  Obtained from environmental sample
  misc_feature (1)..(179): Xaa is any amino acid
MPFIYLAKNSIGLSSQLLHCNYHRNAPFFLNCNIVIFSCINLLLNFPRQGEKRMPNISPKWIKSLSENEIFVFGSNLAGFHGGGAAELAMEWGAVWGQGVGLQGQTYAIPTMFKNAEEMKPYIDEFLVFAKAHPELKFLVTEIGCGIAGFTPKEVAPFFKAVIDENMENVYLPERFVGG

SEQ ID NO: 42813 - DNA, 417 bp, Unknown
  Obtained from environmental sample
  misc_feature (1)..(417): n is a, c, g, or t
ttgtttatggaagctttgagtaaagaaaatttagcccgttttgaagaacgcatcactaaaagatataacgagcttttagaagaactccgctatcgcgagcagtcttctattatggaaaaccaaagagaaaccggggcggaactctcttcttatgcaaaccaccctgcggaagcggcgtcagattatgcgaatttgaccatgaatctgaaccttgcggaacgcaacagcaaatatttattgcagttggaagaggcgctaagtcgcataaaaagagggacttacggtatttgtatgctttgcaaaaagcctatacctctcgttcgtttagaagcggttccaaccacaacaaagtgcgttgaatgtaaaatagaggtcaaagaaagtgaactggaagaatccaagcgagctgccagttaa

SEQ ID NO: 42814 - protein, 138 aa, Unknown
  Obtained from environmental sample
  DOMAIN (59)...(129): Prokaryotic dksA/traR C4-type zinc finger
  misc_feature (1)..(138): Xaa is any amino acid
MFMEALSKENLARFEERITKRYNELLEELRYREQSSIMENQRETGAELSSYANHPAEAASDYANLTMNLNLAERNSKYLLQLEEALSRIKRGTYGICMLCKKPIPLVRLEAVPTTTKCVECKIEVKESELEESKRAAS

SEQ ID NO: 42815 - DNA, 720 bp, Unknown
  Obtained from environmental sample
  misc_feature (1)..(720): n is a, c, g, or t
ttgagaaaaagcatatttttaaatttttttgttcatttttttcgtctaataggcatgaaagaagaaaatttattgccgagagagcggatttttgccggggaacttgcaaaattgtccgtagaagagcttatttgcgtgattttaggcaggggaatacccggaaagagcgtttttgagcttgcaggggaggtttcaggcgttttggagaaaaaatccaggatgcctaccattggagagcttttggagattcgcgggctaggaccggcaaaagcagcccaaattttggcttgtttggagctttctggccgttttatgctgggaactcaggataaagccgtcgagagccctgcggagcttatgccccagctagcgtttttaaagcatttaaagcaggagcagatggttttggtgaccttgaacggcaacaacaaggtgataaaaattcacagaataaccgtagggacggcaaattcaacccaggtgcaccccagggaagcctttgccccagctttggaagaccgtgccgtttccgttgtgtttgctcataaccatccatccggctgcccggagcctagcgtggaagacttgcttttaacgcaaaggctctgcgaggcgggcagaattttggagatacctgttttggaccaccttgtagtgagctcaggaggctttaccagcataaggaacgacaatggggagtattttgaggttgatggctga

SEQ ID NO: 42816 - protein, 239 aa, Unknown
  Obtained from environmental sample
  DOMAIN (110)...(234): RadC, DNA repair protein
  misc_feature (1)..(239): Xaa is any amino acid
MRKSIFLNFFVHFFRLIGMKEENLLPRERIFAGELAKLSVEELICVILGRGIPGKSVFELAGEVSGVLEKKSRMPTIGELLEIRGLGPAKAAQILACLELSGRFMLGTQDKAVESPAELMPQLAFLKHLKQEQMVLVTLNGNNKVIKIHRITVGTANSTQVHPREAFAPALEDRAVSVVFAHNHPSGCPEPSVEDLLLTQRLCEAGRILEIPVLDHLVVSSGGFTSIRNDNGEYFEVDG

SEQ ID NO: 42817 - DNA, 1194 bp, Unknown
  Obtained from environmental sample
  misc_feature (1)..(1194): n is a, c, g, or t
gtgtatgaggtattagagaacaaaatcaagcaaataatgccaattttaaacgaaaaacagttgaggcaatacttgggaagtgaagcagaagtaataggccgaggtggaatagcaataatagcaagaataagcggcaaatcaagaaacacgattgtagccggaataaaggaaaacaggagtggagaaaataccgcggaaggaattcgtaaggccggtggcggcaggaaatcgctcaaggaaaaatatcctgatattaccaaggagatcgaaaggatcgtaagcgatacgacttttgggttttttgagaacccgttgtcttatacgacaaaaagtacaaggaacatacagcagatattgaaagagaaaaaatatgaaattggatacgatgtggtcgcaaagacgctgaaagaactgggatacagcttgcagttgaatcagaagatgctgcaaatcggaaaagggcatccggacagggataagcagtttcagttcatcaatggaaaagcgaaaaggtttttgaagacaggccttcctgtgatctcaattgacgcaaagaagaaggaaaacatcggaaactttataaacaacggtagaacataccggaaaaagaaggagcccacaaaggtggtagatcatgattttgtaatcaaagaactgggaaaagtaaccccgtacggcgtatatgacataggcaggaatgaagggtttgtcaatctgggaatttcctcagacacatcggaatttgcggtagaaagcatatcaaggtggtggttgacattagggaaaaacacttatccgaaagcaaaaaaaatctatatcaattgtgatggtggtggcagcaatgggagcagaaacaaacttttcaagttccaattgcagcaattagcgaaccagagcggccttgaaatccatatatcacatttcccacctggaacaagcaaatggaataaagtagaacacaggatgttctgctacattaccagccattggaagggtcaaccattaataagtgttgagacggttatacagttgattggcagcacaacaacaacgactgggttgaaaatcatttgtgtgaaagatgatactgtttataagattggcataaaagttagtgatgaggattttacgacaataaatataaaaaatgtgaaaacactacccacttggaactatatcatctcccctttataa

SEQ ID NO: 42818 - protein, 397 aa, Unknown
  Obtained from environmental sample
  DOMAIN (86)...(397): Rhodopirellula transposase
  misc_feature (1)..(397): Xaa is any amino acid
MYEVLENKIKQIMPILNEKQLRQYLGSEAEVIGRGGIAIIARISGKSRNTIVAGIKENRSGENTAEGIRKAGGGRKSLKEKYPDITKEIERIVSDTTFGFFENPLSYTTKSTRNIQQILKEKKYEIGYDVVAKTLKELGYSLQLNQKMLQIGKGHPDRDKQFQFINGKAKRFLKTGLPVISIDAKKKENIGNFINNGRTYRKKKEPTKVVDHDFVIKELGKVTPYGVYDIGRNEGFVNLGISSDTSEFAVESISRWWLTLGKNTYPKAKKIYINCDGGGSNGSRNKLFKFQLQQLANQSGLEIHISHFPPGTSKWNKVEHRMFCYITSHWKGQPLISVETVIQLIGSTTTTTGLKIICVKDDTVYKIGIKVSDEDFTTINIKNVKTLPTWNYIISPL

SEQ ID NO: 42819 - DNA, 645 bp, Unknown
  Obtained from environmental sample
  misc_feature (1)..(645): n is a, c, g, or t
atggaatacgagatggtaataggcctggaggtccacgcccagctgctcacgaagaccaagctattttgcggctgcaccaccccgttcggcgacccgtccaatacgcacgggtgcccggtgtgcgccggtcatccgggggcgcttccagcgctcaatcgggcggcggtggagatggcggtgcgcatggggctgtcgctagggtgcgcggtcaacaccaagtcgatcttcgcccgtaagcactacttctaccccgacctcccaaaggggtaccagatatcgcagcttgacataccgatatgcgtctccggaacgctgcctatcgtcgttgacgggcgggaatcttccatccgcgtcaaccgcgttcacatggaggaggacgccggcaaactcgtgcacgaccaagacgccgactcgctcttcgacgtaaaccgctgcggtagcccgctcatagagatcgtctccgagccggatatgcgcagcccgcaggaggcttacgcctacctcatggggcttaagcagatactggagtacctcggcgtctgcgactgcaacatggaagagggcagcctgcgctgcgacgccacatctcgctgcgtcccaagggagagagcaagctcggcaccaagacggagatcaagaacatga

SEQ ID NO: 42820 - protein, 214 aa, Unknown
  Obtained from environmental sample
  DOMAIN (1)...(211): PET112 family, N terminal region
  misc_feature (1)..(214): Xaa is any amino acid
MEYEMVIGLEVHAQLLTKTKLFCGCTTPFGDPSNTHGCPVCAGHPGALPALNRAAVEMAVRMGLSLGCAVNTKSIFARKHYFYPDLPKGYQISQLDIPICVSGTLPIVVDGRESSIRVNRVHMEEDAGKLVHDQDADSLFDVNRCGSPLIEIVSEPDMRSPQEAYAYLMGLKQILEYLGVCDCNMEEGSLRCDATSRCVPRERASSAPRRRSRT

SEQ ID NO: 42821 - DNA, 789 bp, Unknown
  Obtained from environmental sample
  misc_feature (1)..(789): n is a, c, g, or t
atgaacagtttcaggaatttggaaaaggcgctcgaatacgaggcgcggcggcaggaggaggtgctgaggtcgggcgggcgcgttgttcagcagacgtttttgtggaacccgagcgagaaccgctccgtcccgatgcggacgaaggaggacgccgacgactaccgctacttccccgaccccgacctcatgccgcttgttgtggaggccgcgtgggttgacggtgtgcgggagacgctgccggagctgcccgtgccgcgccgccgcaggttcgagggcgactacaaggtctccccctacgccgccgaggtgctgaccggttcgcgcccccttgccgattacttcgagcgctgcgtgagcggctgcaacgacgccaagtccgcctccaactgggtgatgacggacattatgcgtatgatgaacgaagccaagaccgagaacccgtttgacctaaagaccaagccggagcggttgggcgagctgataaagctgataaacggcggcggcgtctccgccaaggccgcgaagagggtgttggacctgatggagagcgaggacaaggagccggacgcggtggtccgcgagcagggtttggagcaggtgtcggacgcgtcggcgatagaggcggtggtgaagggcgtgatcgacgcgcaccccgaggaggttcagaggtacaagggcggcgataagaaactcaccggctttttcatgggtcaggtaatgaaggcctccaaaggcgcggccaacccgaaggangcgatggctattctggacaggttgatttttggatga

SEQ ID NO: 42822 - protein, 262 aa, Unknown
  Obtained from environmental sample
  DOMAIN (42)...(110): PET112 family, C terminal region
  misc_feature (1)..(262): Xaa is any amino acid
MNSFRNLEKALEYEARRQEEVLRSGGRVVQQTFLWNPSENRSVPMRTKEDADDYRYFPDPDLMPLVVEAAWVDGVRETLPELPVPRRRRFEGDYKVSPYAAEVLTGSRPLADYFERCVSGCNDAKSASNWVMTDIMRMMNEAKTENPFDLKTKPERLGELIKLINGGGVSAKAAKRVLDLMESEDKEPDAVVREQGLEQVSDASAIEAVVKGVIDAHPEEVQRYKGGDKKLTGFFMGQVMKASKGAANPKXAMAILDRLIFG

SEQ ID NO: 42823 - DNA, 654 bp, Unknown
  Obtained from environmental sample
  misc_feature (1)..(654): n is a, c, g, or t
atgataatcggcacgtaccttaaactgccaacctatcgtttgatagagcttggggtcgccgcccttatgcatgaagcgggaatgttaaaattaccgtcaaatatttatttaagccagagggctcttaatcctgtggaacagaaagcaatcgctacgcaccctattctggggtacactatgcttaaatcttttaactttcctcttcccgtttgtttagccgcgcttgaacaccatgaacgcggaaacggagctggttatccgcgaagattgcccaacgaaaaaataagcctgtattcaaaaataatagccgttacgtgctcatacgaagcgttaagttccaagcgtccgcacaaagaagcaaaagacggttacacgggaatgttggagcttttaaagaatgaaggaaaacaatacgacgatacagtcgtaaaagcgcttgttctgtgtctgtctatttacccgatcggtctttatgtgcttttatcaaacggaaagaaagggcaggttgtggacgtaaacccggaaaatccccgtttcccgattgtacaaatttttgacgagttcacaccagacggaaaaataaaaacagtacaaaccgctcccgacgtacttacaattgtgcgtcctcttaaacgcaacgagataggcaactag

SEQ ID NO: 42824 - protein, 217 aa, Unknown
  Obtained from environmental sample
  DOMAIN (14)...(111): HD domain
  misc_feature (1)..(217): Xaa is any amino acid
MIIGTYLKLPTYRLIELGVAALMHEAGMLKLPSNIYLSQRALNPVEQKAIATHPILGYTMLKSFNFPLPVCLAALEHHERGNGAGYPRRLPNEKISLYSKIIAVTCSYEALSSKRPHKEAKDGYTGMLELLKNEGKQYDDTVVKALVLCLSIYPIGLYVLLSNGKKGQVVDVNPENPRFPIVQIFDEFTPDGKIKTVQTAPDVLTIVRPLKRNEIGN

SEQ ID NO: 42825 - DNA, 1293 bp, Unknown
  Obtained from environmental sample
  misc_feature (1)..(1293): n is a, c, g, or t
atgccttcttatatatttatttgcatattatttacatttgcgcccattattttaagcggagttttttctctttttgattcggctttacggttatgcagaanaacacggttggaaaaagaagatacaaaacgatacaagtctcttcttaaagtattggaagctccgcataagatatcgctttcctgccgtttatggtgcagtatattcaaagtttttgccgttttttttgcgacagcaattctttttaacttttttatgaatatgccccataatgcatattataaatttataggaaaatttttaattctatttacactcctatatttaataatcttaggcataattatcacattgcttgcggacaatcttcctaaattgctgtcaagaataatgcctgaaaaaacagccgtttttcttctgcctgttatgaagtttttttcttttttcatgctgccgtttacgctgcctacaataaaatttaactcattttttaattcaaaagtccgtcctgaaattgacgacagcaacattaccgaagaagaacttcatgacgaattgcgtaacacgcttatagagggcgaaaaatccggcgttgttgaaaacggggaacgcggcatggtagagggtgttttttatcttggggatcgccctgtgcgcgcttttatgactcaccgctctgaaattcaactgctggacattaacgcgccttatgacgaaatacgcgctaaagctgttgaataccgcgagcagagatgtttcccggttgtaaacgcaagccccgatgaaattgtcggcgcggtttacacggtagacattattcttgattacgcgctggacgctcctttggggttgcgcgcaataatgaaaaaagcgcaatttattcccgaaacaatgccggctataaaagcgtttgagtcttttaagcagggacagtcaaactttttatttgtaatggacgaatacggcgggcttgccggtcttctttcgattacatcgttatttgaggaaatagtcggcgaactttccatgcccgtaaaaaaagaagaacccataaaaaaacaggaagacggcacttggcttgccgacggcacattaaacatagacgacgccgccgaagccctttccctcgccaaccttcgcgaaaaaggagacttccaaaccctggccggttttgttttatccctcgccggagaactcccgcaagccggagacagcgtagagtataaaggctacaagttcacggtcaaggaaatggacgggaacaggatagacaagatcgttattaataaatag

SEQ ID NO: 42826 - protein, 430 aa, Unknown
  Obtained from environmental sample
  SIGNAL (1)...(19)
  DOMAIN (7)...(203): Domain of unknown function DUF21
  misc_feature (1)..(430): Xaa is any amino acid
MPSYIFICILFTFAPIILSGVFSLFDSALRLCRXTRLEKEDTKRYKSLLKVLEAPHKISLSCRLWCSIFKVFAVFFATAILFNFFMNMPHNAYYKFIGKFLILFTLLYLIILGIIITLLADNLPKLLSRIMPEKTAVFLLPVMKFFSFFMLPFTLPTIKFNSFFNSKVRPEIDDSNITEEELHDELRNTLIEGEKSGVVENGERGMVEGVFYLGDRPVRAFMTHRSEIQLLDINAPYDEIRAKAVEYREQRCFPVVNASPDEIVGAVYTVDIILDYALDAPLGLRAIMKKAQFIPETMPAIKAFESFKQGQSNFLFVMDEYGGLAGLLSITSLFEEIVGELSMPVKKEEPIKKQEDGTWLADGTLNIDDAAEALSLANLREKGDFQTLAGFVLSLAGELPQAGDSVEYKGYKFTVKEMDGNRIDKIVINK

SEQ ID NO: 42827 - DNA, 1278 bp, Unknown
  Obtained from environmental sample
  misc_feature (1)..(1278): n is a, c, g, or t
gtggagaggcaggcgctattattcaatatagtcgggaaatacggggtacaggttgaatcggcgctggacaaagcgtccgcccttaatatcgaaatgatttgtccgcttcacggctttgtatggcgttcaaatttaaatgaaatcctttcaaaatacatgctctggagcagatacgaaccggaagaacgcggcgttatgatttcttacgcgtccgtttacggaaatacggaaaacgcggcggaaattcttgcatgccgcctgcgcgacaaaggtattaaaacagttatatatgatgtttcggttacgccggcttcggagatagtaagcgccgcgttcaaatggagccaccttgtattcgcctccacaacctacaacgccggaattttcgtaacaatggaggccttgattaatgatctcgccgcgcacaatattcaaaaccgccgcgtcgccgtaatcgaaaacggttcctgggctgccacaagcggcggcttgatccgcgatatactgggcaaatgcgaaaagatcaatattcttgaaaataatgtcagcatactatccggcttaaagaccgcgcaggtttcggatattgaggcaatggcggaagctctcggcgcggatttccccgctcccgcgggaaccgctcggaataatcaggcagtaccgaacaccgttgatcccaacgccatgttcaaactgtcttacggtttatttgtattaacagccagagacggccgcaaggacaacggctgtattatcaacaccgttatgcagataacggtaactcccataaagataacaatcggggtgaataaagccaattatacccatgacatgatactcaagacgggaaaattcaatatttccgttttaagcgagggcgcgccttttcatgtttttcagcaattcggctttcacagcgggaaagacacggataaattcgccggctgcggtgaggccccgcgcacacaaaacggcgtccgttatgtgtcagaatggacaaacggtgtgatgagtgcggaagtgaaagaatccgttgattgcggcacccatacgctttttatcgccgaggtgaatcaggccttttcgctgtcgcgtgatccaagcgttacttatcaatattattttgatcatataaagcccaaaccccagccgcctaaaggacacaaaaaaggcttcgtctgcaagatttgcggatatgtgcatgaaggcgacaccttgccggatgattttatctgtcctctctgcaagcacggcgccgcggacttcgagcgtatttaa

SEQ ID NO: 42828 - protein, 425 aa, Unknown
  Obtained from environmental sample
  DOMAIN (389)...(422): Rubredoxin
  misc_feature (1)..(425): Xaa is any amino acid
MERQALLFNIVGKYGVQVESALDKASALNIEMICPLHGFVWRSNLNEILSKYMLWSRYEPEERGVMISYASVYGNTENAAEILACRLRDKGIKTVIYDVSVTPASEIVSAAFKWSHLVFASTTYNAGIFVTMEALINDLAAHNIQNRRVAVIENGSWAATSGGLIRDILGKCEKINILENNVSILSGLKTAQVSDIEAMAEALGADFPAPAGTARNNQAVPNTVDPNAMFKLSYGLFVLTARDGRKDNGCIINTVMQITVTPIKITIGVNKANYTHDMILKTGKFNISVLSEGAPFHVFQQFGFHSGKDTDKFAGCGEAPRTQNGVRYVSEWTNGVMSAEVKESVDCGTHTLFIAEVNQAFSLSRDPSVTYQYYFDHIKPKPQPPKGHKKGFVCKICGYVHEGDTLPDDFICPLCKHGAADFERI

SEQ ID NO: 42829 - DNA, 696 bp, Unknown
  Obtained from environmental sample
  misc_feature (1)..(696): n is a, c, g, or t
gtgttaattggaggtgtcctattgacgaacggagcgagggcgcggtcatgcttgcatggacatgaccgagcgagtgaggatatcgaagggcgtaagccctttatgacggatacaattattgtccaacagttgctttcacgggggaacgggatgttgttagcttcacaagcggtagaggccggggctcaccgtcaacaactcgccgatttcgtaaaatccggcatactggaacgcgctgaacgtggaatctatataagctccggcgggctggatgacgcgcttttctggatgcagcagcgggcgaaaaaaattgtctactcacatgaaaccgcactttttctgcacagaatgacagaccgtacccccatacgttattccatcaccgtacccagttcatataaagtatcgacggctcttaaaaaatcctgcaagatttactacatcaagcaagagttaattgatttaggaaaaacaaaaaaatcatccggtatgggaaatactgtaattacctatgatctggagcgtacactttgcgacgtaatccgcagccgaaataaaatcgatgggcagattgttattgaagcgttaaaaaattatgctcggagtaaagaaaaggatttacaccgtctgtacagatatgccgaaaacttcggcgttgagaaaatattgcatcagcatttggaagtattgctgtaa

SEQ ID NO: 42830 - protein, 231 aa, Unknown
  Obtained from environmental sample
  misc_feature (1)..(231): Xaa is any amino acid
MLIGGVLLTNGARARSCLHGHDRASEDIEGRKPFMTDTIIVQQLLSRGNGMLLASQAVEAGAHRQQLADFVKSGILERAERGIYISSGGLDDALFWMQQRAKKIVYSHETALFLHRMTDRTPIRYSITVPSSYKVSTALKKSCKIYYIKQELIDLGKTKKSSGMGNTVITYDLERTLCDVIRSRNKIDGQIVIEALKNYARSKEKDLHRLYRYAENFGVEKILHQHLEVLL

SEQ ID NO: 42831 - DNA, 870 bp, Unknown
  Obtained from environmental sample
  misc_feature (1)..(870): n is a, c, g, or t
atgaaagagaacggcactatcggtatgtggacttcacgttccttcgacgatccgttaatcactatctatgcggcgcatttccttaccgaagcgcgtaacgccaactattatgtttcgtccgcaatgatggaaaaactgcttcaggcttgccgtaatatcgcttccggttcgggatcgagtttatacgatttttccaaccgttcttacgctatttatattctaaccttgaacgaaattgttacaactcagttaattgaatcgcttaaaaaagacatgagcaaaaacgatgatacgcaaacgggtattgccggattgtatcttgccggaagttacgctctattgcaaaaaacttccgacgcttcttccattctgggaaaaataaagcgggctatggcaagggacagcagtttccgttatgttgacgatcttatgtatcattcgatatacctcaatattatcgcacggcatttccctcagcggttacgggatatatcggaatctttgttagttgatatggctcagcaaatggaaagacagtcatataccactatttccgcaaactacgctcttatggcaattaacgcttacatgaaagcggttccaaccgctgaaacaggacgctttactgtgcaggaaatttcaaaagacaaccagcgccgtgatttaaagccaacaggaaccaacttgttcagagttccgttttccgctaatgccgcaaaaatcggtctggaaaacaaggaaaaccttaatctgttttatcagataacagccgcaggttttgacagagaattgccatctaaggaaataaagaacggtatagaagtttacagagaatttcttgacagttcgggaagggctgtaactccgtaa

SEQ ID NO: 42832 - protein, 289 aa, Unknown
  Obtained from environmental sample
  misc_feature (1)..(289): Xaa is any amino acid
MKENGTIGMWTSRSFDDPLITIYAAHFLTEARNANYYVSSAMMEKLLQACRNIASGSGSSLYDFSNRSYAIYILTLNEIVTTQLIESLKKDMSKNDDTQTGIAGLYLAGSYALLQKTSDASSILGKIKRAMARDSSFRYVDDLMYHSIYLNIIARHFPQRLRDISESLLVDMAQQMERQSYTTISANYALMAINAYMKAVPTAETGRFTVQEISKDNQRRDLKPTGTNLFRVPFSANAAKIGLENKENLNLFYQITAAGFDRELPSKEIKNGIEVYREFLDSSGRAVTP

SEQ ID NO: 42833 - DNA, 858 bp, Unknown
  Obtained from environmental sample
  misc_feature (1)..(858): n is a, c, g, or t
atgtttctgccccgttactctgttgttcaaaatcttgcggcaatgggcggcggcggcggttttgacgaagatgaatatctttcacgcaaccttaatccgtttaagcggaaacaaaacgctcctgtggcttattggtccggtattattgacgccggaccagaagtaaaagaactgcgttaccgtgtgccggattattttaacggaacgttaagagtaatggctgtttccgtgagcgaaagcgcaatcggcgtgggcgaagacagggctttaatcagaagcgcttttattatatcgcctaactcgcctatgatggcggctcccggagacgaatttgacgtttcgcttaccgtaaccaataaccaaaaaggcatcggcgaaaaaggcaaagtgcgccttagggtgataccttcggagcattttacaattacgggcaacagcgagtttaatctgcaaatacctgaaggcaaggatcaaactcttacccttcccgttaaagccgcaggtccgcttggcgccgcgcaaatacgctttgtcgcttccaatgataacgaaacgtcggaactttccgcttatatgagcgtacgccccgcaactccgtaccgtgtgtcgctttattcgggagcggtaaaaaataaaagcgttgaaacggcaatagaccgcaatctttacgaggaatttaacacaagagaagtttcgctttctttccttccgatgggaatggcaaagggactttctttcttccttaataatttcccctacggctgttcggagcaaattacaagcgcggttttcccgttcctgtatcctcagcttttcaaggaacttggtacacaaaagcgcagctngatganggattaa

SEQ ID NO: 42834 - protein, 285 aa, Unknown
  Obtained from environmental sample
  misc_feature (1)..(285): Xaa is any amino acid
MFLPRYSVVQNLAAMGGGGGFDEDEYLSRNLNPFKRKQNAPVAYWSGIIDAGPEVKELRYRVPDYFNGTLRVMAVSVSESAIGVGEDRALIRSAFIISPNSPMMAAPGDEFDVSLTVTNNQKGIGEKGKVRLRVIPSEHFTITGNSEFNLQIPEGKDQTLTLPVKAAGPLGAAQIRFVASNDNETSELSAYMSVRPATPYRVSLYSGAVKNKSVETAIDRNLYEEFNTREVSLSFLPMGMAKGLSFFLNNFPYGCSEQITSAVFPFLYPQLFKELGTQKRSXMXD

SEQ ID NO: 42835 - DNA, 696 bp, Unknown
  Obtained from environmental sample
  misc_feature (1)..(696): n is a, c, g, or t
atgattttaaaaactaatattaagactgctattaaagaaaaattcctcaattccttgtttatcagccgcgtggcgctatgtcttctgggaaacttcgtgcttgctttaggcgtggccgtggcggtgaaagccgatttgggaatcaccccggtcaattcaatcgcctttgtcttgagtaaggttcttttgatagatcacggcttcatgaccggcatcatatacgcctgttatgtgctgattcaactagcaatactcagaagggaattccgtgtcaataaccttttgcaggcgggagccgccctgatgttcggctggtttgtttttctctgtaaccatatccttgcgtttcaggttccgcaactctatccggtacggcttttgttcctgttggccggcgtaatcataatcggtctgggcataatgctctacctcagggccaatatcctgcctcagccggcggaagggctcatactggcgattcagaaaaagaccgggtggaaactgcacaatatcaaagtcgtttttgattcttcggttgttatcatagcggcggtgatttctttcattgccatcaaaaaaatcgttggcatcagggaagggacgctgatttcgatgataggtataggcaagtgcctgggcttttttaccagatatcttggcggaaaaatcgacgctcttttcaggcttcccaggtaa

SEQ ID NO: 42836 - protein, 231 aa, Unknown
  Obtained from environmental sample
  misc_feature (1)..(231): Xaa is any amino acid
MILKTNIKTAIKEKFLNSLFISRVALCLLGNFVLALGVAVAVKADLGITPVNSIAFVLSKVLLIDHGFMTGIIYACYVLIQLAILRREFRVNNLLQAGAALMFGWFVFLCNHILAFQVPQLYPVRLLFLLAGVIIIGLGIMLYLRANILPQPAEGLILAIQKKTGWKLHNIKVVFDSSVVIIAAVISFIAIKKIVGIREGTLISMIGIGKCLGFFTRYLGGKIDALFRLPR

SEQ ID NO: 42837 - DNA, 537 bp, Unknown
  Obtained from environmental sample
  misc_feature (1)..(537): n is a, c, g, or t
ttggtgaccaaacatgatttccccaaaatccacttttatgatcaggattttgtcgatatttatgataaaacatgggcatggatacaggattgttggataaatggcggtgaaaagagcggaccggacggaaaaatcttctcttatcccgattcacaggtagttacgcagactgacgctatcttttcctcgttttttctggtgtattccaacagtatttttcaagctcattccactttagacctcttttataaccatcaagagccaaatggagcgattcgctccgcttatgacatcagttctggtgcgcctgtaatagaaaaagacaaccatgaagggcttggaatgcccctttttgcctgggctgagtacaatatctaccacaaatcgggtaataaaaagagagtcaaggatactttgcccattttgtgcaaatactcaacatggatcgataccgtgtttaaaaagcagaacggtctttacaaaacacccctcggcgctacagggatgacaaatgccccgcggggatgcnggcgataa

SEQ ID NO: 42838 - protein, 178 aa, Unknown
  Obtained from environmental sample
  misc_feature (1)..(178): Xaa is any amino acid
MVTKHDFPKIHFYDQDFVDIYDKTWAWIQDCWINGGEKSGPDGKIFSYPDSQVVTQTDAIFSSFFLVYSNSIFQAHSTLDLFYNHQEPNGAIRSAYDISSGAPVIEKDNHEGLGMPLFAWAEYNIYHKSGNKKRVKDTLPILCKYSTWIDTVFKKQNGLYKTPLGATGMTNAPRGCXR

SEQ ID NO: 42839 - DNA, 759 bp, Unknown
  Obtained from environmental sample
  misc_feature (1)..(759): n is a, c, g, or t
gtgatcactgttactgcatctggtaacaccggtaataccggagcaaccagtggctatgaaaatggttttcggtggaaaagcaataatagcggagtgaccattgagctttacgacggacccggcggcaatgtaataataccagcagtaatagacggcaaacaagtgaaagttatcgggatgggtgcttttattggttgcaaaagccttaccagcgtaaccataccgaacggtgttaccagcatagagagtgggtatggtgggggtggtccaattcctatgggtgcttttgctttttgcacgaaccttatcagcgtaaccataccggacagcgttacctctatcgggaataacgctttttacgtatgtggccttaccagcgtaaccataccggacagcgttacctctatcggggactacgcttttttcgaatgtaccagccttaccagcataaccataccaggtagcgttacctctatcaggcgttctacttttgccgaatgtaccagccttgccagcgtaaccataggaaacggcgttaaaatcattagttggaaagttttcagcgaatgctcaagccttacaaacgtaaccataccgaacggtgtcattgtgatggcgcttttggaaatgctcaaaacttgcctcagttactctcggaaacggtgttactacaattgggggagctgcttttatgtatacaggccttacaagtataaccatacctgccagcgttacaaccattggagaaattgcttttga

SEQ ID NO: 42840 - protein, 252 aa, Unknown
  Obtained from environmental sample
  misc_feature (1)..(252): Xaa is any amino acid
MITVTASGNTGNTGATSGYENGFRWKSNNSGVTIELYDGPGGNVIIPAVIDGKQVKVIGMGAFIGCKSLTSVTIPNGVTSIESGYGGGGPIPMGAFAFCTNLISVTIPDSVTSIGNNAFYVCGLTSVTIPDSVTSIGDYAFFECTSLTSITIPGSVTSIRRSTFAECTSLASVTIGNGVKIISWKVFSECSSLTNVTIPNGVIVMALLEMLKTCLSYSRKRCYYNWGSCFYVYRPYKYNHTCQRYNHWRNCF

SEQ ID NO: 42841 - DNA, 648 bp, Unknown
  Obtained from environmental sample
  misc_feature (1)..(648): n is a, c, g, or t
atgtatacaggccttacaagtataaccatacctgccagcgttacaaccattggagaaattgcttttgatgtttgtgacaaacttgcctcagtaactattgagaacggagttaaaacaattaagaaaggtgcttttcaaagatgcgcaagtcttacgagcataacaatacctaacagcgttactacaattgaagaaggaacttttaataaatgcgctaaacttgcctctgtaaccataggaaacagagttacaagcattggagaatgggcttttcaagagtgcgcaagtcttacaagtataaccataccgaacactgttacaactattggaaaattggcatttaatgaatgcacaggtcttacaagtataaccataccgagcagcgttactgttattggagaattcgcttttcaaagatgcgcaggtcttacaagtataactatactggatagcattactaacattgagaagggcgttttttttctttgttctaaacttgtcggcgtaacatttgaagggacaatttctcctgacgggttcaataatgataaaaaataccctgttttccccggagacttgcgagacaaatactttgcgggcggtcctggaacttacaccaacaaaggcggcaagtggacaaaagcataa

SEQ ID NO: 42842 - protein, 215 aa, Unknown
  Obtained from environmental sample
  misc_feature (1)..(215): Xaa is any amino acid
MYTGLTSITIPASVTTIGEIAFDVCDKLASVTIENGVKTIKKGAFQRCASLTSITIPNSVTTIEEGTFNKCAKLASVTIGNRVTSIGEWAFQECASLTSITIPNTVTTIGKLAFNECTGLTSITIPSSVTVIGEFAFQRCAGLTSITILDSITNIEKGVFFLCSKLVGVTFEGTISPDGFNNDKKYPVFPGDLRDKYFAGGPGTYTNKGGKWTKA

SEQ ID NO: 42843 - DNA, 453 bp, Unknown
  Obtained from environmental sample
  misc_feature (1)..(453): n is a, c, g, or t
atgctcatatatcacggcagttacttggaaataaaaagccctcaaatccttgcaggaaaatatgcaaaggatttcggtataggcttttactgtaccgaacttaaagaacaagcgattagatgggcaagccgctataactccccaactctcaatgtttacgaatacgaaaaaaaatcctcattaaaaataagagattttgccgaaatgacagaagaatggctggattttgttattttttgcagaagcggaaaaaaacacgattacgaaattgttagcggaccaatggcaaatgaccaagtttacaactatataagtgattatattgatggggctataacaagagagcaattttgggttctggcaaaattcaaacatcccacgcatcaaataactttttgcaccgagctggcattagagagtctaaaatttgtaaaaagcgaggcggtaaaatga

SEQ ID NO: 42844 - protein, 150 aa, Unknown
  Obtained from environmental sample
  misc_feature (1)..(150): Xaa is any amino acid
MLIYHGSYLEIKSPQILAGKYAKDFGIGFYCTELKEQAIRWASRYNSPTLNVYEYEKKSSLKIRDFAEMTEEWLDFVIFCRSGKKHDYEIVSGPMANDQVYNYISDYIDGAITREQFWVLAKFKHPTHQITFCTELALESLKFVKSEAVK

SEQ ID NO: 42845 - DNA, 549 bp, Unknown
  Obtained from environmental sample
  misc_feature (1)..(549): n is a, c, g, or t
ttgggttctggcaaaattcaaacatcccacgcatcaaataactttttgcaccgagctggcattagagagtctaaaatttgtaaaaagcgaggcggtaaaatgataggtagggaaatcaaggagcacaatgatttgttttttgtgtgttctctaatagattatattgcgcgcaaggtaaaatcgcataggagtacggttgcaaattcgataggaaaaacagaattaagcagaatttttggcttggcagatgtttaccattcggaaaacatagacaaaataagcgatgaacttatagaaaaatttgctgtgccaagcgacaattttcccactgaaagcaaatacaccctgccctcgcactgggacataggcaaggtatataaaaggcttatcataaatatagccgaatatgagcagttggattttatctctgcactcctcaaggcttataattcgccaatttcagagaaaatagagaacttcaatagtagcctttattatgaaaatccaagctatattttcgcctgctatcaagaaggcgtagtgttgtga

SEQ ID NO: 42846 - protein, 182 aa, Unknown
  Obtained from environmental sample
  misc_feature (1)..(182): Xaa is any amino acid
MGSGKIQTSHASNNFLHRAGIRESKICKKRGGKMIGREIKEHNDLFFVCSLIDYIARKVKSHRSTVANSIGKTELSRIFGLADVYHSENIDKISDELIEKFAVPSDNFPTESKYTLPSHWDIGKVYKRLIINIAEYEQLDFISALLKAYNSPISEKIENFNSSLYYENPSYIFACYQEGVVL

SEQ ID NO: 42847 - DNA, 819 bp, Unknown
  Obtained from environmental sample
  misc_feature (1)..(819): n is a, c, g, or t
gtgaggaatatgttaggtgtttttgattcaggttttggcggtttaaccattctcaaagagttggtgaaggttctgcctagttacgattttgtgtatttgggagataatgccagagcaccttacgggaatcgcagttttgatagcatataccgctattcgcttcaagcggtgaattatctgttttccataggctgcccccttgttattcttgcttgcaacacagcatctgcaaaagcactgcgtacaattcagcaaaaagatttgcaaaaaatagcccctgataatagagtgcttggcataatccgcccccttgcagaggagataggcaaattcacagaaaccaaatgcgcgggtattttaggcacggaagggacaataacctcaaagagctatttgttggaaatagcaaaattctggcccgatttgcacatagagcaagaggcttgcccaatgctcgttcctctggtggagaatgccctgctggaacatcctgccacagaggtatttgttagagaatatactcaaaaaattttggcaaaaaattcccaaatagacaccctagtccttgggtgtacccactaccccctgctccaagagatttttctaaaagtactgccaaaaaatataaaaattgtctcgcaaggcagcattatagcccaaaaaacgcttgaatacctagcaaatcactcggaaatagatgccagaatcagtaaaaacggcaaaattcgctttttaaccaccgattccccggaattctttgaaaaaggcgcaaaagtattctggaacaccaaaataaaacctgaaagcattttattataa

SEQ ID NO: 42848 - protein, 272 aa, Unknown
  Obtained from environmental sample
  DOMAIN (4)...(227): Asp/Glu/Hydantoin racemase
  misc_feature (1)..(272): Xaa is any amino acid
MRNMLGVFDSGFGGLTILKELVKVLPSYDFVYLGDNARAPYGNRSFDSIYRYSLQAVNYLFSIGCPLVILACNTASAKALRTIQQKDLQKIAPDNRVLGIIRPLAEEIGKFTETKCAGILGTEGTITSKSYLLEIAKFWPDLHIEQEACPMLVPLVENALLEHPATEVFVREYTQKILAKNSQIDTLVLGCTHYPLLQEIFLKVLPKNIKIVSQGSIIAQKTLEYLANHSEIDARISKNGKIRFLTTDSPEFFEKGAKVFWNTKIKPESILL

SEQ ID NO: 42849 - DNA, 588 bp, Unknown
  Obtained from environmental sample
  misc_feature (1)..(588): n is a, c, g, or t
atgaataattttgttaaattttttacgtgctttttaatcgcggcggtggtggcgggatgcgtttcggacaatgggactcataaaccaaataacggtaataaaaacggagatgaaataatgtttgataccggaataaaagcggaaatcgaggctgatattgaagcacattggaaagagtatggatacaaagaaaaacctaagaaatttgttgccataagttttgacgacggtccctgtcctgcttccagttatggcggaaccgcggcaatgcttgcaaaactagacgagcttaaagtaaaagcgactttctttgtgattggagggaatgtccgcgccaataaatctgtcgcaaaagcgattttcgatgccgggcatgaattgggaaatcattccgacggttacggcagtcttggcggagagacggtaagcgctataaaaacgaaccttaccgccgcctctctggcgatcaaagagataaccggaaaagaccctgttctgttccgcgctcccaacttgaaccatgggcggtatttatcccaagtctgcaaggaaatgggtatggctcttattgaccggcaatgttcataa

SEQ ID NO: 42850 - protein, 195 aa, Unknown
  Obtained from environmental sample
  SIGNAL (1)...(22)
  DOMAIN (63)...(190): Polysaccharide deacetylase
  misc_feature (1)..(195): Xaa is any amino acid
MNNFVKFFTCFLIAAVVAGCVSDNGTHKPNNGNKNGDEIMFDTGIKAEIEADIEAHWKEYGYKEKPKKFVAISFDDGPCPASSYGGTAAMLAKLDELKVKATFFVIGGNVRANKSVAKAIFDAGHELGNHSDGYGSLGGETVSAIKTNLTAASLAIKEITGKDPVLFRAPNLNHGRYLSQVCKEMGMALIDRQCS

SEQ ID NO: 42851 - DNA, 303 bp, Unknown
  Obtained from environmental sample
  misc_feature (1)..(303): n is a, c, g, or t
atgggcggtatttatcccaagtctgcaaggaaatgggtatggctcttattgaccggcaatgttcataacgactggccaggagatgcggcttcaattaaaaacagcgttctttcaagcccgtataacggcggtattattcttttgcatgataataacacatcgcaaggaaacacgatgtctgtactaccggatatagtaaagggccttagggaaaaaggtttctggatattgacggtaggccaacttgtagctgtgaaggaaacatctctggaagccggggaaaggtataattcgattaattaa

SEQ ID NO: 42852 - protein, 100 aa, Unknown
  Obtained from environmental sample
  misc_feature (1)..(100): Xaa is any amino acid
MGGIYPKSARKWVWLLLTGNVHNDWPGDAASIKNSVLSSPYNGGIILLHDNNTSQGNTMSVLPDIVKGLREKGFWILTVGQLVAVKETSLEAGERYNSIN

SEQ ID NO: 42853 - DNA, 417 bp, Unknown
  Obtained from environmental sample
  misc_feature (1)..(417): n is a, c, g, or t
atgctgaatttgcctataggtacgctttacgatttaatctttatccatactgtagaaccaaaaataaaagcgcaaaaacctgtcgctctgattgattaccccgcttttgtcccctgcttggcgaaaaaatcagaaaacggcagaacctgcgagcgatgggagttgtacttcaatggcatagaactggcgaattgttattcggaagaaactgatccgcaaaaagtaaaagatttttttacagatgaagccgcgcaaaaagaaaaaaccgctcttgtacggcataaagtagatcacgactattacaaaacatttgaaaatttccctcaatgttcgggtgtggcgcttggtatggacagactaatcatggcgttaacaggacgttcaaccatagacagcgtattacccttcgctttgtaa

SEQ ID NO: 42854 - protein, 138 aa, Unknown
  Obtained from environmental sample
  misc_feature (1)..(138): Xaa is any amino acid
MLNLPIGTLYDLIFIHTVEPKIKAQKPVALIDYPAFVPCLAKKSENGRTCERWELYFNGIELANCYSEETDPQKVKDFFTDEAAQKEKTALVRHKVDHDYYKTFENFPQCSGVALGMDRLIMALTGRSTIDSVLPFAL

SEQ ID NO: 42855 - DNA, 729 bp, Unknown
  Obtained from environmental sample
  misc_feature (1)..(729): n is a, c, g, or t
atgaagcaaaaaaaattaatctcatttttaaccgcgttgctttttttgattttatttacggcctgcgccggacagcagaaaaaggtaatattccgtccggatgccgcgaataatccgcaggaaccggccaggccttttgactcatgggaaataatcagttcgcaaaacggtcaggaagcggagaatatccccgaatgggtgcgctggtttattgacaatgatataaatgagattgaggcattggacaaatttagcggaaagtatatttttatcggggaaaacggagggagcaacttcaacgccctgcagcagtgggcaaacggctttaccgtggaacaggatttacccaggctgattaccaaaagaactgaacgcaggcttgtatcttcagcttccctctacccagatgatgagtacggcgagtattttgagtttttgataagagatatatcaaacggagaatattctggcgccgtcaaggaacagactttctggctaaagcgaaaagtacctgtcaacacggaaactgacgatggcatcagcactcaatcgaatccgaatgccgcgccggagcgttatgagttttttgtattggtcagcgttgacaaggaaacgctgcaaaaacagattcagggaattatgacaagaataaaaacaaaggtaactccgacaagggaacaggccgcggcggtagccagagtaaaaaattctttttttgaagggttctga

SEQ ID NO: 42856 - protein, 242 aa, Unknown
  Obtained from environmental sample
  SIGNAL (1)...(23)
  misc_feature (1)..(242): Xaa is any amino acid
MKQKKLISFLTALLFLILFTACAGQQKKVIFRPDAANNPQEPARPFDSWEIISSQNGQEAENIPEWVRWFIDNDINEIEALDKFSGKYIFIGENGGSNFNALQQWANGFTVEQDLPRLITKRTERRLVSSASLYPDDEYGEYFEFLIRDISNGEYSGAVKEQTFWLKRKVPVNTETDDGISTQSNPNAAPERYEFFVLVSVDKETLQKQIQGIMTRIKTKVTPTREQAAAVARVKNSFFEGF

SEQ ID NO: 42857 - DNA, 573 bp, Unknown
  Obtained from environmental sample
  misc_feature (1)..(573): n is a, c, g, or t
atgaaaaccggtaaaatatttgtattctcggcgccgtccggcgctggaaagtccacaattttgagccaccttgcggaaacggtgcccaatctcgtgtactcaatctcggccaccacgcgtaaaccgcgggtcggcgagagggacggggtgcactacttctttatgaccaaggaagagtttgaggccaaggcggctaagaacgagtttgccgagtggcaacaagtgttcggcaactactacggcacgccgcgcgccttcatagactcggtggcggctaccgggcgccatattcttatggacatagacgtcttcggaaagaagaagttcgacgcggcgtacccggaggccgtcgggatacttatagttccgcccaccgtggaggcgcttgaggcgcggcttcgggcgcgcggtaccgacgacgaggcgacgataaaattgcggctcgagaaagctcgcaccgagatggcgttcgcgcgttccgagggcaagtacgagtacgagatcgtgaacgacgatttagagaccgcggaggccgagacggcggcgcttataaggacgattatcggcggatga

SEQ ID NO: 42858 - protein, 190 aa, Unknown
  Obtained from environmental sample
  DOMAIN (39)...(143): Guanylate kinase
  misc_feature (1)..(190): Xaa is any amino acid
MKTGKIFVFSAPSGAGKSTILSHLAETVPNLVYSISATTRKPRVGERDGVHYFFMTKEEFEAKAAKNEFAEWQQVFGNYYGTPRAFIDSVAATGRHILMDIDVFGKKKFDAAYPEAVGILIVPPTVEALEARLRARGTDDEATIKLRLEKARTEMAFARSEGKYEYEIVNDDLETAEAETAALIRTIIGG

SEQ ID NO: 42859 - DNA, 969 bp, Unknown
  Obtained from environmental sample
  misc_feature (1)..(969): n is a, c, g, or t
atggcggaatttttcaatatgctgactttgttcctgcaaacctccgtgcaaatgggaacccatattcttttcgccgtgcttggcgggatcatgtgcgagaagatcggcaacctgaatcttggcatagagggcatgatgttgttaggcgccagcgtaggtttttccgtcgcgcttgccacggctaatcccattgccgcggttctggccgcgggtcttgccggctcgcttggcgcgttaatttacgggataataaccgttacattacggggcaaccaggttgtcaccgggcttgtccttacgatttttggcaccggcgtatcaggttttatcggtaaaagccttgccggaaagcccctgccggacgctgttcagaaggctttttctcctgttgccgtccccctcttggggaagatccccgttatcgggcagatcttttttatccagagcccatacgttttggcgggcatgatccttggggtattgctgtatttttattttcgctatacccgcatcggactgaacgcgcgcgctgtcggcgagaaccccgccgtcgccgacgccgccgggattccggtgatcctctataaatatgttcatgtcatgctcggcggttttttatgcggtttgggcggagcgtatctttccctggtttttgttccccgctggcaggagaacattaccgccggagcgggctggatcgccgtcgcgctggttattttcagcacatggaatcccctgcgggcgatttttgccgcctgtctctttggcgccctgcggggcctgggtttcaaattacagaatattgtcatgagcattgccggcgtccgcattattttccattcccagcttctggatatgatcccttaccttgccactatcattgtccttttgatcatcacccgcaggaagaagaaagaataccaggcgcccgcttcccttggtgcgtcgtatttccgcgaagaccggtaa

SEQ ID NO: 42860 - protein, 322 aa, Unknown
  Obtained from environmental sample
  DOMAIN (11)...(296): Branched-chain amino acid transport system / permease component
  misc_feature (1)..(322): Xaa is any amino acid
MAEFFNMLTLFLQTSVQMGTHILFAVLGGIMCEKIGNLNLGIEGMMLLGASVGFSVALATANPIAAVLAAGLAGSLGALIYGIITVTLRGNQVVTGLVLTIFGTGVSGFIGKSLAGKPLPDAVQKAFSPVAVPLLGKIPVIGQIFFIQSPYVLAGMILGVLLYFYFRYTRIGLNARAVGENPAVADAAGIPVILYKYVHVMLGGFLCGLGGAYLSLVFVPRWQENITAGAGWIAVALVIFSTWNPLRAIFAACLFGALRGLGFKLQNIVMSIAGVRIIFHSQLLDMIPYLATIIVLLIITRRKKKEYQAPASLGASYFREDR

SEQ ID NO: 42861 - DNA, 1056 bp, Unknown
  Obtained from environmental sample
  misc_feature (1)..(1056): n is a, c, g, or t
atgctaagcgtacgaatagccgcgcgtgcggagttgagccggcgggacgaaacgctgcttcggcttttagcggcagtctgcgcgcttgccgcttccggcgtaatcatggcgtttatgggatacaacccttttgacgtttatgcgaagatcatttcaggttcccttggctcggcttaccgcttcagggaaacgattaacaaggccatacccttgtgcgttctttccctgggaaccgcaattgccttcaggatgaaattctggaacataggccaggaagggcagttttaccttggggcctacggttcggccctggccgcctttgccttcccgaaccttcccgcgcccatcctcctgtcaataatgctgataatgggcatggtctttggcggcttgtgggctttaattcccgcgttattgaaaataaaattttcaacaaatgaaacgctggtaacattgatgctgaactacatagcgattaagtggatttcatttttgcagtacgtggcgtggaaagacccgacggcgctcggttttccgaaaattacccctttcagcgccaacgcagtgcttccccgtctttttagtatccatatcggctggataatcagcctctgtctcgcttttttgctgtacgtattgcttaaaaaaaccaagttcggttatgagattgacgtaataggggagagcgaggctacggcgcgttacgcgggcatgaacgtgttcaggatcagcgttctcgcaatcatgctttcaggcggcctttgcggcatagcgggaatgatgcaggcatccgcgattgaacgttccctgtcggagcagctttcaggcgggcttggctttacgtcggttattgtcacatggcttgcccgccttgagccgggcgtgattatcgttatggcgtttcttttttccctcctgatacagggcggcaattttctgcaatcgagtttgcagattcccgcttctatatcgcaagtgctgcaggggatcattatcttctttgtgcttggttctgaattctttataaggtatcgttttgtacgggggaaaaactga

SEQ ID NO: 42862 - protein, 351 aa, Unknown
  Obtained from environmental sample
  DOMAIN (60)...(336): Branched-chain amino acid transport system / permease component
  misc_feature (1)..(351): Xaa is any amino acid
MLSVRIAARAELSRRDETLLRLLAAVCALAASGVIMAFMGYNPFDVYAKIISGSLGSAYRFRETINKAIPLCVLSLGTAIAFRMKFWNIGQEGQFYLGAYGSALAAFAFPNLPAPILLSIMLIMGMVFGGLWALIPALLKIKFSTNETLVTLMLNYIAIKWISFLQYVAWKDPTALGFPKITPFSANAVLPRLFSIHIGWIISLCLAFLLYVLLKKTKFGYEIDVIGESEATARYAGMNVFRISVLAIMLSGGLCGIAGMMQASAIERSLSEQLSGGLGFTSVIVTWLARLEPGVIIVMAFLFSLLIQGGNFLQSSLQIPASISQVLQGIIIFFVLGSEFFIRYRFVRGKN

SEQ ID NO: 42863 - DNA, 1275 bp, Unknown
  Obtained from environmental sample
  misc_feature (1)..(1275): n is a, c, g, or t
ttgggtctaggcgttttgtgcctgctgacgaattctcttgttattctgaaactctaccctgtgttgatgaacgtgctgtttctctttgcctttggcctgacgctttttcagggccccccgatgatctaccgctttgcggttctggcggacaaatccattcccaattctctgggggaaaagcgaattgcggaatactgccggaaagtaaccatagtctgggttctgttttttgtttttaacggaagtatggcggcggctacgattgtctccggctctgacgtgctctggtctagttataatggcggtgtttcgtatatacttataggtaccctatttgcaggggaatatcttgtcagaaagaaggtacagaaaaatatgccaaaaatcatttcgctttctgaatttaacagcaagtccagggatatctcaacagttatatgttacgatggtgcctggagcgataatacccacaagacctggggggatttccttgaaaatactgccgtccttcgccgaaagattgaatccacaggcggtgataaatggcttctccacagtgaagactgctggtattttttcctggccttcacagccttgctccaatgcaaaaaggaagtgcttttaacggccaatacaagccccgattatctggcggaaataaaaggcgatgccccatttcttgcggatcaggttttcgccgggatggaaaatacctttcatattccttctttgctaagtgaaaagagcggaaccgccacgaaaggcgaaattccggtaattaacagtgaagaagcattcattgttttttggacctccggaactaccggcagacccaaggccattaggcagcgtcttaaggaatttgaatcggataaccgcaatatacttcttaaatggggtgaagaattttttagccgtaagttgtgttccactgtagatcagcatcacatttacggtttcctcttttcgatacttctgccttttaccgccgggactccattcaggagaaagatgataaaagcgcctgaagaatttgaaaaattctcagactcccagtacataatcatcaccgtgccggcttttttaaagcgggccgtggaaattgagacacctttgagcctccaattaaaatcgccgtatatcatcgcttcggcggcttcctttttccggacgtggcggcaaaacaaacgcggtttttggctgttggcctttggagttttacggcagtaccgaaacttccggtgtcgcctggcgtcagcaaagcaacggcattga

SEQ ID NO: 42864 - protein, 424 aa, Unknown
  Obtained from environmental sample
  misc_feature (1)..(424): Xaa is any amino acid
MGLGVLCLLTNSLVILKLYPVLMNVLFLFAFGLTLFQGPPMIYRFAVLADKSIPNSLGEKRIAEYCRKVTIVWVLFFVFNGSMAAATIVSGSDVLWSSYNGGVSYILIGTLFAGEYLVRKKVQKNMPKIISLSEFNSKSRDISTVICYDGAWSDNTHKTWGDFLENTAVLRRKIESTGGDKWLLHSEDCWYFFLAFTALLQCKKEVLLTANTSPDYLAEIKGDAPFLADQVFAGMENTFHIPSLLSEKSGTATKGEIPVINSEEAFIVFWTSGTTGRPKAIRQRLKEFESDNRNILLKWGEEFFSRKLCSTVDQHHIYGFLFSILLPFTAGTPFRRKMIKAPEEFEKFSDSQYIIITVPAFLKRAVEIETPLSLQLKSPYIIASAASFFRTWRQNKRGFWLLAFGVLRQYRNFRCRLASAKQRH

SEQ ID NO: 42865 - DNA, 543 bp, Unknown
  Obtained from environmental sample
  misc_feature (1)..(543): n is a, c, g, or t
ttggagttttacggcagtaccgaaacttccggtgtcgcctggcgtcagcaaagcaacggcattgactggataccctttggcaacgccgaactgtcggtaaacgaggacagttgtctggtgatccactcggactttatcaaaggctcggaagcttttgaaaccgccgacttggtgaagatgcttcctaacgggcattttatattgatgggacgccttgattctgtagtcaagattgaggggaagcgcatttcgctgccggaagttgagggccgcataatggaatccggccttgcttctgacgtctgcgtgatcgccatggaggacaagcgccagtaccttgccgcggctatagttttcaacgaaagaggcaaagaaaaattcacgggtctggaaaagcaccaaataaattctttctggcacgaataccttttgcgcttttttgagaatctggttatcccgaaaagatggcgctttcctgaagcgctgccggttgacgcccaaggtaaaaaaaagaaggaagatattgagttactcttcttgtga

SEQ ID NO: 42866 - protein, 180 aa, Unknown
  Obtained from environmental sample
  misc_feature (1)..(180): Xaa is any amino acid
MEFYGSTETSGVAWRQQSNGIDWIPFGNAELSVNEDSCLVIHSDFIKGSEAFETADLVKMLPNGHFILMGRLDSVVKIEGKRISLPEVEGRIMESGLASDVCVIAMEDKRQYLAAAIVFNERGKEKFTGLEKHQINSFWHEYLLRFFENLVIPKRWRFPEALPVDAQGKKKKEDIELLFL

SEQ ID NO: 42867 - DNA, 1077 bp, Unknown
  Obtained from environmental sample
  misc_feature (1)..(1077): n is a, c, g, or t
atgaagctaatgcgggaagggaatttaatacccttgcaaaaagacatcggtacttttgcggaactggctgacggtttttgggattgggatgcttcaccctaccttgaggacagaaggaaacggagtttgctcacaaaggcgtatgccgacaaatgcaaaagggttgtcgatttttaccttctgccccacttcggaaaaatgaggcttgagaaaatcacccttgacgttgtcgaggaatggtttgacaagctgattgcggaaaaatacaagcacacgaccattaacggcattttcggcacgttaaggactatgctgcggtgggcagcaaaaaaaaggattgtgccggggggcgatccgcttatcggcgtggaacggcttttgaatgaccgcaagcagattaagattattacccaggtcgaattcaaagccctttttgtcgatgactggaaaaaagtctgggataatgacctgctgcgctacacggccaacaagctggcggcgtgtaccggcatgaggtgcggggaactgttagggctgcggggcgaaaacatatttgacgaccacctttttctttgcgggcagtatgacagttacggataccgttccaccaaaacgaaaattaaacaccatatccctttggctgcggaactggtaggggatttgcggaaacttatgagtgtaaacggggacggctatgtattctcgcttgacggcggggatacgcctgtgtgcggaaggcatttgagaaacggattgaaaaaagcccttaaaaatatcggcatagacgaaacggaagcgaaaaagcgggggcttcacctccatgcatggcggcatttctgtaatactgaaatgcaaaaaggcggattgaccattcagaaagtacaggcggttacggggcataagtccgagagaatgaccgaacactatacacattttgatccgcttgatttcggcgaagtcccgaaaatacaggaggctttgctggcaaagaaagaaaaaacggcgaatgaacgccatgctcttacccttgtaaaaatgccggaaaataatgtctccaaggggagaaaggcttcatag

SEQ ID NO: 42868 - protein, 358 aa, Unknown
  Obtained from environmental sample
  DOMAIN (146)...(319): Phage integrase family
  misc_feature (1)..(358): Xaa is any amino acid
MKLMREGNLIPLQKDIGTFAELADGFWDWDASPYLEDRRKRSLLTKAYADKCKRVVDFYLLPHFGKMRLEKITLDVVEEWFDKLIAEKYKHTTINGIFGTLRTMLRWAAKKRIVPGGDPLIGVERLLNDRKQIKIITQVEFKALFVDDWKKVWDNDLLRYTANKLAACTGMRCGELLGLRGENIFDDHLFLCGQYDSYGYRSTKTKIKHHIPLAAELVGDLRKLMSVNGDGYVFSLDGGDTPVCGRHLRNGLKKALKNIGIDETEAKKRGLHLHAWRHFCNTEMQKGGLTIQKVQAVTGHKSERMTEHYTHFDPLDFGEVPKIQEALLAKKEKTANERHALTLVKMPENNVSKGRKAS

SEQ ID NO: 42869 - DNA, 1410 bp, Unknown
  Obtained from environmental sample
  misc_feature (1)..(1410): n is a, c, g, or t
ttgccaaaattcaatccgacaatgaacggcagacctgtattgaaaaacaaatacaggagtattttgggggacatcatgtttgaatccatgacaaaagatcaggctactcagcatattcttaatagcgtgaaagaatactataagatctttatgcaaaagccgccgtaccgtgacggagatcgcattccctatgcttcacggatctttgatgaacaggaaatggtcaatctggttgacagttcgctggagttttggcttacttcagggcgttacaccgagcgttttgagaaacagcttgcaaagtaccttcagattcctttttgttcactggtgaattccggttcatcagcaaacctcattgcattcatggctcttacttccccattattgggagatcgggcgattgggcggggggatgaggtaatcactgttgcagcgggctttcccaccaccgttacccccattttgcaatttggcgctgtaccggtgtttgtggatgttaccattcctcagtacaatattgatgtttcgttactcgaaaaagccttctcccccaaaacaaaagcggtaatgttggcccatactctgggggacccctttgaccttgaggcggtaaaaagtttttgttccgcccataaattatggttggtagaagacaactgcgatgccttgggttcaacctatacaattgatggcgttttaaaatttaccggaaccattggcgacattggaacatcaagcttttatcctccccatcacatgaccatgggcgaaggcggggcggtctatacgtctgatcccctgcttcacaagatcattcgttccatgcgggattggggccgggattgcgcctgtccctccggaaaagacaacctctgtgggaaccgctttaaccggcagtacggcgaactgccttttgggtatgaccacaaatacgtctatagccatttcggctacaacctgaaagctacggatatgcaagccgccatcggctgcgcccaactggaaaaattccctttatttgtaggagaacgccgttataactggaagcgcttgcatgaagggctaaaagacttgcaagacaaattgatattgccggaagcggctcccaattccgatccaagctggtttggatttttgataacctgcaaagaaagcgttagccgcaataaactggttcagcaaatcgaaagcaaaaatatccaaacgcggatgctctttgcgggcaatttggttaagcatccttgttttgatgagttgcggaaatccggtacaggttatcgcatagttggaactttggacacgacggattgcgttatgaacgatagtttctggattggcgtatatcctggcatgaccgatgagatgatagataagatgattgatgtgatacgggattttttatgctga

SEQ ID NO: 42870 - protein, 469 aa, Unknown
  Obtained from environmental sample
  DOMAIN (67)...(465): DegT/DnrJ/EryC1/StrS aminotransferase family
  misc_feature (1)..(469): Xaa is any amino acid
MPKFNPTMNGRPVLKNKYRSILGDIMFESMTKDQATQHILNSVKEYYKIFMQKPPYRDGDRIPYASRIFDEQEMVNLVDSSLEFWLTSGRYTERFEKQLAKYLQIPFCSLVNSGSSANLIAFMALTSPLLGDRAIGRGDEVITVAAGFPTTVTPILQFGAVPVFVDVTIPQYNIDVSLLEKAFSPKTKAVMLAHTLGDPFDLEAVKSFCSAHKLWLVEDNCDALGSTYTIDGVLKFTGTIGDIGTSSFYPPHHMTMGEGGAVYTSDPLLHKIIRSMRDWGRDCACPSGKDNLCGNRFNRQYGELPFGYDHKYVYSHFGYNLKATDMQAAIGCAQLEKFPLFVGERRYNWKRLHEGLKDLQDKLILPEAAPNSDPSWFGFLITCKESVSRNKLVQQIESKNIQTRMLFAGNLVKHPCFDELRKSGTGYRIVGTLDTTDCVMNDSFWIGVYPGMTDEMIDKMIDVIRDFLC

SEQ ID NO: 42871 - DNA, 714 bp, Unknown
  Obtained from environmental sample
  misc_feature (1)..(714): n is a, c, g, or t
atgggacaggatagcgtggggttgatgaaagaagcggcgggtaaagccgcagtagacgaaatggtaaaaagcggcatgaaactcggccttggaacgggttctaccgccattcacgcggttcgcagggtaggcgagcttttgtcgcagggaacgttacgggacatttgcgcgtttgccacaagttttcagacggaaattgaatgtgaaaaactgcatattccttttttttcattaaattcgcgcgaactctccgcaggactggatttaacaattgacggcgccgacgaagtagacccgcaaaaccgccttattaaaggaggagggggcgctcatttaattgaaaaaatagccgcttatgcctcggcgcagtacgctattacagtggacgaatcaaaattaacagagcgcctgggaggcggttttcccgttccggtagaagttgttcccgaggcaagagcgcgggctgcaaaggcgctggaaaagttaggcgcaaatgtttttctaagagaggcggtgcgaaaagcggggcctgtaatcaccgaacatggaaatttaatccttgatatccgttttaattctccggtagacccgacattaatggaaacggaaataaacaacattcccggcgttgtagagaacggatttttcacccgaaagccgcctgtagtatatattgcccgttcaaacggaacggtagaaaaaaggggaagctga

SEQ ID NO: 42872 - protein, 237 aa, Unknown
  Obtained from environmental sample
  DOMAIN (55)...(232): Ribose 5-phosphate isomerase A (phosphoriboisomerase A)
  misc_feature (1)..(237): Xaa is any amino acid
MGQDSVGLMKEAAGKAAVDEMVKSGMKLGLGTGSTAIHAVRRVGELLSQGTLRDICAFATSFQTEIECEKLHIPFFSLNSRELSAGLDLTIDGADEVDPQNRLIKGGGGAHLIEKIAAYASAQYAITVDESKLTERLGGGFPVPVEVVPEARARAAKALEKLGANVFLREAVRKAGPVITEHGNLILDIRFNSPVDPTLMETEINNIPGVVENGFFTRKPPVVYIARSNGTVEKRGS

SEQ ID NO: 42873 - DNA, 894 bp, Unknown
  Obtained from environmental sample
  misc_feature (1)..(894): n is a, c, g, or t
atggatgttcgcgagctttccgagttgtaccattttaaaaaaataacaaaagatacaaaaatatacggagttataggcaacccgttaaaatccagcgtaagcccttggttttttaacactatttttaatcttgaaaacgcggattgcgtgtatgcccccttccctgtaacggatatcaatgattttctggatctcgcggacggattgaatatacagggactttccatcacagtgcctttcaaggaaacggttcttccatatattggggaaaaatcggaaattgcagaatcaatcggcgcgtgcaataccatgtaccgtaaagaggacgtatggtatggcgataataccgattatgccggttttataatgtcgctgttgaattttttaggcagaaaagatttaaaacggcagaaaattacaataataggcgccggaggcgtatcacgcgccgtagccgcggaaatatttaaaatgggcggcaaagcccttatattaaaccgtaccgttcataaagccgcaagtatcgcatcactgtatggtttccgttggggaggactggataatcagggaatagatcttatgtccaaattcaatgacataataatccaaaccacctccgtcggtatggaaggttataatgaaggagatccgctggaaacttacgaattttcaggaaaagaatctgtgatggatttgatttatactcccgctcagactccttttttaaaaagagccgcaaccgcaggatgtaaaacgctcaacggttatgatatggtaatacgtcaggcgtgtttgcagtacgcaaacttctttgacagggaaataccaaaaacacatttatcgcaattaaattcattaggagcaaacggatgggacaggatagcgtggggttga

SEQ ID NO: 42874 - protein, 297 aa, Unknown
  Obtained from environmental sample
  DOMAIN (121)...(242): Shikimate / quinate 5-dehydrogenase
  misc_feature (1)..(297): Xaa is any amino acid
MDVRELSELYHFKKITKDTKIYGVIGNPLKSSVSPWFFNTIFNLENADCVYAPFPVTDINDFLDLADGLNIQGLSITVPFKETVLPYIGEKSEIAESIGACNTMYRKEDVWYGDNTDYAGFIMSLLNFLGRKDLKRQKITIIGAGGVSRAVAAEIFKMGGKALILNRTVHKAASIASLYGFRWGGLDNQGIDLMSKFNDIIIQTTSVGMEGYNEGDPLETYEFSGKESVMDLIYTPAQTPFLKRAATAGCKTLNGYDMVIRQACLQYANFFDREIPKTHLSQLNSLGANGWDRIAWG

SEQ ID NO: 42875 - DNA, 1164 bp, Unknown
  Obtained from environmental sample
  misc_feature (1)..(1164): n is a, c, g, or t
atgaagaagacaattgttagcctgctgattgcgggcgcgctggttttggcttttaatcacacggttgaggccaaaggtaatacgcaagcctccggctcggttctttcggttggagccacgccggttccccacgcggaattgcttaacctgatcaaggacgatctggcggagcagggtattaccctgaaagtagtggaattcaccgactatgtgcagcccaatgtggcggtgattgcgggagacctggacgccaactttttccagcatatcccttacctggattccaacgaggaatggaaggcgaaaatggtttccgcttttggcgtgcatgtggaaccattcgggctgtactccgcgaagtacaagcatatcaaggacctgcccaatggcgctactatcgccatccccaatgacccgtcaaacggtggccgggcgctgctcctgctccaggcaaaagggcttattaccctcaaagaaggggtgggcctgaccgctaccccccgcgatgtagccggcaatccgcataatttcaagttccagccccttgaggccgcccagcttccccgctccctgaaagacgtggatgccgccaccattaacggcaactacgccctggaagccggccttaaccccgtcaaggactcccttatcattgagggcgcggattccccctatgttaacatcgtggtggtgttgaaaggcaaggagggtgattcccgtattgtcgctctgaagaaagcccttctcagccagaaagtaaaggcttacatcaacagccattacgacggcggcgtcgcgcgctgttttctaaaaagacctcacgcagagttcgcggaggcgcagagggaagaacgaaagaagaaagaaaaaggaagaagtaagaaagtgagagaagggaacttcttccttcttgctttttccttcttacttaatctcttactttttcttttgtattcctccgcgtgctccgcgcctctgcgtgagatattcttcttcccttggtcattgctcattgctcattgctattttctccgcggctttcctcaccctctcaataatcgcttttacgtccacgcctgttatcttgccgtcttttaccagcctcttgccgtttacaaatacgtccgtaacatcggcccctgtcgcgctgaaaacaagggctga

SEQ ID NO: 42876 - protein, 387 aa, Unknown
  Obtained from environmental sample
  SIGNAL (1)...(24)
  DOMAIN (35)...(269): NLPA lipoprotein
  misc_feature (1)..(387): Xaa is any amino acid
MKKTIVSLLIAGALVLAFNHTVEAKGNTQASGSVLSVGATPVPHAELLNLIKDDLAEQGITLKVVEFTDYVQPNVAVIAGDLDANFFQHIPYLDSNEEWKAKMVSAFGVHVEPFGLYSAKYKHIKDLPNGATIAIPNDPSNGGRALLLLQAKGLITLKEGVGLTATPRDVAGNPHNFKFQPLEAAQLPRSLKDVDAATINGNYALEAGLNPVKDSLIIEGADSPYVNIVVVLKGKEGDSRIVALKKALLSQKVKAYINSHYDGGVARCFLKRPHAEFAEAQREERKKKEKGRSKKVREGNFFLLAFSFLLNLLLFLLYSSACSAPLREIFFFPWSLLIAHCYFLRGFPHPLNNRFYVHACYLAVFYQPLAVYKYVRNIGPCRAENKG

SEQ ID NO: 42877 - DNA, 921 bp, Unknown
  Obtained from environmental sample
  misc_feature (1)..(921): n is a, c, g, or t
atggcgaggcgagggggagattggataaaaggggctttagtcgaagatatccgccatgatttttccaattccgattcctttgtccccccgcaaaagctaaaggaaatttccgcggcttgccgggaggctggtcttgtccccgtcatcgggctgatggcagaggaggactttgagaccggccgtctgcggaaagcctttgatctgctgagggacattgatgctctgcaaaccatgcaccttgccgaaaacacatggcgcgttgaccgtatccttgaaaaatacggtatgaccccgatagagtaccttgcgcgtaacggcttccttaacaataagctgataggctcccatgtcgtatgcgtgacagataacgagatcgggctgttgaaagaagcgaacgtcaaggtcgccaacacgccgttatgtgaaatgaaaatcgccgatgggatagcccccatccccgaaatggccaggcggggagtcacagtcgggcttggcactgacggccccctttggaacaattcaagcgacattttcagggagatgaaggctatggcccttttgcacacggtcagcaagggaatccgcagtttttccaagaaagacatcctcaatatggctaccacggggggcgcggccgttttcggcaaggaaaaagagttcggcatgatcaaagagggtatgaaagccgacatgatccttattgaccctgacaagccgcacctgcagcccctccttttaggcaaaaatgaaaatgtcacttcagcccttgttttcagcgcgacaggggccgatgttacggacgtatttgtaaacggcaagaggctggtaaaagacggcaagataacaggcgtggacgtaaaagcgattattgagagggtgaggaaagccgcggagaaaatagcaatgagcaatgagcaatga

SEQ ID NO: 42878 - protein, 306 aa, Unknown
  Obtained from environmental sample
  DOMAIN (8)...(235): Amidohydrolase family
  misc_feature (1)..(306): Xaa is any amino acid
MARRGGDWIKGALVEDIRHDFSNSDSFVPPQKLKEISAACREAGLVPVIGLMAEEDFETGRLRKAFDLLRDIDALQTMHLAENTWRVDRILEKYGMTPIEYLARNGFLNNKLIGSHVVCVTDNEIGLLKEANVKVANTPLCEMKIADGIAPIPEMARRGVTVGLGTDGPLWNNSSDIFREMKAMALLHTVSKGIRSFSKKDILNMATTGGAAVFGKEKEFGMIKEGMKADMILIDPDKPHLQPLLLGKNENVTSALVFSATGADVTDVFVNGKRLVKDGKITGVDVKAIIERVRKAAEKIAMSNEQ

SEQ ID NO: 42879 - DNA, 747 bp, Unknown
  Obtained from environmental sample
  misc_feature (1)..(747): n is a, c, g, or t
atgagcagttacaaacttaataatttacttgccgatcgcgggtcgagaaaaatataccgcgacggggacaaagtgataaagctcagggacgaaggtttccccgcgccggacgttctttctgaagcgcacaaccttgccgtggtgggagagaccgccctcaaggttccgcgtttggtagaggtaacgaaaatagacggcaagtgggcggtcgtttgggaatatgttgagggaacttcccttgacaaacttatggaaaaaaacaaaaacaaagaggagcagtatcttgagcgctttgttgacattcagcttaacatgcaccgtcatagcgcgacaaggcttcctttgcttatcgaaaagatggagcgcaagataaaagcctccgatcttgactcgaccgcccgctacgaaatcctgggaaggctggcgagtatgcccaaacacaccaaactctgccacggcgattataaccccgccaacgttgtcatcaccgaaaaagacgaagcatacatcatcgactggtgtcacgccacgcagggcaacgcctcggcggacgcggcgcatacctacctgttgttccgtcttgcgggtaacgccgatcttgcggacaaataccttgcgctgttctgtaaaaagagcggcacggcgaaacaatatgtggagaagtggctttccattgtggcgcgcttcacacgcttcccaaggcaaggccggaagaaaaagaatttttactgcattgggccaatgtag

SEQ ID NO: 42880 - protein, 248 aa, Unknown
  Obtained from environmental sample
  DOMAIN (5)...(218): Phosphotransferase enzyme family
  misc_feature (1)..(248): Xaa is any amino acid
MSSYKLNNLLADRGSRKIYRDGDKVIKLRDEGFPAPDVLSEAHNLAVVGETALKVPRLVEVTKIDGKWAVVWEYVEGTSLDKLMEKNKNKEEQYLERFVDIQLNMHRHSATRLPLLIEKMERKIKASDLDSTARYEILGRLASMPKHTKLCHGDYNPANVVITEKDEAYIIDWCHATQGNASADAAHTYLLFRLAGNADLADKYLALFCKKSGTAKQYVEKWLSIVARFTRFPRQGRKKKNFYCIGPM

SEQ ID NO: 42881 - DNA, 1887 bp, Unknown
  Obtained from environmental sample
  misc_feature (1)..(1887): n is a, c, g, or t
atgtcggatttattcggcagggaaatacatgaaatcctgggacacaatgatatgcacgcttttggtttttcaaaagaagccatggagattgcaaataacgctgacagaacagccatgaacgaatgcaggcaggtatcttttgaggaatggatggtatgcccggacggaaccaaacggctttttgaaaccgtaaaagtgccgcttattctggacgaagaaatagtcggaattttgggtataggccgcgatattacccagcgtaaggcaatggaagaggaagtaagggcggcttcagtcgctaagtccgatttccttgccaatatgagccatgaaatccgcacgccgcttaacgtggttatcggccttacggatttagtgctggaagacggctccctttccaaagaagttacggaaaacctgataaaaattaataacgccggaagtacgcttttaagcattgtgaacgacattcttgatttctcaaaaatcgaagcgggcaaactgcaaatatctccggttgaatattatatgtccagtctgttgaacgacgttattacccttgttgttacgcgcataggggaaaaaccgataacattcaatcttaatatccctgataaccttccgaacaaactatacggcgacgatctgcgggtaaagcagatactaaccaacctcctgagcaattccgccaagtacacgcaccggggaagcatagagttaaaagtaaactgcgagcgcgaaggcggcaacgtatggatgattatttctgtttccgacacaggcatcggcataagcgaggaaaacctaaagaagctcttctcggattataaccaggtggacacccgcgccaaccgcaatatagagggcacaggcctgggattggccatcacaaagaggcttgcggagcttatgggcggaaaaatctccgtgacaagcgagtacggcaagggctctgttttctctgttcttattcggcagggctttgtaagcgatgcgccaatcggtcctgttgttgcggaaaacctccgtaaattccgttatgccgatgacaaacgcactgttggcaaaaagctcgtgcgccaggatttaagcaacgccagagtattggtcgttgacgatatgcagaccaaccttgatgtggcggcaggcctcttgcgaaaatacaaaattcaggtcgattgcataaataacggcaaggaggccgttgagcgtatacgcggcggcaatccggcgtataacgctatattcatggatcacatgatgccgggaatggacggcatagaatcggcagacacgattcgctccatagactcggaatacgcccgccaaatacctattatcgctctcacggcaaacgccatccagggaacggaaaatatgttttatgaacacggttttcaggcattcatatccaagcccatcgacataatggaactggattcagtaatcaagaagtgggtgcgcaatgaatcaatggagagtatatcaatcccaaatacaacagcggaaaataataaaccggtaataaacatacccggagtagataccgaaaagggactttctttgtacggcgatgatttggatatttacctgccaacactgcgttcttacgtttcctatactacggacgttctcgacaagcttcggaatgtttcagaagaaagcttgcctgagtatgttattaacgtacatggattgaaaggcaccagcgccagcataggcgcggaaatagtaagagaatcagcccttaatctggaaaagctggcaagggctggcgacttgcagggggttctggcaagaaacgacaggtttattaaaggcacggaaaatattgttgccaatataaaggcttggctggaaaaacattataatggggaaatcggataa

SEQ ID NO: 42882 - protein, 628 aa, Unknown
  Obtained from environmental sample
  DOMAIN (532)...(607): Hpt domain
  misc_feature (1)..(628): Xaa is any amino acid
MSDLFGREIHEILGHNDMHAFGFSKEAMEIANNADRTAMNECRQVSFEEWMVCPDGTKRLFETVKVPLILDEEIVGILGIGRDITQRKAMEEEVRAASVAKSDFLANMSHEIRTPLNVVIGLTDLVLEDGSLSKEVTENLIKINNAGSTLLSIVNDILDFSKIEAGKLQISPVEYYMSSLLNDVITLVVTRIGEKPITFNLNIPDNLPNKLYGDDLRVKQILTNLLSNSAKYTHRGSIELKVNCEREGGNVWMIISVSDTGIGISEENLKKLFSDYNQVDTRANRNIEGTGLGLAITKRLAELMGGKISVTSEYGKGSVFSVLIRQGFVSDAPIGPVVAENLRKFRYADDKRTVGKKLVRQDLSNARVLVVDDMQTNLDVAAGLLRKYKIQVDCINNGKEAVERIRGGNPAYNAIFMDHMMPGMDGIESADTIRSIDSEYARQIPIIALTANAIQGTENMFYEHGFQAFISKPIDIMELDSVIKKWVRNESMESISIPNTTAENNKPVINIPGVDTEKGLSLYGDDLDIYLPTLRSYVSYTTDVLDKLRNVSEESLPEYVINVHGLKGTSASIGAEIVRESALNLEKLARAGDLQGVLARNDRFIKGTENIVANIKAWLEKHYNGEIG

SEQ ID NO: 42883 - DNA, 1275 bp, Unknown
  Obtained from environmental sample
  misc_feature (1)..(1275): n is a, c, g, or t
ttgggaaacgcccgggtggccctcctggatgaatatacccccagtgtaaaggccaccatggccttgttcctggaaggcattgaggccacggccaaaagcgaggccgtggcccaggccatgatcgacaaggttgatgaattcattaatattatcgggaatgttgcccttcaatacacgcggaccctaagctcggccatgtccagaatcatcttggtgatgtcgggcggcccggtcgtggctctcctggtcagcctggcgtttggcctcttggtgaccagaagcctggtccgggccattgaagccgttattgccagcctctcgaaaagcgcctatgaaatcgaacagtcttccaagcggctgaccaaatacgccggcgccttgtctggaggaaccacggaaaacgcgaataatctgcaagataccagttcctccctggaggaagtcagttccatgaccaagcgcaacgccgacaacgccttggaggccaagaccctgatgggccaggccaccgatatcgttgcccaggccgatggttccatggccaaggtcaccgaggccatggacgagattgcccgctcgggcggcgaaataaacaagataataaagtccattgacgagatagccttccagaccaatatcctggccctgaacgcggcggtggaggcggcccgggccggtgaaacgggcaagggcttcgcggtggtggccgaggaggtgcgcaacctcgcgatgcgcagcgctgaagcggcaaggaacacggccgacatgattgaggcgtccgtaaagaacgccgacggcggcgtaaagatcacggaagaggtggccgaggcgctcagccagattgtcgaccgcgcgcagaaagtgggcgacctgatagccgagatagcggcggcctccaacgagcaggcgcttggtatagagcaagtgaacaccgccgtggcgtctatgaaccaggtcacccagcagaacgcggccaactccgaagaatcggccagcgccgccgaggagctcagctctcaggctagggagctctcgaatatggtgggcacattcgcgttgtccgacatgatcggcgtccgccgcagcgcgcaggcgagcaattacgccccccctccaaagcatttgccgtctccgcaggcgtttcgcaagccggtgatcgcggctcttcccgacaaatccaagaaagcgccgccgccggccaaggcgaccgccccgaaagcggtgaacgcgtcggaggtcattccgcttgacgacgatgaattgagcgagttttaa

SEQ ID NO: 42884 - protein, 424 aa, Unknown
  Obtained from environmental sample
  DOMAIN (132)...(354): Methyl-accepting chemotaxis protein (MCP) signaling domain
  misc_feature (1)..(424): Xaa is any amino acid
MGNARVALLDEYTPSVKATMALFLEGIEATAKSEAVAQAMIDKVDEFINIIGNVALQYTRTLSSAMSRIILVMSGGPVVALLVSLAFGLLVTRSLVRAIEAVIASLSKSAYEIEQSSKRLTKYAGALSGGTTENANNLQDTSSSLEEVSSMTKRNADNALEAKTLMGQATDIVAQADGSMAKVTEAMDEIARSGGEINKIIKSIDEIAFQTNILALNAAVEAARAGETGKGFAVVAEEVRNLAMRSAEAARNTADMIEASVKNADGGVKITEEVAEALSQIVDRAQKVGDLIAEIAAASNEQALGIEQVNTAVASMNQVTQQNAANSEESASAAEELSSQARELSNMVGTFALSDMIGVRRSAQASNYAPPPKHLPSPQAFRKPVIAALPDKSKKAPPPAKATAPKAVNASEVIPLDDDELSEF

SEQ ID NO: 42885 - DNA, 1107 bp, Unknown
  Obtained from environmental sample
  misc_feature (1)..(1107): n is a, c, g, or t
atgctgttttaccgattaaaactcgctcaattcatcgtcgtcaagcggaatgacctccgacgcgttcaccgctttcggggcggtcgccttggccggcggcggcgctttcttggatttgtcgggaagagccgcgatcaccggcttgcgaaacgcctgcggagacggcaaatgctttggagggggggcgtaattgctcgcctgcgcgctgcggcggacgccgatcatgtcggacaacgcgaatgtgcccaccatattcgagagctccctagcctgagagctgagctcctcggcggcgctggccgattcttcggagttggccgcgttctgctgggtgacctggttcatagacgccacggcggtgttcacttgctctataccaagcgcctgctcgttggaggccgccgctatctcggctatcaggtcgcccactttctgcgcgcggtcgacaatctggctgagcgcctcggccacctcttccgtgatctttacgccgccgtcggcgttctttacggacgcctcaatcatgtcggccgtgttccttgccgcttcagcgctgcgcatcgcgaggttgcgcacctcctcggccaccaccgcgaagcccttgcccgtttcaccggcccgggccgcctccaccgccgcgttcagggccaggatattggtctggaaggctatctcgtcaatggactttattatcttgtttatttcgccgcccgagcgggcaatctcgtccatggcctcggtgaccttggccatggaaccatcggcctgggcaacgatatcggtggcctggcccatcagggtcttggcctccaaggcgttgtcggcgttgcgcttggtcatggaactgacttcctccagggaggaactggtatcttgcagattattcgcgttttccgtggttcctccagacaaggcgccggcgtatttggtcagccgcttggaagactgttcgatttcataggcgcttttcgagaggctggcaataacggcttcaatggcccggaccaggcttctggtcaccaagaggccaaacgccaggctgaccaggagagccacgaccgggccgcccgacatcaccaagatgattctggacatggccgagcttag

SEQ ID NO: 42886 - protein, 368 aa, Unknown
  Obtained from environmental sample
  misc_feature (1)..(368): Xaa is any amino acid
MLFYRLKLAQFIVVKRNDLRRVHRFRGGRLGRRRRFLGFVGKSRDHRLAKRLRRRQMLWRGGVIARLRAAADADHVGQRECAHHIRELPSLRAELLGGAGRFFGVGRVLLGDLVHRRHGGVHLLYTKRLLVGGRRYLGYQVAHFLRAVDNLAERLGHLFRDLYAAVGVLYGRLNHVGRVPCRFSAAHREVAHLLGHHREALARFTGPGRLHRRVQGQDIGLEGYLVNGLYYLVYFAARAGNLVHGLGDLGHGTIGLGNDIGGLAHQGLGLQGVVGVALGHGTDFLQGGTGILQIIRVFRGSSRQGAGVFGQPLGRLFDFIGAFREAGNNGFNGPDQASGHQEAKRQADQESHDRAARHHQDDSGHGRA

SEQ ID NO: 42887 - DNA, 648 bp, Unknown
  Obtained from environmental sample
  misc_feature (1)..(648): n is a, c, g, or t
ttggccgcgttctgctgggtgacctggttcatagacgccacggcggtgttcacttgctctataccaagcgcctgctcgttggaggccgccgctatctcggctatcaggtcgcccactttctgcgcgcggtcgacaatctggctgagcgcctcggccacctcttccgtgatctttacgccgccgtcggcgttctttacggacgcctcaatcatgtcggccgtgttccttgccgcttcagcgctgcgcatcgcgaggttgcgcacctcctcggccaccaccgcgaagcccttgcccgtttcaccggcccgggccgcctccaccgccgcgttcagggccaggatattggtctggaaggctatctcgtcaatggactttattatcttgtttatttcgccgcccgagcgggcaatctcgtccatggcctcggtgaccttggccatggaaccatcggcctgggcaacgatatcggtggcctggcccatcagggtcttggcctccaaggcgttgtcggcgttgcgcttggtcatggaactgacttcctccagggaggaactggtatcttgcagattattcgcgttttccgtggttcctccagacaaggcgccggcgtatttggtcagccgcttggaagactgttcgatttcatag

SEQ ID NO: 42888 - protein, 215 aa, Unknown
  Obtained from environmental sample
  misc_feature (1)..(215): Xaa is any amino acid
MAAFCWVTWFIDATAVFTCSIPSACSLEAAAISAIRSPTFCARSTIWLSASATSSVIFTPPSAFFTDASIMSAVFLAASALRIARLRTSSATTAKPLPVSPARAASTAAFRARILVWKAISSMDFIILFISPPERAISSMASVTLAMEPSAWATISVAWPIRVLASKALSALRLVMELTSSREELVSCRLFAFSVVPPDKAPAYLVSRLEDCSIS

SEQ ID NO: 42889 - DNA, 321 bp, Unknown
  Obtained from environmental sample
  misc_feature (1)..(321): n is a, c, g, or t
ttgatgaaaccaaaggcaaagacagaatcgataatggagcgcggttactgcgcttccgtccgcgaaagcggcggcgaggcgtacaagttcgtttcgccggcccggcgcggcgtgccggatcgtttgacgctctacgcgataccgccgaagcaccgcgccattgtcgcgcaatacgtccgcttcgtcgagttcaaggcgccgggcaagaagcccacgcgcgcgcagaaaagagaacatgcgcgtttggaggctttgggctttaaagtcatagtcgtcgataagatgccgtcaaacgtatttgttgaagggatagacccgtga

SEQ ID NO: 42890 - protein, 106 aa, Unknown
  Obtained from environmental sample
  misc_feature (1)..(106): Xaa is any amino acid
MMKPKAKTESIMERGYCASVRESGGEAYKFVSPARRGVPDRLTLYAIPPKHRAIVAQYVRFVEFKAPGKKPTRAQKREHARLEALGFKVIVVDKMPSNVFVEGIDP

SEQ ID NO: 42891 - DNA, 474 bp, Unknown
  Obtained from environmental sample
  misc_feature (1)..(474): n is a, c, g, or t
atgcgggaaagggcggcgttatctgtaatcaacgacaaagcggcggacagttaccgcaaatggggaaagctcgaattttcccgcgtgaaaaagaattggctgcgcatcctcctgccgtccggacgttatctgtgttacgccggcgcaaagagcgacggcgggaaaatccgctatctcggcaacgacacctacacgcgccgctggggatatcaatccacgtacggcgggaaactggcggaaaatatcgtgcaggccgtgagccgcgatattttggcgtcctctatgttggaagtagaatcgcgcggctttaaagtggtgctgtccatacatgacgagctgatagcggaggttcctgacaccgataactacactgctgaaacgttatcaacgtttatgtcagccgcaccgccgtgggcgaaagggttaccgctagcggcggccggatttgaggctaaaaggtataggaaagattga

SEQ ID NO: 42892 - protein, 157 aa, Unknown
  Obtained from environmental sample
  misc_feature (1)..(157): Xaa is any amino acid
MRERAALSVINDKAADSYRKWGKLEFSRVKKNWLRILLPSGRYLCYAGAKSDGGKIRYLGNDTYTRRWGYQSTYGGKLAENIVQAVSRDILASSMLEVESRGFKVVLSIHDELIAEVPDTDNYTAETLSTFMSAAPPWAKGLPLAAAGFEAKRYRKD

SEQ ID NO: 42893 - DNA, 1314 bp, Unknown
  Obtained from environmental sample
  misc_feature (1)..(1314): n is a, c, g, or t
atgcaactggaagatcaatataaaacaggtaaatatggcggtaatacgaaaaatcatcgcggcgtttgccctgccgattggcatttacctgatactgcggaatggcgtaatttagtgacattcgcgggtgctcctacgaatgatgtcaatggtagacctgcgggtagaaaactgaagacgacaacgggttggagtcctcctaattccacttataattataatggaacagacgatttctggttttctgccatgcccggcgggtataataacttttctggcactagcgctcgttggtggttggccgaggatcaaacaacagcaaatgcaaattatatgagtgtgggggactccgattccgcgttttcaaaggctcaaattgccaagactaataattttttttcggtgagatgcgttggagataaattagtagcagtcaaacccacagtcagaaacaaaaccctcatttataaaggcgtacagcaatttgcagggatagcgtcagcgccaaagggcgagtatcaagtatcaggcgacagatggatagaagcgggtaaatacaccgcagtggttgtattgaaagacccgattgaatgggagtgggatgacggcacaaccgacgaccttgaattagagtggtcgatagcgcccgccgccggagaattcctccctctgactcttgacgagccatattccgacggtcttaaactttcggatttggatttaccggacggttacgcttgggcgaccactgttaacccggacactcctttgaggttaggcgaacaaaaattccccgccacctacaccgcccccggtttcgacggttcgaccggcaattacaagcccgccgacggttttataacggtgaacgtgataaagggagccgtagatttcgacccgtttgaggatatagggccgataaacgcgacctataccccaacgcttaaactgtttaatttacagttgccgccgaattacgcgtgggtttcgcctactaccgcgttagacgccggagacgaacaaattttcgacgcgaagtacaccgacccgagcggcaactacgaggcggcgttgggaattatcatagtgaatgttgcaccggccaaagggacattcggcgctccgccgccggtgaacgtaacctattctgccggcggtgtgtcactcggagacgttctcttatcagcgacgcacgccggttatgtttgggacgacccatctatagaattgaacgcgggtacgaatcatagattcgacgctcaatacaccgacccgagcggcactactcgacggacagccgaatacttcccgtga

SEQ ID NO: 42894 - protein, 437 aa, Unknown
  Obtained from environmental sample
  misc_feature (1)..(437): Xaa is any amino acid
MQLEDQYKTGKYGGNTKNHRGVCPADWHLPDTAEWRNLVTFAGAPTNDVNGRPAGRKLKTTTGWSPPNSTYNYNGTDDFWFSAMPGGYNNFSGTSARWWLAEDQTTANANYMSVGDSDSAFSKAQIAKTNNFFSVRCVGDKLVAVKPTVRNKTLIYKGVQQFAGIASAPKGEYQVSGDRWIEAGKYTAVVVLKDPIEWEWDDGTTDDLELEWSIAPAAGEFLPLTLDEPYSDGLKLSDLDLPDGYAWATTVNPDTPLRLGEQKFPATYTAPGFDGSTGNYKPADGFITVNVIKGAVDFDPFEDIGPINATYTPTLKLFNLQLPPNYAWVSPTTALDAGDEQIFDAKYTDPSGNYEAALGIIIVNVAPAKGTFGAPPPVNVTYSAGGVSLGDVLLSATHAGYVWDDPSIELNAGTNHRFDAQYTDPSGTTRRTAEYFP

SEQ ID NO: 42895 - DNA, 1674 bp, Unknown
  Obtained from environmental sample
  misc_feature (1)..(1674): n is a, c, g, or t
atgccagatgacgacgattttacaagcgcttgccgatgtaaaagaaaaattcaagatggaaccggtgcctgtcatcattcctatggggttgggaggcgctttaagggcgttatcgacgtactgcacgataaggcgtatctggcgggcggcgacggcgtggaaaaagaatgccccatccccgatgaattcaaggacgcggtggcgggggcgcgggaaaagttaatcgaagcggcagccgagggtgatgataccctcatggaacaatacattgagaagggttccctttcgccggaagaaatgaaaacgggacttataaaagccctggtagacaataagtatatccccgctttcgcgggttcggctttgaagaattccggtcttttgcccttaatggattttatcgccgatgtgggaccaaatccacgctccgcaaaagacgcggttcttggcggcgacgggaaggcgcaggaagtttccattgatccggacaaaccgctttcggctctggttattaaaaccacttacgaccaattctccgggaaactttcctgggtcaagattatttccggaaagctggccgctgatacggaagcaatcaatgtttcggaaaataaaaaagaacgcattggcaagctgtatacctgtcagggcaagaaactggaagagatccgggaactgtccgccggagacgtggggattatcacgaagtcggcgacgcttaaaacaaacgacactctggccgcggcggacgcaggctttacctttgtcccgctgcagcttccggaaccggtacattcggtggcggtcgcggcgctggccaagaaagacgatgacaagcttggcgaattccttgtacgcgccgcggaggaagacaaaaccttccgctancattttaacagcngaaccaaggagaccgtaatctccggcatgggcgagcttcaaatcaatatcatcctggacaaggtaaaagccaaccagaaaatcgaagtggaaacccgcatccccaagattgcctaccgtgaaacgataacaaaaaaagcttccgccgagtatacccataaaaaacaaaccggcggtcacgggcaatacggtaaggttgtgctggaaatcgccccattaagccggggcgagggctataagtttgaaaataaaattttcggcggggctgttcccaaaaattacatccccggcgtggagaagggcatagccgaaggaatggctcacggcacagtggcccattatccggctgtggatgtggaagtggctatagtagacggaaagtaccatccggtggattcttcggaactttccttcaaacttgccgcccgcaacgcctttcgcgaatcgatgcgccaggcaaaccccacattactggaacctgtaatgaatctgacggtttttatcgaggaaaaatatctgggcgacgttatgagcgacctttccggcaagaggggaaaaatcctcgggcaggattcggctagcggcatagcggaggtacgcgccgaggttccccaggcggaactgctgcgttactcgatagacctgcgctcgatcacatccggtaccggctccttctccgtgtcattcagccactacgcgccgatttccggacgcatcgccgacgaagtaatcaaggcaaggggagacttcaaggtacaggaaaccgaagaataa

SEQ ID NO: 42896 - protein, 557 aa, Unknown
  Obtained from environmental sample
  DOMAIN (180)...(247): Elongation factor Tu domain 2
  misc_feature (1)..(557): Xaa is any amino acid
MPDDDDFTSACRCKRKIQDGTGACHHSYGVGRRFKGVIDVLHDKAYLAGGDGVEKECPIPDEFKDAVAGAREKLIEAAAEGDDTLMEQYIEKGSLSPEEMKTGLIKALVDNKYIPAFAGSALKNSGLLPLMDFIADVGPNPRSAKDAVLGGDGKAQEVSIDPDKPLSALVIKTTYDQFSGKLSWVKIISGKLAADTEAINVSENKKERIGKLYTCQGKKLEEIRELSAGDVGIITKSATLKTNDTLAAADAGFTFVPLQLPEPVHSVAVAALAKKDDDKLGEFLVRAAEEDKTFRXHFNSXTKETVISGMGELQINIILDKVKANQKIEVETRIPKIAYRETITKKASAEYTHKKQTGGHGQYGKVVLEIAPLSRGEGYKFENKIFGGAVPKNYIPGVEKGIAEGMAHGTVAHYPAVDVEVAIVDGKYHPVDSSELSFKLAARNAFRESMRQANPTLLEPVMNLTVFIEEKYLGDVMSDLSGKRGKILGQDSASGIAEVRAEVPQAELLRYSIDLRSITSGTGSFSVSFSHYAPISGRIADEVIKARGDFKVQETEE

SEQ ID NO: 42897 - DNA, 699 bp, Unknown
  Obtained from environmental sample
  misc_feature (1)..(699): n is a, c, g, or t
ttgcccgtgaccgccggtttgttttttatgggtatactcggcggaagctttttttgttatcgtttcacggtaggcaatcttggggatgcgggtttccacttcgattttctggttggcttttaccttgtccaggatgatattgatttgaagctcgcccatgccggagattacggtctccttggttcngctgttaaaatgntagcggaaggttttgtcttcctccgcggcgcgtacaaggaattcgccaagcttgtcatcgtctttcttggccagcgccgcgaccgccaccgaatgtaccggttccggaagctgcagcgggacaaaggtaaagcctgcgtccgccgcggccagagtgtcgtttgttttaagcgtcgccgacttcgtgataatccccacgtctccggcggacagttcccggatctcttccagtttcttgccctgacaggtatacagcttgccaatgcgttcttttttattttccgaaacattgattgcttccgtatcagcggccagctttccggaaataatcttgacccaggaaagtttcccggagaattggtcgtaagtggttttaataaccagagccgaaagcggtttgtccggatcaatggaaacttcctgcgccttcccgtcgccgccaagaaccgcgtcttttgcggagcgtggatttggtcccacatcggcgataaaatccattaa

SEQ ID NO: 42898 - protein, 232 aa, Unknown
  Obtained from environmental sample
  misc_feature (1)..(232): Xaa is any amino acid
MPVTAGLFFMGILGGSFFCYRFTVGNLGDAGFHFDFLVGFYLVQDDIDLKLAHAGDYGLLGSAVKMXAEGFVFLRGAYKEFAKLVIVFLGQRRDRHRMYRFRKLQRDKGKACVRRGQSVVCFKRRRLRDNPHVSGGQFPDLFQFLALTGIQLANAFFFIFRNIDCFRISGQLSGNNLDPGKFPGELVVSGFNNQSRKRFVRINGNFLRLPVAAKNRVFCGAWIWSHIGDKIH

SEQ ID NO: 42899 - DNA, 699 bp, Unknown
  Obtained from environmental sample
  misc_feature (1)..(699): n is a, c, g, or t
atgcgatataattacatatacgatatgatagaatacgtcgtccctatgaatatagatgatagggcattggcaaaagcggcgcgggtactggaaagcggcgggctagtcgccttacccaccgatacaagctggagcataacctgttccctgaaatcccccggcggcattaaaaagctgaaaaaactgtccggagagagggacgagcggcattttaccctgctttgctcgggaatttcgcagtttggggagttatgtagcctggacaacagccgtttccgcctgataaaccgcctttcaccggggccttatgtgtttatattaaaaacgcttccgggcaccgaaaaagccctggacatacgccggaaggaagtcggcgtcagaatccccgatcattccataccccttgcccttatagacacgcttcaacagcccctttactcaataacagccaaaaagagcatgcaggaagaggttgaatttgaagataatgactccgatgaacataatggctctgacgaacttccgcccattcccgaagacaacctttttgaaggcggctgggagctggacggaattgacggccttgacctgattttggacggcggcgaggagcgtgagcgtattttctccacaattctggatttatccggcgacgatgtcatattgctaagacaaggcgccggcctctggcccatttaa

SEQ ID NO: 42900 - protein, 232 aa, Unknown
  Obtained from environmental sample
  DOMAIN (27)...(226): yrdC domain
  misc_feature (1)..(232): Xaa is any amino acid
MRYNYIYDMIEYVVPMNIDDRALAKAARVLESGGLVALPTDTSWSITCSLKSPGGIKKLKKLSGERDERHFTLLCSGISQFGELCSLDNSRFRLINRLSPGPYVFILKTLPGTEKALDIRRKEVGVRIPDHSIPLALIDTLQQPLYSITAKKSMQEEVEFEDNDSDEHNGSDELPPIPEDNLFEGGWELDGIDGLDLILDGGEERERIFSTILDLSGDDVILLRQGAGLWPI

SEQ ID NO: 42901 - DNA, 519 bp, Unknown
  Obtained from environmental sample
  misc_feature (1)..(519): n is a, c, g, or t
ttgtcgcccgcaacggcctcgcccatcttagcgatctttgaattgtccaacaccaagctgctgttgttgttaacgcgcaacgtccccttaatctcgtccgaaacgcccttagcgctgccctcaagcagtttcttcgtgttgaattcggtcgtattgccgatgcggttaatctcagccagcagttgcttgacctcggcttgcaattccgacctatcggcgtcggtgttcgtgtcgttcgccgactgtacggcgagttcgcggattctctggagtatggagtgcgtctcggcgagcgcgccttccgcggtctgtatcatggagattgtgtcttggngcgtcttggaggccatggtcaaaccgcgaatctgggctctcattttttcggagatcgccaaccctgcggcgtcgtcgccggcgcggttgattctgaagccgctggagagtttctccatcgatctcgatccgtcagactcggatatgcccatctggcggtgtgtgttcattgcggccacattgtga

SEQ ID NO: 42902 - protein, 172 aa, Unknown
  Obtained from environmental sample
  misc_feature (1)..(172): Xaa is any amino acid
MSPATASPILAIFELSNTKLLLLLTRNVPLISSETPLALPSSSFFVLNSVVLPMRLISASSCLTSACNSDLSASVFVSFADCTASSRILWSMECVSASAPSAVCIMEIVSWXVLEAMVKPRIWALIFSEIANPAASSPARLILKPLESFSIDLDPSDSDMPIWRCVFIAATL

SEQ ID NO: 42903 - DNA, 921 bp, Unknown
  Obtained from environmental sample
  misc_feature (1)..(921): n is a, c, g, or t
ttgatggccgagaattttacgcccattgatgataatcatatacttgtcgctacgctgtccggattgtatttatccgactttctttccccctataaagtatgggaaacgggtaacatttttgtcattgaccatgaaggggtagccgtcgccgtaaaccagtatgattaccgggtacaggaacggcataactatattgattggggtaaacgggatccgacataccggaaaatgggcgaagttttccagtacattattgaaaacgaggagggtataaagcaatacccctataacgggtccgagaggtactgcgcctttgataccgtctacgggaccgacaactggtctgtattgataagcgctccgttttcggaaagtccccttacccatattcggcagatgctctttatctgcgccgcgataattatggggctggggataatagccgcgctgctggccgccaacagcattgcggctccctatgcaaaaatgacagaactgagaatcaccgccgaaacagcgtccgcttccaaaacccgcttcctcgcgaatatgagccatgaaatgagaacgccgcttaacgccattatcggcctttcagaactggaacttggctcggccaaactgcaaggggaatcttttacaaatgttgaaaaaatttatacggcgggcatgacgctcctgggaatcatcaacgatcttttggacatatcaaaaatagaatccggaaaattgttaatgattccggtaatatacgacgtccccagcatgatcaacgacacagttaatctgaacgtagtccgcattggcagcaagccggtgcaattcaggctccatgtagataaatccatgccttcccggcttaagggcgacgaactgcggatcaaacagatatttaacaatctgctctcaaacgctttttag

SEQ ID NO: 42904 - protein, 306 aa, Unknown
  Obtained from environmental sample
  DOMAIN (176)...(242): His Kinase A (phosphoacceptor) domain
  misc_feature (1)..(306): Xaa is any amino acid
MMAENFTPIDDNHILVATLSGLYLSDFLSPYKVWETGNIFVIDHEGVAVAVNQYDYRVQERHNYIDWGKRDPTYRKMGEVFQYIIENEEGIKQYPYNGSERYCAFDTVYGTDNWSVLISAPFSESPLTHIRQMLFICAAIIMGLGIIAALLAANSIAAPYAKMTELRITAETASASKTRFLANMSHEMRTPLNAIIGLSELELGSAKLQGESFTNVEKIYTAGMTLLGIINDLLDISKIESGKLLMIPVIYDVPSMINDTVNLNVVRIGSKPVQFRLHVDKSMPSRLKGDELRIKQIFNNLLSNAF

SEQ ID NO: 42905 - DNA, 879 bp, Unknown
  Obtained from environmental sample
  misc_feature (1)..(879): n is a, c, g, or t
ttgacgggaaaggtacactatgacgcgatttttatggatcacatgatgcccggaatggacggtattcaaacaacaagaatcatacgcgaggagatcaacagcgaatacgcaaaaaatgttcccatcatcgcgcttacagctaacgccctcctgggcaacgacgctctgttccttgaaaacggtttccaggcttacctgtccaagcctattgatattatcaggctggatcaaattttaaatcaatgggttcgggataaaaagaaggaaaaagagctgaaagaatccccccaggacacgaaatcggaaacctcaattaaaacaggcagtcaaaaaaaatacttaattcccggagtcaacaccgcggaagctcttgaacgctttgatgatgacgatgaggtctatttccaggtgcttaaatcttttatcacctacaatccgaaacaacttgaaacgcttaaaacagcgggcgaggatcacgaagcgtaccgccttgccgctcacagcatgaagggttcaagcagaaacattggcgcggaagaactgggtaatcaggcggaaatgctggaaaaagcggctactcacgaggactgggactatataaacgccgtaaacgcggattttatcaaaaccgccgaaaaacttattgccgatattgaggcctttttaaaaatcgttatgcctaacgacccggaagccaataaaccggaaaagaaaaatccggctcccgaagtattggataaaatactggaagcctgtgaaaattatgatatggcctccctgagggaggcaatagacgccttggctgaattccgttacccgacatttccggatctggcgcaatggaccaaggagcaagccaacaaatccaattttccgtga

SEQ ID NO: 42906 - protein, 292 aa, Unknown
  Obtained from environmental sample
  DOMAIN (136)...(218): Hpt domain
  misc_feature (1)..(292): Xaa is any amino acid
MTGKVHYDAIFMDHMMPGMDGIQTTRIIREEINSEYAKNVPIIALTANALLGNDALFLENGFQAYLSKPIDIIRLDQILNQWVRDKKKEKELKESPQDTKSETSIKTGSQKKYLIPGVNTAEALERFDDDDEVYFQVLKSFITYNPKQLETLKTAGEDHEAYRLAAHSMKGSSRNIGAEELGNQAEMLEKAATHEDWDYINAVNADFIKTAEKLIADIEAFLKIVMPNDPEANKPEKKNPAPEVLDKILEACENYDMASLREAIDALAEFRYPTFPDLAQWTKEQANKSNFP

SEQ ID NO: 42907 - DNA, 885 bp, Unknown
  Obtained from environmental sample
  misc_feature (1)..(885): n is a, c, g, or t
ttgacattccacgcgccctttttgggcgcgggcgtgcttgtggacgatccttcgcgtaaagaaaaaaccggttacatagcctgccacaaccagcttgtagcaagcgcccttgccgtaaaagcctgccatgaaatgctgccgaatgcgaaaatcggcagcatggtagcctcgttgacagtttatccttattcctcccgtccgcaagacacatgggaaaaactacagcttgaacgcaaaaactattgtcttactgacgtgcaggtgcgcggttattatcctgcctggctaaagaaacatcttgaaaaagagcgtatcctctccgcgataagcgctgaagacgaaaaaatactgcgcgaaaatactgtggattttgtttcattcagctattattcgacatgcgcggtctcgacagatccgaaaacagcggctgaaaaaacctcgggcaatattttcgggggcgtgcaaaacccttaccttaaatcctcggaatggggctggcagatcgatcctatgggcttgcggatcgccctgaatttcttctatgatcgctaccaaaaacccttattcattgtggaaaacggacttggcgcaaaggacgcgcttttgccaaacggcgaaatacacgatgattaccgaatcgaatatcttcgcaagcacataaaggcgatgaaatccgccgttgaggaagacggcgttgagcttcttggttatacgacatggggctgcattgacatcataagcgcgtcaaccggcgagatgtccaaacgctatggctttgtctatgtggaccgtgatgacgagggaaaaggcgcgttaaagcgttcccggaaaaaaagctttttctggtacaaagacgttatttccagcaatggagaaaaactttaa

SEQ ID NO: 42908 - protein, 294 aa, Unknown
  Obtained from environmental sample
  DOMAIN (2)...(292): Glycosyl hydrolase family 1
  misc_feature (1)..(294): Xaa is any amino acid
MTFHAPFLGAGVLVDDPSRKEKTGYIACHNQLVASALAVKACHEMLPNAKIGSMVASLTVYPYSSRPQDTWEKLQLERKNYCLTDVQVRGYYPAWLKKHLEKERILSAISAEDEKILRENTVDFVSFSYYSTCAVSTDPKTAAEKTSGNIFGGVQNPYLKSSEWGWQIDPMGLRIALNFFYDRYQKPLFIVENGLGAKDALLPNGEIHDDYRIEYLRKHIKAMKSAVEEDGVELLGYTTWGCIDIISASTGEMSKRYGFVYVDRDDEGKGALKRSRKKSFFWYKDVISSNGEKL

SEQ ID NO: 42909 - DNA, 300 bp, Unknown
  Obtained from environmental sample
  misc_feature (1)..(300): n is a, c, g, or t
gtgatcccgcgttcaacgcctatattccgagccatcgcgcttgcggacccttttgttctgtacaacctgggcaatattcagcctgtaaaattaacggactttatagaaatcctggaaacagccctgggacgtacggcggaaaaattgtacatggggatgcaggcgggcgatgtaactgtaacaatggcggacattgacatttcgcgcgatgaattgggctggaagccaaaaacgccgataactgagggattaaaattatttgcgcagtggttttgcgaatataaacataataaattatga

SEQ ID NO: 42910 - protein, 99 aa, Unknown
  Obtained from environmental sample
  misc_feature (1)..(99): Xaa is any amino acid
MIPRSTPIFRAIALADPFVLYNLGNIQPVKLTDFIEILETALGRTAEKLYMGMQAGDVTVTMADIDISRDELGWKPKTPITEGLKLFAQWFCEYKHNKL

SEQ ID NO: 42911 - DNA, 2127 bp, Unknown
  Obtained from environmental sample
  misc_feature (1)..(2127): n is a, c, g, or t
gtgttcaattaccttgcggctctggctgtcaccgggaattccgccgccggtttctgttctttcgcctatatagacctttcaagcggcggcttttacgtgacatcttttccctcggtaaattcttccgacaggctgcgccaggagcttgagcgcattcaggcaagagaaatgatagtccaggaatcgcttttggaagaagaacccgcgatagcccgcgccctgtatgagcgtccgaacctggtgcttaaccgctgggccgactggctcttcgatattgaccgttcaaagaaaaggcttatgcgtcagtttaatgtttccagtctcaggggcttcggtcttgaagacaacagtccgcagttgctttgcgccggggctcttcttgattatcttgacgacaccgccagggctctgctgccccatgtacggtctatcacggtgtacacggataatgaatttgtgggtatagacgaatcaagccagcgcaaccttgaacttgtgaaaaatctgagggatggcgacatccgtttttcgctgctggaggcgctcgatgaaacccgctgcgccatgggaaagcgcctgttaagacgccgtgtcctgcacccccttcgcaatcttggccgcatacaggcgcggcttgacatggtggaaaccctctaccgcgatcagggaagtttaagcagtctccgggaactgctggggaggacgcctgaccttgagcggctttcctcgcggctggcgatggacaaggctcacggcaaggatatgctcgcaattaaaaacgcgcttttctcatgcaaacagataagggaactgcggaagcgcatgggtataatttgtgaagcagataccccatctgaaaacgacgatgatgccggtttcgcaaagctgacggatcttgcggaactgcttaacaagagtatatgcgatgatccttctattgttcttaatgagggaaaccttatacgcgacggctattcgacggagctggattcccttcgcaccttaaaggattcaggaaggcagcttctggaagcctatcttgaggaagaaagacaactaacgggaatcccgagcctaaagatgcgctacaacaggcttatagggtatttttttgaagttactaacgcccacaccggcaaggttccggcgcacttcatccggcggcagggcgttgccggcggcgagcgtttttccacagaacgcctcgcaagccttgaatccgacatcaacagcgcctcggataaaatcattgatcttgagcgtgcgctttttctggaaatacgcgaaaaggccaaaaccgttcttgacgatcttgtacgcgaagcccgccgaatcgcggaaattgacgcggctcagtcgctggcaaaagccgcctcaatccggggctggactcgccctatagtggacgattcaaacgcactggaaatttacgaggcgcgccaccccgttgtcgaggcccagcttggcagcggcgagtttattcccaatgacattatcctgaacagcgggcagggtacccccccatattttgcgatgatcaccggccccaatatggccggtaagtccacatatttgcgctccgcggcccttataacgctgatggcccagattggctcgtatatacccgcaagccaggggcggatagggctttgcgacaggatatactgccgcgtgggcgcctcggacaacctcgcgcggggggagtccacattccttgtggaaatgaacgaaaccgcctatatcctcaacacggcaagcgaaaaaagccttgtaataatggacgaggtaggacgcgggaccggcactaacgacgggctttccattgcctgggcggtaagcgaagagcttcttgacagagtaaaatgccgcaccttttttgccacccattaccatgagctttcattattggcgcatccgcgcatagtaaaccgttcaatggaagtagtggagaaagacggaggcataatttttctccgcaggctaagggaagggccgaccgcggaatcatacggcatccatgtggctcgtctcgccggactttccccctctgtgcttgacagggcggagcagattatgagccggctgagggacatggaaggggggttgagaattagaaatgagcaatag

SEQ ID NO: 42912 - protein, 708 aa, Unknown
  Obtained from environmental sample
  SIGNAL (1)...(22)
  DOMAIN (3)...(142): MutS domain II
  misc_feature (1)..(708): Xaa is any amino acid
MFNYLAALAVTGNSAAGFCSFAYIDLSSGGFYVTSFPSVNSSDRLRQELERIQAREMIVQESLLEEEPAIARALYERPNLVLNRWADWLFDIDRSKKRLMRQFNVSSLRGFGLEDNSPQLLCAGALLDYLDDTARALLPHVRSITVYTDNEFVGIDESSQRNLELVKNLRDGDIRFSLLEALDETRCAMGKRLLRRRVLHPLRNLGRIQARLDMVETLYRDQGSLSSLRELLGRTPDLERLSSRLAMDKAHGKDMLAIKNALFSCKQIRELRKRMGIICEADTPSENDDDAGFAKLTDLAELLNKSICDDPSIVLNEGNLIRDGYSTELDSLRTLKDSGRQLLEAYLEEERQLTGIPSLKMRYNRLIGYFFEVTNAHTGKVPAHFIRRQGVAGGERFSTERLASLESDINSASDKIIDLERALFLEIREKAKTVLDDLVREARRIAEIDAAQSLAKAASIRGWTRPIVDDSNALEIYEARHPVVEAQLGSGEFIPNDIILNSGQGTPPYFAMITGPNMAGKSTYLRSAALITLMAQIGSYIPASQGRIGLCDRIYCRVGASDNLARGESTFLVEMNETAYILNTASEKSLVIMDEVGRGTGTNDGLSIAWAVSEELLDRVKCRTFFATHYHELSLLAHPRIVNRSMEVVEKDGGIIFLRRLREGPTAESYGIHVARLAGLSPSVLDRAEQIMSRLRDMEGGLRIRNEQ

SEQ ID NO: 42913 - DNA, 528 bp, Unknown
  Obtained from environmental sample
  misc_feature (1)..(528): n is a, c, g, or t
atgaacctttatgaagaaaaagaaagcacagtaatgagaaacctttctttatataagatgacccgccctccctccgacctctccgaggccgacgtggacgtcacccccgtgatgaacatgttcgttatcctcatcccgtttctcgtctccatggccgtcttcacgcaggtggcgatcatagacttttccgttccgcccgacgccggacaggccgccgcgcagccgtccggcaagcctaaactcaagctcaccgtaatattgacggagtcctttcttggcatcgccgagggtgaaaatctgctcgattccctcccgttgctcgccgacggggagtatgcgttcgactccttgaagcaggcgctcgccatccgtcggccgcagtctgagtttcccgacgagattgtagtggcggttcgcgacggcgtggctttcaggcacgcggtcaaggcgatggacgtggggcgcgagagcggtttcacgaatatcggtatctccggcgcggccgccgacccgtccgcgggtaagtga

SEQ ID NO: 42914 - protein, 175 aa, Unknown
  Obtained from environmental sample
  misc_feature (1)..(175): Xaa is any amino acid
MNLYEEKESTVMRNLSLYKMTRPPSDLSEADVDVTPVMNMFVILIPFLVSMAVFTQVAIIDFSVPPDAGQAAAQPSGKPKLKLTVILTESFLGIAEGENLLDSLPLLADGEYAFDSLKQALAIRRPQSEFPDEIVVAVRDGVAFRHAVKAMDVGRESGFTNIGISGAAADPSAGK

SEQ ID NO: 42915 - DNA, 690 bp, Unknown
  Obtained from environmental sample
  misc_feature (1)..(690): n is a, c, g, or t
gtgggtgtcggcttaatatgtttcttaatcctacaaatcctagtcctagttcagatatcctttaaggaggtttttatgtcgcattacgtcgaactgctcgcaacgtggttccgctcgggcggcccgttcatgtgggtgctgctcttcttctccgcctgcgccgccgcggtggcgattgagcggatgatcttcctctactttgtctgcccccgcgacacctccggtctcgtgggcaagctgaagaccgcggtaggggagggcagaggcgccgacgccgccaagatgttgcagggcaagggttcgccgactctggcgctcctgaacatcgccgttgacagtttcaacgccggctacgccgccgccgacatccaagaggacgtggaggaggcggccataagccagatacaccgcttctccgtgcggctgaactacctgtccttatttgctaacgtctctacgctcatagggcttttagggacgataacgggactgatgcagtcgttcacatcgctcgccagcgtcgacgccgcccaaaaggcctcaatgctagccgccggcatttcccaagcaatgatcaccactgccgcgggactgataatagccgtgccgtgcatggtggtctacacgatcttttctaacagacagagcgtattggtgaaagatttagacgaatcaacggttaaactatga

SEQ ID NO: 42916 - protein, 229 aa, Unknown
  Obtained from environmental sample
  DOMAIN (100)...(227): MotA/TolQ/ExbB proton channel family
  misc_feature (1)..(229): Xaa is any amino acid
MGVGLICFLILQILVLVQISFKEVFMSHYVELLATWFRSGGPFMWVLLFFSACAAAVAIERMIFLYFVCPRDTSGLVGKLKTAVGEGRGADAAKMLQGKGSPTLALLNIAVDSFNAGYAAADIQEDVEEAAISQIHRFSVRLNYLSLFANVSTLIGLLGTITGLMQSFTSLASVDAAQKASMLAAGISQAMITTAAGLIIAVPCMVVYTIFSNRQSVLVKDLDESTVKL

SEQ ID NO: 42917 - DNA, 1512 bp, Unknown
  Obtained from environmental sample
  misc_feature (1)..(1512): n is a, c, g, or t
ttgctctggaagatgccgggaaataatatccttacccctatttcagcgtttttccggagactgcggcaggagtggatttcgtttcttgatataagaaatgataattatacatatcgcattgtaacactccttgccgctgttttattggttgtttttgcctttgtcttgggcttgtcattgctgggggacatattcgggataaaggccttgaacccgtctttaggttcatttttttcccattcctatggtatccttgctttttttattccgtattatcttggttatgccgcttctgttctggtcgatccccgctggcggccggatcgcattttttttctggccgtgtcgccattccccttctttacacttgggacaggtaatatcttaatcctcgattttgaagccctatcacgggattatgcttttttggattttaccggaaaaacggggtttggcggaatcgttgttgtaatgacttttctggaagtggttgccctgcaaatgttaaaaaacgccctgttccccaaggtaactattgatggaaagaaaaaaagagtctggcgtggtaataaggcgacacttttgcttcccccgcctaaaccccagggggaagaatacggcgtttatgtcaaagaaactatagtttcagaaaattcagtttcagatgatccccccgcgaaagaaaccaacgctgaaaagatagaaatcgaactgcctccgatgaagccattgcacagccctcttgcacttgaatatttgaatgaagcgaacagggaagcggccaggcggcagagggaaacaggcgttcatggggacaaactcgcgggcagtatcgagagggccattgaagaggcggaagtgatggcggcaatccacagtgagaaacttcgcaaaaagtcaacggataaggctgcaagcatcgcggccgcaggccacgcaacatccggccatacggcgcgcgcgtataaaagaaagtacagtatcccgctggaaatcctgagcgagtatcccgacggcgaatactggatcatagatcaggcgacacgcgacgcggcaagcaccctcaaggaaactcttgaggaatttaaaattcaggcggaggttaccgggatcaaaaaaggcccggtaataaccatgtttgaactgctgcccgcgcccggtgttaaactctctcgaattgtcaatctgcaggacaatatcgctctgcgccttgccgcctcgtctgtgcgaattgtcgcgccgattcccgggaagcacgctgtgggcatagaggttcccaacgcaaagcggcacattgtttcgttcagggagattatcgaaggggaaataaaccggggcggaaaaaaaccgganggttcccatcgtgctgggaaaggacataacgggagaggcggttacggtagaccttgtacaaatgccgcacttgttgatagcgggggcaacaggctccggaaaatcagtttgcgtcaattccatgatcctgacgctcctgtatcaaaagcctcctgctga

SEQ ID NO: 42918 - protein, 503 aa, Unknown
  Obtained from environmental sample
  misc_feature (1)..(503): Xaa is any amino acid
MLWKMPGNNILTPISAFFRRLRQEWISFLDIRNDNYTYRIVTLLAAVLLVVFAFVLGLSLLGDIFGIKALNPSLGSFFSHSYGILAFFIPYYLGYAASVLVDPRWRPDRIFFLAVSPFPFFTLGTGNILILDFEALSRDYAFLDFTGKTGFGGIVVVMTFLEVVALQMLKNALFPKVTIDGKKKRVWRGNKATLLLPPPKPQGEEYGVYVKETIVSENSVSDDPPAKETNAEKIEIELPPMKPLHSPLALEYLNEANREAARRQRETGVHGDKLAGSIERAIEEAEVMAAIHSEKLRKKSTDKAASIAAAGHATSGHTARAYKRKYSIPLEILSEYPDGEYWIIDQATRDAASTLKETLEEFKIQAEVTGIKKGPVITMFELLPAPGVKLSRIVNLQDNIALRLAASSVRIVAPIPGKHAVGIEVPNAKRHIVSFREIIEGEINRGGKKPXGSHRAGKGHNGRGGYGRPCTNAALVDSGGNRLRKISLRQFHDPDAPVSKASC

SEQ ID NO: 42919 - DNA, 1146 bp, Unknown
  Obtained from environmental sample
  misc_feature (1)..(1146): n is a, c, g, or t
atgcgagcgcgaacacttgagggcgctgacggggttctctgcacgattctgaacggcgatgttgatgtctggcgttatgatattgaaatccccaaaacgtacggcgttgatattaatgtcggcgacacacgggggcccgccggaatttttcgcgccctcagaaccattccggtaatgctggatatatgcaaagatatagaaaaatactgccccaatgccgtatttctcaattacaccaaccccatggctatgctgtgccgcgccatgcagggtgaatttccaaacctgaaaatttccggactttgccacagtgtgcagggcacggcgagtatgctcgcgcattggataggggcgaacgacgaggatattacctatacctgcgcgggtattaatcatcaggctttttacattgattaccgctggaaaggaaaggacgcctatcccctgctcagggaggcgatgaagaacccacagatatacaacgaggaacaggtacggaacgagatgtttctgcttttggattattacccgacagagtcatccggccacaattccgagtacaacgcgtggttccgcaaacggcctgatcttattgaacaattttgcattcacggcacggggtggaatccgggagcctacgcttatattctgaacgagtaccagagcagaaaggggacatggcggaaggagattgaagactggctcgatgaacccaccgttgatctgaaccgtgggcatgaatacgcggcctatatttttaacgccatgttcggcgataagaccatgtttaaatttaacggtaacgtattaaaccgcggtctgattgacaatctgccccagggcgcctgtgtggaggtgcccgtacttgcctctccgcacgggtttgaggccatacgggtaggcaaacttcccaatcaaatcgcggctctggttcatacaagttccgtctgcgaggagatggcggtggaagcttcgctttccggcgatccgcggaaagtgtatcaggccatagcctttgatccgcttacatcggcggtattgggcataccggaaataaaggagatgaccgtaaaaatgttcaaacaaaatgagggctatcttccgcaattcaaattaagaataactaatcttgataaaaaatgttaa

SEQ ID NO: 42920 - protein, 381 aa, Unknown
  Obtained from environmental sample
  DOMAIN (1)...(343): Family 4 glycosyl hydrolase
  misc_feature (1)..(381): Xaa is any amino acid
MRARTLEGADGVLCTILNGDVDVWRYDIEIPKTYGVDINVGDTRGPAGIFRALRTIPVMLDICKDIEKYCPNAVFLNYTNPMAMLCRAMQGEFPNLKISGLCHSVQGTASMLAHWIGANDEDITYTCAGINHQAFYIDYRWKGKDAYPLLREAMKNPQIYNEEQVRNEMFLLLDYYPTESSGHNSEYNAWFRKRPDLIEQFCIHGTGWNPGAYAYILNEYQSRKGTWRKEIEDWLDEPTVDLNRGHEYAAYIFNAMFGDKTMFKFNGNVLNRGLIDNLPQGACVEVPVLASPHGFEAIRVGKLPNQIAALVHTSSVCEEMAVEASLSGDPRKVYQAIAFDPLTSAVLGIPEIKEMTVKMFKQNEGYLPQFKLRITNLDKKC

SEQ ID NO: 42921 - DNA, 513 bp, Unknown
  Obtained from environmental sample
  misc_feature (1)..(513): n is a, c, g, or t
gtgccccgtgtgcaggtacgcggggaatttgccctgcgcggcgagattcttgatattttcatgggcggtgatgaatccggggctgaagacgaggttgaagcgttccgcgtgctgtttgattttgacaaggttgaatctgtcaagcgttttaatccctctacccagggaggagggcttggcaaggaaaagctggccgaactgctgatacgtcccatgcgggaactggtctggacagacgacagaatcgaaacgctgagcgccaatctggccgcgtgcaaggaattttccgacggcgggaaagccattatcgaagaattgatcacgcacagaaattttgccggcgaggagatgttttatccgttagcagggactggggactggggactagggactgggaacggggagcgtgntcagttatctaggcatgaaaaaacnacgcatgctttacannccagaccccagtccctgttccccagtccctgttcccaaatcattcatttctcaattatctag

SEQ ID NO: 42922 - protein, 170 aa, Unknown
  Obtained from environmental sample
  misc_feature (1)..(170): Xaa is any amino acid
MPRVQVRGEFALRGEILDIFMGGDESGAEDEVEAFRVLFDFDKVESVKRFNPSTQGGGLGKEKLAELLIRPMRELVWTDDRIETLSANLAACKEFSDGGKAIIEELITHRNFAGEEMFYPLAGTGDWGLGTGNGERXQLSRHEKTTHALXXRPQSLFPSPCSQIIHFSII

SEQ ID NO: 42923 - DNA, 672 bp, Unknown
  Obtained from environmental sample
  misc_feature (1)..(672): n is a, c, g, or t
gtgtatctggggcctgcccccgtttttactgtccggtttaacgatcacttcgctggaacttacacgggttaccgtaccgctccggcgggcttttaccagcacaccggaatcgtaggcgcactttccttccataccggttcccaccctgggcgcttcaggaaaaaccagaggaaccgcttgccgctgcatattacttcccataagagcccggtttgcatcatcatgctccagaaaaggaataagcgaagccgatacggagatgatctgtttgggggacacatccatgtactgaatatcttccggcacccgcgtagtatagtccccctggcggcggcaggacacttgatcgtcggaaaaggttccgttgtcattaagttttgccgaagcctgagcgatgtaataccggtcttcgtccatggcggaaaggtattcaatgtcattgatgaccttgccgccgtccaccttccggtaaggggtttccaaaaatccgtattcatttaccctggtataattggccagagatacgatgaggccgatattcgggccttccggcgtttcaatgggacacatcctgccataatgggtatagtggacatcccggacttcaaagcccgccctgtccctggaaagaccgccggggcccaacgcgttaagccgccgcttgtgggttaa

SEQ ID NO: 42924 - protein, 223 aa, Unknown
  Obtained from environmental sample
  misc_feature (1)..(223): Xaa is any amino acid
MYLGPAPVFTVRFNDHFAGTYTGYRTAPAGFYQHTGIVGALSFHTGSHPGRFRKNQRNRLPLHITSHKSPVCIIMLQKRNKRSRYGDDLFGGHIHVLNIFRHPRSIVPLAAAGHLIVGKGSVVIKFCRSLSDVIPVFVHGGKVFNVIDDLAAVHLPVRGFQKSVFIYPGIIGQRYDEADIRAFRRFNGTHPAIMGIVDIPDFKARPVPGKTAGAQRVKPPLVG

SEQ ID NO: 42925 - DNA, 561 bp, Unknown
  Obtained from environmental sample
  misc_feature (1)..(561): n is a, c, g, or t
atgagggatattcaggattttgactcgatcatgatcaaattggcctcgccggatatgatccgggcctggtcatacggagaagtaaagaaaccagagacgatcaattaccgtaccctcaggccggaaaaggatggccttttttgcgaacgaattttcggtactaccaaagaatgggaatgctactgcggtaagtttaaatcgattcgttacaagggcgttacctgcgatcgttgcggcgtggaagtgacccactttaaggtacggcgtgaacggatgggccacatagagctggctgctccggtatcccatatatggtactaccgttcggtccccagccgcatggggttgctcctggatctgcccatggctgccttgcgttccatactgtattacgaaaaatatgtagtcattgatgccggcgatacggacttaaagaaaggccaggttctaacggaagaagagtactacgaaaatcaggaacgctacggcggcagtttttccgccggcatgggagccgaagcaatacgaaccttgctgaaaacatcaatcttgatgagatag

SEQ ID NO: 42926 - protein, 186 aa, Unknown
  Obtained from environmental sample
  DOMAIN (4)...(185): RNA polymerase Rpb1, domain 1
  misc_feature (1)..(186): Xaa is any amino acid
MRDIQDFDSIMIKLASPDMIRAWSYGEVKKPETINYRTLRPEKDGLFCERIFGTTKEWECYCGKFKSIRYKGVTCDRCGVEVTHFKVRRERMGHIELAAPVSHIWYYRSVPSRMGLLLDLPMAALRSILYYEKYVVIDAGDTDLKKGQVLTEEEYYENQERYGGSFSAGMGAEAIRTLLKTSILMR

SEQ ID NO: 42927 - DNA, 555 bp, Unknown
  Obtained from environmental sample
  misc_feature (1)..(555): n is a, c, g, or t
atggcacgagctcggntatttcagtctccgtccacggatgacatcgaaagaaaattaaaagaagcggggcttcccgtgaccagtaagactgtactccgggacggacggaccggtgaaccctttgtcaatccaattttctgcgggattatctactttctcaaactacaccacctggtggatgacaagatgcatgcccgctctaccggcccttattcgctggtaacccagcagcctttgggcggcaaggcccagtttggcggtcagcggctgggagagatggaagtatgggcgctggaagcctacggagcggctaatacccttcaggaacttttgacgataaaatccgatgacatgatgggccgctccaagatttacgaggccatagtcaagggagagccttctaccactgcggggattcccgaatcattcaatgtgctggtacaggaattgcgggggctggcgctggatatgacgatctacgatgccaaaaataaacagattccgttaaccgaacgggatgaagagctcatcactaaatcgggaagtaatttttaa

SEQ ID NO: 42928 - protein, 184 aa, Unknown
  Obtained from environmental sample
  DOMAIN (86)...(162): RNA polymerase Rpb2, domain 7
  misc_feature (1)..(184): Xaa is any amino acid
MARARXFQSPSTDDIERKLKEAGLPVTSKTVLRDGRTGEPFVNPIFCGIIYFLKLHHLVDDKMHARSTGPYSLVTQQPLGGKAQFGGQRLGEMEVWALEAYGAANTLQELLTIKSDDMMGRSKIYEAIVKGEPSTTAGIPESFNVLVQELRGLALDMTIYDAKNKQIPLTERDEELITKSGSNF

SEQ ID NO: 42929 - DNA, 468 bp, Unknown
  Obtained from environmental sample
  misc_feature (1)..(468): n is a, c, g, or t
ttgcaaggagaaattttaatgacctatcaaatagtgtctgaacgcaaactgaaaagcaaagttagaatcaaagcttccgaagaagtttttaaactggtaaagcggtatgcaaaggagaagcgggaattatttatactgctaaccttgaatggagctaataccgttgtttcggtttctatagtaagcatcggaatagtaaacaggacaatcatccatccgagggaaatattcagcagggctatatccgataatgcggcggcaatcattgtttgccataaccatccttccggcaatgtgatgccttcggaagaagacatagacatcacaaaaagaatttgcaaagccggggagataatcggaataccgcttcttgatcatgtaattttctccaatagaaattataccagtttgaaacgagaaggcttcattcagaaagcacgcggtttcgataaaagcttttccgcttaa

SEQ ID NO: 42930 - protein, 155 aa, Unknown
  Obtained from environmental sample
  DOMAIN (20)...(143): RadC, DNA repair protein
  misc_feature (1)..(155): Xaa is any amino acid
MQGEILMTYQIVSERKLKSKVRIKASEEVFKLVKRYAKEKRELFILLTLNGANTVVSVSIVSIGIVNRTIIHPREIFSRAISDNAAAIIVCHNHPSGNVMPSEEDIDITKRICKAGEIIGIPLLDHVIFSNRNYTSLKREGFIQKARGFDKSFSA

SEQ ID NO: 42931 - DNA, 987 bp, Unknown
  Obtained from environmental sample
  misc_feature (1)..(987): n is a, c, g, or t
atgctaaacctaaccttcgccccctccgccgacatcctcgccccgttggccaaagacaggatattgggcgcgtggcgcgacccgtttgacccgccgaccgtcgtcgtccccaatccggcggtcgggaagtggctgaacatacggttggcggaggatccgtcggtcgggtgcgtcgctaacttgcggatgccgacgcttgagcggtttctgtggaacgcgctcgggcccagtcccgatacgcttctgctggacgccgggcatctatcgcagattatttgcgcgcttttggatgaagggacgcttggggatgccgtctacaagccgctcagagattatttgtatgttgacggcaatcataacgcaaacgctgacggcgttagcggcggcattgaccccataaagcgcgtacagctctccgcccgtatcgcccaacaatttctggagtacgagtacaaccgccccagcgtttggagcgaggaggcggcgcggtgggggcggcacggcattgacgccaagtggctgctggggaaggggtattttgaggggcgcgaacatgaggattggcagatggatttgtaccgccgggcgagcgagcgcctctcaaagagcgtgccgccgcgatacacaacgctgccgcacctatataggcgcaagcgcgaggagtgcgccaaagagaagcgcccttggtgcgatgtcggctccaatcatcaaataatcctattcggcgtctcgaagataagccacttccaccgcaacacgctggttgaaatatcgcagtccgacggcattgacatgcacgtgcttctgacaaacccgtgcgccgagttttgggaagacgtggacactagccggcggacgcgcgctctgcgcaggcggtggagcagcgactcgccctccgaggtagccggtataacgcccgtgaaaccggaggaatacgacaagggcaaacttgacagatttggcgaagacgaagacacccccctttga

SEQ ID NO: 42932 - protein, 328 aa, Unknown
  Obtained from environmental sample
  misc_feature (1)..(328): Xaa is any amino acid
MLNLTFAPSADILAPLAKDRILGAWRDPFDPPTVVVPNPAVGKWLNIRLAEDPSVGCVANLRMPTLERFLWNALGPSPDTLLLDAGHLSQIICALLDEGTLGDAVYKPLRDYLYVDGNHNANADGVSGGIDPIKRVQLSARIAQQFLEYEYNRPSVWSEEAARWGRHGIDAKWLLGKGYFEGREHEDWQMDLYRRASERLSKSVPPRYTTLPHLYRRKREECAKEKRPWCDVGSNHQIILFGVSKISHFHRNTLVEISQSDGIDMHVLLTNPCAEFWEDVDTSRRTRALRRRWSSDSPSEVAGITPVKPEEYDKGKLDRFGEDEDTPL

SEQ ID NO: 42933 - DNA, 825 bp, Unknown
  Obtained from environmental sample
  misc_feature (1)..(825): n is a, c, g, or t
atgttaggggcggtatgttgcgtcgccatgagcgtgttgctcgtaaatatgtataggttgcaggtaattgaggcggaagagagtattcgcgtatccaacgaaaacagtatgcgcgagcaggtggtgctccccccccgcggacgcattttagacagaaacggcaacgaactggcccgcaaccgccccgcctactctatatgcgtgctgccctacagtctgcgcaatcgcgaggcggtgatctcctcgctctgcaagatacgcgacatagagggcaacgtcgttttcgacagcatgacgctggtacagcaaatccgcagggccaatacccgcaagtttgaactcacgcgcataaaggaagacgtgcccatagacatagtgagcatagtggaagagcactatatggaactgccggggatagtggtggaaacggagtcgcgccgagagtacccctacggcccgacggcgtttcacgcggtgggctacatgggcgagataccggaaaacgagttcgacaccctcagaaaccaagactactactggggcgacctgatgggcagagcggggcttgagcgctcctacgagagcgtcatgagggggcgttgcggacgcgagtatctggaggtcaacgcatacggaaaaagtttgggcacagtgtcgaacatcaaaaagatagacccaacctacgggtacgacctatatacaacgctagacatcaacctgcagattgtggcaaagaaagctttccccgactcgctaaagggcgcggtggtagcattagacccgcgcaacggcgatgttttggtgctgttcgcaatccgtcggtag

SEQ ID NO: 42934 - protein, 274 aa, Unknown
  Obtained from environmental sample
  DOMAIN (41)...(219): Penicillin-binding Protein dimerisation domain
  misc_feature (1)..(274): Xaa is any amino acid
MLGAVCCVAMSVLLVNMYRLQVIEAEESIRVSNENSMREQVVLPPRGRILDRNGNELARNRPAYSICVLPYSLRNREAVISSLCKIRDIEGNVVFDSMTLVQQIRRANTRKFELTRIKEDVPIDIVSIVEEHYMELPGIVVETESRREYPYGPTAFHAVGYMGEIPENEFDTLRNQDYYWGDLMGRAGLERSYESVMRGRCGREYLEVNAYGKSLGTVSNIKKIDPTYGYDLYTTLDINLQIVAKKAFPDSLKGAVVALDPRNGDVLVLFAIRR

SEQ ID NO: 42935 - DNA, 777 bp, Unknown
  Obtained from environmental sample
  misc_feature (1)..(777): n is a, c, g, or t
atgtcgatgataaaaacagtcggattatacaagacctttcacggctcacagggcaggggaccgcttgaagtgttaaaggacgtgtcccttaccgtggagcaaaaagaagtcgtctgcataatcgggccctccggcgcgggcaaatcgacatacctgcgcaccctgaaccatttggaaacgattgacaaggggcagatatttatagaagacaaactcctctttgactgccacaagggaacaaaccgcgttagaatgcaccatgatgagtacaacaaaacattgcttgaagtgggcatggtgttccagcgtttcaatctttttccccacaggacggcccttgaaaacgtgatgctcgcccctgtccatgtccgcaaaatttccgttaatgaagcgcgggaaaaatccaaaactatccttgagcgcgtcggccttggcgataaattcgacgttttcccctcccagctatcaggcggccaacagcagcgggtcgctattgcccgcgccctcgcgatggagccgaggataatgctttttgacgagcctaccagcgctcttgaccctgagcttgtcggcgaggtgttagctgtaatgaaacagcttgcccttgacggaatgaccatgcttgttgtatctcacgagatggggtttgcccgagaagtcgccgacagggtggtattcatgtttgagggcaaaatcctggaggtcgccccgccaaggataatgttcaacgcccccgctaacgagcgtacccgccagtttctgcaaagtgttttgtag

SEQ ID NO: 42936 - protein, 258 aa, Unknown
  Obtained from environmental sample
  DOMAIN (3)...(234): RecF/RecN/SMC N terminal domain
  misc_feature (1)..(258): Xaa is any amino acid
MSMIKTVGLYKTFHGSQGRGPLEVLKDVSLTVEQKEVVCIIGPSGAGKSTYLRTLNHLETIDKGQIFIEDKLLFDCHKGTNRVRMHHDEYNKTLLEVGMVFQRFNLFPHRTALENVMLAPVHVRKISVNEAREKSKTILERVGLGDKFDVFPSQLSGGQQQRVAIARALAMEPRIMLFDEPTSALDPELVGEVLAVMKQLALDGMTMLVVSHEMGFAREVADRVVFMFEGKILEVAPPRIMFNAPANERTRQFLQSVL

SEQ ID NO: 42937 - DNA, 582 bp, Unknown
  Obtained from environmental sample
  misc_feature (1)..(582): n is a, c, g, or t
atggtcattccgtcaagggcaagctgtttcattacagctaacacctcgccgacaagctcagggtcaagagcgctggtaggctcgtcaaaaagcattatcctcggctccatcgcgagggcgcgggcaatagcgacccgctgctgttggccgcctgatagctgggaggggaaaacgtcgaatttatcgccaaggccgacgcgctcaaggatagttttggatttttcccgcgcttcattaacggaaattttgcggacatggacaggggcgagcatcacgttttcaagggccgtcctgtggggaaaaagattgaaacgctggaacaccatgcccacttcaagcaatgttttgttgtactcatcatggtgcattctaacgcggtttgttcccttgtggcagtcaaagaggagtttgtcttctataaatatctgccccttgtcaatcgtttccaaatggttcagggtgcgcaggtatgtcgatttgcccgcgccggagggcccgattatgcagacgacttctttttgctccacggtaagggacacgtcctttaacacttcaagcggtcccctgccctgtgagccgtga

SEQ ID NO: 42938 - protein, 193 aa, Unknown
  Obtained from environmental sample
  SIGNAL (1)...(24)
  DOMAIN (27)...(65): Protein of unknown function (DUF1602)
  misc_feature (1)..(193): Xaa is any amino acid
MVIPSRASCFITANTSPTSSGSRALVGSSKSIILGSIARARAIATRCCWPPDSWEGKTSNLSPRPTRSRIVLDFSRASLTEILRTWTGASITFSRAVLWGKRLKRWNTMPTSSNVLLYSSWCILTRFVPLWQSKRSLSSINICPLSIVSKWFRVRRYVDLPAPEGPIMQTTSFCSTVRDTSFNTSSGPLPCEP

SEQ ID NO: 42939 - DNA, 678 bp, Unknown
  Obtained from environmental sample
  misc_feature (1)..(678): n is a, c, g, or t
gtggccggctcgttgggcaatatcatccccggcatgaacgcgatagtgagtatcggcaaaatgtttatcggcatcgcgcttggttacatagacgagtgttgtttgggatataccttcttaaaaaaggagcagggcgcgtttaagagcgcggcggacggcgttgtaatttacgcgcagaattggaaaaaacttttgaaggacgcggcgaaaaccacggcgatagttgttatccttataatagtcatcacgctggtttcattcatattgttttttattatatccagaatgctttttagcaatagcatctttaagcctctggcggacattgtggcgttccttcttgcgtgctgcgtggcgttggcgataaaatccgcttttatcgacagttatatgctggtaaaaatgatggtttcctatatgcaggaagcgccgactacggtaatcacgtttgacttgtacggcaaactgtgcggcctgtcagcgaaatttaaggaactgtttaacaagggacagcaggaagctgctcagtctccgcagcctgctatggcaggttcggcgggaacagcgcaactggccgccgctccggctggcggggataaacccaaattctgcggcaattgcggagcgaaaaacgctccgggtacgaaattctgcggcgactgcggcaagcctatgtaa

SEQ ID NO: 42940 - protein, 225 aa, Unknown
  Obtained from environmental sample
  misc_feature (1)..(225): Xaa is any amino acid
MAGSLGNIIPGMNAIVSIGKMFIGIALGYIDECCLGYTFLKKEQGAFKSAADGVVIYAQNWKKLLKDAAKTTAIVVILIIVITLVSFILFFIISRMLFSNSIFKPLADIVAFLLACCVALAIKSAFIDSYMLVKMMVSYMQEAPTTVITFDLYGKLCGLSAKFKELFNKGQQEAAQSPQPAMAGSAGTAQLAAAPAGGDKPKFCGNCGAKNAPGTKFCGDCGKPM

SEQ ID NO: 42941 - DNA, 2376 bp, Unknown
  Obtained from environmental sample
  misc_feature (1)..(2376): n is a, c, g, or t
atgaggactttgggcatggtcagccaggagcggcttgcgcaaaccgccaaggacgattcctatctggctgccctcaaagaaatctatgaaaggtttcagcggtataaaaaaggcgaaacatggtaccggggaagccataaggacgtagtggcgtatttctccatggaatacggcatggacgtgtccttgccgatttattcgggcggtttgggaattctttccggcgaccacatgaaaacttcttcggacatggggcttccgcttgttggtatagggcttttgtacaggcagggatattttacccagatgctgaacgccgacggctaccagcaggaaagctatcccgagaacgactggtacaatatgcccgtcgaaaggaaaaacggcaaagacggccagcctttaaaaatttccgtggatttggccggaaggcaggcaatcgcccaaatttgggaagcaaaagtaggccgctcttcgctttatctcttagacacgaatatcgaggaaaacgccccggactttagaaatattaccgcttctctttacggcggcgacaaagaaacaagaatgcagcaggaaatccttttgggcataggcggcatccgcgccttacgcgccttgggaatcaatcccgcggctacccacatgaacgaagggcacgcggcgtttttgggtcttgagcggatccgcgagataatggaagagaagggatttacttttgaggaagcgcgcgaggctgtttggccgtcaaatatttttacgacccacacccctgttccggccggaaacgagcgttttgaaatcgcgatgatggaaaaatatttccgatcatggccgcaggttttgggaatttcatggaaggactttctgggactgggcaggatataccccggcgacgagcgcgaaactttctgtatgaccgttcttgcgcttaaaatggcggcttacgccaacggagtcgcgaaattgcacggagttgtttcccgcgacatgtggaaaggaatctggccggggctgccgttaaatgaaattccgattggacacgtaacaaacggcgttcactcaaggacatggatttccagcggcatgattgatcttttggacagatacttcggccccagtttcctggacaggcctaccgatttgcaaatttgggagcgcatggaccgcatctccgacgaagaactgtggcgcacccatgaacgccgccgcgaaaaacttgtcgcttttgtgcgcgagcggattaacgcgcagtatgtgcgcacaggcgccgcgcggcttanacaggcggaagatgccctttccccctacgcgctcaccctttgttttgcgcgccggtttgccacttataaacgcggcaacctcctgttacgcgatccaaaacgcctgttgaggctggtaagggatcacgaccgccccattcagttgatttttgccggtaaggcgcatccccatgatatgccgggtaaggacattatccgcgaaataattcactttgccgataaatacgatgtttcaagccgcattgtgtttgtagaaaactacgacatgaatgtcgcaaaatatttaacttccggcggcgatgtatggcttaataccccaagacgtccgatggaagcatccggaaccagcggtatgaaagctgcaatgaacggcgtacttaactgttctattcttgacggctggtgggatgaagcatattgtcccgaagtaggctgggctatcggtcacggcgaacattatgatgacgaaaaactccaggatgatattgaaagtaaagcgctgtatgatcttctggaacgggatattattcctttgttttaccagagaggccgtgacggtcttccccgtgaatggataaaacggatgaaggactgtatgaagcagattggtcagtctatgtccagccaccgtatgttaatggattattcaaatcagttttactttccggcgcttaaaaattcacgccgttttgtaaaggatgattatgccgaagccaaatcacttgcggcgtatttcagtaaactgcagaatttgtggggcagcctgaaaattgtcaaactggaatccaacgcaaaacctgtaatgcaacgcggcgatatgctgaccgttaccgcctatctggatttaggttctatcaaaccggatgaattatatgtcgagctttaccacggaactgtatcgaatcaaagcagcgagattgcgaacgcaagaaaaacagagatgaagtggctcaaaagcgaaggcaaccttaacctgtatcaggttagaattgaatgcgccgacaccggtatgcagggtcatacggtgcgtattttacccaaacatgatgcgctggtacatccgtaccgcagcggatttattaagtgggcataa

SEQ ID NO: 42942 - protein, 791 aa, Unknown
  Obtained from environmental sample
  DOMAIN (55)...(646): Carbohydrate phosphorylase
  misc_feature (1)..(791): Xaa is any amino acid
MRTLGMVSQERLAQTAKDDSYLAALKEIYERFQRYKKGETWYRGSHKDVVAYFSMEYGMDVSLPIYSGGLGILSGDHMKTSSDMGLPLVGIGLLYRQGYFTQMLNADGYQQESYPENDWYNMPVERKNGKDGQPLKISVDLAGRQAIAQIWEAKVGRSSLYLLDTNIEENAPDFRNITASLYGGDKETRMQQEILLGIGGIRALRALGINPAATHMNEGHAAFLGLERIREIMEEKGFTFEEAREAVWPSNIFTTHTPVPAGNERFEIAMMEKYFRSWPQVLGISWKDFLGLGRIYPGDERETFCMTVLALKMAAYANGVAKLHGVVSRDMWKGIWPGLPLNEIPIGHVTNGVHSRTWISSGMIDLLDRYFGPSFLDRPTDLQIWERMDRISDEELWRTHERRREKLVAFVRERINAQYVRTGAARLXQAEDALSPYALTLCFARRFATYKRGNLLLRDPKRLLRLVRDHDRPIQLIFAGKAHPHDMPGKDIIREIIHFADKYDVSSRIVFVENYDMNVAKYLTSGGDVWLNTPRRPMEASGTSGMKAAMNGVLNCSILDGWWDEAYCPEVGWAIGHGEHYDDEKLQDDIESKALYDLLERDIIPLFYQRGRDGLPREWIKRMKDCMKQIGQSMSSHRMLMDYSNQFYFPALKNSRRFVKDDYAEAKSLAAYFSKLQNLWGSLKIVKLESNAKPVMQRGDMLTVTAYLDLGSIKPDELYVELYHGTVSNQSSEIANARKTEMKWLKSEGNLNLYQVRIECADTGMQGHTVRILPKHDALVHPYRSGFIKWA

SEQ ID NO: 42943 - DNA, 537 bp, Unknown
  Obtained from environmental sample
  misc_feature (1)..(537): n is a, c, g, or t
atggaaaatagaatgggagatgagagtatttatttgcggattttggaattgaaaaatgggaatatccaattaactgattctaccaatgcggcacggcttttgaaagaacataagagggatattcgttattttccggcttggaaaaaatggctggtgtggaacggttcgtattgggaaactgacgagggcggggctttgatacatgaaaaagggcttgcgacggttcggaatatctatgatgaccttctgaaaactaacgactacagggaacggaatgaaattgagaatttcgcaaagataagtgaaagtatcaggcggcgtgaggcaatggttaaaacggctcaatatataaaggagttgaataccggcgctgaggagcttgataaaaatccctggctgttgaatgtccgtaacggaactattgacgtattgacaggggattttatggaacacaggcaagaggatatgattaccaaacttgccaatgttgattttgacccttcagccgatgtccgttatggaagcagttgtccgtga

SEQ ID NO: 42944 - protein, 178 aa, Unknown
  Obtained from environmental sample
  misc_feature (1)..(178): Xaa is any amino acid
MENRMGDESIYLRILELKNGNIQLTDSTNAARLLKEHKRDIRYFPAWKKWLVWNGSYWETDEGGALIHEKGLATVRNIYDDLLKTNDYRERNEIENFAKISESIRRREAMVKTAQYIKELNTGAEELDKNPWLLNVRNGTIDVLTGDFMEHRQEDMITKLANVDFDPSADVRYGSSCP

SEQ ID NO: 42945 - DNA, 1215 bp, Unknown
  Obtained from environmental sample
  misc_feature (1)..(1215): n is a, c, g, or t
atgacagattggccgagggtaaagaccttttcgggcaatattaaccaatgcgcgcaattaaacctgataacgaaagaaatgtttgcgatagacggatgcaaactgccgtcgaacgcgtcaaaagaatggtcggggtcgataagggagcttagaaggaaacgggacaaactgaaagaacatatagaaaaaataattaaacagcacggagaactggacaaagacgaaaaggctaagaagatacaaaagccgtacgcgaagacaatgggtgatgacaaggaaagaagggaaaagagcgtggaaaggctggaaaaaagattggagaagctgaacaaattcttgaaggaagcagaaccgaggaaaggagtgtcagcggaagaagtgcagtcgaatataacggacaatgaaagcgcattgataaaaagcccgcacggatatatccagggatataacggcataacaatagcggattccggcagccagataatagtatctgcggaagtaataggttcaggacctgaaagcggaagttttccgaagatgctggatagctttgaagaaaatatgaaaaagataacaggaaaagaagaaccgttgaagaaagcgttattagtaggggacaccggatatttttcagaggctaatctgcaggaagctgaggaaagagggataaacgtgttgatacctgatccgcaattcaggcagagggaaccgtactatgcggagaagaagaaagaaaaagtagaaaagaaaaaacgatatacagcggaagacttaaagtataatgaaaggaacgacagttttatatgcccgtgcggaaaaacgcttgtatacaaaggagatgtgacgctgaggaataacagcgggaggaaatacatggcgaaaaggacagattgcgcgaactgtcctttaatagaaaaatgcatagcgcggcgtagcggaaagaaatcagtaagaacgctttatatagtagaaaagaaatacaaaaacaatttatccgaaaagatgaggaaaaagatagacaatcctgcgtaccgagaattgtattcgaggcgtatgcagatagtggaacctgtatattcaaatataacatataacaaaggaatgaacaggtttacgttaagaactaaaaggaaggtaaacatacagtggaagttatactgcatggtacacaatatagggaaatgtataaaacctttgggagaaatatgcggataa

SEQ ID NO: 42946 - protein, 404 aa, Unknown
  Obtained from environmental sample
  misc_feature (1)..(404): Xaa is any amino acid
MTDWPRVKTFSGNINQCAQLNLITKEMFAIDGCKLPSNASKEWSGSIRELRRKRDKLKEHIEKIIKQHGELDKDEKAKKIQKPYAKTMGDDKERREKSVERLEKRLEKLNKFLKEAEPRKGVSAEEVQSNITDNESALIKSPHGYIQGYNGITIADSGSQIIVSAEVIGSGPESGSFPKMLDSFEENMKKITGKEEPLKKALLVGDTGYFSEANLQEAEERGINVLIPDPQFRQREPYYAEKKKEKVEKKKRYTAEDLKYNERNDSFICPCGKTLVYKGDVTLRNNSGRKYMAKRTDCANCPLIEKCIARRSGKKSVRTLYIVEKKYKNNLSEKMRKKIDNPAYRELYSRRMQIVEPVYSNITYNKGMNRFTLRTKRKVNIQWKLYCMVHNIGKCIKPLGEICG

SEQ ID NO: 42947 - DNA, 360 bp, Unknown
  Obtained from environmental sample
  misc_feature (1)..(360): n is a, c, g, or t
ttgattttctcaggttattccgatatggcaatagggttgggcagaatgttcggctttgagtttctagaaaatttcaactacccatatatatcaaaaactataaccgaattctggcgaaggtggcacatatccttatcatcgtggttcaaggattatgtttacataccacttggagggaacaaaaaagggaatgtgtatgttaatttattaattgtatttgttctgacaggtttctggcacggagctcattttcagtttttggcatgggatctttggcatggtttgtttttgatcatagaacgtttgttcggaatgagaaaagtacggagaaaaaaattattccgctgcgttatgcaatga

SEQ ID NO: 42948 - protein, 119 aa, Unknown
  Obtained from environmental sample
  DOMAIN (2)...(119): MBOAT family
  misc_feature (1)..(119): Xaa is any amino acid
MIFSGYSDMAIGLGRMFGFEFLENFNYPYISKTITEFWRRWHISLSSWFKDYVYIPLGGNKKGNVYVNLLIVFVLTGFWHGAHFQFLAWDLWHGLFLIIERLFGMRKVRRKKLFRCVMQ

SEQ ID NO: 42949 - DNA, 621 bp, Unknown
  Obtained from environmental sample
  misc_feature (1)..(621): n is a, c, g, or t
gtgtgtatcggccatatcgttatttccgatgaggtaaaaccggacagcaaggctgccattgcgggccttaaagcccagggggtaagaaagaccgtcatgctgactggggataacccacagatagcggcggcggttgcaagggaattgaaattggacgagtggcacgccggtcttttgcctcacgagaaagtagagaaattggaaatactttcgggcgaaaaaaaggccaaaggcaaactcgcttttataggggacggtatcaacgacgcgccggtactcgcccgcgccgacataggtatcgcaatgggtgtgctcggttctgacgcggcaattgaagccgccgatgtggtattgatgaccgacgagccgtcaaaactcatagaagcggtcggcattgcccggttcactaaacgcattgtctggcagaacatcgctttagccctggggattaagggagtgtttttggttcttggcgctttcggccttgctaccatgtgggaagcggtttttgccgatgtgggagttgctgtgcttgcgatactgaacgccagcagagcgatcaaggggactcccgcgctgcgcggcaggaaaaacccggttcgcatacagccggaacgttaa

SEQ ID NO: 42950 - protein, 206 aa, Unknown
  Obtained from environmental sample
  misc_feature (1)..(206): Xaa is any amino acid
MCIGHIVISDEVKPDSKAAIAGLKAQGVRKTVMLTGDNPQIAAAVARELKLDEWHAGLLPHEKVEKLEILSGEKKAKGKLAFIGDGINDAPVLARADIGIAMGVLGSDAAIEAADVVLMTDEPSKLIEAVGIARFTKRIVWQNIALALGIKGVFLVLGAFGLATMWEAVFADVGVAVLAILNASRAIKGTPALRGRKNPVRIQPER

SEQ ID NO: 42951 - DNA, 426 bp, Unknown
  Obtained from environmental sample
  misc_feature (1)..(426): n is a, c, g, or t
atgcgaaccgggtttttcctgccgcgcagcgcgggagtccccttgatcgctctgctggcgttcagtatcgcaagcacagcaactcccacatcggcaaaaaccgcttcccacatggtagcaaggccgaaagcgccaagaaccaaaaacactcccttaatccccagggctaaagcgatgttctgccagacaatgcgtttagtgaaccgggcaatgccgaccgcttctatgagttttgacggctcgtcggtcatcaataccacatcggcggcttcaattgccgcgtcagaaccgagcacacccattgcgatacctatgtcggcgcgggcgagtaccggcgcgtcgttgataccgtcccctataaaagcgagtttgcctttggcctttttttcgcccgaaagtatttccaatttctctactttctcgtga

SEQ ID NO: 42952 - protein, 141 aa, Unknown
  Obtained from environmental sample
  SIGNAL (1)...(27)
  misc_feature (1)..(141): Xaa is any amino acid
MRTGFFLPRSAGVPLIALLAFSIASTATPTSAKTASHMVARPKAPRTKNTPLIPRAKAMFCQTMRLVNRAMPTASMSFDGSSVINTTSAASIAASEPSTPIAIPMSARASTGASLIPSPIKASLPLAFFSPESISNFSTFS

SEQ ID NO: 42953 - DNA, 675 bp, Unknown
  Obtained from environmental sample
  misc_feature (1)..(675): n is a, c, g, or t
atgtacttccccataacccgatacggaatgccgcaggttttgatatttccgctggttgtattggcgttaatggcggcgctgttcatcttcctgcctcggggtatattgcttataacggcggaaattgttcttttcctggtctttgtatggatgctgatgttttttcgggatccacggcgtaaaatacctctggacaaccgcgcgttactctctccggcggacggcactataacggatatttccgaagcggaaatacccgagattgagggcaaggcgctgaaaatcgggatgttcctcagtattttcaatgtccacataaaccgctttccctgcgcggcgcgcgttgaatcgatctattataaaaagggaaaatttataaacgccatggacgccgaggcgggccgcgttaatgaatccaatgacatattgatgacccgtcttgacgagccgcgcggccggctgctgataaggcagataagcggggcaatcgcccgccatattgtctgcgaggcgaaacctggacaagagtacgcgcagggggcagccttcggtatgattaaattcggttcccgcacggaattgtacctgcccctcaaagacttggactattccctgcttgtaaaaatcggggacaaagtcaatgcgggcttaagcccattggttgtatacaaatga

SEQ ID NO: 42954 - protein, 224 aa, Unknown
  Obtained from environmental sample
  DOMAIN (47)...(221): Phosphatidylserine decarboxylase
  misc_feature (1)..(224): Xaa is any amino acid
MYFPITRYGMPQVLIFPLVVLALMAALFIFLPRGILLITAEIVLFLVFVWMLMFFRDPRRKIPLDNRALLSPADGTITDISEAEIPEIEGKALKIGMFLSIFNVHINRFPCAARVESIYYKKGKFINAMDAEAGRVNESNDILMTRLDEPRGRLLIRQISGAIARHIVCEAKPGQEYAQGAAFGMIKFGSRTELYLPLKDLDYSLLVKIGDKVNAGLSPLVVYK

SEQ ID NO: 42955 - DNA, 1104 bp, Unknown
  Obtained from environmental sample
  misc_feature (1)..(1104): n is a, c, g, or t
ttgctgagtcctngggcggaaaacccagaatgggatctggaatgggccgattgggacaaggaaaaaataagcgcccattcgctgacggcaactctgtcggcttcggtcatggagaagacgcagacttttcagatgatcgcggatctgccgccacgggacgcgaagttgagctggaatacgggaataaatatatggatcaccagcactaacgcaagctgggggatacagctcccggagaaaagggaggaatggaagctggatccgttcaatttccgcgagagcgtcaactttggcagttatggcagtctttcttttaacatgacaatggatactgagggttgggattcgcctgaaacaggtgtaatggaaagaagggtaagctcgattacaacatcgctaaacctttcaaaatggggagtcacggcggcatattccgcttcccgtatgctgggttatgaatatctgattggaacaggcaccgccgatacaggatggttccagcggccggattcggccgagaatatgattctccgctccagggatttttccctttcctattcaaaaaatatagctatgaaagaactctggaataaaaatatagactttaccgttaacacaagggcaagcctgaatattaatctgcagcaatatacgagctccaattttaatttttccctgggctttaccctggggattaatagattcctcagcatgagcatagccgccgagtcgtcgaattcgcgtatttatcagtatttccatgactggcgggtattccgcgacgcccggatagaattgtctcccgacacccagacaaacatattcattgacctttttgattctttccgttttgacgatgaagaattaaggaaaagatccggatttaagatgaagaatttccgaatatcggcaacccatcatttgggagactggaacgccatattgaactggtcaatgacgccttaccgcgcgccgggcagcaacagttatgaaattaataacgaagtgagcttcctgctccaatggatacccatcagcgaaatcaagagcgatatttcatataacaagaaaaatacccccgaatgggtggtgaaaggcttgtaa

SEQ ID NO: 42956 - protein, 367 aa, Unknown
  Obtained from environmental sample
  misc_feature (1)..(367): Xaa is any amino acid
MLSPXAENPEWDLEWADWDKEKISAHSLTATLSASVMEKTQTFQMIADLPPRDAKLSWNTGINIWITSTNASWGIQLPEKREEWKLDPFNFRESVNFGSYGSLSFNMTMDTEGWDSPETGVMERRVSSITTSLNLSKWGVTAAYSASRMLGYEYLIGTGTADTGWFQRPDSAENMILRSRDFSLSYSKNIAMKELWNKNIDFTVNTRASLNINLQQYTSSNFNFSLGFTLGINRFLSMSIAAESSNSRIYQYFHDWRVFRDARIELSPDTQTNIFIDLFDSFRFDDEELRKRSGFKMKNFRISATHHLGDWNAILNWSMTPYRAPGSNSYEINNEVSFLLQWIPISEIKSDISYNKKNTPEWVVKGL

SEQ ID NO: 42957 - DNA, 378 bp, Unknown
  Obtained from environmental sample
  misc_feature (1)..(378): n is a, c, g, or t
atggcgctcttgcccaacgcttacatgcagggcgaggccgcgggaataaacatggcaggcggcgacaagagctttgacaaggcaatccccatgaacgccatcgggtttttcggcctgcacattatcacggcgggtagttactcgggcgatgtacacgccgagagcggcaaaggcaattacaggcgcttgttttacagcgacaacaaactaaacgggtatatccttatcggtaacatagaaaaggcagggatttacacaagccttatccgcgagcgcacaccgcttgatacaatcgacttcgcgttagtttgcgaaaggccggggctgatggcgttcagaaaagaagagcgaatggtaaaattgggaggcgcttcatga

SEQ ID NO: 42958 - protein, 125 aa, Unknown
  Obtained from environmental sample
  misc_feature (1)..(125): Xaa is any amino acid
MALLPNAYMQGEAAGINMAGGDKSFDKAIPMNAIGFFGLHIITAGSYSGDVHAESGKGNYRRLFYSDNKLNGYILIGNIEKAGIYTSLIRERTPLDTIDFALVCERPGLMAFRKEERMVKLGGAS

SEQ ID NO: 42959 - DNA, 789 bp, Unknown
  Obtained from environmental sample
  misc_feature (1)..(789): n is a, c, g, or t
ttgcgaaaggccggggctgatggcgttcagaaaagaagagcgaatggtaaaattgggaggcgcttcatgattaacatatctgcgaagaatttaaaccacaaagaacttaacaaacttattagaaccgccgcggaagacgtttgcgtagacgattgttttgggcagaggtttatcgggagcggcatgagcggcaaaaatataacgataaatggaacgccgggaaacgcgatgggcgcttattttaacggtggaacaattcttgtaaacggaaacgcgcaggacgccgtcggcgacactatgaacgacggcaaaatcatcattcacggcaacgcgggcgacgcgcttggctacgccatgcggggcggcagtatttttgtccgcaacaactccgggtacagagccggaatccacatgaaagaatacaaagaaaaaaaacctgtaattgtcattggcggcaaggcgggcagttttttgggcgaataccttgccggcggaatcattgtagtgctgggaataggctgccacaatgagatccccgtctggtattttacgggaaccggaatgcacggcggaaaaattttcatcagaaccgacaaagaactttcttcgcttccggcgcaggtcgttgaggacatagccagtgataatgatctgcgtgagattgcgccgtatatcggtgagtttgcaaagtattttagtatggacgcgcagcagcttttgaaagacaggtattatgtgttgaagcctaacgcaaagaacccgtataaacagctatatacggcgaattaa

SEQ ID NO: 42960 - protein, 262 aa, Unknown
  Obtained from environmental sample
  DOMAIN (14)...(232): GXGXG motif
  misc_feature (1)..(262): Xaa is any amino acid
MRKAGADGVQKRRANGKIGRRFMINISAKNLNHKELNKLIRTAAEDVCVDDCFGQRFIGSGMSGKNITINGTPGNAMGAYFNGGTILVNGNAQDAVGDTMNDGKIIIHGNAGDALGYAMRGGSIFVRNNSGYRAGIHMKEYKEKKPVIVIGGKAGSFLGEYLAGGIIVVLGIGCHNEIPVWYFTGTGMHGGKIFIRTDKELSSLPAQVVEDIASDNDLREIAPYIGEFAKYFSMDAQQLLKDRYYVLKPNAKNPYKQLYTAN

SEQ ID NO: 42961 - DNA, 486 bp, Unknown
  Obtained from environmental sample
  misc_feature (1)..(486): n is a, c, g, or t
gtgaaaaccccgctttacttaactggaacaatgatagtggctcgcgatattgcccacgcaaaactcgcagagattttggagaaagaaggcgacttgccggaatatttcaaaaagcatcctatctattacgcaggtcctgcaaaaactccaaaaggcaaacccacaggtagctttggtccaaccactgctggcagaatggactcttatgtggcgcgtttccaagaaaaaggagcaagccttattatggtggcaaaaggcaaccgcaccaaagatgtaacggattcttgccagaaaaacggcggtttctatttaggttcaataggcggtcctgcggcattgctcgcagagcaaaatattttgagcaatgagattttagcattcccagaacttggaatggaagccattcgcaaaatcaccgttaaggatttccctgcgttcataattgtggacaataagggaaatgactttttcaaggaattgatatag

SEQ ID NO: 42962 - protein, 161 aa, Unknown
  Obtained from environmental sample
  DOMAIN (1)...(160): Fumarase C-terminus
  misc_feature (1)..(161): Xaa is any amino acid
MKTPLYLTGTMIVARDIAHAKLAEILEKEGDLPEYFKKHPIYYAGPAKTPKGKPTGSFGPTTAGRMDSYVARFQEKGASLIMVAKGNRTKDVTDSCQKNGGFYLGSIGGPAALLAEQNILSNEILAFPELGMEAIRKITVKDFPAFIIVDNKGNDFFKELI

SEQ ID NO: 42963 - DNA, 303 bp, Unknown
  Obtained from environmental sample
  misc_feature (1)..(303): n is a, c, g, or t
ttgatgtcgccgtttacgccccgcaggcgcgacgcttttaccgcggctcttgacgaggcgggaatagaatacgccgtaccggaaggggcgttttacctgttctgcaaagttccgtcgcggcgtaaaagctcagaaccgggcgatgacgcggcgtttgtaaaccacctgaaacagtatttgatnttaggcgtacccggcgccggtttcggcaaacccggctggctgcgtttcgcgtattgcattgacgagaaaataatccgcgcttctgctgttgcttttaagaaggcgatagaaagctggtag

SEQ ID NO: 42964 - protein, 100 aa, Unknown
  Obtained from environmental sample
  misc_feature (1)..(100): Xaa is any amino acid
MMSPFTPRRRDAFTAALDEAGIEYAVPEGAFYLFCKVPSRRKSSEPGDDAAFVNHLKQYLXLGVPGAGFGKPGWLRFAYCIDEKIIRASAVAFKKAIESW

SEQ ID NO: 42965 - DNA, 843 bp, Unknown
  Obtained from environmental sample
  misc_feature (1)..(843): n is a, c, g, or t
gtgtttgatttttcctggggaatcccgatcttgagccgccgcctgaatttncaccgggttttcctgaaacttgccgaagaagacgcaaaaggttcccacggctatatgcccaacgcgggttatgccgatgtgagggaagcccttgcccgcaaagcctcacgggaacatcaggtttccattgacggttcgcatattgtcatggccgtcggtgcggcgggcgggctgaacgcggtgtttaagaccatctgcgaccccggcgacgaagtgattgttatgcgtccctattttatggaataccgttcctatacgggaaatcacggggcaaaattggttgaagtagattctcttcccgattttaacctgaatattgacgctatcggcgcggcgcttacgcccaaaaccgctgcgattttgataaattcgcctaacaaccccacagggaaagtttaccccgcgcagagcattgccgcgcttgccggtcttttgaaaaaacacggagaaaaaaccggccgcttgccctatctggtgtccgatgagccgtaccgtgaaattgcgtataacgtagatgttcccccggtattgaacgcctacagtgaatcaattgtggtgaattcctattcaaagagcctgtctctgcccggcgagcgaatcggctatatcgcggtaagccctgacattaccgacaaagccgatgtgatgaacggtctgatttacagcacccgcatactgggctacgtcaacgcgccggcgctgatgcaaaggattgtagcggaattaaccgaagcggtagttgatgtcgccgtttacgccccgcaggcgcgacgcttttaccgcggctcttga

SEQ ID NO: 42966 - protein, 280 aa, Unknown
  Obtained from environmental sample
  DOMAIN (1)...(276): Aminotransferase class I and II
  misc_feature (1)..(280): Xaa is any amino acid
MFDFSWGIPILSRRLNXHRVFLKLAEEDAKGSHGYMPNAGYADVREALARKASREHQVSIDGSHIVMAVGAAGGLNAVFKTICDPGDEVIVMRPYFMEYRSYTGNHGAKLVEVDSLPDFNLNIDAIGAALTPKTAAILINSPNNPTGKVYPAQSIAALAGLLKKHGEKTGRLPYLVSDEPYREIAYNVDVPPVLNAYSESIVVNSYSKSLSLPGERIGYIAVSPDITDKADVMNGLIYSTRILGYVNAPALMQRIVAELTEAVVDVAVYAPQARRFYRGS

SEQ ID NO: 42967 - DNA, 372 bp, Unknown
  Obtained from environmental sample
  misc_feature (1)..(372): n is a, c, g, or t
atgagtggagagaaacaaaagatactcattgtcgatgacgaggcaaaaatcatcgaagtggttgagtcatttttggagagcaaaggttattccgtgctcggagcggaaaatgcaggacaggcgttcgatattttcgagagggagcgcgtggacttgattctgttggaccttatgctccccggcatgacaggtgaagaattctgcgcggcagtgcgcagaaagtcccatgtccccataatcatgctgaccgccaaggtggaggaagaagacatgctgaacggtcttgccataggcgccgacgactacatcacaaaaccgttcagccttaaaacgcttctcgcgcgaatcgaggccattctcggccgcatctga

SEQ ID NO: 42968 - protein, 123 aa, Unknown
  Obtained from environmental sample
  DOMAIN (6)...(117): Response regulator receiver domain
  misc_feature (1)..(123): Xaa is any amino acid
MSGEKQKILIVDDEAKIIEVVESFLESKGYSVLGAENAGQAFDIFERERVDLILLDLMLPGMTGEEFCAAVRRKSHVPIIMLTAKVEEEDMLNGLAIGADDYITKPFSLKTLLARIEAILGRI

SEQ ID NO: 42969 - DNA, 615 bp, Unknown
  Obtained from environmental sample
  misc_feature (1)..(615): n is a, c, g, or t
atgtctgggctgagtttccttgcgcgttgcaattcccagtttgtttcggaaattaacggcgcgcccaagggtgattctaccgttactctaaagaacggtgttcgcgtgcgggtcatcaaattcgaattgtcttccggagaaatcgagactcttgtgaccaaccttttcaatttatcagaatcgctattctcggaactttatgctcttcgttgggggatagaaacagcttatcttaggctgaagagggagctatgtgttgaaaaattttccggaaagacgccaaacagtgtacggcaggacttttggacgagcatggttttgctcaattcagtggctgtgtttcaaggcgaggctgataaagcggtacaagaacggcagaaagctaaaaccgtaaagcatgagaaccgcgcgcgaaccagcggtataattgttacgttacgtgatcgctttattttcgctgttttgtgcggtaacccgatgttcacgtccgaagagatggaacgtgtcatcaaagcaatggctcgcgaggtatcgcctgtacgtcccggtcgctcatctccaagacatttcaaaactgcttgtgccgccaatcataaccttaagtctcacctttga

SEQ ID NO: 42970 - protein, 204 aa, Unknown
  Obtained from environmental sample
  misc_feature (1)..(204): Xaa is any amino acid
MSGLSFLARCNSQFVSEINGAPKGDSTVTLKNGVRVRVIKFELSSGEIETLVTNLFNLSESLFSELYALRWGIETAYLRLKRELCVEKFSGKTPNSVRQDFWTSMVLLNSVAVFQGEADKAVQERQKAKTVKHENRARTSGIIVTLRDRFIFAVLCGNPMFTSEEMERVIKAMAREVSPVRPGRSSPRHFKTACAANHNLKSHL

SEQ ID NO: 42971 - DNA, 648 bp, Unknown
  Obtained from environmental sample
  misc_feature (1)..(648): n is a, c, g, or t
gtgttattatatagaaccatgactattgtaaatcgaaaattaacaggatctttttatactgaaagtaaagttgctgagagtgtagtaaattgggcaatcataaacagtaaagataaagtgttggagccttcatttggagacggtatatttattgataagtctatttgtcgttttagaacattaggcaactttaatccaagtattacggctgtggaaatacagcctgaagttgttgaaaatgttcgtaaacaattcaaagtaggaaatcttcacacattaacaacagattttctttcgctcaatttaaataatcaatttgatgcagttgtggggaaccctccttatgtcggtataaaaaacctgccgtcaaaacagaaggacacagcccggcgggttatcaagaattatagtgttcaatgtcctgataacggcagtttatggtttccatttgttctacatgctattactgctgttaagacggatggtcgcctgacctttgttttaccttttgagattacatatactcgttatgcttatggattatggaaaatattggcccaaaatttttccggtctttcaatttgccggatatacgaggattttttcctaacgtcgatgttgaaacaatactcctctttgcggaagtaa

SEQ ID NO: 42972 - protein, 215 aa, Unknown
  Obtained from environmental sample
  misc_feature (1)..(215): Xaa is any amino acid
MLLYRTMTIVNRKLTGSFYTESKVAESVVNWAIINSKDKVLEPSFGDGIFIDKSICRFRTLGNFNPSITAVEIQPEVVENVRKQFKVGNLHTLTTDFLSLNLNNQFDAVVGNPPYVGIKNLPSKQKDTARRVIKNYSVQCPDNGSLWFPFVLHAITAVKTDGRLTFVLPFEITYTRYAYGLWKILAQNFSGLSICRIYEDFFLTSMLKQYSSLRK

SEQ ID NO: 42973 - DNA, 435 bp, Unknown
  Obtained from environmental sample
  misc_feature (1)..(435): n is a, c, g, or t
gtgcttgtggcctctgtcaatgggtcgtcggctacatccatgctggtaattgaacgccaaagggacatcgctgttttgaaagcgtccggggccgggccttcctttacgagcgcggtgtttttgtggggcgctttcttaaccggccttgccggttccgtcctcggcatcgccgcgggtcttgccatcggctgctcggtgaacagcctcataagagcgctggaaagggcgctgacttttttctcgggaatttttcacggcggccctgttttaattctggattccggctactaccttgaaaccatccccatcatcgtgaactggaaaatggtttttacaatcgcgctattgacgatctctgctacggtcttggcttcctggcttccggcccgcagggccggaaagctaaagcccattgagatactgcggaagtattaa

SEQ ID NO: 42974 - protein, 144 aa, Unknown
  Obtained from environmental sample
  DOMAIN (1)...(137): Predicted permease
  misc_feature (1)..(144): Xaa is any amino acid
MLVASVNGSSATSMLVIERQRDIAVLKASGAGPSFTSAVFLWGAFLTGLAGSVLGIAAGLAIGCSVNSLIRALERALTFFSGIFHGGPVLILDSGYYLETIPIIVNWKMVFTIALLTISATVLASWLPARRAGKLKPIEILRKY

SEQ ID NO: 42975 - DNA, 984 bp, Unknown
  Obtained from environmental sample
  misc_feature (1)..(984): n is a, c, g, or t
gtgcaggctgcgcggcgacgagacccgggtcaggcaggtggccctgaacgtgctgaacaacgccgccaagtacaccaaggagggccacgtctcgttcgaggttaccgggcgcagggacgccgtgggcggcttcgagctggtgatggccgtgtcggacacgggcatagggataaagcgcgaggacatgggcaggctgttcggcaagttcacgcgcctggacggcgagaagaaccgcgcggtggagggcaccggcctgggcctcgccatcaccagcaacctatgcgggatgatgggcggcgagatatgcgtggacagcgagtacgggaggggctccaccttcaccgtcaggctgccccagggggtggcggacgaggcccccctgaccaggctggactcccccgcggagtgcgccaccctggtcttcgagctgcgccccaagcacctcgagtccatagagtccaccctgaggggcctgggcgcgcccttcgacgccgtctccaccctgtccgccttcaaggacggcctgtccggcggcggctaccggttcgccatactgcccaagcacctatacgacgaggccccgggcgtcctcgccgcggccgcggccggcggcgcggaggtgttcgtgctgctggagttcagcgagacggtgccggccaagggcgtcggcaccctgtccatgcccgtgagctgcatatcggtggccaacgccttcaaccacgcgggctccgccggcgagccagagctggcgggcgggccagggcacttcacggcccccggcgcgcgggtgctggtggtggacgacataccgaccaacctgagggtgatggagggcctgctggccccctacggcctgcgggtggacacctgcgcctccggcgaggaggccatagagctggcgcgggccggcgtctacgacatggtgttcatggatcacatgatgccgcgtatggacggcatagagaccgcgcgaaagctgcgtga

SEQ ID NO: 42976 - protein, 327 aa, Unknown
  Obtained from environmental sample
  misc_feature (1)..(327): Xaa is any amino acid
MQAARRRDPGQAGGPERAEQRRQVHQGGPRLVRGYRAQGRRGRLRAGDGRVGHGHRDKARGHGQAVRQVHAPGRREEPRGGGHRPGPRHHQQPMRDDGRRDMRGQRVREGLHLHRQAAPGGGGRGPPDQAGLPRGVRHPGLRAAPQAPRVHRVHPEGPGRALRRRLHPVRLQGRPVRRRLPVRHTAQAPIRRGPGRPRRGRGRRRGGVRAAGVQRDGAGQGRRHPVHARELHIGGQRLQPRGLRRRARAGGRARALHGPRRAGAGGGRHTDQPEGDGGPAGPLRPAGGHLRLRRGGHRAGAGRRLRHGVHGSHDAAYGRHRDRAKAA

SEQ ID NO: 42977 - DNA, 1755 bp, Unknown
  Obtained from environmental sample
  misc_feature (1)..(1755): n is a, c, g, or t
atggacagcagttttataggacggataggctcaagtcccaccggccaatacgccgttacctaccgcagggagaacggtgtaataacgatcgggacaagttccgacattgaacaaagcatggcttacattagcggtcccaacgcgcgcaaggaccgtgtggatgatccccaaccttttacgataaacggaaaaacctcacaaaatctaagaatgggggttcccatctttaatccgcgtacggacgaagtagtcggaatcgtagtctgccttttaaatctcgacgtaatacaggaaatagtgatgaataccatcaaaacatacgaagaaatcgccttaatggtaatgtattcaaataatggaactattattgcgcattttattcctgacagaattggtaaaaatttaaaagaagttgatttagaatatggtgacaagcaacaagaggcttatcaagcgatactggatgggaagccttataatctcaggttctatgatccaaatatgaaggatcattgcaattttataatgcaaccgttcactatcggcaattcaggcgtaagttggacgatattagtaggggtaatggattcgtacgccctcaaagaagtcagggcgattactaagtttaccattttactgacgttgatagccattgcagcttcggcggcaattatatattttgttcttggcgggattacaaacccaatcgtcaaagtagccgataccctcaaaattgtcgcggaaggcgatctgacgcanagcgtcaatgtcaatacaaaagacgaaataggcgatcttgcccgcgactttaatttttcgacagataaaatcagagaacttgttggaacaataaaatacaaaatcaacggacttaaccataccagttttgaactttcaactaatatgggtaaaacttcttcagccgttaagcagatttcatcaaaatctgacaatatggaaaacctgatggtcaaacaggaaaacggagcggaagaagcgtgtaacgcggtaggcattataaaaacaaatatcgacagccttaaaaaaatgatagaacagcagaacgacagcgttaatatgtcgtcttccgctattgaggaaatgaccgccaacattcattcggtaactcagacgcttgcggaaaacagcaaaaatgtcggcgttttagtcgaagcgtcagaaaacggcaaaacagggcttcaattggtagcgcaggagatacaggaaatagcccatgattccgaaggcctgctggaaataaattctgtgatggacaatatcgcaagccaaaccaatttgctttcaatgaacgcggcgatagaagccgctcacgccggagaagtcggaaaaggctttgccgtagtcgccgatgaaatacgcaaactcgccgagtcgtcgagtaatcagtcaaaaacaacggcggcaatgttaaaaaaaataaaaacgtccatagacaacattacaaaatcatctaacgacgtattagagcgtttcggcgctatagactcaagcgtaaaaacggtttccgaacatgaacaaaatatcctgaaagcgatgcaagagcaggaaatcggagggaagcaaatactggaaaccatcagtcttttaagggacataacccattcggtaaaaaaagggtctgatgacatggctaaatcaggtgaaactttagtcaatgaaacggacgaatttataaataccagccggaaagcggtagaaggcatgaacgagatactcaaaggcataaccagataa

SEQ ID NO: 42978 - protein, 584 aa, Unknown
  Obtained from environmental sample
  DOMAIN (352)...(577): Methyl-accepting chemotaxis protein (MCP) signaling domain
  misc_feature (1)..(584): Xaa is any amino acid
MDSSFIGRIGSSPTGQYAVTYRRENGVITIGTSSDIEQSMAYISGPNARKDRVDDPQPFTINGKTSQNLRMGVPIFNPRTDEVVGIVVCLLNLDVIQEIVMNTIKTYEEIALMVMYSNNGTIIAHFIPDRIGKNLKEVDLEYGDKQQEAYQAILDGKPYNLRFYDPNMKDHCNFIMQPFTIGNSGVSWTILVGVMDSYALKEVRAITKFTILLTLIAIAASAAIIYFVLGGITNPIVKVADTLKIVAEGDLTXSVNVNTKDEIGDLARDFNFSTDKIRELVGTIKYKINGLNHTSFELSTNMGKTSSAVKQISSKSDNMENLMVKQENGAEEACNAVGIIKTNIDSLKKMIEQQNDSVNMSSSAIEEMTANIHSVTQTLAENSKNVGVLVEASENGKTGLQLVAQEIQEIAHDSEGLLEINSVMDNIASQTNLLSMNAAIEAAHAGEVGKGFAVVADEIRKLAESSSNQSKTTAAMLKKIKTSIDNITKSSNDVLERFGAIDSSVKTVSEHEQNILKAMQEQEIGGKQILETISLLRDITHSVKKGSDDMAKSGETLVNETDEFINTSRKAVEGMNEILKGITR

SEQ ID NO: 42979 - DNA, 837 bp, Unknown
  Obtained from environmental sample
  misc_feature (1)..(837): n is a, c, g, or t
gtgcagtatataggcatgaagcgattaaggctgataataatactctttacattttcatgctttgctttgcatgggcaagccaggaaaagccagctcataagctttgattttgtcgatcagcagattcgggaaattttatacgcattttccacttacgcaggtatttccatcataggagacgacacggtaacaggaaccgccagctttcagtataacggagctaattttgaacaggcttttgattcgtttctgttaacaagccgcctgtttgttgaaaaaacagaaaatgtctggattgtatccagaataaaaatttcgactaattatggaggcataattcttgattccctggacgcgacggcttcccagttaaccgacaaactcagccggaagaccaacgccaccattttaagggatatacttccggaaacccgcctgtccatgcatttggaaaccataaacccccaggaagcggtggaattgtatatgaagcctttcagcgactataccgttgaaaccgctgaaaactatatacatatcaaaaaagcaaataccacgccttttggttctttctcattggcaggcgcttcctctgtcagcataaatgaaaatgacgggcttttcgacgttgatgttgaacgcgccggaacaagcgaagcgcttaacagactgtttcaggcagccgggcgggaatacctttctttcatacgccctgatcaaatgatagaacgaataaaactaaaaggcagggggttttatgaaactttaaggataattttggaacagggaggagggaatacaaagagatggggatatgttatatttcccccgcgataa

SEQ ID NO: 42980 - protein, 278 aa, Unknown
  Obtained from environmental sample
  SIGNAL (1)...(25)
  DOMAIN (55)...(103): Secretin and TonB N terminus short domain
  misc_feature (1)..(278): Xaa is any amino acid
MQYIGMKRLRLIIILFTFSCFALHGQARKSQLISFDFVDQQIREILYAFSTYAGISIIGDDTVTGTASFQYNGANFEQAFDSFLLTSRLFVEKTENVWIVSRIKISTNYGGIILDSLDATASQLTDKLSRKTNATILRDILPETRLSMHLETINPQEAVELYMKPFSDYTVETAENYIHIKKANTTPFGSFSLAGASSVSINENDGLFDVDVERAGTSEALNRLFQAAGREYLSFIRPDQMIERIKLKGRGFYETLRIILEQGGGNTKRWGYVIFPPR

SEQ ID NO: 42981 - DNA, 315 bp, Unknown
  Obtained from environmental sample
  misc_feature (1)..(315): n is a, c, g, or t
atggggcttgtcgcgagcgccgcggctattatccagcttgccgcgccaaaagaacggcggctggggctgcccaacagccattaccttatacaccagcccctttccggcatacgcggcgtcgccaccgatattgaaatccacgcaagagaacttgaaaagctgcgcgcgaagataaaccgccttatagcggaagaaacaggcaaccccgccgagcaggttgaaaaagacaccgaccgtgactactggatgagcgcccaggaagcggtcaagtacggtctgatcagcaaggtgataacaaacagggacgagatgtag

SEQ ID NO: 42982 - protein, 104 aa, Unknown
  Obtained from environmental sample
  DOMAIN (1)...(101): Clp protease
  misc_feature (1)..(104): Xaa is any amino acid
MGLVASAAAIIQLAAPKERRLGLPNSHYLIHQPLSGIRGVATDIEIHARELEKLRAKINRLIAEETGNPAEQVEKDTDRDYWMSAQEAVKYGLISKVITNRDEM

SEQ ID NO: 42983 - DNA, 840 bp, Unknown
  Obtained from environmental sample
  misc_feature (1)..(840): n is a, c, g, or t
atgttcccgctgcgtaaactggcaacgctgccaaggcatcaacgtctgagaaaagcggcgaaaatttttgaagggacggaacttaggttagtcactttcggaaagcttccggctgatgagattgaatatctaaagtgtctggcaaaacaactaacgcatgaagaaggtttttctcctgcggctgtagatcttcttgctaacgcgcaatcaattttgggtaatggtgcgcaaagcgaaatccgcagaacgttgaacagtgtttaccattttcttctatcggaaacaggccgtgctaaggcagattgggattttctcgattcgcgcggcgttcttgacccttcaaaacggcggtctttcgcgggcatgcaggtctatcttgaggacattcgatccccgtttaacgtaggttccatgttcagggccgccgaatctttcggggctgaaaaaatatggctctcgccgttctgcgccgatccccgtcacaagcgggccgagcgcacggcaatgggctgcgttgatgtccttccatgggagcgtttatcccatgatccctttgccggtttgcatgaaaaatttaccggaggggcaatcttcgcccttgagaccggcggcacgccgcttgaggatttttcatttccaaaacagggaatactaatcgccggttccgaagagttaggcgtaagcccgaacgccctcgccgcagcggactcctcccttgggagggtcagcatcacctgctacggcgcgaaaggctccctcaacgtgtctgtagccttcgggattgtgatgcaggcgtggagtaacaaaagaaaagagaaaaaggaagagggaaaaaagtaa

SEQ ID NO: 42984 - protein, 279 aa, Unknown
  Obtained from environmental sample
  DOMAIN (121)...(264): SpoU rRNA Methylase family
  misc_feature (1)..(279): Xaa is any amino acid
MFPLRKLATLPRHQRLRKAAKIFEGTELRLVTFGKLPADEIEYLKCLAKQLTHEEGFSPAAVDLLANAQSILGNGAQSEIRRTLNSVYHFLLSETGRAKADWDFLDSRGVLDPSKRRSFAGMQVYLEDIRSPFNVGSMFRAAESFGAEKIWLSPFCADPRHKRAERTAMGCVDVLPWERLSHDPFAGLHEKFTGGAIFALETGGTPLEDFSFPKQGILIAGSEELGVSPNALAAADSSLGRVSITCYGAKGSLNVSVAFGIVMQAWSNKRKEKKEEGKK

SEQ ID NO: 42985 - DNA, 606 bp, Unknown
  Obtained from environmental sample
  misc_feature (1)..(606): n is a, c, g, or t
atgagtcaatatttagatgacgatgacaacgatgatgatattcaagaaaaagaaaaacagccggttttagatcctcttgcgggacggatgctaaaaacacggacagttttactttccggagaaataaataaagaactggcggaaaaagccattcgccagcttttgcttttggaagatatgagtgacgatccaattcggatttttatagactcccccggcggagacgcggacgcgggttacgctatttttgatatgattcgttttgtaaaaccaaagatatggacaataggcatggggcttgtcgcgagcgccgcggctattatccagcttgccgcgccaaaagaacggcggctggggctgcccaacagccattaccttatacaccagcccctttccggcatacgcggcgtcgccaccgatattgaaatccacgcaagagaacttgaaaaactgcgggcgaagataaaccgcctcatagcggaagaaaccggcaaccccgccgagcaggttgaaaaagacaccgaccgcgactactggatgagcgcccaggaagcggtaaaatacggcctaatcagcaaggtgataacaaacagggacgaaatgtaa

SEQ ID NO: 42986 - protein, 201 aa, Unknown
  Obtained from environmental sample
  DOMAIN (16)...(198): Clp protease
  misc_feature (1)..(201): Xaa is any amino acid
MSQYLDDDDNDDDIQEKEKQPVLDPLAGRMLKTRTVLLSGEINKELAEKAIRQLLLLEDMSDDPIRIFIDSPGGDADAGYAIFDMIRFVKPKIWTIGMGLVASAAAIIQLAAPKERRLGLPNSHYLIHQPLSGIRGVATDIEIHARELEKLRAKINRLIAEETGNPAEQVEKDTDRDYWMSAQEAVKYGLISKVITNRDEM

SEQ ID NO: 42987 - DNA, 456 bp, Unknown
  Obtained from environmental sample
  misc_feature (1)..(456): n is a, c, g, or t
atggttgagtatgaagcccctttagatcaattaagaaaattatccaggttaaaatcactaacagttgaacccgtcatggaattaagaagtacggttgttttaatcaaaagaataaaagaaggcgaatctgtttcttacggcagaacatggacggcggaagccgacacattaatcggcgttctttccgttgggtatgccgacggccttccgcgccttgcaagcaacaaatggaaggttcttatcggcggggagctttatccgcttgtcggacgtatcagcatggatcagtgctgtgtgaatcttgggaaaaaaacaaaaattaaccgctgggacgaagcggtcgtttttggcagtcccggcaatgacgcggcggcgctggcgaaaattacaggcacaattccctacgaaataacctgtaatattaataaacgggtacccagagtatacaagtattag

SEQ ID NO: 42988 - protein, 151 aa, Unknown
  Obtained from environmental sample
  DOMAIN (25)...(150): Alanine racemase, C-terminal domain
  misc_feature (1)..(151): Xaa is any amino acid
MVEYEAPLDQLRKLSRLKSLTVEPVMELRSTVVLIKRIKEGESVSYGRTWTAEADTLIGVLSVGYADGLPRLASNKWKVLIGGELYPLVGRISMDQCCVNLGKKTKINRWDEAVVFGSPGNDAAALAKITGTIPYEITCNINKRVPRVYKY

SEQ ID NO: 42989 - DNA, 567 bp, Unknown
  Obtained from environmental sample
  misc_feature (1)..(567): n is a, c, g, or t
ttgatcaccaccaccgaactcggcgaagctgcgttttacggtccgaaattggatttcatggtgaaagatgccatcggtcgcaaatggcagttaggcacggttcaggtggattacaacttgcccgatcgttttgagctggaatacatcggtgcggataatcaaaaacaccgtccggtgatgatacaccgtgcaccgtttggttccatggagcggtttgtagcggtgttgattgaacacaccggcggaaatttcccgctgtggctcacacccgaacagtttattgtgctaccgatttccgaaaaatatatcgactacgccgacaaagtaaaacacgacttggaattgctggattgtcgcggtacggttgacgaacgcaacgaaaaaacaggcaaaaaaattcgcgatgcggagttggctaaaatcccgtacatgctgattgttggcgagaaagaagccgccgaaggaacggtttccattcgcaaacacggtgaaggcgatttaggcgcgatgaccatcgaagcctttgctaatcgcatacttgaagaggtaaaaaagatggtagaataa

SEQ ID NO: 42990 - protein, 188 aa, Unknown
  Obtained from environmental sample
  DOMAIN (92)...(182): Anticodon binding domain
  misc_feature (1)..(188): Xaa is any amino acid
MITTTELGEAAFYGPKLDFMVKDAIGRKWQLGTVQVDYNLPDRFELEYIGADNQKHRPVMIHRAPFGSMERFVAVLIEHTGGNFPLWLTPEQFIVLPISEKYIDYADKVKHDLELLDCRGTVDERNEKTGKKIRDAELAKIPYMLIVGEKEAAEGTVSIRKHGEGDLGAMTIEAFANRILEEVKKMVE

SEQ ID NO: 42991 - DNA, 858 bp, Unknown
  Obtained from environmental sample
  misc_feature (1)..(858): n is a, c, g, or t
atgcctttaatggatattgagttattgcgcgagcgctccagaatcattaagcaggtacgttctttttttgacagccgcgattatctggaaacggatacccccttgatttccccggacttaattcccgaatcgtgcctcgaggtttttcaaaccctccgcctctccccaaagggaagcaaaacgccggacaaaccctgctggcttgtaccctcccctgaaatttggatgaagcgtctgatagcgcggcatcgggcaaacctttaccagatttgcaagtgcttcagaaacggggaatcctctggccgctggcacagtcccgagtttactatgctggagtattattccatgcaggcggattacatggactctctaaaactaacagaggagcttttcgctttcctccttggcgagggacaaaaaaacggaaacgagctggcggagctctcgcctccatttattaaaattactatggaagaagcctttcgccgctgggccagctttgacctttacaaggccgcagaatcgccgtctgccatggaagaagaagcgcggaagctgggcctctgcccgccgaccgggctttcagttcccgaactatacgaccttatctttatccacgctgtggaaccaaacctaaaacttgagcgtcctgttgccatcattgattatccggctttcgttccctgccctcgcgaaaaaaggaagcggtggagcgctcggcggaaaagaccgtcgcagcgctgggagctttatgtccggggaatcgagctggcaaactgttattcggaaaaaaccagctccgaaagagtacgcgccttttttgaagcgaaaaagccgttaaagaaaagaacgcgctag

SEQ ID NO: 42992 - protein, 285 aa, Unknown
  Obtained from environmental sample
  DOMAIN (1)...(285): tRNA synthetases class II (D, K and N)
  misc_feature (1)..(285): Xaa is any amino acid
MPLMDIELLRERSRIIKQVRSFFDSRDYLETDTPLISPDLIPESCLEVFQTLRLSPKGSKTPDKPCWLVPSPEIWMKRLIARHRANLYQICKCFRNGESSGRWHSPEFTMLEYYSMQADYMDSLKLTEELFAFLLGEGQKNGNELAELSPPFIKITMEEAFRRWASFDLYKAAESPSAMEEEARKLGLCPPTGLSVPELYDLIFIHAVEPNLKLERPVAIIDYPAFVPCPREKRKRWSARRKRPSQRWELYVRGIELANCYSEKTSSERVRAFFEAKKPLKKRTR

SEQ ID NO: 42993 - DNA, 837 bp, Unknown
  Obtained from environmental sample
  misc_feature (1)..(837): n is a, c, g, or t
atgagtcttgaagtgcggcagacagccgagcgggaaatagagcgttaccaggtcaaaacagggctgcccataagcacccttntgaagtatgcgggaataccgcaacgcacatggcgcgaatggtcggagcgcagggatgttgagacgaagcacaacaacaacatccccaaggcgtattacctgacgcctgaagaaatcaaggcgataatcgcgtattgcatcaacaatcccctgaaaggctaccggatgcagtgctgggagatggtggaccggaatgtggcgtttgtgtcatgcagcagtgtctataacgtcataaaacgccataatctggacaaaaagtgggcggaactgcccgatgaggcgaagaaaggttttgaccagcccaaggcggttcacgagcaatggcacatagatttttcgtacatcaagatacaaaattcgttttattattttatcggcatccttgacggctacagccggaaattgttgaactggaagctctgcgaaaacatggagggtatcaacgctgaaatactggtcgccgaaaccaaagagatgtacccgcaagcggtcaacccgcggctgataagcgacaacggcagccagttcatatcaaaagattttgaagaattgcttatgcttttagaagtcgggcacacgcttacatccgcgaaccacccgcagagcaacggcaagctggagcggttccaccgcaccttgaaaactgaacacgtaaggagggcatcgtatttagaataccaggacgcctgcataaggctggcggcatggatcgcgtatacaacagcgaaaggctccacagcgcgatctggtatttaa

SEQ ID NO: 42994 - protein, 278 aa, Unknown
  Obtained from environmental sample
  DOMAIN (127)...(278): Integrase core domain
  misc_feature (1)..(278): Xaa is any amino acid
MSLEVRQTAEREIERYQVKTGLPISTLXKYAGIPQRTWREWSERRDVETKHNNNIPKAYYLTPEEIKAIIAYCINNPLKGYRMQCWEMVDRNVAFVSCSSVYNVIKRHNLDKKWAELPDEAKKGFDQPKAVHEQWHIDFSYIKIQNSFYYFIGILDGYSRKLLNWKLCENMEGINAEILVAETKEMYPQAVNPRLISDNGSQFISKDFEELLMLLEVGHTLTSANHPQSNGKLERFHRTLKTEHVRRASYLEYQDACIRLAAWIAYTTAKGSTARSGI

SEQ ID NO: 42995 - DNA, 1065 bp, Unknown
  Obtained from environmental sample
  misc_feature (1)..(1065): n is a, c, g, or t
gtgtttacaatgaaacgcatactggtagttgacgataacctttctattcttaaacagatatccgcccatctttcgggcgaatatgaggtttcactggcaaagtccggcctgttggctttgcagatatgcactaaagaaaagccggatctgattctactggatgttgagatgccggatatggacggatttgacgtcatttcaaggttaaagcagaacccctatttgaatcgaataccggttatcttccttacggccagccatagccatgaagtcgagataaaggctttggaattgggcgcaagggattttatcatgaagccggcggaaaaaagcatactgctgcacagaattgaactgcatctgcggtttgcttcctatcagatacagactgaagaaaaagtaacagccctttctgacaacatcgcaatttcatttgcggaaatgattgaatgccgcgatgaaaacacaggcggccatgtggtacgcacgtcgaaatatgttgatatactgggcaaagagttgattaacaagggcgtttttcaggatgaactcaatgattcggaattgcagatgatggtgcgcgccgctccgctgcatgatataggaaaaatcgccatcagcgatcgtgtgctgctgaaagccggacggcttgatgatatagaattttccatcattaaacgtcatgcggaaataggcgctcaaattgttgaacgaatgtaccagcggatgcccgcacagaggtatctttactatggcagccttattgccggatcccaccatgagcgttatgacggcaaaggttacccaaaaggcctggaaaagaataatattccgctctgcgcgagaattatggcagtggcggatgtttatgacgcgcttatggaaacacgggtttaccgcaaggggctgggacatatacaggcaagcaatatcatttttgaaaacgaatggacgcagtttgatcccaaagttgttgacgcattcagaaatgtccaggagcagataagcgcagtggcaaacacatggaatgaagctgcaatgaatagcgacggtatatatgcttaa

SEQ ID NO: 42996 - protein, 354 aa, Unknown
  Obtained from environmental sample
  DOMAIN (156)...(293): HD domain
  misc_feature (1)..(354): Xaa is any amino acid
MFTMKRILVVDDNLSILKQISAHLSGEYEVSLAKSGLLALQICTKEKPDLILLDVEMPDMDGFDVISRLKQNPYLNRIPVIFLTASHSHEVEIKALELGARDFIMKPAEKSILLHRIELHLRFASYQIQTEEKVTALSDNIAISFAEMIECRDENTGGHVVRTSKYVDILGKELINKGVFQDELNDSELQMMVRAAPLHDIGKIAISDRVLLKAGRLDDIEFSIIKRHAEIGAQIVERMYQRMPAQRYLYYGSLIAGSHHERYDGKGYPKGLEKNNIPLCARIMAVADVYDALMETRVYRKGLGHIQASNIIFENEWTQFDPKVVDAFRNVQEQISAVANTWNEAAMNSDGIYA

SEQ ID NO: 42997 - DNA, 861 bp, Unknown
  Obtained from environmental sample
  misc_feature (1)..(861): n is a, c, g, or t
atgaaatcgatattgattgttgatgacaaccttgtcagcctcaggcagataagcgccctgctttccagagattacgacgtttcactggcaaagtccggagaactggcgttacagatttgctcccaggaactacctgatttgatcctgcttgacgtggaaatgcccggcatggacggctttcaaacaatagcccgcctgaatgcagacgagcgcttaaagcatataccggtgatttttctgacaggaaaccatgatgctgaaacagaggtaaaatgcctggaatccggagccatggattttatcaccaaaccggccaatgccgagatcctgcaccacaggatagaagtgcatcttcaattttcactataccagcttcaactggagcacatggtaaaagaactggaagacaatatcggcatctcatttgcggaattactggactgcaaagattataacgcggctatccatatgatacgttccggagagtatgttgagatgttggttaaagagcttgttaatgagggaaccttcgggagcgcgcttacggcggatgacgcgaatttgataaaacgcgccgcccccttccatgacatcggaaaacttggggtaagtgacattatcctgctgaagcgcagccctctgacgaaaatggaaaatcaggaagtccggaaacatactacaatcggcggccaggtgctgaaggctatttatgaacgtacccccagccagcaatatctgaaagtagcgatgattcttgccgaaggccaccatgagagttttgacggcagcggctatcctcagggtctggcgggagagaatattcccatgttctgcaggattatgtcggtagtcaatgagtag

SEQ ID NO: 42998 - protein, 286 aa, Unknown
  Obtained from environmental sample
  DOMAIN (153)...(286): HD domain
  misc_feature (1)..(286): Xaa is any amino acid
MKSILIVDDNLVSLRQISALLSRDYDVSLAKSGELALQICSQELPDLILLDVEMPGMDGFQTIARLNADERLKHIPVIFLTGNHDAETEVKCLESGAMDFITKPANAEILHHRIEVHLQFSLYQLQLEHMVKELEDNIGISFAELLDCKDYNAAIHMIRSGEYVEMLVKELVNEGTFGSALTADDANLIKRAAPFHDIGKLGVSDIILLKRSPLTKMENQEVRKHTTIGGQVLKAIYERTPSQQYLKVAMILAEGHHESFDGSGYPQGLAGENIPMFCRIMSVVNE

SEQ ID NO: 42999 - DNA, 1983 bp, Unknown
  Obtained from environmental sample
  misc_feature (1)..(1983): n is a, c, g, or t
atgtgtggacggcaacccggtctaacatggaatccgaccgaacacgcggttactcgcaataagtcaaacaccttccagcaagacgccgggaagcgcctcgccacgttcctgtgggacaggcggcctacgtggaacagttcgtgcgagaagataataggggaggggcagtggtgggggccgtccatgcttaaataccactactccccgcagggccagcagttgtcggagttcacactgaattggttgcacggaacaggctcgccctccgccgtaacctcccgcgacgcccacctgatggccgagatgtaccgccaacttgaacttgagtgggatgtatacactccgggcgacaggtatctgacgagcgtcccgttctacttccacgggttcttcacggtattggggctgaacgtcctcaccggcaaccaccacgcccctatgaacatgaagcggtcggctaacatgaaagtatacttagacgtccaccagacctacgcctttgaggaacataccgtcacctatacaatacattataggagctacggggcggaagaggctaagggtgtgcggatagtcaaccgcctgcgcagcgacttcgactttatctccgggacgggttcgccctcgtacgacgtcgcctcaaacaccgttacttggaacataggcaacgtgcccggattcaagacgtcgaccggtatcaatcccaccaaaggaaccgtaaccctcaaggtcagaataccgaacgccaaactcaagcgctacgagaacaaagtcactatatcatgcacaaacgggtcagggtggacgtccaacgagtacccgaacaagatatcttccgttatgaaacgtaccggagtcgacatcgccagccgcgctttacgggtagatcattcactcagcagggataccgtcaatcccgggatgaccgtcgtctacactatagacttcgagaacagcgccaaggcggggtggctcaacggcggcaggccgggggtcaacttctcctacgcccacgacgggaccgcggcgagcgccggcagccatacgttccagctcagggcgtttcacgacgctcacgaagcctacatagattatgggaattaccgcttatcgtatttcttgtttgacaataactacaagggcttgggcgccaacggttggaatgtccgaaccgatattctctacgttcccgaggcggagaggtcgaagttcaagctgctgcacgaaaacatcacgcccggcgaggacaaaaacggcaagtggaatcagcgtttgatattgcagatagccgacgtcctcgatccatctcgcagcgataccaactgggggactatggcggcgcccacgcagttcctcataaactacagcggcctcgacaaccgcgtccaccgcggtatcagcacgccgtttaaaggtgtgtgggcggtgtacgccggcaactacgcgaaccgcaattgggggagcgactggtcgtacaattcacgggccagaggcactataagcaacgacgcgatgagcagttggggttaccccataacgccggattttaccgacgacccgtcgcctgacaatcccgggaaacccgttacgctgctgcataggaaactgtgcgcgtcgccggcctccgtatccgtagacaacgtgctgatagaggagtgggacggctacacgtggcgcagggtgttcggcaacggtccgctccccggacgcgaggtggtaaacgtcgtaatccgcgacacattgccgcagggcgtgacgttcatcaattttatcgaaccttacccgatgggaaaagcgccaaagataaacggacgcgttatcacatgggaaatcgacaaactgctggtgggcgagaaaggtaccatcaaatatacagtacgcgccgacaagccgtccggcgataaggacgtcgtcatcccttcaaacgcttgggctatagccgacaaggagtcgccgatgcgcagcacggcgacgcttgtgtaa

SEQ ID NO: 43000 - protein, 660 aa, Unknown
  Obtained from environmental sample
  misc_feature (1)..(660): Xaa is any amino acid
MCGRQPGLTWNPTEHAVTRNKSNTFQQDAGKRLATFLWDRRPTWNSSCEKIIGEGQWWGPSMLKYHYSPQGQQLSEFTLNWLHGTGSPSAVTSRDAHLMAEMYRQLELEWDVYTPGDRYLTSVPFYFHGFFTVLGLNVLTGNHHAPMNMKRSANMKVYLDVHQTYAFEEHTVTYTIHYRSYGAEEAKGVRIVNRLRSDFDFISGTGSPSYDVASNTVTWNIGNVPGFKTSTGINPTKGTVTLKVRIPNAKLKRYENKVTISCTNGSGWTSNEYPNKISSVMKRTGVDIASRALRVDHSLSRDTVNPGMTVVYTIDFENSAKAGWLNGGRPGVNFSYAHDGTAASAGSHTFQLRAFHDAHEAYIDYGNYRLSYFLFDNNYKGLGANGWNVRTDILYVPEAERSKFKLLHENITPGEDKNGKWNQRLILQIADVLDPSRSDTNWGTMAAPTQFLINYSGLDNRVHRGISTPFKGVWAVYAGNYANRNWGSDWSYNSRARGTISNDAMSSWGYPITPDFTDDPSPDNPGKPVTLLHRKLCASPASVSVDNVLIEEWDGYTWRRVFGNGPLPGREVVNVVIRDTLPQGVTFINFIEPYPMGKAPKINGRVITWEIDKLLVGEKGTIKYTVRADKPSGDKDVVIPSNAWAIADKESPMRSTATLV

SEQ ID NO: 43001 - DNA, 918 bp, Unknown
  Obtained from environmental sample
  misc_feature (1)..(918): n is a, c, g, or t
atgatggccgaaattctgggtttttttaatcctacggctggaaaagggaaggcggcaaagcaataccctaaaatcgagcgttttctgcgtgaaaacggatataattttgaaatatttttgacaaagggagtaggcgacgcgctcaatatggcgcgtgacttccccattggcgcgaacgatgtaacggttgccgccggaggtgacggaacctgcaacgaggttgtaaacggtttgttaaggcgtaatgccggcgctcccccggtctttggaatcctccccattgggcgcggcaatgatttttccgctacgcctaaaatcccgcaagatgtcgagaaagctctgcaattactgaccaccggaaacgcaaagccgcttgacgccgggtttgtaaaaggcggctttttccccgacggacgctactttatcaacggaatcggcatcggttttgacaccaaagtcggctttgaggcggcaaaattaaaaataaaaagcggcatttcctacgccgtcggcgctcttatcactgttatacgctatgagccatcgcctgttttgcagattcattatgatgataatgaagtaacgcttcctgcggttcttgtttcggttgtaaacggcagaagaatgggcggaagtttctatatgggacccaacgccatacttgacgacgggcttttggatatttgttatgtacagcatcaaaaatcgcgccttgatcttcttaaaataatttcccattacacaaagggaacacagggcgaatgtaagggagtaaacttcggcaggggagcgcgtttccatttaaaagctcttgaaggcggaatggcggcgcactgcgacggagaaaccgtctgttacgacggcaaggaattggagataacctgtatcccgaacgctctgaggcttattgaggcgtaa

SEQ ID NO: 43002 - protein, 305 aa, Unknown
  Obtained from environmental sample
  DOMAIN (4)...(133): Diacylglycerol kinase catalytic domain (presumed)
  misc_feature (1)..(305): Xaa is any amino acid
MMAEILGFFNPTAGKGKAAKQYPKIERFLRENGYNFEIFLTKGVGDALNMARDFPIGANDVTVAAGGDGTCNEVVNGLLRRNAGAPPVFGILPIGRGNDFSATPKIPQDVEKALQLLTTGNAKPLDAGFVKGGFFPDGRYFINGIGIGFDTKVGFEAAKLKIKSGISYAVGALITVIRYEPSPVLQIHYDDNEVTLPAVLVSVVNGRRMGGSFYMGPNAILDDGLLDICYVQHQKSRLDLLKIISHYTKGTQGECKGVNFGRGARFHLKALEGGMAAHCDGETVCYDGKELEITCIPNALRLIEA

SEQ ID NO: 43003 - DNA, 1524 bp, Unknown
  Obtained from environmental sample
  misc_feature (1)..(1524): n is a, c, g, or t
ttgacaaactgccataacagcctatgcgcggttgggggaacgataaatcaagatgatcatgtgttcgccctttccgccgcgcaaaaatacggcggcgtatatgtgccgccccaccttgccgtcattcacagttacaaccgcgaaatgatggcaggttgcggcaggatgattcttggctctgacagccatacccgttatggtgcgcttggcacaatggcggttggcgaaggcggcggagagcttgcaaaacagcttgtcggcaggacttacgatatgccttcccctccggtaatagggatttatcttgaaggagagacggcgaggggagtcggtcctcaggatgcggcgcttgcgatagttggagcggtttttaaaaacggatatgtaaaaaacaaggcacttgaatttattggggacggtgttgataaaatgacggttgatttccgtaatggaattgacgtaatgacgacggagaccgcctgctggtcgtcaatttggaaaaccgacgacaatgtaaaaacatatcttaaagagcggggcagggaaggcgattacaaagaactgaagcccgcagacatcgcctactatgacggttttatcaaaattgatttatctaaaattgagccatgtatcgcccttccgttccatccaagtaatgtgtacacgattaaagaactgcaaaaaaacgcgaaagatatttttgcgaaaatagaagaagaaaacaaggagacgggccttaacctgaatcttggcgttaaatgccatgacgatggcgtgtgggctgatcaggcgataatcgcaggctgttccggcggcattttttccaacattatggccgcatctgacattattaaaggatgctcaacaggaaaaagcaatttttccatgagcgtgtatcctgaaagccagcccacctatcttgaacttgtgaaaaacggcgcggtagaaacatttatgaaagccggagtccttgtgcgcgaagctttctgcggcccctgtttcggagcgggagacactccggcaaataacgaactgtcaatccgtcacgttacgcgcaatttccccaaccgcgaaggttccaaaccaaccgacggacaaatcgcgtccgtcgcgctaatggacgcgagatcaatcgccgcgacagctattaacggcggaaaaattaccgccgcaactgacattgacgtgaaatacggcaaatataagttcttctttgacaaaagcatttacgacaagcgcgtatataatggcgtgggaagtccaaaaccgcaaactgaattgaagttcggccctaatatcaaagactggccaaaaatgcccgcacttcctgaaaacttattgttaaaagtggtaactttcatcaccgactccgttacaaccaccgatgaacttatcccttcaggggaaacttcatcgtaccgttcaaatccgttaaaactggcagaattcactttaagcagaaaagacccgaattatgtaaagcgggcgaaagaattgcaaattcttgaagagcaaaagaagtaa

SEQ ID NO: 43004 - protein, 507 aa, Unknown
  Obtained from environmental sample
  DOMAIN (2)...(385): Aconitase family (aconitate hydratase)
  misc_feature (1)..(507): Xaa is any amino acid
MTNCHNSLCAVGGTINQDDHVFALSAAQKYGGVYVPPHLAVIHSYNREMMAGCGRMILGSDSHTRYGALGTMAVGEGGGELAKQLVGRTYDMPSPPVIGIYLEGETARGVGPQDAALAIVGAVFKNGYVKNKALEFIGDGVDKMTVDFRNGIDVMTTETACWSSIWKTDDNVKTYLKERGREGDYKELKPADIAYYDGFIKIDLSKIEPCIALPFHPSNVYTIKELQKNAKDIFAKIEEENKETGLNLNLGVKCHDDGVWADQAIIAGCSGGIFSNIMAASDIIKGCSTGKSNFSMSVYPESQPTYLELVKNGAVETFMKAGVLVREAFCGPCFGAGDTPANNELSIRHVTRNFPNREGSKPTDGQIASVALMDARSIAATAINGGKITAATDIDVKYGKYKFFFDKSIYDKRVYNGVGSPKPQTELKFGPNIKDWPKMPALPENLLLKVVTFITDSVTTTDELIPSGETSSYRSNPLKLAEFTLSRKDPNYVKRAKELQILEEQKK

SEQ ID NO: 43005 - DNA, 480 bp, Unknown
  Obtained from environmental sample
  misc_feature (1)..(480): n is a, c, g, or t
ttgaagagcaaaagaagtaacgggaaagctgacggcgaaatggaaaaggtactgaaaaagatacagggtattgaaggttgtgcggggatagggctttccaatatgggtatagcaagcgcgatttttgcccgcaaacccggtgacggctccgcaagggagcaggccgcatcctgtcagcgcgtacttggaggcggcgctaattttgcgttggagtacgcgacaaagaggtacaggtcaaacctaatcaactggggaatacttccatttcttattagcgatgaaaccgccttctcaaacggggattatattttctttcccggaattaagtccgccgttcaggataaaaaggagacaatcaaaggatttgtgttaggtgaaactgtcaaagagattaaaaccgcattaggcggacttacggattctgagaggcaaatattgatagatggctgtttaattaattattacgcaaaaaaaatataa

SEQ ID NO: 43006 - protein, 159 aa, Unknown
  Obtained from environmental sample
  misc_feature (1)..(159): Xaa is any amino acid
MKSKRSNGKADGEMEKVLKKIQGIEGCAGIGLSNMGIASAIFARKPGDGSAREQAASCQRVLGGGANFALEYATKRYRSNLINWGILPFLISDETAFSNGDYIFFPGIKSAVQDKKETIKGFVLGETVKEIKTALGGLTDSERQILIDGCLINYYAKKI

SEQ ID NO: 43007 - DNA, 1041 bp, Unknown
  Obtained from environmental sample
  misc_feature (1)..(1041): n is a, c, g, or t
gtgaatcggaaaaacgcttcggactttcgtccgttaatgcttgttatgctggttttttgcggtatttcattgctccctgcggcagaggcggggattgatttcagcatccgttattttgacaagcgggtatattaccttgaatccgatccgatttttattcaggttacgataacaaacaacagccccttcacatacaggttcaaattggccgatgagcgggctttttccgtggattttgatgtcaggacaaacagcaaccgcattgtggaagcggctgatattctgattcgcaagcggagccagagccagcaggtttacttcangggagtatcgatagagccgggggaatctttttcctttgtcgaggatctgaagaattacgcgtccctgacccaaagcggcagttatgtggttcaggcaaagatatacccggaactttaccatactgtcaggtctgaggtcttcggcttatggtcctacggggccggcggtatcaatccgggcgtaaccctggcgggcatcggtatcccactggaatccaaccgccttgcgctcaacataaggccggctctcatccccggcccggacggtatcccctttgaactggacgtggaaaccaacgcgattcttgtccgcgagaaacttcctcccgacgaggttattcgctatatgctgacagccaggcagaaaagccagtgggaaaaattcttcctttaccttgacctggaagccatgctctcccgcgacgcgtaccgcaggcggcagtacaccgccgagtccgaagaaggccgccaaaggatgatcgcccgttaccggcaggatctgcaaaattccgtgatagacggtgatatttcgcttattcccatgaattttatcattgagcgcactacccataacgggcagacagggacagtaactgcgctggaatatttcaggattggagactatacggagaaaaagcgctacacctggtatctggaaaaaagggatgatatatggacaattgtcgattattcggttgttaatttaggaaccgaatag

SEQ ID NO: 43008 - protein, 346 aa, Unknown
  Obtained from environmental sample
  SIGNAL (1)...(27)
  misc_feature (1)..(346): Xaa is any amino acid
MNRKNASDFRPLMLVMLVFCGISLLPAAEAGIDFSIRYFDKRVYYLESDPIFIQVTITNNSPFTYRFKLADERAFSVDFDVRTNSNRIVEAADILIRKRSQSQQVYFXGVSIEPGESFSFVEDLKNYASLTQSGSYVVQAKIYPELYHTVRSEVFGLWSYGAGGINPGVTLAGIGIPLESNRLALNIRPALIPGPDGIPFELDVETNAILVREKLPPDEVIRYMLTARQKSQWEKFFLYLDLEAMLSRDAYRRRQYTAESEEGRQRMIARYRQDLQNSVIDGDISLIPMNFIIERTTHNGQTGTVTALEYFRIGDYTEKKRYTWYLEKRDDIWTIVDYSVVNLGTE

SEQ ID NO: 43009 - DNA, 1284 bp, Unknown
  Obtained from environmental sample
  misc_feature (1)..(1284): n is a, c, g, or t
gtgacagacacctttaaaatctatacaataaatagcatgaactcagcattggaaacactaaaaatcaggggctttttacagcaatgtaccgataccgaaggcctgtcaaaattaatggacgaaagtcccgtcactttttacgaaggcactgaccccaccgggggaagtctgcatatcggccacatggttccctattttgcgttccgtcatcttagagccgccggtcataaaggaatcgcccttcttggaggcggcaccgcaaggattggagacccttccggaaagagcgagatgagaaaaatgcttgattacgagcagttggataaaaataccgattcaatccgcgcccagcttgatcgttttgtcgtttttgacggtaataccgcttttactgctaacaataaagactggcttgccaatttaaactatatcgactttttacgcgacatcggcaggcatttttccgtaaacaggatgcttagttttgaagcttacaaaatgcgaatggaaacggggctttcttttatcgaatttaattatcagcttttacagagttatgactttctggagttgtaccgccgccacaaatgccgtttgcaaatcggcggcgatgatcagtgggggaatattgtcgctggcgtggagcttgtgcgccgaatagaaggcgttgaagtttttgggctgacattcccgcttgttaccaccgctgacggaaaaaaaatgggcaaaacggaaaaaggcgcgctattccttgaccccgccgttaccgcgccttatgactttttccagtattggcgcaatgtgcatgatcaggatattcttcgcttcctgcttatgtttacattcctgcctgttgatgaatgtaaagccatgtgcgaatcgggaaaaaatccaaatgaggcgaaggaacgtcttgcgtgggaaataacagctatcattcacgggaaggaagaagcggataaagctcttgccggcgcgaaggcggcttttggcagtttggagggcggcgataaaacggcaatgcctcattgtgaagttgcgcgctcaagactggaagacggctacaatgttgtagaacttttcagcgatacgggacttgtttcgaccaagagcgaaggacgccgccttgttcagcagggcggggcgtttgtttccgacagcgacggagaactttccgtggtaaatgatccggctgcggcgattggaacggagagactgaacaaagaaggcgaattaattatcagagccggaaaaaaacgatatttattggtgaaaattaaataa

SEQ ID NO: 43010 - protein, 427 aa, Unknown
  Obtained from environmental sample
  DOMAIN (39)...(331): tRNA synthetases class I (W and Y)
  misc_feature (1)..(427): Xaa is any amino acid
MTDTFKIYTINSMNSALETLKIRGFLQQCTDTEGLSKLMDESPVTFYEGTDPTGGSLHIGHMVPYFAFRHLRAAGHKGIALLGGGTARIGDPSGKSEMRKMLDYEQLDKNTDSIRAQLDRFVVFDGNTAFTANNKDWLANLNYIDFLRDIGRHFSVNRMLSFEAYKMRMETGLSFIEFNYQLLQSYDFLELYRRHKCRLQIGGDDQWGNIVAGVELVRRIEGVEVFGLTFPLVTTADGKKMGKTEKGALFLDPAVTAPYDFFQYWRNVHDQDILRFLLMFTFLPVDECKAMCESGKNPNEAKERLAWEITAIIHGKEEADKALAGAKAAFGSLEGGDKTAMPHCEVARSRLEDGYNVVELFSDTGLVSTKSEGRRLVQQGGAFVSDSDGELSVVNDPAAAIGTERLNKEGELIIRAGKKRYLLVKIK

SEQ ID NO: 43011 - DNA, 666 bp, Unknown
  Obtained from environmental sample
  misc_feature (1)..(666): n is a, c, g, or t
ttgcccgttatgaccgtcctatggaaagacatttttgaattcttaaaaaaaccgattcaaaaaatgacaggtttcattattttagcgacaattcccgccgtaattgccgcccttctttttaaagacgctatcgaagatatttttaaatcgggaaaatggttaggcgtttgttttttaattaccgccacgcttttagttatggcggaaatactttcaaggcacaataaaaacgaaaatcactctggtgagggacaagacggaaacggcgtaaagatgaattggcttcacgctttttttattggcataatgcaagcgcttgccattccccctggtatttcgcgctcaggagcgacaatcagcggttctcttttttgcaaacttgaccgcgattttgccgcgcgtttttcgtttttaatgtccatcccggccattcttggcgcagttgttatgcaaactaaagatttggtaaaacatggcgcggcggaaagtaccggctttgggacttccgctattatcgccggtacaattacttcggcggttgtcggatttttcgcggtcaagtttatgctgaagattattagggaaaaatcgctttttgggttcgcggtttatactggagtgcttggggtggttgttttaattttacagagagtgattggtttttaa

SEQ ID NO: 43012 - protein, 221 aa, Unknown
  Obtained from environmental sample
  DOMAIN (1)...(212): Bacitracin resistance protein BacA
  misc_feature (1)..(221): Xaa is any amino acid
MPVMTVLWKDIFEFLKKPIQKMTGFIILATIPAVIAALLFKDAIEDIFKSGKWLGVCFLITATLLVMAEILSRHNKNENHSGEGQDGNGVKMNWLHAFFIGIMQALAIPPGISRSGATISGSLFCKLDRDFAARFSFLMSIPAILGAVVMQTKDLVKHGAAESTGFGTSAIIAGTITSAVVGFFAVKFMLKIIREKSLFGFAVYTGVLGVVVLILQRVIGF

SEQ ID NO: 43013 - DNA, 603 bp, Unknown
  Obtained from environmental sample
  misc_feature (1)..(603): n is a, c, g, or t
atggcgaagattaagctcactaaaaacgagctaaagaaacaaaaagattcccttaaaatgtacaggcgttatctgccgactcttatgttgaaaaaacaacagctacagagggaaataaggcttacggatttacggttaagcgaattgtactcagccaaagagaagcttgatgaatcttttaaaccatgggttgcggttttcggcgagacagggttttttacggttaacactttaaaaattgtaaatttcagaacgggacacggaaatattgccggcgtttcgattccggtatttgaaggcgctgactttgaaacagcgaaatatgatcttgcgcgcactcctgcctggctggacagggcaatagatgtaataagacaagttctcctgcttgatcttgaagcgcagattgtcgaagaacagcgcagaaggcttgaccgcgaattgcgtattactactcagcgcgtaaatctttttgagaaagtaaaaattcctgaagcaagaggaaatataaaaaaaattcaagtttatctcggtgatcagcaaacagcctctgtcgtccgtgggaaaatcgccaaaggcggaacagggaaggcggctatatga

SEQ ID NO: 43014 - protein, 200 aa, Unknown
  Obtained from environmental sample
  DOMAIN (2)...(196): ATP synthase subunit D
  misc_feature (1)..(200): Xaa is any amino acid
MAKIKLTKNELKKQKDSLKMYRRYLPTLMLKKQQLQREIRLTDLRLSELYSAKEKLDESFKPWVAVFGETGFFTVNTLKIVNFRTGHGNIAGVSIPVFEGADFETAKYDLARTPAWLDRAIDVIRQVLLLDLEAQIVEEQRRRLDRELRITTQRVNLFEKVKIPEARGNIKKIQVYLGDQQTASVVRGKIAKGGTGKAAI

SEQ ID NO: 43015 - DNA, 1299 bp, Unknown
  Obtained from environmental sample
  misc_feature (1)..(1299): n is a, c, g, or t
atgaataaagtatatagcaaaattgaatcgatatcgggaagcgttattacagtaaaggctgatggaatccgttatggagaccttgccgaagtagatacagtattcggtacctcgcttgccgaagtaaaccgtctacagggtgatactgtcgcattacaggtatttgcgggcgggcgcggcatctcaacaggcgatacagtccgttttctcgggcgcccgatgcaggttccgttttctgaaaacttaatgggcagggtattttccggttcaggtaaaccgcgcgacaaaggccccgagttaagcgaaaacatgataccaatcggcggtccgtctgttaatccttctcagcgtatcataccgcgaaagatgatccgtacaggcattcctatgatagatctttttaatactcttgtcgtatcgcagaaactgccgattttctctgtttcgggagaaccttataatgaacttcttgcgcgtatcgccatgcaggctgaagttgatgtaatcgttcttggaggaatgggacttaaatacgacaattacctttattttaaggatacgctggaggacggcggagcgttagcgcgtaccgtaatgtttattcacactgcaagtgacccgactgttgaatgcttgatgatacctgatatgtccttggctgtcgccgagcagtttgcacttcagggcaaggacgtacttgtgcttcttactgacatgacaaactttgccgatgccatgaaggaaatctcgattattcaggaacaggttccttcaaaccgcggctatcccggagacctttacagccagcttgcaagccgttatgaaaaagccgtagactttgaaactgctggatcaattacggttctcggtgttaccacaatgcccggtgacgatgttacccaccctgtgcctgataataccggatatattacagaaggccagtattatcttaaaaacggccgcatagaaccgttcggctccctttcccgtctgaaacagcaggttaacggaaaaacccgtgaagaccaccgtgctattatggacggcatgataaaactgtattccgctttccgtgatactatggaaaaaaaggcgatgggctttatcatgactaactgggatgaaaaacttctgaaatacgggtaccagtttgaatccaaaatgatggatctttccgtcaatataccactggaaaaagcgcttgatcttggctgggaaattttatctgattgtttcaatccagaagaaacaggtttaagaacagaacttatatccaaattttggccgaaaaaagactag

SEQ ID NO: 43016 - protein, 432 aa, Unknown
  Obtained from environmental sample
  DOMAIN (8)...(71): ATP synthase alpha/beta family, beta-barrel domain
  misc_feature (1)..(432): Xaa is any amino acid
MNKVYSKIESISGSVITVKADGIRYGDLAEVDTVFGTSLAEVNRLQGDTVALQVFAGGRGISTGDTVRFLGRPMQVPFSENLMGRVFSGSGKPRDKGPELSENMIPIGGPSVNPSQRIIPRKMIRTGIPMIDLFNTLVVSQKLPIFSVSGEPYNELLARIAMQAEVDVIVLGGMGLKYDNYLYFKDTLEDGGALARTVMFIHTASDPTVECLMIPDMSLAVAEQFALQGKDVLVLLTDMTNFADAMKEISIIQEQVPSNRGYPGDLYSQLASRYEKAVDFETAGSITVLGVTTMPGDDVTHPVPDNTGYITEGQYYLKNGRIEPFGSLSRLKQQVNGKTREDHRAIMDGMIKLYSAFRDTMEKKAMGFIMTNWDEKLLKYGYQFESKMMDLSVNIPLEKALDLGWEILSDCFNPEETGLRTELISKFWPKKD

SEQ ID NO: 43017 - DNA, 444 bp, Unknown
  Obtained from environmental sample
  misc_feature (1)..(444): n is a, c, g, or t
atggcaaagtggaaaaagtcagcgcacgtcgtatatcaatgtagttatcatctggtatggacaccaaaatatagatacaggatattacaaggagaaataaaagaattcgtagaaaggaaaatcaaagcagtctgtgaatggaagcgagtagagatattagaaatgacgataatgcccgatcatatccacatggtagcgataataccgccgaagttggctatatcggagttgatagggatattgaaaggaaaaacggcgatagccgtttttcaacagcacaacaaactgcggacaaagccgtattgggggaatcacttctggagccgcggttattgtgttacgacggtcgggatagatgaagaaaaaatacgaagatatgtaaaatatcaggaagacgccgagcggctcagcgaagaccacgaactacaaccaggcctcttttag

SEQ ID NO: 43018 - protein, 147 aa, Unknown
  Obtained from environmental sample
  DOMAIN (19)...(123): Transposase IS200 like
  misc_feature (1)..(147): Xaa is any amino acid
MAKWKKSAHVVYQCSYHLVWTPKYRYRILQGEIKEFVERKIKAVCEWKRVEILEMTIMPDHIHMVAIIPPKLAISELIGILKGKTAIAVFQQHNKLRTKPYWGNHFWSRGYCVTTVGIDEEKIRRYVKYQEDAERLSEDHELQPGLF

SEQ ID NO: 43019 - DNA, 780 bp, Unknown
  Obtained from environmental sample
  misc_feature (1)..(780): n is a, c, g, or t
atggaccctgaaattaatagcgaacaaggtggtagaactgggaatactggacagcatctcggatcatgggataggggaccttttaaaaaaaacgacattcagccatggctacagaaggaatggtgcatagcgacaccgtccgccgaatatgtccagcggatggaggacgtattggaggtctataaacgtccgtatgatgaaaaacagccggtagtttgccttgacgaggccaaccggcaactcattgatgaaatactgagcccccggcctatcctgaaaggacaggctgccttatatgactacgaatatgtgcgcaatggggcagccaatctctttatgatgttcgagccgcttgtcgggcggcgcgaagtaaaagtaacggaacggcgtaccggaaaggattttgcaggctgccttaaagaattggcagaaatacaataccctgacgccgaaaaaatagtgcttgtcatggacaatctgaatacccatacgcttgcctctttgtactccgcatttgaaccggaagtcgctttgcgccttgcccaacgcttcgaaatccatttcacccccaagcatggttcctggcttaatatggctgagttggaaataggggtaatgagccggcaatgcctaaaaaggagaataccgactattgaaaagatggcaggtgaagtacaagcctgggttactgaacggaacgataatagaaccactgttcattggcagttcactaccgcagatgcccgcattaagctgagacacttgtatccaaaattttaa

SEQ ID NO: 43020 - protein, 259 aa, Unknown
  Obtained from environmental sample
  misc_feature (1)..(259): Xaa is any amino acid
MDPEINSEQGGRTGNTGQHLGSWDRGPFKKNDIQPWLQKEWCIATPSAEYVQRMEDVLEVYKRPYDEKQPVVCLDEANRQLIDEILSPRPILKGQAALYDYEYVRNGAANLFMMFEPLVGRREVKVTERRTGKDFAGCLKELAEIQYPDAEKIVLVMDNLNTHTLASLYSAFEPEVALRLAQRFEIHFTPKHGSWLNMAELEIGVMSRQCLKRRIPTIEKMAGEVQAWVTERNDNRTTVHWQFTTADARIKLRHLYPKF

SEQ ID NO: 43021 - DNA, 414 bp, Unknown
  Obtained from environmental sample
  misc_feature (1)..(414): n is a, c, g, or t
gtggttctattatcgttccgttcagtaacccaggcttgtacttcacctgccatcttttcaatagtcggtattctcctttttaggcattgccggctcattacccctatttccaactcagccatattaagccaggaaccatgcttgggggtgaaatggatttcgaagcgttgggcaaggcgcaaagcgacttccggttcaaatgcggagtacaaagaggcaagcgtatgggtattcagattgtccatgacaagcactattttttcggcgtcagggtattgtatttctgccaattctttaaggcagcctgcaaaatcctttccggtacgccgttccgttacttttacttcgcgccgcccgacaagcggctcgaacatcataaagagattggctgccccattgcgcacatattcgtag

SEQ ID NO: 43022 - protein, 137 aa, Unknown
  Obtained from environmental sample
  misc_feature (1)..(137): Xaa is any amino acid
MVLLSFRSVTQACTSPAIFSIVGILLFRHCRLITPISNSAILSQEPCLGVKWISKRWARRKATSGSNAEYKEASVWVFRLSMTSTIFSASGYCISANSLRQPAKSFPVRRSVTFTSRRPTSGSNIIKRLAAPLRTYS

SEQ ID NO: 43023 - DNA, 336 bp, Unknown
  Obtained from environmental sample
  misc_feature (1)..(336): n is a, c, g, or t
ttgccggctcattacccctatttccaactcagccatattaagccaggaaccatgcttgggggtgaaatggatttcgaagcgttgggcaaggcgcaaagcgacttccggttcaaatgcggagtacaaagaggcaagcgtatgggtattcagattgtccatgacaagcactattttttcggcgtcagggtattgtatttctgccaattctttaaggcagcctgcaaaatcctttccggtacgccgttccgttacttttacttcgcgccgcccgacaagcggctcgaacatcataaagagattggctgccccattgcgcacatattcgtagtcatataa

SEQ ID NO: 43024 - protein, 111 aa, Unknown
  Obtained from environmental sample
  misc_feature (1)..(111): Xaa is any amino acid
MPAHYPYFQLSHIKPGTMLGGEMDFEALGKAQSDFRFKCGVQRGKRMGIQIVHDKHYFFGVRVLYFCQFFKAACKILSGTPFRYFYFAPPDKRLEHHKEIGCPIAHIFVVI

SEQ ID NO: 43025 - DNA, 486 bp, Unknown
  Obtained from environmental sample
  misc_feature (1)..(486): n is a, c, g, or t
atgctcaaaccaaacatcaaataccgggtaacattggctgaggaagaacggaaaacattgcaggatatggttcgtatgggaaagacagcgggctaccggatacgccacgcacagatactgcttgcgctggatgaagtaccggcgaacgaatcatggaccgatgaaaagataggcaaggcgtatgggtcgcacatacgcacaataggaaacataaggaagcggttcgtggaggaaggcatacaggccgcgctggaaagaaaagaaagggaaaacccgccgttctcaaaaatagacggggaagccgaagcgaaaataatcgcccttacttgcagccagccgcctgaaggacactgtcgatggaccctgaaattaatagcgaacaaggtggtagaactgggaatactggacagcatctcggatcatgggataggggaccttttaaaaaaaacgacattcagccatggctacagaaggaatggtgcatag

SEQ ID NO: 43026 - protein, 161 aa, Unknown
  Obtained from environmental sample
  misc_feature (1)..(161): Xaa is any amino acid
MLKPNIKYRVTLAEEERKTLQDMVRMGKTAGYRIRHAQILLALDEVPANESWTDEKIGKAYGSHIRTIGNIRKRFVEEGIQAALERKERENPPFSKIDGEAEAKIIALTCSQPPEGHCRWTLKLIANKVVELGILDSISDHGIGDLLKKTTFSHGYRRNGA

SEQ ID NO: 43027 - DNA, 504 bp, Unknown
  Obtained from environmental sample
  misc_feature (1)..(504): n is a, c, g, or t
atgcctactgccaggacaacgaaatatcctggtatgacttggtctttttacgagaagaattacgctctttaccgctttgtaaaggaaatgatcgctttccgccgccgccatcccggttttatgcggccagagttttttacgggcagggacggtaagtacaacgccatcccggacataagctggtttgacgaaaagggaaacacacctaattgggacacgattggcccgtgccttgcctttaggatggacggttcctacgctgatatacttgccgacagggacgacaacgactttttcatcatgttcaacggaagcgagaaagctttaagttttaaagtatgcgaacccatggccggaaaaaaatgggtccgcgctgtggacacaggccttccttcacctaacgatattctgaaaagcggggaggaacaaattttggaaaacccatacgcatatccgcttaaggaaaaaagcatggttatacttatatcaaggttattgtattaa

SEQ ID NO: 43028 - protein, 167 aa, Unknown
  Obtained from environmental sample
  misc_feature (1)..(167): Xaa is any amino acid
MPTARTTKYPGMTWSFYEKNYALYRFVKEMIAFRRRHPGFMRPEFFTGRDGKYNAIPDISWFDEKGNTPNWDTIGPCLAFRMDGSYADILADRDDNDFFIMFNGSEKALSFKVCEPMAGKKWVRAVDTGLPSPNDILKSGEEQILENPYAYPLKEKSMVILISRLLY

SEQ ID NO: 43029 - DNA, 612 bp, Unknown
  Obtained from environmental sample
  misc_feature (1)..(612): n is a, c, g, or t
atggacgaaagcagttttattttgggcgtagaccttgacggggtagtgggggacttttacggcgcgatgcggaaaatcgccgccgcctggctgaataaaccagtgaaggcccttacaaccgatgtgagctttggccttgaggaatggggccttgatgaatacggcggctatgaaagacttcaccgtttcgccgtaacccagcgtaaccttttccgcgacatggagccaatcaaagacgccccctccgttttgcgaaaactttcaagcaatcacattagaattcgcattatcacacacagactttttcttaaatattcccacaaggcaacaattacccagactgttgattggctggattcctgggacattccctactgggatctttgctttatggccgacaagggcgctgtaggcgcccatgtgtatattgatgattccccggcaaacattgtgcgcttaagggatcagggctgcaacacgattattttttcaaattctaccaatctggaactggacggcccaagagcatacaactggcaggatgtggagcgctttgttatggacgcttttaaggaatggcaaaccggaaccaggaatatgttcgctccctga

SEQ ID NO: 43030 - protein, 203 aa, Unknown
  Obtained from environmental sample
  misc_feature (1)..(203): Xaa is any amino acid
MDESSFILGVDLDGVVGDFYGAMRKIAAAWLNKPVKALTTDVSFGLEEWGLDEYGGYERLHRFAVTQRNLFRDMEPIKDAPSVLRKLSSNHIRIRIITHRLFLKYSHKATITQTVDWLDSWDIPYWDLCFMADKGAVGAHVYIDDSPANIVRLRDQGCNTIIFSNSTNLELDGPRAYNWQDVERFVMDAFKEWQTGTRNMFAP

SEQ ID NO: 43031 - DNA, 309 bp, Unknown
  Obtained from environmental sample
  misc_feature (1)..(309): n is a, c, g, or t
atgtggagcgctttgttatggacgcttttaaggaatggcaaaccggaaccaggaatatgttcgctccctgacatgagcgcgattgttcttgctactatcaacgccaagtggattcatccctcactggccttacggcttttaaaagcaaacctcggaaaccttgaagctcactgtacgattctggaatttgccctaaggcagccattaaatgaaaaaatcacccccatccttgcggaacatccacgggttatcggtctttccgtttcaatatggaaccatttggcaactttggaactgctcaaggcatga

SEQ ID NO: 43032 - protein, 102 aa, Unknown
  Obtained from environmental sample
  misc_feature (1)..(102): Xaa is any amino acid
MWSALLWTLLRNGKPEPGICSLPDMSAIVLATINAKWIHPSLALRLLKANLGNLEAHCTILEFALRQPLNEKITPILAEHPRVIGLSVSIWNHLATLELLKA

SEQ ID NO: 43033 - DNA, 936 bp, Unknown
  Obtained from environmental sample
  misc_feature (1)..(936): n is a, c, g, or t
atgattggaacaaaaggaatagtgacaggcgttaacggcaacatggttagcgtccgttttaacggaatagtttccatgaacgaagtcggctatgtaaaagtcgcaggcaaacggctgaaaagtgaagttatcaggattcgcggcgaagtaagccagctgcaggtctttgaaatcaccaagggcataaccatcggcgatgaagtggaattcactggcggaatgttatctgtagaattggggccgggtcttttgggacaagtttatgacggtcttcaaaacccgcttcctcagcttgctcaagcggcgggttatttccttgaacgaggtgtttatcttgacgcactgtcaacagaaaaaagctggcagtttacgcctaaagccaaagctggcgacagagttgagcgagctgatactttaggtactgttcccgaaggctcatttactcacagaataatggttccgtttaatatgtacggaacttttactatttcatggataaaacctgaaggatcatataaaatccgcgataccattgcggaacttacagacgaaaaaggcaataaagtttctgtaacactcagttttcattggcctgtaaaaagagcgattgactgttacgaagaaaggcttaaacctgcggagccgatggttacgcgcgtacggttaattgacactttcttccctgtagcgcgcggcggcacatactgtattcccggtccgttcggcgccggtaaaacagttcttcagcagataacaagccgttttgccgatgttgatattgtaattgtagccgcgtgcggcgagcgcgccggagaggtagttgaaacattaaaagaattccctgaattaaaagatgaaagaacaggccgctctctcatggaaagaacgatcattatttgcaatacatcgtctatgccggtgcctcggccgatctga

SEQ ID NO: 43034 - protein, 311 aa, Unknown
  Obtained from environmental sample
  DOMAIN (8)...(72): ATP synthase alpha/beta family, beta-barrel domain
  misc_feature (1)..(311): Xaa is any amino acid
MIGTKGIVTGVNGNMVSVRFNGIVSMNEVGYVKVAGKRLKSEVIRIRGEVSQLQVFEITKGITIGDEVEFTGGMLSVELGPGLLGQVYDGLQNPLPQLAQAAGYFLERGVYLDALSTEKSWQFTPKAKAGDRVERADTLGTVPEGSFTHRIMVPFNMYGTFTISWIKPEGSYKIRDTIAELTDEKGNKVSVTLSFHWPVKRAIDCYEERLKPAEPMVTRVRLIDTFFPVARGGTYCIPGPFGAGKTVLQQITSRFADVDIVIVAACGERAGEVVETLKEFPELKDERTGRSLMERTIIICNTSSMPVPRPI

SEQ ID NO: 43035 - DNA, 558 bp, Unknown
  Obtained from environmental sample
  misc_feature (1)..(558): n is a, c, g, or t
gtgagagcatactattactttattgcccagcttccttctttgatttacgaacaaaaaccgcctatgtcttccgctcattttaaggagttagccgctgatttgctggaagacggcgatttaaaagtaatggattatctttcctttaacgacgtattttccgaaaaaggtaattgcgcttttgtaaataattggaaaaactgggaacgcgctttaaaattaaatctcgccaaagagcgggcgataaagttaaagaaagatgttcagctaacggacattccgtttttcccgcaggaagccgctattaccgccgttaaagccgttgacgaaaaatcaccgttggacggcgagattttgctggataaagcgcgctggacagccatagattcaatcgccggcagagattattacagcgtgaataatatatacgcttattatttaaaattattactgcttgaaagaaggcagtcgtttaatactgaaaaaggatttgcagaatataaaactttgtacgctgaaattttagaaagcgcgcaaaattccccgggggaaactaaatga

SEQ ID NO: 43036 - protein, 185 aa, Unknown
  Obtained from environmental sample
  misc_feature (1)..(185): Xaa is any amino acid
MRAYYYFIAQLPSLIYEQKPPMSSAHFKELAADLLEDGDLKVMDYLSFNDVFSEKGNCAFVNNWKNWERALKLNLAKERAIKLKKDVQLTDIPFFPQEAAITAVKAVDEKSPLDGEILLDKARWTAIDSIAGRDYYSVNNIYAYYLKLLLLERRQSFNTEKGFAEYKTLYAEILESAQNSPGETK

SEQ ID NO: 43037 - DNA, 438 bp, Unknown
  Obtained from environmental sample
  misc_feature (1)..(438): n is a, c, g, or t
gtgcgcgtcggccccttttcgccgtggatgaaaaaatggataaacgacaatcacgtgagcaacatcatacaccaccacggggtttcacaggaacaactcgttgaactatactgctgcgccgacatatttatctacccaagtttcgtcgaagggttcgggatgcccccgcttgaagcgctggcgtgcggcgttcaggcggtggcggcgcggtcgtcggcgcttaaagaaaacctcgacggcgtcataccgctggtcgacccgccggacaggattgatgggtacttgaaagttatagacgacgcgctctccggaaaaaatgtcgtagacaaaaaggcggctgaaagaacgcttgagcggttttcaatcgaacagtttggggtgagagtccgcgcttgctttcgagatagccgcaattcaggaacggtagttacatcttaa

SEQ ID NO: 43038 - protein, 145 aa, Unknown
  Obtained from environmental sample
  misc_feature (1)..(145): Xaa is any amino acid
MRVGPFSPWMKKWINDNHVSNIIHHHGVSQEQLVELYCCADIFIYPSFVEGFGMPPLEALACGVQAVAARSSALKENLDGVIPLVDPPDRIDGYLKVIDDALSGKNVVDKKAAERTLERFSIEQFGVRVRACFRDSRNSGTVVTS

SEQ ID NO: 43039 - DNA, 774 bp, Unknown
  Obtained from environmental sample
  misc_feature (1)..(774): n is a, c, g, or t
atgaatatcggcgtagacataaaggcttttaaaaacggctccaccggaatcaacagatacacacgttgcattcttgacgagttgcaggagattgactcggagaacaattactacctcatggaatgtaaaccgtccgactacgcgccggtcaatccaaggtggaagaagatctctcacaagagcaagatgcccggaacgctgtggctgcaaacggttgttcccggactcataaaaaaacacggcgtcgacatattctgggctccagagcagataagcccggttttggggttgccgcgaggcgtaaagattgtcaccacgatacacgatttcacttttctgcactatccggaaacgtgtcaacgcaccgacctcctgataaagaaattgctgaccgcccataccgtaaaaaaatcagcggcgcttattccggtctcagactacataaaaaaagagttattcgatctctatccttacatacgggatgggcgaaagatcattcgaaccgtgggcaacggcgtcaaaagccggcgcgttgaaatccaatcggccaaacgcgaaaactttttattcttccccggcaacatggaaccccgcaaaaacctcttacggcttatcaaggcgcttgaaatagtaaacgcgtcgggcgttgagatagagcttcgtatatgcggcccaagcggttggaagaacaccaacttacataaactgataaaatcaagccccgtccaaaatcgcgtaaaacacctcggatacctgtccgaaaggatttgctga

SEQ ID NO: 43040 - protein, 257 aa, Unknown
  Obtained from environmental sample
  misc_feature (1)..(257): Xaa is any amino acid
MNIGVDIKAFKNGSTGINRYTRCILDELQEIDSENNYYLMECKPSDYAPVNPRWKKISHKSKMPGTLWLQTVVPGLIKKHGVDIFWAPEQISPVLGLPRGVKIVTTIHDFTFLHYPETCQRTDLLIKKLLTAHTVKKSAALIPVSDYIKKELFDLYPYIRDGRKIIRTVGNGVKSRRVEIQSAKRENFLFFPGNMEPRKNLLRLIKALEIVNASGVEIELRICGPSGWKNTNLHKLIKSSPVQNRVKHLGYLSERIC

SEQ ID NO: 43041 - DNA, 675 bp, Unknown
  Obtained from environmental sample
  misc_feature (1)..(675): n is a, c, g, or t
ttggaagagttttccgcggaacagcttgttatgctcttaaagccggaatcgccccagacggttgctatgatcctttcgcgccttacacccaaactttcagcggataccataaacaaacttccgtccgacattaagcctgaagttctcaggcgcatcgcatatcaaaaagaagtttcacccgaagtgcttgaacaggtaacggcgggcttaagagaaaaagcgcgtaacatttcaggcggcgctggagacatcgagattgacggaatgcagacgctggcggctatcttaaaacagggagattatgatttcggcgacaagataatcaacgaattggagcagagcagccccgatataggaaaaagccttaaagaaaaaatctacacgcttgacgatgttgtccttaccgttgacaggcctattcaggaaaaactttcgctgatgtcggatcaggagatagcgattttattaaagggcaggggaaagccgttttgcgaaaaaattctttcctgcgtttcggcggggcgcaggaaaataatccgcgaagaatttgaagtgctcggcgcggttccgaagcgcgactgcgacgccgccgcgggggaatttctttcctggttcaggaaagcccgtgaaaacggggaaattatactttacagcgataaggatgtttatttatga

SEQ ID NO: 43042 - protein, 224 aa, Unknown
  Obtained from environmental sample
  DOMAIN (108)...(217): FliG C-terminal domain
  misc_feature (1)..(224): Xaa is any amino acid
MEEFSAEQLVMLLKPESPQTVAMILSRLTPKLSADTINKLPSDIKPEVLRRIAYQKEVSPEVLEQVTAGLREKARNISGGAGDIEIDGMQTLAAILKQGDYDFGDKIINELEQSSPDIGKSLKEKIYTLDDVVLTVDRPIQEKLSLMSDQEIAILLKGRGKPFCEKILSCVSAGRRKIIREEFEVLGAVPKRDCDAAAGEFLSWFRKARENGEIILYSDKDVYL

SEQ ID NO: 43043 - DNA, 1287 bp, Unknown
  Obtained from environmental sample
  misc_feature (1)..(1287): n is a, c, g, or t
gtgtggcgggaatcgggacggacaagggggcgggcggcaggctcgtccgcatcgtggttggggagggtttttgtgaacagactgagcaaacttctgttggcaggcgtcttttgtgtttcgttgtccgccgcggcgtcggcggattcgtatactgaggcgatggaatcggcggcggcgacgcttaaatcggcgcgggagacgctttctaaggcgatagccgattttgaggcgagagaggcggctgcggctgaggccgaagccgaggccgcaagagtcgcggcggaagccgaacgcgtcagagcggcggctgaggaggcggcggcggcgaaaaagggcaagggcggcgtaaaggcggcgaaggttgataccgccgacgcgaagaaggatgtcggcgccgttccggcggttgccgatacggctgtcgcgaaggcggccgtcgttgattccgcggttgttgataccgtcgcggctaagacggcggttgttgattcggcggctgcggtcgacagcgcggcgccaaaggctgcggcggttgacagcgccgccgtaaagcccgccgctcccaagaaggcggccgttgttaagcgtcctcccaagacttaccctatcgtcaagccggagatagagatggtgcatgtcaagggcggtaagtttaagatgggctgtcaggacgagcaggaaaactgcatgaacgacgagaggccgcggcacgaggtgaagctcaaggattattacattggtaagtatccggttacgcagaagcagtggtggtcggtgatgggcgtgaatccggcgtataaagagggtgaaaatctgccggtcgagcaggtaagctgggacgatgttcaggagtttttgaagaggctcaacgtgttgactggcaagaagtaccgtttgccgacggaggcggagtgggagtacgcggcgcgcggcggggcgctgagcaacgggcggaagttctccggccatccctacttgtacgacgtggcgtggtacgattacaacagctccggctccacgcagattgtgggcgctagggagccaaacgagcttggcgtgtacgatatgctcggcaatgtctgggagtgggtcggcgattggtacgacaggtactactacaaggagtcctccctgaagaatcccggcggtcccaagtacgggagcgagcgggtgagccgcggctgcagcttcaattcagaggagtccgcttgcaggatatcgttgcgtaactacaacaagcccggcagccggacgatatacttggggctcaggctggcgtcgcagtga

SEQ ID NO: 43044 - protein, 428 aa, Unknown
  Obtained from environmental sample
  DOMAIN (206)...(427): Domain of unknown function (DUF323)
  misc_feature (1)..(428): Xaa is any amino acid
MWRESGRTRGRAAGSSASWLGRVFVNRLSKLLLAGVFCVSLSAAASADSYTEAMESAAATLKSARETLSKAIADFEAREAAAAEAEAEAARVAAEAERVRAAAEEAAAAKKGKGGVKAAKVDTADAKKDVGAVPAVADTAVAKAAVVDSAVVDTVAAKTAVVDSAAAVDSAAPKAAAVDSAAVKPAAPKKAAVVKRPPKTYPIVKPEIEMVHVKGGKFKMGCQDEQENCMNDERPRHEVKLKDYYIGKYPVTQKQWWSVMGVNPAYKEGENLPVEQVSWDDVQEFLKRLNVLTGKKYRLPTEAEWEYAARGGALSNGRKFSGHPYLYDVAWYDYNSSGSTQIVGAREPNELGVYDMLGNVWEWVGDWYDRYYYKESSLKNPGGPKYGSERVSRGCSFNSEESACRISLRNYNKPGSRTIYLGLRLASQ

SEQ ID NO: 43045 - DNA, 633 bp, Unknown
  Obtained from environmental sample
  misc_feature (1)..(633): n is a, c, g, or t
ttgggaggacgcttaacaacggccgccttcttgggagcggcgggctttacggcggcgctgtcaaccgccgcagcctttggcgccgcgctgtcgaccgcagccgccgaatcaacaaccgccgtcttagccgcgacggtatcaacaaccgcggaatcaacgacggccgccttcgcgacagccgtatcggcaaccgccggaacggcgccgacatccttcttcgcgtcggcggtatcaaccttcgccgcctttacgccgcccttgccctttttcgccgccgccgcctcctcagccgccgctctgacgcgttcggcttccgccgcgactcttgcggcctcggcttcggcctcagccgcagccgcctctctcgcctcaaaatcggctatcgccttagaaagcgtctcccgcgccgatttaagcgtcgccgccgccgattccatcgcctcagtatacgaatccgccgacgccgcggcggacaacgaaacacaaaagacgcctgccaacagaagtttgctcagtctgttcacaaaaaccctccccaaccacgatgcggacgagcctgccgcccgcccccttgtccgtcccgattcccgccacacgcttacagtcgccgaccggtatgctttaccggtataa

SEQ ID NO: 43046 - protein, 210 aa, Unknown
  Obtained from environmental sample
  SIGNAL (1)...(27)
  misc_feature (1)..(210): Xaa is any amino acid
MGGRLTTAAFLGAAGFTAALSTAAAFGAALSTAAAESTTAVLAATVSTTAESTTAAFATAVSATAGTAPTSFFASAVSTFAAFTPPLPFFAAAASSAAALTRSASAATLAASASASAAAASLASKSAIALESVSRADLSVAAADSIASVYESADAAADNETQKTPANRSLLSLFTKTLPNHDADEPAARPLVRPDSRHTLTVADRYALPV

SEQ ID NO: 43047 - DNA, 501 bp, Unknown
  Obtained from environmental sample
  misc_feature (1)..(501): n is a, c, g, or t
gtgggcgggaatttcggcgtaacgaagctcagttccctgatcgccgtcaaagtaaatcgccttcatggtaacaagatcgaccacgccttcaagcttatcctcaagccctatcggtatctgtatcaaaaccgcgttaagggccagcttttcgcggagctgggtttttaccttgaaaggattcgcccccatgcgatcgcacttgtttacaaaggcgatacgcggaacgtggtagcgcttgagctgcctgtccacggtgatggactgggactgaacccctccgaccgcgcaaagaacaagtaccgccccgtcaagcacacgcagggcgcgctcaacctcaatggtaaagtccacgtgccccggggtgtcgataagattaatcgtgtggtttttccattcaacctgggtagcggcggactgaattgttattcctctttcccgctcaagctccatgtgatccatggtggctcccactccgtctttgccccaacctggaaagaataa

SEQ ID NO: 43048 - protein, 166 aa, Unknown
  Obtained from environmental sample
  misc_feature (1)..(166): Xaa is any amino acid
MGGNFGVTKLSSLIAVKVNRLHGNKIDHAFKLILKPYRYLYQNRVKGQLFAELGFYLERIRPHAIALVYKGDTRNVVALELPVHGDGLGLNPSDRAKNKYRPVKHTQGALNLNGKVHVPRGVDKINRVVFPFNLGSGGLNCYSSFPLKLHVIHGGSHSVFAPTWKE

SEQ ID NO: 43049 - DNA, 882 bp, Unknown
  Obtained from environmental sample
  misc_feature (1)..(882): n is a, c, g, or t
gtgggagccaccatggatcacatggagcttgagcgggaaagaggaataacaattcagtccgccgctacccaggttgaatggaaaaaccacacgattaatcttatcgacaccccggggcacgtggactttaccattgaggttgagcgcgccctgcgtgtgcttgacggggcggtacttgttctttgcgcggtcggaggggttcagtcccagtccatcaccgtggacaggcagctcaagcgctaccacgttccgcgtatcgcctttgtaaacaagtgcgatcgcatgggggcgaatcctttcaaggtaaaaacccagctccgcgaaaagctggcccttaacgcggttttgatacagataccgatagggcttgaggataagcttgaaggcgtggtcgatcttgttaccatgaaggcgatttactttgacggcgatcagggaactgagcttcgttacgccgaaattcccgcccacctgaaacaggacgctgaaaagtaccgtgaagaactgatcgacgaggtttcaattttttccgatgaacttgcggaaaaatttatctctggcgatgcgatctccgaagacctgcttcgcgcggctattcgcaagggaacattggcggaagctttcgttcctgtcatgctgggttccgcctataaattcaagggtatccagccgcttcttgacgccgtgaacaactttctgccgaacccgacagaggtaaagaactacgcctatgacattgacaataacgaanaacaaaaggaacttctgtctgatgataaaagccccacggtagcgctgggcttcagcttgaagacggccagtacggccagctcacctacgtcagggtttatcagggcgctcttaaaaagggcgaggagctga

SEQ ID NO: 43050 - protein, 293 aa, Unknown
  Obtained from environmental sample
  DOMAIN (1)...(237): Elongation factor Tu GTP binding domain
  misc_feature (1)..(293): Xaa is any amino acid
MGATMDHMELERERGITIQSAATQVEWKNHTINLIDTPGHVDFTIEVERALRVLDGAVLVLCAVGGVQSQSITVDRQLKRYHVPRIAFVNKCDRMGANPFKVKTQLREKLALNAVLIQIPIGLEDKLEGVVDLVTMKAIYFDGDQGTELRYAEIPAHLKQDAEKYREELIDEVSIFSDELAEKFISGDAISEDLLRAAIRKGTLAEAFVPVMLGSAYKFKGIQPLLDAVNNFLPNPTEVKNYAYDIDNNEXQKELLSDDKSPTVALGFSLKTASTASSPTSGFIRALLKRARS

SEQ ID NO: 43051 - DNA, 1248 bp, Unknown
  Obtained from environmental sample
  misc_feature (1)..(1248): n is a, c, g, or t
gtggtaataggcggtaagacgtggatggcgcagaatctgaattattcgacggcaaacgattctttgcgctatccccgctcctattgtaaaaaatatggccggttgtacgattggaatacggcgatgacggtttgcccgagcggctggcacctgccgtccaacgccgagtgggatagtttggcgaaatccgccggaggatacgaggatcattacctaataagacacagatgggggatggcgcctcactggcggaacgtgggcgcaaagctgaaatcaacacgcggttggtacgaaggcggtaacggcaccgacgattacggtttttcggctgtctcaggcgacggcggctacaacggcagttggtggacgtctactgtggtcgatagcgatacggcctactacagaaacatctcttactccagcgatctcttgttcaatgaggcagctagcaaggagcgcgcagaatcggtgcggtgcgttcaaaacgaaaacacatattcggtgaccgtttcaagcaagggcgtcggggcgggtgggagccgcaatcacgtgatggcaggcgagggtgtggacataatggccggaacggtgcgcggccaacgattcaaatgctggacatccgcaaacggcaatgtaacttttgccgaatcgtcacgcgcggcgacaaggtttattatgccggcaagcgacgtaacgataacggcgagtttcgatactgttgtcgtttcggccgccgatagaaaaacgtataaaacgacggtaatcggcggtaagaggtggatggctgagaatttgaatgataaaacgtcaagcggttcttggtgctataaaaatgatgatacctactgtaaaaaatacggcagattgtacgattgggaaacggcgatggctgcatgccccgcaggatggcatttggcgtccaaccaagagtggaatattttggttacggaggccggcggcaacgagatagcgggtaaaaaactgaaggctaaaaccggatggaacaaagacggtaacggcacggacgattacggattttcggccctgccgggcggagaccgctacctcgatggctttttcgatcttatcgatatcggaaacttcggctattggtggacttctacgggcggagacggaagcgacggcgccatgatacgacgcatgagctaccgggacaataaggtacacgagaccggcttcgtcagcggcgtgngttgctcggttcgctgcgttgcggacggcgaatga

SEQ ID NO: 43052 - protein, 415 aa, Unknown
  Obtained from environmental sample
  misc_feature (1)..(415): Xaa is any amino acid
MVIGGKTWMAQNLNYSTANDSLRYPRSYCKKYGRLYDWNTAMTVCPSGWHLPSNAEWDSLAKSAGGYEDHYLIRHRWGMAPHWRNVGAKLKSTRGWYEGGNGTDDYGFSAVSGDGGYNGSWWTSTVVDSDTAYYRNISYSSDLLFNEAASKERAESVRCVQNENTYSVTVSSKGVGAGGSRNHVMAGEGVDIMAGTVRGQRFKCWTSANGNVTFAESSRAATRFIMPASDVTITASFDTVVVSAADRKTYKTTVIGGKRWMAENLNDKTSSGSWCYKNDDTYCKKYGRLYDWETAMAACPAGWHLASNQEWNILVTEAGGNEIAGKKLKAKTGWNKDGNGTDDYGFSALPGGDRYLDGFFDLIDIGNFGYWWTSTGGDGSDGAMIRRMSYRDNKVHETGFVSGVXCSVRCVADGE

SEQ ID NO: 43053 - DNA, 1320 bp, Unknown
  Obtained from environmental sample
  misc_feature (1)..(1320): n is a, c, g, or t
atggatctcttcgacacaaaccgcgaagccgttttgagccgcaacgccccgctcgccaaccgtatgcgcccgcgtacgctcgacgagtatatcgggcaggatcatatcataggccccgggcgcctattgcgccgcgccatacagattgaccaactctcaagcgtcatcttctacggtccgcccgggacgggaaagacgacgctggcgcggatcatcgccaataccacaaaggcgaacttcatctccataaacgcggtgctcgccggcgtaaaagagatccgcgaggctatagacgacgcgcaaaaagcgctcgcccactaccaaaaacgcaccacgctgtttgtagacgaggtgcaccgcttcaacaagtcgcagcaggacgcgctcctgccgcacgtggaaaacggcacgctcacgctcatcggggcgaccaccgagaacccgtacttcgaggtgaacaaggcgctggtctcacgctcacggatattccaactcacggtgctcacggaggccgacttaaaagcgatcgcaatgcaggcgctctccgacaaggagcgcggctacggcggcaaaaacgtcgtgatagacgacgacgccctaaaccatttagtgcgcacggccaacggcgacgcccgcggcgtgctcaacgcgctggaactcgccgttgagacgacgccggaggacgacggcggcgtgataaggatcaaccgctccatagccgaggattcaatccagcaacgcgccgtcctctacgaccgcgacggcgacgcccactacgacacgataagcgccttcataaagtcgctgcgcggctccgaccccgacgccgcgctctactggatggcgaagatggtctacgccggcgaagacccgcgattcatcttccgcagaatgctcatcttcgcctgcgaagacgttggcatggccgaccccaacgcgctgacggtcgtggtgaacgccgcacgggccttcgactacgtgggtatgccggaaggacgtttccacttgtcgcacgcctgtatatactgcgccacggcgcccaagagcaactcgtcaatggcatttttcgacgcgctcaacaccgtggcgcaaagcgcgtccgacgacgtgccgaaccacttgcgggacgcttcgcgagacagcaaggggctggggcacggcaaaggatatttatacccgcacgcctatagagaccactgggtggcgcagcagtatttgccggatcacctgaaggggcaggtgttttatacgccgggggaaatcgggtatgaaaagcatgtcaaggagaggattgaacggtataggaagtcgcttgggtaa

SEQ ID NO: 43054 - protein, 439 aa, Unknown
  Obtained from environmental sample
  DOMAIN (50)...(178): Magnesium chelatase, subunit ChlI
  misc_feature (1)..(439): Xaa is any amino acid
MDLFDTNREAVLSRNAPLANRMRPRTLDEYIGQDHIIGPGRLLRRAIQIDQLSSVIFYGPPGTGKTTLARIIANTTKANFISINAVLAGVKEIREAIDDAQKALAHYQKRTTLFVDEVHRFNKSQQDALLPHVENGTLTLIGATTENPYFEVNKALVSRSRIFQLTVLTEADLKAIAMQALSDKERGYGGKNVVIDDDALNHLVRTANGDARGVLNALELAVETTPEDDGGVIRINRSIAEDSIQQRAVLYDRDGDAHYDTISAFIKSLRGSDPDAALYWMAKMVYAGEDPRFIFRRMLIFACEDVGMADPNALTVVVNAARAFDYVGMPEGRFHLSHACIYCATAPKSNSSMAFFDALNTVAQSASDDVPNHLRDASRDSKGLGHGKGYLYPHAYRDHWVAQQYLPDHLKGQVFYTPGEIGYEKHVKERIERYRKSLG

SEQ ID NO: 43055 - DNA, 951 bp, Unknown
  Obtained from environmental sample
  misc_feature (1)..(951): n is a, c, g, or t
atgggacaatgtacaatagaattcagtctgcttatcgaaaacaccttcgccgaaagcgggctgatatttaccgccgcggtagtggtatttatctgtctcgcggtatttgcgtcgacgcgcgttgtggtgaaggttcgggactgggcggcaaagggggatcgcaaggaactgctgcgcttatgggatgccggggattttaacgaggtgtacaacattagcggggctgcgcttgatacccactcaacggattatttcctgttgaccatgcacgggttttccgcttaccagcttggcatctcccagataaacaacctgaacgcggaacagtattttgataaatgtatatggtcgctgcggcaggcaatgcagttgaaaaacgcggagaatgacgggcggctatactatgttctgggaaaagcgtatagttataagggtgaggactatgccgatctcaccataaaatatctggagaaagccagggagttgtctgacaggaccgccgatattcccgaatatctgggcatggcttatttctcggttggagactatcgaagaagcgtggcggcttttagcgaagcccttgggacaagcgcggaggggccttccgggcctttactgttgtttatagcgcgggcctatattgcactggaagaatttgataacgcgcgcccgtatctgcagcgctgcatagcggtttctccggatttccgggttgttcttgacgcgcgttttctgctggcggaagcgctcaggatgaatggtgatatagaagaggcgataaagcagcttcaggagataattgcggaaacaggcgataatgccgaggcgcattaccagttgggggaactgtatgcctcgcaggggaatatcatacgcgcccgcgccgaatggcgaatggcgcttgatgtggacccggcgcaccttaaggcgagaactcggctttcaagataa

SEQ ID NO: 43056 - protein, 316 aa, Unknown
  Obtained from environmental sample
  DOMAIN (274)...(307): Tetratricopeptide repeat
  misc_feature (1)..(316): Xaa is any amino acid
MGQCTIEFSLLIENTFAESGLIFTAAVVVFICLAVFASTRVVVKVRDWAAKGDRKELLRLWDAGDFNEVYNISGAALDTHSTDYFLLTMHGFSAYQLGISQINNLNAEQYFDKCIWSLRQAMQLKNAENDGRLYYVLGKAYSYKGEDYADLTIKYLEKARELSDRTADIPEYLGMAYFSVGDYRRSVAAFSEALGTSAEGPSGPLLLFIARAYIALEEFDNARPYLQRCIAVSPDFRVVLDARFLLAEALRMNGDIEEAIKQLQEIIAETGDNAEAHYQLGELYASQGNIIRARAEWRMALDVDPAHLKARTRLSR

SEQ ID NO: 43057 - DNA, 723 bp, Unknown
  Obtained from environmental sample
  misc_feature (1)..(723): n is a, c, g, or t
atgataacatcaacatccccattatgcccgctctgcgattccaccgccctgtccctcatcagccaagacgagaggcacaagcgatttttctatctctgccccgattgcggcctgatctccgtcccgccgcgataccatctgtcaaaaaccgacgaactggcccgctacgccctccacgacaacaccatatccaatcaaggctacgtcgacttcctatccgaagtcgccgatgtcgccgttaatatagcctcggaaatgccgcatacagatttgtcaatgagcgatcccagagaacatccggtaaaactgctggatttcggatgcggcggcgaggcggtgctctgccgtctgcttgtgaggcgggggataggtatagactgccgcccctacgacccgttgtacgaagggttgcggaggttgccggacgcggtcggcaaatacgatataattgttgcaagcgaggtggtcgagcaccttcgcgacataacgggggagttgcgtatgatggtcaggttgctgagtgacagcggggcgattattttgcgtacgcggctatacgacgaatccggcgtcgacgcgtcgtcgaatttcaaaagttggtggtacgctcaggatcctacgcatataaattttttcagcagaaaatcgctttctaaactggcgattattacagggaagcggattgaggaaaccgggtgtcgggatatatttattctcaggtga

SEQ ID NO: 43058 - protein, 240 aa, Unknown
  Obtained from environmental sample
  DOMAIN (104)...(181): Methyltransferase domain
  misc_feature (1)..(240): Xaa is any amino acid
MITSTSPLCPLCDSTALSLISQDERHKRFFYLCPDCGLISVPPRYHLSKTDELARYALHDNTISNQGYVDFLSEVADVAVNIASEMPHTDLSMSDPREHPVKLLDFGCGGEAVLCRLLVRRGIGIDCRPYDPLYEGLRRLPDAVGKYDIIVASEVVEHLRDITGELRMMVRLLSDSGAIILRTRLYDESGVDASSNFKSWWYAQDPTHINFFSRKSLSKLAIITGKRIEETGCRDIFILR

SEQ ID NO: 43059 - DNA, 609 bp, Unknown
  Obtained from environmental sample
  misc_feature (1)..(609): n is a, c, g, or t
ttgcctccagccgcggcggtttttattcggcgctcaggaaaaaactctcatgggcgggagaaggggaagcccaggtacagaatgattgaagaacttagcgtaaggaatttcgcgcttatagacagcctcaacctctcatttgaaaagggcttcacggttctttcaggagaaacaggggccggaaaatccataatcgtgggctctcttagttttctttttggcgccaaagcagacagcgaaattatccgttcaggttcggaagaagcaagcgtctcggcggtgattgccattgacgacagaaaccgggatgccctgcaatggcttactcatagggaaatagagcgggaagattccaggcttatagtccggcgcagcgttaaagcctcaggccgtaattcaatctacatacaaaacgttcctgtaacaagaaatgatcttgccgaatttatgggtttcctttttgacctccacggtcagcacacccacgaatcattgttaagaaaagaaactcatcgtgtttaccttgacctgttttccggtctggaagacgaagttgcggccttcagccgggtttttaccgagctggcggagaaacgccaggactcttga

SEQ ID NO: 43060 - protein, 202 aa, Unknown
  Obtained from environmental sample
  DOMAIN (28)...(199): RecF/RecN/SMC N terminal domain
  misc_feature (1)..(202): Xaa is any amino acid
MPPAAAVFIRRSGKNSHGREKGKPRYRMIEELSVRNFALIDSLNLSFEKGFTVLSGETGAGKSIIVGSLSFLFGAKADSEIIRSGSEEASVSAVIAIDDRNRDALQWLTHREIEREDSRLIVRRSVKASGRNSIYIQNVPVTRNDLAEFMGFLFDLHGQHTHESLLRKETHRVYLDLFSGLEDEVAAFSRVFTELAEKRQDS

SEQ ID NO: 43061 - DNA, 588 bp, Unknown
  Obtained from environmental sample
  misc_feature (1)..(588): n is a, c, g, or t
gtggtttttgacaggtggatggcagggaaagaagtcgtttcccgccgcctgatgcttaatgtatcggtagaaagggaaggccgtaagatctttcaggaatgctgccttaacgatgtgatcatttcatcttccgtcattgccaaaataattaatctgcgccttttttacagtgaagaaaaaaagaaagcagagctaaagctgggttcgtaccgctcggacggccttatagtcgccacccctaccggttcaaccgcttattcagcctctgtagggggccccgtagtcgatcctgaacttgaggcgctgatattaagcccaatttgcccttttatacttacaaaccgccctttggtattgccggcactcggaacggcgatcgtggaggtggcggatgagcagcaaagcggggtaatattgacactggacggtcaggtcaaggagaaaataaaaaaaggggacaggatccttattgaaaaggcgccttattcctgtttcttaattgcctccagccgcggcggtttttattcggcgctcaggaaaaaactctcatgggcgggagaaggggaagcccaggtacagaatgattga

SEQ ID NO: 43062 - protein, 195 aa, Unknown
  Obtained from environmental sample
  DOMAIN (3)...(170): ATP-NAD kinase
  misc_feature (1)..(195): Xaa is any amino acid
MVFDRWMAGKEVVSRRLMLNVSVEREGRKIFQECCLNDVIISSSVIAKIINLRLFYSEEKKKAELKLGSYRSDGLIVATPTGSTAYSASVGGPVVDPELEALILSPICPFILTNRPLVLPALGTAIVEVADEQQSGVILTLDGQVKEKIKKGDRILIEKAPYSCFLIASSRGGFYSALRKKLSWAGEGEAQVQND

SEQ ID NO: 43063 - DNA, 933 bp, Unknown
  Obtained from environmental sample
  misc_feature (1)..(933): n is a, c, g, or t
atgacagattggccgaggtatcaagtggcccggcgccggttctccgttgttaaagaattttcgataatggcgaacccccttaccgccggtttttctctgccggatatcaaacttatgctgatacaggaaaacgagattttcggcagaaggaaacggccggtccgttcattgcataccgcgcgttcaaaacctattgatacgtttatagaacttaatcccggcgactatatcgttcatgttaattacggtattgggcttttcaagggaatagagagaattacggctctaggtcttgaaagggattatatccggcttgaatacgcggacgaggagaccgtctttgttcccgtcgagcaggttaaccttgtccagcgttatatcggaagcgaaggaaatccgccgcggcttgacgttatgggttccaaaagctgggagagccgcaagaacagggtaaaaaaatccgtagaagacatagcggaaaaactgatagaactgtattcaaaacgcaagagggcgcagggttttgcctttcctcaggacagcgagtggcagacaatgttcgaggcggctttcccgtttgaagaaacggaagatcaactgcgctgtatcgcggagataaaaaaggacatggaaagcccgcagccgatggacaggcttgtctgcggtgacgtggggtacggcaaaacagaagttgccgttcgcgcctgctttaaggctgtcatgggcggcaaacaggcggctttccttgctccgaccacaattcttgtagagcagcactatgaaaactttttggaaagattttccaatttccctgtaaacgtcgccatgctttcccgttttgtggacagaaaaaagacgcgcgtaattcttgaaaaactaaaaaacggcgaaatcgatttactttgtcggaacccacaggattatccagcgtga

SEQ ID NO: 43064 - protein, 310 aa, Unknown
  Obtained from environmental sample
  DOMAIN (196)...(310): DEAD/DEAH box helicase
  misc_feature (1)..(310): Xaa is any amino acid
MTDWPRYQVARRRFSVVKEFSIMANPLTAGFSLPDIKLMLIQENEIFGRRKRPVRSLHTARSKPIDTFIELNPGDYIVHVNYGIGLFKGIERITALGLERDYIRLEYADEETVFVPVEQVNLVQRYIGSEGNPPRLDVMGSKSWESRKNRVKKSVEDIAEKLIELYSKRKRAQGFAFPQDSEWQTMFEAAFPFEETEDQLRCIAEIKKDMESPQPMDRLVCGDVGYGKTEVAVRACFKAVMGGKQAAFLAPTTILVEQHYENFLERFSNFPVNVAMLSRFVDRKKTRVILEKLKNGEIDLLCRNPQDYPA

SEQ ID NO: 43065 - DNA, 1053 bp, Unknown
  Obtained from environmental sample
  misc_feature (1)..(1053): n is a, c, g, or t
gtgtgttataatataatttatgtatctatggacatacaaaccgcaatcaagcacgtaacgtccggcaagagcctctcagtagccgacaccaccgaggtcttcgcctccatcatggaggggctggccacagacgctcagatagccgcgcttattgtcgcgctgaggatgaagggcgaaacgccggacgagataacgggcgccgcgtacgttatgcgggacaaggccacgcatatctacacaagctcccgccagaacctgatagacacctgcgggacgggcggcgacggttccaacaccttcaacatctccaccgtcgcggcgtttatagccgccggcgcgggggccaaggtggccaagcacgggaaccgctccatctccagccgcagcggtagcgccgacgtcctcgagagcatgggagtcagcatcggcctgaatccgatgcaggtcggcgtttgccttaaggaactggggataggcttcctcttcgcgccggcgttccacgccgctatgaagtacgccgccgcggcgcgcaagcagatcggcataaggaccatattcaatataataggcccgctggcaaacccggcgcgcaccacaagccagctgctcggcgtcttctccccggacctcacggagaccatggcccaggcgctcaaaaacatgggcagcgaaaaggccttcgtagtccacggcctcgaccccttagacgaaatatccatctgcggcccgaccaaaatctcggagatacgcggcggcgaaatcgtcacgtaccagataacgccggaagaattcggcttcaaaagggcggtactggccgacatacaaggcggcgaaccggattacaacgccgccatagtcaaagagatactggacggcaaaaaaggcgtccacagagacgtagccgtactaaacaccgctttcgccctatgcgctgcatcggttacggaaacgcccaaagagggtattgccgcggctgaaaagtcgatagattccggagcggctcgggagaaattagagaagctcagggaactgtctaatcggttggcaggctag

SEQ ID NO: 43066 - protein, 350 aa, Unknown
  Obtained from environmental sample
  DOMAIN (11)...(76): Glycosyl transferase family, helical bundle domain
  misc_feature (1)..(350): Xaa is any amino acid
MCYNIIYVSMDIQTAIKHVTSGKSLSVADTTEVFASIMEGLATDAQIAALIVALRMKGETPDEITGAAYVMRDKATHIYTSSRQNLIDTCGTGGDGSNTFNISTVAAFIAAGAGAKVAKHGNRSISSRSGSADVLESMGVSIGLNPMQVGVCLKELGIGFLFAPAFHAAMKYAAAARKQIGIRTIFNIIGPLANPARTTSQLLGVFSPDLTETMAQALKNMGSEKAFVVHGLDPLDEISICGPTKISEIRGGEIVTYQITPEEFGFKRAVLADIQGGEPDYNAAIVKEILDGKKGVHRDVAVLNTAFALCAASVTETPKEGIAAAEKSIDSGAAREKLEKLRELSNRLAG

SEQ ID NO: 43067 - DNA, 615 bp, Unknown
  Obtained from environmental sample
  misc_feature (1)..(615): n is a, c, g, or t
gtggactacgaaggccttttcgctgcccatgtttttgagcgcctgggccatggtctccgtgaggtccggggagaagacgccgagcagctggcttgtggtgcgcgccgggtttgccagcgggcctattatattgaatatggtccttatgccgatctgcttgcgcgccgcggcggcgtacttcatagcggcgtggaacgccggcgcgaagaggaagcctatccccagttccttaaggcaaacgccgacctgcatcggattcaggccgatgctgactcccatgctctcgaggacgtcggcgctaccgctgcggctggagatggagcggttcccgtgcttggccaccttggcccccgcgccggcggctataaacgccgcgacggtggagatgttgaaggtgttggaaccgtcgccgcccgtcccgcaggtgtctatcaggttctggcgggagcttgtgtagatatgcgtggccttgtcccgcataacgtacgcggcgcccgttatctcgtccggcgtttcgcccttcatcctcagcgcgacaataagcgcggctatctgagcgtctgtggccagcccctccatgatggaggcgaagacctcggtggtgtcggctactga

SEQ ID NO: 43068 - protein, 204 aa, Unknown
  Obtained from environmental sample
  misc_feature (1)..(204): Xaa is any amino acid
MDYEGLFAAHVFERLGHGLREVRGEDAEQLACGARRVCQRAYYIEYGPYADLLARRGGVLHSGVERRREEEAYPQFLKANADLHRIQADADSHALEDVGATAAAGDGAVPVLGHLGPRAGGYKRRDGGDVEGVGTVAARPAGVYQVLAGACVDMRGLVPHNVRGARYLVRRFALHPQRDNKRGYLSVCGQPLHDGGEDLGGVGY

SEQ ID NO: 43069 - DNA, 588 bp, Unknown
  Obtained from environmental sample
  misc_feature (1)..(588): n is a, c, g, or t
atgtcggccagtaccgcccttttgaagccgaattcttccggcgttatctggtacgtgacgatttcgccgccgcgtatctccgagattttggtcgggccgcagatggatatttcgtctaaggggtcgaggccgtggactacgaaggccttttcgctgcccatgtttttgagcgcctgggccatggtctccgtgaggtccggggagaagacgccgagcagctggcttgtggtgcgcgccgggtttgccagcgggcctattatattgaatatggtccttatgccgatctgcttgcgcgccgcggcggcgtacttcatagcggcgtggaacgccggcgcgaagaggaagcctatccccagttccttaaggcaaacgccgacctgcatcggattcaggccgatgctgactcccatgctctcgaggacgtcggcgctaccgctgcggctggagatggagcggttcccgtgcttggccaccttggcccccgcgccggcggctataaacgccgcgacggtggagatgttgaaggtgttggaaccgtcgccgcccgtcccgcaggtgtctatcaggttctggcgggagcttgtgtag

SEQ ID NO: 43070 - protein, 195 aa, Unknown
  Obtained from environmental sample
  misc_feature (1)..(195): Xaa is any amino acid
MSASTALLKPNSSGVIWYVTISPPRISEILVGPQMDISSKGSRPWTTKAFSLPMFLSAWAMVSVRSGEKTPSSWLVVRAGFASGPIILNMVLMPICLRAAAAYFIAAWNAGAKRKPIPSSLRQTPTCIGFRPMLTPMLSRTSALPLRLEMERFPCLATLAPAPAAINAATVEMLKVLEPSPPVPQVSIRFWRELV

SEQ ID NO: 43071 - DNA, 1086 bp, Unknown
  Obtained from environmental sample
  misc_feature (1)..(1086): n is a, c, g, or t
atggaagttgctaacagcgttacaaaaagattcggcatattgacggcgggcggtgattgtccgggtctgaatgccgctatacgcggtatctgccgtgctgcccatgaccgttacggcatggaaattatcggtatagccaacggctttcggggtcttattgacgaagatgtcagaatactcagacctgaagatattactggtattcttacacgcggcgggacaattctcggctcaagcagggaaaaaccttttgcgcctaccagcgacgatgatgtaatagataaagtttcagcgataaaagaaacatacgcaaaacttgggctggattgcctgtcatttcttcggcgaaacggaacaacacnaacaggatataaacttcnacgcgaaggcctnacatatnncggtcttccaaaaacaattgacaatgacatnttcggcacagataaaactttcggcttcgattccgcacttaccatcggcacggaagccatcgaccgcttgcactccacggcgcaaagccacagccgtattattgttatcgagttgatgggacacaaagcgggctggcttgcgctttacgccggagtcgccggcggcgctgatgttattcttcttcccgagtttccttatgatatccgcgtaatttcccagcatgttgaaaaacgcgccaaattcggcagaatgttttctattatagttgtcgcggaaggcgctatgtccgttaaagaagcggagatggataaaaaagacagaaaaaaattacgcgcggaaagcggtccttccgtggcataccgcgtcgcccaaaaaataagcgaagagacaggcatggaaacccgcgccactgttttaggatatgttcagcgcgggggaatcccaagcgcttcagaccgcatacttgccacaagccttggaaccgccacggcggaacttcttgcgaacggcaaatacggccgcatggccgccttgcagggagaccgcatcggcgatgtagacctcagcgtccccgaaggcaaaataaaaaatgtcccgaccgatcattatatgatagaaaccgccaaagccgtcggcacatgcatgggattttaa

SEQ ID NO: 43072 - protein, 361 aa, Unknown
  Obtained from environmental sample
  DOMAIN (9)...(313): Phosphofructokinase
  misc_feature (1)..(361): Xaa is any amino acid
MEVANSVTKRFGILTAGGDCPGLNAAIRGICRAAHDRYGMEIIGIANGFRGLIDEDVRILRPEDITGILTRGGTILGSSREKPFAPTSDDDVIDKVSAIKETYAKLGLDCLSFLRRNGTTXTGYKLXREGLTYXGLPKTIDNDXFGTDKTFGFDSALTIGTEAIDRLHSTAQSHSRIIVIELMGHKAGWLALYAGVAGGADVILLPEFPYDIRVISQHVEKRAKFGRMFSIIVVAEGAMSVKEAEMDKKDRKKLRAESGPSVAYRVAQKISEETGMETRATVLGYVQRGGIPSASDRILATSLGTATAELLANGKYGRMAALQGDRIGDVDLSVPEGKIKNVPTDHYMIETAKAVGTCMGF

SEQ ID NO: 43073 - DNA, 918 bp, Unknown
  Obtained from environmental sample
  misc_feature (1)..(918): n is a, c, g, or t
atggaagaaaaaaaatgtatcgggggcttcgccgcgcagaaaaagcgaagagactccgccggaggctgtatgaacgaaagcgaatcatttaaggcgttatacgacactgtagtaaagctgaggggacccggcggctgtccgtgggatcaggagcagactccgtcctctctgcggggcgcgttagttgaagaaacttacgagtgtcttgaggccatagccgaaaataatcccgatcatgtcgccgaagaactgggagatttgtttttgctcgctaccatgatcggctatatgcatgaacaggaaggcaagtttacggtttccgactcgcttaaaaaaataaccgacaaattaatccgccgccacccccatgtgttcgcagacgtaaaagtcaaagacagcgcgcaagtgcttgaaaactgggcggcaataaaagtgaatcaggaggcccgcaagccaaaagattctattcttgatgaagtaagcggcgggcttcctcctatggatcgcgctttcaaactacagaaaaaagcggcgaaagtcgggtttgactggccggatacggaaggggtaatttcaaaaataaaagaagaattgcaagaggtaacggaagctgaaaaaaccattgcgcataacgaacaggctgaagaaacagcgtttcaagaaacagcgtttcaagaaacggagtttcaaaaaacagaactggaaaaagaacttggcgatctattgttttcggtaatcaatctatgccgttttcataaaattgacccctcggcggcgcttcaccgcaccaatttaaaatttacggaacgctttaagtatgtcgaagcaaagatgaaagagtcgggaaatgatatgaaaaaggaaaatttggaaattatggataaattttggaatgaggcaaagggtctgactacttaa

SEQ ID NO: 43074 - protein, 305 aa, Unknown
  Obtained from environmental sample
  DOMAIN (185)...(271): MazG nucleotide pyrophosphohydrolase domain
  misc_feature (1)..(305): Xaa is any amino acid
MEEKKCIGGFAAQKKRRDSAGGCMNESESFKALYDTVVKLRGPGGCPWDQEQTPSSLRGALVEETYECLEAIAENNPDHVAEELGDLFLLATMIGYMHEQEGKFTVSDSLKKITDKLIRRHPHVFADVKVKDSAQVLENWAAIKVNQEARKPKDSILDEVSGGLPPMDRAFKLQKKAAKVGFDWPDTEGVISKIKEELQEVTEAEKTIAHNEQAEETAFQETAFQETEFQKTELEKELGDLLFSVINLCRFHKIDPSAALHRTNLKFTERFKYVEAKMKESGNDMKKENLEIMDKFWNEAKGLTT

SEQ ID NO: 43075 - DNA, 402 bp, Unknown
  Obtained from environmental sample
  misc_feature (1)..(402): n is a, c, g, or t
ttgatggcgaggagccacgatgaattggaacttccccttgngacattatcgttaaaattttcaggcggtcttggagggcacaatgggcttcgctccatgaaaaaagttttcgggaacgcggatttttggcggcttcgaatcggcatcggccgccccgactcgcgcttgccgggagagggcgggcatgcgggtagcggagaaggagtatatgactgggtgctttcggatttttccggggcggagagggaaatacttaacccggcgcttgatgccggagcggggcttttacagcagttgatttcaagcgagccggaaactttgcttgacgaatggaagaaaaaaaatgtatcgggggcttcgccgcgcagaaaaagcgaagagactccgccggaggctgtatga

SEQ ID NO: 43076 - protein, 133 aa, Unknown
  Obtained from environmental sample
  DOMAIN (1)...(113): Peptidyl-tRNA hydrolase
  misc_feature (1)..(133): Xaa is any amino acid
MMARSHDELELPLXTLSLKFSGGLGGHNGLRSMKKVFGNADFWRLRIGIGRPDSRLPGEGGHAGSGEGVYDWVLSDFSGAEREILNPALDAGAGLLQQLISSEPETLLDEWKKKNVSGASPRRKSEETPPEAV

SEQ ID NO: 43077 - DNA, 1191 bp, Unknown
  Obtained from environmental sample
  misc_feature (1)..(1191): n is a, c, g, or t
atgagcggcttttaccggcgggcgctcagcaaacttaacaggctcaaccttgagcagtgccgggaattgcttgtatcggcttcacaggaaatcttccgtcttgataccgttcttgattctctgccctgcggcatacttgtatgcgatgaaaaacaccgtttgctcatggcgaataaagccgccctgcgttttctgcccatgagttacacggaaggcgaacttttgtgggagcttcttcccgatgaacctgtagcgaatttttttcaacaggttttaaaacacggcgacagggtgctggagcatgaaatggatatccagacgcaagggcctccgggcccgaaccgtctgctctcgatcagcgtacacccgcttgtcgagaagcggcatataaccggctccctcgtatatatggaagatataaccgagaagcggggcagggaagtaaggcttcgccgcgctgaaaatcttgccagccttaccacgctcgccgcgggcgtcgcccacgagataaagaacccgttaggggctatttcaatccacctccagcttttacggaaagctctcaataaaaaggaaaaacaacaggaaccggagacagacgcgttagtcgataaatatttttccgtgttaaacgaagaagtagaccggttgaacggcatagtcattgattttttatttgccgtacgccccatgtcactggaactctgcgaaggagacctcaacgcgctgattgccgggcttggcgaatttatacaggcggaactggagcagtccaatatacggctcctgcttgaacttgacgaaaaccttccccccgtgcttttcgacgagcgttatatgaaacaggttctgcttaaccttataaaaaacgcccaggccgccatgccaaagggggggcttttaaccattgcctcttttgggtcggacaacgagatacggataagcgtatgcgataccggcacggggattagcaaggaaaaccttaaaaaaatatttgagccttatttcacgacaaaaagcaacggcacgggtcttgggctgacccttgtatataaaattatcagggaacatcagggcgagatgtcggttgattcgcgggaaggggaagggactgattttgagatcatccttcctgtctatcagaaaaaacagaatttgatcaattattcaggggcaaaaaatgaagtttaa

SEQ ID NO: 43078 - protein, 396 aa, Unknown
  Obtained from environmental sample
  DOMAIN (32)...(140): PAS fold
  misc_feature (1)..(396): Xaa is any amino acid
MSGFYRRALSKLNRLNLEQCRELLVSASQEIFRLDTVLDSLPCGILVCDEKHRLLMANKAALRFLPMSYTEGELLWELLPDEPVANFFQQVLKHGDRVLEHEMDIQTQGPPGPNRLLSISVHPLVEKRHITGSLVYMEDITEKRGREVRLRRAENLASLTTLAAGVAHEIKNPLGAISIHLQLLRKALNKKEKQQEPETDALVDKYFSVLNEEVDRLNGIVIDFLFAVRPMSLELCEGDLNALIAGLGEFIQAELEQSNIRLLLELDENLPPVLFDERYMKQVLLNLIKNAQAAMPKGGLLTIASFGSDNEIRISVCDTGTGISKENLKKIFEPYFTTKSNGTGLGLTLVYKIIREHQGEMSVDSREGEGTDFEIILPVYQKKQNLINYSGAKNEV

SEQ ID NO: 43079 - DNA, 1158 bp, Unknown
  Obtained from environmental sample
  misc_feature (1)..(1158): n is a, c, g, or t
atgaagtttaaactccttgttgtagatgatgaaaaaaacatccgtgaggggcttgccgcctcccttgaaatggacggctacaatacggtctgcgccgcgagcggtgacgaagcgtgggagctttattgcaagggcgacatagacctggttattaccgaccttcgtatgcctggcatggacggcgaggaacttatgcgcagaatactggccgaaacccccggcctgccggttatcatactcaccgggcacggcaccatagaaaacgccgtcagcgccatgcacgacggggcatgggatttccttaccaagcctgtcaacctggatcatcttggaatgctggtaaagcgggcgcttgaaaacagggaacttgtactgcgtcaccgggaactgcangccgatctggagcggggccgcctctcatccagcatgataggcaagtcaaccgttatgcgaaaagtctttgacacgataaaccgtgtcgccccctccaaagcctcggtattgattacgggcgaatcgggggttggcaaagaactggtcgccgacgccatccacgagctttcaccccgcaagggcaagcccatggttaaagtgcactgtgccgcgcttgcggcaaacctccttgaaagcgagttattcggccatgagaaaggggcgttcacaggcgcggtttcgcgtcggcggggacgttttgagctcgcgaacggaggaacgctttttcttgacgagataggcgagatagaccagaacatacagataaagcttctgcgtgttttacaggaacatcagtttgagcgtgttggcggggaagaaacccttgaaaccgatgtacgcattgtcgccgcgaccaacaaagacctcaaagccgaaatagaaaaaggcaatttccgcgaggatctttacttccgccttaatgtagtgagcatccacgttcctccgttacgcgaaagaaaagacgacattccccttatggctgccagctttctaaaagaaatcgccgctgaaaacaacaaaaccatcgaaggcatccatgaaaaagcgtattcacggctttacgcctacgactggccaggcaatatccgcgagcttcgcaactgcatcgaaagcgccgtggtcatgtgccgcaaacccatcatcgccgggactcggcctatctga

SEQ ID NO: 43080 - protein, 385 aa, Unknown
  Obtained from environmental sample
  DOMAIN (166)...(314): ATPase family associated with various cellular activities (AAA)
  misc_feature (1)..(385): Xaa is any amino acid
MKFKLLVVDDEKNIREGLAASLEMDGYNTVCAASGDEAWELYCKGDIDLVITDLRMPGMDGEELMRRILAETPGLPVIILTGHGTIENAVSAMHDGAWDFLTKPVNLDHLGMLVKRALENRELVLRHRELXADLERGRLSSSMIGKSTVMRKVFDTINRVAPSKASVLITGESGVGKELVADAIHELSPRKGKPMVKVHCAALAANLLESELFGHEKGAFTGAVSRRRGRFELANGGTLFLDEIGEIDQNIQIKLLRVLQEHQFERVGGEETLETDVRIVAATNKDLKAEIEKGNFREDLYFRLNVVSIHVPPLRERKDDIPLMAASFLKEIAAENNKTIEGIHEKAYSRLYAYDWPGNIRELRNCIESAVVMCRKPIIAGTRPI

SEQ ID NO: 43081 - DNA, 972 bp, Unknown
  Obtained from environmental sample
  misc_feature (1)..(972): n is a, c, g, or t
ttgcgcgaccttcccgcgttacgcgccattaagaaacggataaacactttggaaaaagaacttgataaagcggtttccggttatgtcgctaacgaggattataagcgtatgctgcaatcgccgctgccgtcgcaaagggacggaagggctgtgcttgcggtaaaggtgaattttcgcggaagaatccccggcattttgcatgaagtgtcgtccagcgggcagactgtctttgtggagccgcttgatgttgtggataaaaacaatgaaatcttagtggaaaaaagaaatctggacgcggaagtgcaaaaaatcctgcgcgagcttacggaaaatatttccgttcacgcggagagtctaaaaaagtttcaccaaacaattatcgagcttgaatgtttaagagctaaggcaaggtattcggcggaaaccaaaggacactttgcgctgaatactgatacagggcaaagtcttttgttaaaacaggcgcgccaccctatgctgaaaaaagcggttcccatcaatatagaaatgggcagttctatccgcacattgattatcaccggtcccaacacgggcggaaaaacggtagcgttaaaaacgctcggtctttttgccatgatgaatcagagcgctcttgccctgccgcttgacgaggggagcgtacttcccatttttgacggaatattcgccgacatcggcgacgagcagtcgattaatcagatcgctttccactttttccgcccacataacaaatgtcgccgccatcgatcgcccattccacggaaaattccctcgcgcttctgtgacgagcttggctccggcacggatccccaggaaggcggcgcgattgcgatggcggtgcttgaccgcctgattgacaagaaagcccgcctgttaatcaccactcaccacggcatcctgaaaaattaccgctacgcaaagggagcgaacgttgaccaatcgcctccgatgtga

SEQ ID NO: 43082 - protein, 323 aa, Unknown
  Obtained from environmental sample
  DOMAIN (151)...(320): MutS domain V
  misc_feature (1)..(323): Xaa is any amino acid
MRDLPALRAIKKRINTLEKELDKAVSGYVANEDYKRMLQSPLPSQRDGRAVLAVKVNFRGRIPGILHEVSSSGQTVFVEPLDVVDKNNEILVEKRNLDAEVQKILRELTENISVHAESLKKFHQTIIELECLRAKARYSAETKGHFALNTDTGQSLLLKQARHPMLKKAVPINIEMGSSIRTLIITGPNTGGKTVALKTLGLFAMMNQSALALPLDEGSVLPIFDGIFADIGDEQSINQIAFHFFRPHNKCRRHRSPIPRKIPSRFCDELGSGTDPQEGGAIAMAVLDRLIDKKARLLITTHHGILKNYRYAKGANVDQSPPM

SEQ ID NO: 43083 - DNA, 444 bp, Unknown
  Obtained from environmental sample
  misc_feature (1)..(444): n is a, c, g, or t
atggaggttcttgcgggcgagtccaaacggcgcggggttcttgtccgccttgataaaaagacatcagccggcaataactggatagtggaaataggctcgcttaaaataagttttcccgaacaggaacttgtcccggttgccgcgagccgcaagcctcccaaacctcttgccgcgcagttggatttggcgggggctcccacagcgcgcgccgaaatcaacctttgcgggatgaggcttgaagaggcgcttgaggcgctgcgccgccagacagaagcggccatgctggccggactgaagacatttgccgttatccacggcaagggagacggcattttgcaaagaggcgtgcatgagtggctgaagaaagatcccttcgtcgcggactactttttttcccaccctgaactcggcggcttcggcagaacggaagtggtgttgaaatga

SEQ ID NO: 43084 - protein, 147 aa, Unknown
  Obtained from environmental sample
  DOMAIN (72)...(147): Smr domain
  misc_feature (1)..(147): Xaa is any amino acid
MEVLAGESKRRGVLVRLDKKTSAGNNWIVEIGSLKISFPEQELVPVAASRKPPKPLAAQLDLAGAPTARAEINLCGMRLEEALEALRRQTEAAMLAGLKTFAVIHGKGDGILQRGVHEWLKKDPFVADYFFSHPELGGFGRTEVVLK

SEQ ID NO: 43085 - DNA, 321 bp, Unknown
  Obtained from environmental sample
  misc_feature (1)..(321): n is a, c, g, or t
atgctttacacacacggaaaaacggattgtaagccgggtgaagtcggctatgatgaacaacggcttgacgtgctgaacagccaccttcagcgcctcattgatgacggtgaaatacaatgcgcgacctattgcgtctcacgcaagggcaaaattttcgcgcacggcgcaatcgggaaaaaatcgttccgtaaggatgacaataccccggttcagccggattccgtgcggtacatagcttcgactacaaaaacatttaccgctgtggcgataatgcagcttgtcgaaaacnggcttaatgcggctggaccagccggtaggtga

SEQ ID NO: 43086 - protein, 106 aa, Unknown
  Obtained from environmental sample
  misc_feature (1)..(106): Xaa is any amino acid
MLYTHGKTDCKPGEVGYDEQRLDVLNSHLQRLIDDGEIQCATYCVSRKGKIFAHGAIGKKSFRKDDNTPVQPDSVRYIASTTKTFTAVAIMQLVENXLNAAGPAGR

SEQ ID NO: 43087 - DNA, 360 bp, Unknown
  Obtained from environmental sample
  misc_feature (1)..(360): n is a, c, g, or t
atgcgtaacttgacatgtattgtctgtccaatcggttgctcgcttgctgtaaatgaagactcaagcggaaatttatccgtaacaggaaaccgctgtctccgaggggaactttacgcgaaagaggaaatccgcgcgccaaaacgcactgtaaccgccacctgccggattgataaagactcaggctttgttaaaaggattccggtaaagacagcttctccttgtccgcgagagaaaattcacgatttgttagatgacatttataaattaaaagtcgccttgcctgtgaaaaccggggatgttttgattgaagactggaagggcgaagggattaatgttgtcgcgaccaggacgattggctaa

SEQ ID NO: 43088 - protein, 119 aa, Unknown
  Obtained from environmental sample
  SIGNAL (1)...(18)
  DOMAIN (2)...(116): Protein of unknown function (DUF1667)
  misc_feature (1)..(119): Xaa is any amino acid
MRNLTCIVCPIGCSLAVNEDSSGNLSVTGNRCLRGELYAKEEIRAPKRTVTATCRIDKDSGFVKRIPVKTASPCPREKIHDLLDDIYKLKVALPVKTGDVLIEDWKGEGINVVATRTIG

SEQ ID NO: 43089 - DNA, 753 bp, Unknown
  Obtained from environmental sample
  misc_feature (1)..(753): n is a, c, g, or t
ttgataaaagccgcggcggaaaaaggagtaaggctcggcggagcgccggataccttcatgggagccggtctccagacctgcagaaaacttatagacgacggctggattggcgcgcccgtagcagcgacggctgcaatgatgaaacgcggccctgaacactggcatcccgatcctgaatttttctacaaagaaggcggcggcccgatgttcgacatgggaccgtactacataaccgctctggtcagtcttttagggcctgtttccagagtttccggcagcgcgaaaataaccagcccggttcgtactatcaaaaacaagcaacaatacggcgttgttataaatgtggaagttcccacgcacatcgccggcgtccttgatttcgcaagcggcgcggtcggcactattgtaacaagtttcgacgtacattcgcataccttgcccttcatcgaaatttacggaaccgaaggcacgcttaaagtccccgatcccaacaccttcggcggtcctgtaattgtccgtcgtttcaacgaagaagaatggtacaaaataccgctgttaaaggcgtatcctgaaaattccagaggactgggaattaccgacatggcggaagcaattgaagaaaaccgcccccaccgcgcctgtgtcgagatggcttaccatgtgctggacataatgcacggcatacacgacgcctcatctgccggaaagcacattaaactcaaaagcaaatgcaaacgccccgccgcgtgttag

SEQ ID NO: 43090 - protein, 250 aa, Unknown
  Obtained from environmental sample
  misc_feature (1)..(250): Xaa is any amino acid
MIKAAAEKGVRLGGAPDTFMGAGLQTCRKLIDDGWIGAPVAATAAMMKRGPEHWHPDPEFFYKEGGGPMFDMGPYYITALVSLLGPVSRVSGSAKITSPVRTIKNKQQYGVVINVEVPTHIAGVLDFASGAVGTIVTSFDVHSHTLPFIEIYGTEGTLKVPDPNTFGGPVIVRRFNEEEWYKIPLLKAYPENSRGLGITDMAEAIEENRPHRACVEMAYHVLDIMHGIHDASSAGKHIKLKSKCKRPAAC

SEQ ID NO: 43091 - DNA, 954 bp, Unknown
  Obtained from environmental sample
  misc_feature (1)..(954): n is a, c, g, or t
atgaccgcgacatatgacggaacacagacaccggagggcagaaccaaaaacatgacgagagctataaggccacncttgtctaacaatgaggccatctttcattttttgaagaaatacatcgccgaaccgtggacggctaatatctcggcagacgacatcgagcggatagataagagctttatcaccaaagagtacagccatatagattccgacttaatatacaagttgaagataggcggctccgacgtatatttttatgtattgcttgaattacagtcgcaagtcgattttacaatgccataccggcttctaagatatatggttgagttattaaccgacatatttaagaatacggataaggatgtcagggaacgcaaagaattcaggcttcccgccatcttgccgataattctgtacaatggttacgataactggacggtagtcaagacgtttcgcgagtacacaaaggattatgaaaaattcggtaacaatattattgattttcaatatctactgtttaacctgaaacagaaagatgaaaaaacaatattaccggtagagaacgtattggatgcctttttttcgctagataaacggcggcttgaaaaacggctatcccctaaagagttcgtagattggtgggctgaacaagcgccgcatttgtccacagatgatagaaatacgctcattaactatgtagagcgtgtcctatatagaggcaaaatatcgccaaaagagatggaaaaccttaaaaaatccttagaaaagggagacattatgacgatgacacacgggcttgcggcttggagagacgagatgatcgacgaggcgacacgcgaggcgacacataaggaggatatcaaaatcgcagacaaacttaaacgtgaaggtgtggatgtggacaccatagcgagagttacagggctcacggtcgacgaaatcctccaactctga

SEQ ID NO: 43092 - protein, 317 aa, Unknown
  Obtained from environmental sample
  DOMAIN (27)...(297): Putative transposase, YhgA-like
  misc_feature (1)..(317): Xaa is any amino acid
MTATYDGTQTPEGRTKNMTRAIRPXLSNNEAIFHFLKKYIAEPWTANISADDIERIDKSFITKEYSHIDSDLIYKLKIGGSDVYFYVLLELQSQVDFTMPYRLLRYMVELLTDIFKNTDKDVRERKEFRLPAILPIILYNGYDNWTVVKTFREYTKDYEKFGNNIIDFQYLLFNLKQKDEKTILPVENVLDAFFSLDKRRLEKRLSPKEFVDWWAEQAPHLSTDDRNTLINYVERVLYRGKISPKEMENLKKSLEKGDIMTMTHGLAAWRDEMIDEATREATHKEDIKIADKLKREGVDVDTIARVTGLTVDEILQL

SEQ ID NO: 43093 - DNA, 483 bp, Unknown
  Obtained from environmental sample
  misc_feature (1)..(483): n is a, c, g, or t
ttgatcagatcggccgagatattagccggaaaatgtatcgggtgccgaagctgcgaagtcatctgttcctggaacagggggaagaattttaatccccggaactccgcggtttcggtacttaactacgaagaggcggttatctcggtgccggtaatgtgcctgcaatgcgaggaagcctgctgcgtcaaggtttgcccagtgggggctatgcacaaggatgagaacggcgttgtaaagaccgacgccaacaagtgcatagtctgcaagatgtgcgttaacgcctgccctctggggaatgtctcattcagccaatcaagccgaaaaattgtcaagtgcgaactctgcgacggagatccgggatgcgccaaatactgcccggcgggctgtctggtatataccgaagaagaagacggcctgggccggaaaagggctatagctctttctcttaaaaatatttttgggcaagaggaggcggcaaaatga

SEQ ID NO: 43094 - protein, 160 aa, Unknown
  Obtained from environmental sample
  DOMAIN (78)...(101): 4Fe-4S binding domain
  misc_feature (1)..(160): Xaa is any amino acid
MIRSAEILAGKCIGCRSCEVICSWNRGKNFNPRNSAVSVLNYEEAVISVPVMCLQCEEACCVKVCPVGAMHKDENGVVKTDANKCIVCKMCVNACPLGNVSFSQSSRKIVKCELCDGDPGCAKYCPAGCLVYTEEEDGLGRKRAIALSLKNIFGQEEAAK

SEQ ID NO: 43095 - DNA, 1803 bp, Unknown
  Obtained from environmental sample
  misc_feature (1)..(1803): n is a, c, g, or t
atgaacgcatggacaggaaaactgctgcggattaatttaactaccggggatattaaaaaagagcccctcaatatgaaagacgccaatgaatttgtaggcgcgcgcggtttaggcacgaagatctactgtgatgaagtcaatcccaaaattgatcccttcagcccggacaataaaatcatctatatgaccgggcctctgaccggaaccttcgccgcctgcccggggcgctacgaagtggtaaccaaggctcctctgacaggcaccatcggcgcggccaattcaggcggccactttgggccggaactcaagtttgcgggctacgacgggatcatcgtggaaggggccgctaaaaagccggtctacatttatatcaacgatgataaggtagagattcgcaaggcggatcatctttggggcaaaaaagtcccggaaaccacggatgcgctcaacgcggaaacttccccggatgcccgtatagcctgtattgggcctgccggtgaaaaccaagttctctacgccgggattatgaacgacaaacaccgtgccgcgggccgtgggggtcttggggcggtgatggggagcaagaagctcaaggccatagcggtaagaggatcgggcagtgtaaccgtagcccggccggaaaagttcatggcggcggcggttgacgcgagggccaagctcaaggctcaccctgtggctggtaccgggcttcccgcctacggaaccaacgtgctggtgaacatcatcaactcccagggcgcgctgcccaccagaaactggagggacggcggcgaatttgaaactgccaacgacatcggcggtgaaagcctcgccgagaaattccttgtcaagaacaagggctgttttggctgctccattggttgcggaaggcttagtagggtcagtgacggccccttcgcctcccagggtgaaggccccgaatacgaggcagcctgggcttacggcgcgtcttgcggggtaaacgatctggcggctatttgcaaggcgaactttctctgcaacgaatatggcatggatcccatcacgttaggcgctaccatcgcgtgcgctatggagatgtacgaaaaaagaattcttaccgaaaaggaaatcgggcggcccttgccctttggcgatgccgaagggattgtggttctcactgaacttgtcgggaaattcgaaggcttcggcaaaaaactcgcccagggttcctggcgtatggctaatgaagaaggcgcggcggagctttcaatgtccgccaaaaaacaggagatgcccgcttacgacggcagagccgcgcagggaatgggcctggagtacgccacgagcaaccggggcggctgccatgtccgaggttacatgacctcgcctgaattgctgggtgtgccgttgaagatggatccccttgttaccgaaggaaaagccggaatgctcaaagtattccaggacctcaccgccctggtggattctctgggcgtctgcctctttactaccttcggcctgggattaccggaactttcggcgcagtaccgggaagcggttggcagcgacgagagcgacgaggagatcctccttaaaggagagagggtctggaatattgaaaagcagttcaatatacaggccggggttgagaaagataccctaccgcccagacttcttcgggaagccctgccctccggcgcggccaaaggtaaagttactcagcttgaagtcatgctcaaggaatattattcactccggggttggagtgctgaaggcgcgccgaccaaggaaaaacttggggcgctgggattgaaaggttag

SEQ ID NO: 43096 - protein, 600 aa, Unknown
  Obtained from environmental sample
  DOMAIN (4)...(206): Aldehyde ferredoxin oxidoreductase, N-terminal domain
  misc_feature (1)..(600): Xaa is any amino acid
MNAWTGKLLRINLTTGDIKKEPLNMKDANEFVGARGLGTKIYCDEVNPKIDPFSPDNKIIYMTGPLTGTFAACPGRYEVVTKAPLTGTIGAANSGGHFGPELKFAGYDGIIVEGAAKKPVYIYINDDKVEIRKADHLWGKKVPETTDALNAETSPDARIACIGPAGENQVLYAGIMNDKHRAAGRGGLGAVMGSKKLKAIAVRGSGSVTVARPEKFMAAAVDARAKLKAHPVAGTGLPAYGTNVLVNIINSQGALPTRNWRDGGEFETANDIGGESLAEKFLVKNKGCFGCSIGCGRLSRVSDGPFASQGEGPEYEAAWAYGASCGVNDLAAICKANFLCNEYGMDPITLGATIACAMEMYEKRILTEKEIGRPLPFGDAEGIVVLTELVGKFEGFGKKLAQGSWRMANEEGAAELSMSAKKQEMPAYDGRAAQGMGLEYATSNRGGCHVRGYMTSPELLGVPLKMDPLVTEGKAGMLKVFQDLTALVDSLGVCLFTTFGLGLPELSAQYREAVGSDESDEEILLKGERVWNIEKQFNIQAGVEKDTLPPRLLREALPSGAAKGKVTQLEVMLKEYYSLRGWSAEGAPTKEKLGALGLKG

SEQ ID NO: 43097 - DNA, 516 bp, Unknown
  Obtained from environmental sample
  misc_feature (1)..(516): n is a, c, g, or t
ttgtttaatatagaagaggaaccattggaaaatgacgcaaaccccgttcggatagacgttcctcgcggcgaaggcaaagtaatgtcctggaattcaaccgttgaattccagcgtctttacgattcggcgtttaatattttgcttagggttgcttttcggattaccaacaactgggaagcggctgaagatatttgtcaggaaagtttttttcgtttatacgaaaaaaatatggtgttcccgagtcaggaagaggcaaaatactggctgattcgcgtagtaaaaaacgcggcgttaaattacgcaaaaagaaaagaacgggaacgaaaagcgtatcaacgcgcctttcgcgaagaccacaggcaggaggaaaccggagagggtttgcttgtaaaaaaagaaaccagcgaagaagtaaaaagcgcactggaaaaactgccggaaaatttgcgtatggtattgatactaaaagagtatgcggaaatgaattataaggagattggaaaacgcttggcataa

SEQ ID NO: 43098 - protein, 171 aa, Unknown
  Obtained from environmental sample
  DOMAIN (39)...(107): Sigma-70 region 2
  misc_feature (1)..(171): Xaa is any amino acid
MFNIEEEPLENDANPVRIDVPRGEGKVMSWNSTVEFQRLYDSAFNILLRVAFRITNNWEAAEDICQESFFRLYEKNMVFPSQEEAKYWLIRVVKNAALNYAKRKERERKAYQRAFREDHRQEETGEGLLVKKETSEEVKSALEKLPENLRMVLILKEYAEMNYKEIGKRLA

SEQ ID NO: 43099 - DNA, 597 bp, Unknown
  Obtained from environmental sample
  misc_feature (1)..(597): n is a, c, g, or t
atgtgtcctgatccacaacttctatcaatttatgttgacggcgagcttccgtccccatggaacgaaaaaatggacgtccatttaaaggactgccctgcttgcagggaaaaactggaaagttttaaaaaacttcgtgaattaatcgccaaagaattaccggcaaaagaaataaacgaaacggaaattcaaacctccaaagaaaaaatttggcgtaacatagaggcaaaacggcgttttgcgccgcatccggcgaaagtatggcagcgcaggatttccatctctattcctgccgccgccgcagccgcgattataatcgcgctgattacaatatttatctcaggcggcggacaaattttaaataacggattcgccggcaaaaaagcaaaccatgacgaaagatcaaacatcattcttgcggcggaagaagaaatccccggaattatacctgcggcgacagacttaaacgacgttcttcaatatttaggcgcagacagttccgatataattattttacggcttcctgaaagcagaaatttctcccgagtcggagaaccggcaataattagagccgccgactattcaaggagccgcccgtaa

SEQ ID NO: 43100 - protein, 198 aa, Unknown
  Obtained from environmental sample
  misc_feature (1)..(198): Xaa is any amino acid
MCPDPQLLSIYVDGELPSPWNEKMDVHLKDCPACREKLESFKKLRELIAKELPAKEINETEIQTSKEKIWRNIEAKRRFAPHPAKVWQRRISISIPAAAAAAIIIALITIFISGGGQILNNGFAGKKANHDERSNIILAAEEEIPGIIPAATDLNDVLQYLGADSSDIIILRLPESRNFSRVGEPAIIRAADYSRSRP

SEQ ID NO: 43101 - DNA, 894 bp, Unknown
  Obtained from environmental sample
  misc_feature (1)..(894): n is a, c, g, or t
ttgtttttggtttactgcgtgttaacatttttacttttcattctgtacctgataggcgggatgaactggtttgaagccgtctgccaaagtttgacagcccttgctacaggcggaataaatgtcagaaacaagggtatcgaagcgtggaattcaccgtttattgacggcgttaccacagtatttttgctccttgccgggataaactttaacctttactgccgcatccttcagagaaaatttacggaaataaaaaataacatcgaacttaaagcctatcttggcattttcgccgttgccgcgataattatcactgtttcgcttgtgccggtttacggctctgtccccggcgcgttccgtcacgcgtcatttcagagcgcgtccgttctttccacggcgggcaatacaaccgtaaactatgaacaatggccttctttggcgagaatggtcctttttattctgatgtttataggcggatgttccggctctacggcgggaggaataaaagttatacgccatgtcattctttggaaacagataaaaaacgaaactcagcggatgctttaccctcagggtattttcaggatacagattaacaaccgcgtggggcgcaacgacgtagtgtacggggtatcgggatttatcttcatgtatctttttgtaatcatgattgttacgctgattaccgcggcatcgggaatcgatctcttttcctcgttaagcgcgccctttcattacgggaatatcgggctgggatttggagcaatcggcatagggcataattacagcgcttttgcggatcatatcaagtggcttttttcatttgtaatgctcgcgggccggcttgaaatgtggactgtgtttattttatttacgcgaatatattggcggaagtaa

SEQ ID NO: 43102 - protein, 297 aa, Unknown
  Obtained from environmental sample
  DOMAIN (1)...(295): Cation transport protein
  misc_feature (1)..(297): Xaa is any amino acid
MFLVYCVLTFLLFILYLIGGMNWFEAVCQSLTALATGGINVRNKGIEAWNSPFIDGVTTVFLLLAGINFNLYCRILQRKFTEIKNNIELKAYLGIFAVAAIIITVSLVPVYGSVPGAFRHASFQSASVLSTAGNTTVNYEQWPSLARMVLFILMFIGGCSGSTAGGIKVIRHVILWKQIKNETQRMLYPQGIFRIQINNRVGRNDVVYGVSGFIFMYLFVIMIVTLITAASGIDLFSSLSAPFHYGNIGLGFGAIGIGHNYSAFADHIKWLFSFVMLAGRLEMWTVFILFTRIYWRK

SEQ ID NO: 43103 - DNA, 1299 bp, Unknown
  Obtained from environmental sample
  misc_feature (1)..(1299): n is a, c, g, or t
ttgaagagtcccgaaaagtacaaagagatcggcggcaagatacccaaaggcgtgcttttggttggaccgccgggaacgggaaaaactttgctggcaagggctgtcgcaggcgaggctggagtttccttcttccgcatgagcggagccgactttgtggaaatgtttgtcggcgtcggagcggctcgtgtgcgtgatttattcaaacaggcaagaaacaaagcgccctgtattatttttattgacgagttagacgccattggcaaaagcagaataaacaacattgcgggcggcaatgacgaacgtgaacaaacgcttaaccaactccttgtagaaatggacggttttgacggcactagcgggcttattattctcgccgccacaaacagacccgacgtattagaccccgctctcctgcgccccggacgctttgatcgtcaggtgcttgtggacaaacccgatcttaaaggcagagaggcgatcttaaaaattcattccaagcctgtaagacttgatcccgccgtagaccttgaagttgtcgctcgtataacatcgggtttttccggcgcggatttggcgaacattgtaaacgaagccgctcttctggcggtcagggcggggcggaaaatggtcacgcagcgtgatttcagcgaagcgatagaaaaaaccgtagccggtttgcagaagaaaaccagggtaatcaaggaagaagaaagaaggcttaccgcctatcatgaagccggccacgcgatggtcgccgcttttacacctaacgccgaccctgttcagaaaatttcgattattccgcgcggctttgcgcttggatacacattgcagcttccgctggaagaccgttatacggttacaaagtccgaccttttgggaaggatagacattcttcttggcgggcgcattgccgaagaaatgatttccggcgaatattccacaggcgcggcaagcgatcttaccaaagcgaccgacattgctcgcaagatgattaccgactacggcatgagcgaccgtttccgcaatgtcgcgcttacttcgcgcggcatgagcatgaccgggcaggagagacaggaaccgtcttttcagcgcgaatacgcggaaagcacccagcagtatgttgatgaggagattgcgcggattatcgacgttgagtacgcaaaggcaaggaagatactggaagaaaggcgcgatattttggatagtgtttcttccgcgctgcttgaaaaagaaactcttgacgaaaaggaattcaaaggattaatcggacttacttccgccaatatattcgcgtaa

SEQ ID NO: 43104 - protein, 432 aa, Unknown
  Obtained from environmental sample
  DOMAIN (17)...(151): ATPase family associated with various cellular activities (AAA)
  misc_feature (1)..(432): Xaa is any amino acid
MKSPEKYKEIGGKIPKGVLLVGPPGTGKTLLARAVAGEAGVSFFRMSGADFVEMFVGVGAARVRDLFKQARNKAPCIIFIDELDAIGKSRINNIAGGNDEREQTLNQLLVEMDGFDGTSGLIILAATNRPDVLDPALLRPGRFDRQVLVDKPDLKGREAILKIHSKPVRLDPAVDLEVVARITSGFSGADLANIVNEAALLAVRAGRKMVTQRDFSEAIEKTVAGLQKKTRVIKEEERRLTAYHEAGHAMVAAFTPNADPVQKISIIPRGFALGYTLQLPLEDRYTVTKSDLLGRIDILLGGRIAEEMISGEYSTGAASDLTKATDIARKMITDYGMSDRFRNVALTSRGMSMTGQERQEPSFQREYAESTQQYVDEEIARIIDVEYAKARKILEERRDILDSVSSALLEKETLDEKEFKGLIGLTSANIFA

SEQ ID NO: 43105 - DNA, 948 bp, Unknown
  Obtained from environmental sample
  misc_feature (1)..(948): n is a, c, g, or t
atgaccgaaaccgcggcggctatcaatcaaatcaccgccaatatccagagtatcaagggcagggtaataaaccagagcgcgagcgtaaccgaaacaaacgccacaatggaacaggttatcgccaacatcaacaaactaaacagccatgtggaaaaccagagccgtaacgtttcacaggcttcatcagcgattgaggaaatggtagccaatatcaattctgtaaccaacacgctgattaacaactccgccaatgtaaagaccttacaggaagcctccgaagtgggaaaaaccggattacaggaagtggccgccgacattcaggaaatagcccgcgagtccgagggccttatggaaattaactcggtaatggaaaacatcgccagccagaccaacctgctttcgatgaacgcggcgatagaagcggcccacgcgggagaggcggggaagggctttgccgtagtagcagacgagatacgcaaacttgcggagagttccagcgagcagtccaagaccatcggcaatgttttgaagaagataaaatcatcgatggacaagataaccaaatccaccgaggtcgtactgaccaggttcgaggcgattgactcgggcgttaagacggtggcggatcangaagaaaatatccgcaacgcgatggaagaacagggcgaaggaagcaaacaggtactgaacgctcaaagcagtttaagcgagcttacacagcaggtaaaaagcggttcggaggaaatgcttaacggcagtcaggaagtaatgaaggaaagccagaaccttgaaaaggtaacgcaggaaataaccggcggtatgaacgagatggcgagcggagcggatcagataaatgtagcggtacacaatgtcaacgagatgacccagaagaaccgtgacgccattgacagtttgataaaagaagtttcgcgcttcaaggtagaatga

SEQ ID NO: 43106 - protein, 315 aa, Unknown
  Obtained from environmental sample
  DOMAIN (51)...(271): Methyl-accepting chemotaxis protein (MCP) signaling domain
  misc_feature (1)..(315): Xaa is any amino acid
MTETAAAINQITANIQSIKGRVINQSASVTETNATMEQVIANINKLNSHVENQSRNVSQASSAIEEMVANINSVTNTLINNSANVKTLQEASEVGKTGLQEVAADIQEIARESEGLMEINSVMENIASQTNLLSMNAAIEAAHAGEAGKGFAVVADEIRKLAESSSEQSKTIGNVLKKIKSSMDKITKSTEVVLTRFEAIDSGVKTVADXEENIRNAMEEQGEGSKQVLNAQSSLSELTQQVKSGSEEMLNGSQEVMKESQNLEKVTQEITGGMNEMASGADQINVAVHNVNEMTQKNRDAIDSLIKEVSRFKVE

SEQ ID NO: 43107 - DNA, 348 bp, Unknown
  Obtained from environmental sample
  misc_feature (1)..(348): n is a, c, g, or t
atgcttaacaaatataaggacaagcatacaaaaaaagaaacgggtcaaatggttgaagaaatgctgatatatattttgaataacggcagtactattcaggtgttgttaagcgaaaacggcgatattggttttcaaaaaaaattgttataccattttattatgcataatcagataacgaagtatttttcagaaaagcagaacgatgaaacaaagtcctattattcggtttttcttgtacatggctctatcggtttgattcagcactggcttaaagaaaatttggctatgccgattccgcagttggcgaagatgttgatgaaatggacggaacatcagatcaagttttaa

SEQ ID NO: 43108 - protein, 115 aa, Unknown
  Obtained from environmental sample
  misc_feature (1)..(115): Xaa is any amino acid
MLNKYKDKHTKKETGQMVEEMLIYILNNGSTIQVLLSENGDIGFQKKLLYHFIMHNQITKYFSEKQNDETKSYYSVFLVHGSIGLIQHWLKENLAMPIPQLAKMLMKWTEHQIKF

SEQ ID NO: 43109 - DNA, 780 bp, Unknown
  Obtained from environmental sample
  misc_feature (1)..(780): n is a, c, g, or t
atgaagcgcaggtttgccgttttatttttttttaccttcgttatcccctgtgttttttctgtcccgcttgaggaactgacagggtctgaaaacgctaaccggctgcgttcaggctctgtttcagagactcagatggggaaacccgtgctaaaattactgcccgctttgcctgaattacggcaatttgtagtcaattccataaccgcccttgaacctactctggcggtcgagacgctgtacctttataaaaaaccgggttctaccgccgcttgggacgattccgggcgggccgccttattcaatcaaatgctggctatcggtacccttaccggtattgagtacttttccgcaagccgtaacgccatgaggactttttacgaatattccgcggttatagactcgccgtcgtccaaaaaaccgcttcctgaccctgtttttgaacagccgccggctcaatataccctttacgcaaggcaaaaagaccttacttttggggataatatttaccgttacgaatacaactcggcggaaaatgccttattttttattcaggagaatatgacctcccttacttacgggataatcccggcggttggcaaaaacaggcttaggtcggttttggcggtaatagactgcggcgattccctgttaatttatgccgtttcaatggcaaaagccgcctctgttccgggaatgacggaaaagataggcaattccttcagaaatcgcgcggatgcggtctataaatggtttgcctcaggcgcggataaagtgttttaa

SEQ ID NO: 43110 - protein, 259 aa, Unknown
  Obtained from environmental sample
  SIGNAL (1)...(20)
  misc_feature (1)..(259): Xaa is any amino acid
MKRRFAVLFFFTFVIPCVFSVPLEELTGSENANRLRSGSVSETQMGKPVLKLLPALPELRQFVVNSITALEPTLAVETLYLYKKPGSTAAWDDSGRAALFNQMLAIGTLTGIEYFSASRNAMRTFYEYSAVIDSPSSKKPLPDPVFEQPPAQYTLYARQKDLTFGDNIYRYEYNSAENALFFIQENMTSLTYGIIPAVGKNRLRSVLAVIDCGDSLLIYAVSMAKAASVPGMTEKIGNSFRNRADAVYKWFASGADKVF

SEQ ID NO: 43111 - DNA, 762 bp, Unknown
  Obtained from environmental sample
  misc_feature (1)..(762): n is a, c, g, or t
atggagtatgaatttgaaggccgcaccgaaaaagaagcaatcgacaatgcggcgaaagaactaggactggaaaaagacgactttgacgtggagattctggaaacccagaaaaacggccttttcaaaaaaggttttgttaggataagggttcataccggaaacacaacgtttccaagaaacgaatctcatggaaatgcgttttctggaaacaatttttcttctaagaattccgatgcggaagatacggaagcgaggcacagaaccggaggaagcaaggcgatcttcggagaacctgtgccgcaaaatgaatttgaggaaaaaatgtctgaattcacgacaggcattattgaaagaatgggttatcccggcaaggttacaatcctgttcagggagaagcacaaaatcgggataaaaattgattcggaacattcatccatcctgattgggaaaaaaggcaagaatctggacgcgcttcagcttttgttaaatatatacgccggcaggcttggcagagacgatatgcgcgtaatccttgataccgaaaattaccgtatccgcagggaagagtcccttgtacgtcttgcgtataacgtggcggaaaaggtgcgcgaaagccgcgattccgtccttcttgaaccgatgaacccttttgacaggtggcttatccatacgacattaaacgatataaatgacgttgaaaccaaaagcgagggagatggtttatataaacaggtaagggttttttaccgcggattaaaataa
